United States Patent Application Publication US 2004/0123343 A1 - sequence listing, part 50

SEQ ID NO: 181407 - protein, 1902 aa, Oryza sativa
  unsure (1)..(1902): unsure at all Xaa locations
  Clone ID: PAT_MRT4530_78684C.1.pep
MGFVSGIDDFVFPPGQAFXFGSLDFITNDFGKISLLDSGSNQSGRGQVSIPFGIPNSAEIYSKIISTESAQNHSDEIQSTPTRSDQDDGAYPPILMKLPNDLVAVFTTRASSPRRSRRDPAPALIQSSFREVGVILQPLGTVSTEQLDGYLSSPGVDSXPTEIVEYDDFDEGFEDNYTPLYFGIFMANNETKEQCQAREAEEQRVRQEAERRRLEEERQAQERERLQREQEEREQAAKEAEDRQQRALEAGQRARELIGQQDVEGMKVFRTPQQNEVAAITLLDTLLKEDALNQANHVVNILNQTKTMIAASFPVNSASIRMPTGSRVPPLRSQDYHQPSLSIVGVGSSHRSKDHNEXSVHSPPDRRRERQAEPPXSPHRRRPIAGDLRRVDWPAGFKPTGIKKYDGTTNPESWLTIYSLAIRAAGGDSKAMANYLPVALADSARSWLHGLPRGTIRTWAELRDHFIANFQGTFECPGTQFDLYNVVQKSGESLXDYIXRFSEQRNKISDITDDIIIAAFTKGIRHDDLVGKFGRKRPRTIKQMFEKANEYAKAEDAITASKQSGTTWKPNKDTPTTGGSGSTNHKDRKCKPEELVATTTPSSRQRSRVNTFDKIMNSQCPHHPNSNHAAKDCFVYKQFAEQYAKTARKTTDGDQSTSKKKDDEDDAPTGFQDHRKELNHIFGGPLAYESKRKQKLTEREINAVQPDTPQYLRWSETAIKFDRSDHPDRXFGTQENFRTENVCFEVADFETAYHAILGXLALAKFMAIPHYTYMMMKMSGPRGVISLRSDIKQAVTCDKENCEMAQTREITLAREEIRLAASTATEEEVPATKMTKCGEGDAKTKKIPLDLSNPTKTANNKDIFAWKPSDMPGIPREVIEHSLHVKKDAKPIKQRLRRFAQDRKDAIKEELTKLLAAGFIXEVLHPDWLANQVLVRKKMGQWRMCVDYTDLNKTCPKDPFGLPRIDQVVDSTAGWELLSFLDCYSGYHQIXLKESDCIKTSFITPFGAYCYITMPFGLNNVGAIYQRMIQRXFLTQIGRNVEAYVDDVVVKTKQKDDLITDLEETFVSIRAFRMKLNHEKCIFGVPSGKLLGFMVSHRGIQANTEKINAILNMKPPSSQKDVQKLTGCIAALSRFVSRLGERGMPFFKLLKKTDNFQWGPEAQKAFEDFKKLLTTPLILALPHPQEPLLLYGLATAQVVSTVLVVEREEEGHVQKVXKPIYFVSEVLADSKTRYPQVQKLLYGVLITVRKLSHYFKGHSVSVVTLFPLGNILHNREANWRIAKWALELMSLDLSFKLRTSIKSQALADFVAEWTECXEDMPAEKMEYXTMYFDRSKRLSGTGAGVVLISPTGERLSYILWIHFSASHNMTEYEALLHGQRIAISLGIRRLIVRGDSQLVVNQVMKEWSCLDDNMTTYRQEVCKLEDKFDGLELTHALRHNNEVADKLANFGSKREAAPSDVFIEHLYEPTIPRKEINEAMDAQDVSMIEADWREPFIRFLTKQELPQDKDKAERISRHSRLYVVHETELYKKSPSGILQRCVXLEERRQLLKDIHSGIYGNHAAARTIVGKAYRQGFFWPTVVSDADKIVRTCEGCQFFARQTHLSAQELQTISLSWPFAVWGLNMVGSFKKAVGGYTHLFVAVDKFSKWIEAKPVITITVDKARDFFINIVHRFGVPNRIITNNSTQLTGGVFKDFCEDFGIKICYDSVAHPMSTGQVERANGIVLQGIKTRVFDRLHPYAGKWVEKLPSVLWSLRTTPSQAMGQSPFFLVYGAEAMLPSEVEFESLXFRNFNEERYGEDRVDDLNRLEEAREAALIQLARYLQGLRHYHNRNVRSQAFLVGELVLRKIQTTRDRHKLSPLWEGPFIISEVTRPGSYRLKREDGTHIDNSWNIKHLRRFYA

SEQ ID NO: 181408 - protein, 111 aa, Oryza sativa
  unsure (1)..(111): unsure at all Xaa locations
  Clone ID: PAT_MRT4530_78685C.1.pep
GDLRPPHIHDLPLPPHGRASVPASTSHRATTAARPHPRRLPAVPPPSRAARRRGSHAAVGGAGEGEGEGRXGGRGRLXKEKRRERKEGNEGEKGEQERGGGEAEERDRENK

SEQ ID NO: 181409 - protein, 345 aa, Oryza sativa
  unsure (1)..(345): unsure at all Xaa locations
  Clone ID: PAT_MRT4530_78686C.1.pep
AVGAGAEGEPPACGGGERARAGGPARAREGAAAGGGAAAATDAEASADVRAVAGTRAGAQAIRAPAASMAAADGGAAAAAATRADAAAAHAGGAAGGAAEATSLHGDGESGVCTSAPTGKHAGGAARVGAGASQARAAEGGCISAATRAGAEVXAGGGTAEATRAAGAGSVTGAAQAGDAADAAAARAAPARAXLAIMPQPQGHRGRGGGTARHPDAAIAXGGIRSRTQPPPRGGAAARAAAAASAAARAISATDVRGAARRGHVERAGVPGTAREADRCSAAAAAAAAGAGRAGVPGAGAADTAATGVGGAGRAGAAAGGGGRGGGGWRGRRDGATAFVDEGAV

SEQ ID NO: 181410 - protein, 104 aa, Oryza sativa
  unsure (1)..(104): unsure at all Xaa locations
  Clone ID: PAT_MRT4530_78687C.1.pep
TDTTQAFLKIKXTNKSTWQTLIISLIXTDINILINRYNCLRRAQSLYGNISYSNLNPNRAQVKLYWLPAISAQSVSNYLVRFNLLXFRIDIQLQIHVNLVKFRF

SEQ ID NO: 181411 - protein, 82 aa, Oryza sativa
  Clone ID: PAT_MRT4530_78688C.1.pep
MGKAASMRVALVSVVLVGLILVSTAHAARPEKLPAVVSPSIAPAVGEVVDAAINAVDLLGVSKMQEANPYTRGCSRINRCRG

SEQ ID NO: 181412 - protein, 1551 aa, Oryza sativa
  unsure (1)..(1551): unsure at all Xaa locations
  Clone ID: PAT_MRT4530_78689C.1.pep
MGSVSGIDDCVFPPGQAFRFGSLDFITNDFGKISLLDLDSNQSGRGRISAPFGIPNSAEIYPKVISDESVSNHSDEIQSTLTPPDQDDGAYPPILMKLLDDLAAVFTTRASSPRRPRRDPASAPIRPSSMEVGVILQSLSTVSMDQLEGYFSSPGVDSRPTEIVEYDEFGYRYDNCNLDDFDESFEHNYTPLYFGVFMADNETEEQRQAREAEGRRVQQEAERRRLEEERQAQEQERLQREQQERERAAKEAEDRRQRALDARRRARELIGQQDVEGTAVFRTPQQNAIAAITLLDTLLKEDALNQADHVVNILNQTKTMIAASVPVNSASVRTPTCSRVPHLRSQDYHQPSLSIAGAGSNSRSRAGFKPTGIEKYDGTTNPESWLTVYGLAIRAAGGDSKAMANYLPVALADSARSWLHGFPRGTIRSWAELRDHFIANFQGTFERPGTQFDLYNISDITDDIIIVAFTKGIHHEDLVGKFGRKPPRTVKQMFEKANEYTRAEDAIIASKQSGTTWKPKKDTPTTGGSGSTNHKDQQYAKNALKTSDGDQSTSKKKDDDDDAPTGFQDHRKELNHIFGGPLAYESKRKQKLTEREINAVQPDTPQYLRWSETTIKFDRSDHPDQVVHHGAVPPGLSATPLGQITLPVTFGTRENFRTENVCFEVADFETAYHAILGRPALAKFMAVLHYTYMMMKMPGPREVISLRSDIKQAVTCDKESCEMAQTREITIAREDIRLAAITASEGEVPATKISKSGESEAKTKKIPLDPSDPSDPTKTADRKDAIKEELTKLLAAGFIKEVLHLDWLANPVLVSKKTGQWRMCVDYTDLNKSCPKDPFGLPHIDQMKLNHEKCIFGVPLGKLLGFMVSHRGIQANPEKINAILNMKPPCSQKDVQKLTGCMAVLSQFVSRLGERGMPFFKLLKKTDNFQWGPEAQKAFEDFKKLLTTPPVLASPHPQEPLLLYVSATSQVISTVLVVEHEEEGHVQKIQRPIYFVSEVLANSKTRYPQVQKLLYGVLITVRKLSHYFQGHSVTVVTSFPLGNILHNREANGWIAKWALELMSLDISFKPRTSIKSQALADFVAEWTECQEDTPEEKMEYWTMHFNGSKRFSSTRAGVVLISLTGERLSYVLWIRFSATHNMAEYEALLHGLRITISLGIRRLIVCGDSQLVVNQVMKEWSCLDDNMIAYRQEVRKLEHKFDGIDLTHVLRHNDEAADRLANFGSKREAAPSDVFVEHLYEPTVPRRETVEAADTQDIAMVEADWREPLIRFLTNQELPQDKDEAERISRCSRLYIIHETELYKKSPSGILQRCVSLEEGRQLLKDIHSGICGNHAAARTIVGKAYRQGFFWPTAVSDVDKIVRTCEGCQFFARQTHLPAQELQTIPLSWPFAVWGLDMVGPFKKAVSGYTHLFVAIDKFSKWIEAKPVITITADKARDFFINIVYRFGVPNRIITDNGTQFTGGVFKDFCDDFGIKICYASVAHPMSNGQVERANGMSATSQSPFFLVYGAEAMLPSEVEFESLRFRNFXRSATEKTEWMIYIDWKRPAK

SEQ ID NO: 181413 - protein, 182 aa, Oryza sativa
  Clone ID: PAT_MRT4530_7868C.1.pep
TSHSSLVSFSSSSPSSMSSSSSSSTTSFLSSSKSSSSSISSSSSSSSLFSSSSSSISSSSSPSSSSSSTFSSSYKNSSSSSSSSSSSSSSSSSSCIISCSISCSISLSIASSSAASTCSTTPNSPSSSTSSGWRRPLCAAARGSARPSGASTRRRRNIVGLLVDCIIYASILEMCEILQAFF

SEQ ID NO: 181414 - protein, 129 aa, Oryza sativa
  Clone ID: PAT_MRT4530_78690C.1.pep
TSGSPGCRLARPSLLRFPLFFPFFSPSLSRPCPPSPPLPLPLPGSPHGSVASSPSLPVPLSPYDVCLFVRTNLMLFFSLFLLLCQSVGQRATATRPGGGTAVETTRMRPCGGGGSVRCGGRDTGAAMRR

SEQ ID NO: 181415 - protein, 1197 aa, Oryza sativa
  Clone ID: PAT_MRT4530_78691C.1.pep
MGFVSGIDDFAFPPGQAFRFGSLNFITNDFGKISLLDSDSNQSGRDQVPVPFGIPNSAEAYSKIISPESASNHSDEIQSTLPRPDQDDGSPGVSSRPTEILDYDDFGYHYDHGDLDNFDDSYKDNYTPLFFGVFMADNETEEQRQAREADQDRARQEAERRRLEEERQRQERERLQREQQDRERIAKEAEDRRQRALESGWQARELIGQQDVDGIAVFRTPQQNAVAAITLLDTLLKEDALNQADHVVNILNQTKTMIAASVPANSASTRTPTGSRVPHLRSQDYHQPSLSIAGAESSRRSRGHDERSVRSPPERYRERRIERPHSPHRRRPIDLRDTINQRRTARGHHSPDRYDDNVDGVAAFTSDLRRVDWPAGFKPTGIKKYDGTTNPESWLTVYGLAIRAAGGDSKAMTNYLPVALADSAWSWLHGLPRDTIGSWAELRDHFIANFQGTFERPGTHFDLYNIVQKSGESLRDYIRRFSEQRNKISDITDDVIIAAFTKGIRHEDLVDKFGRKPPKTVKQMFEKANEYAKAEDAITTSKQSGTTWKPKKDTPTAGGSGSKNHKDRKRKLEELVATTSPSSRQRSRVNTFDKIMNSQCPHHPNSNHVAKDCFVYKQFAEQYVKNARKPSDGDQGTSKKKDDEDDAPTGFQDHRKELNHIFGGPLAYESKRKQKLTEREINAVQPSTPQYLRWSEITIKFNRSDHPDRVVHPGRYPLVLDPVVRNVKLRRTLIDGGSALNILFAKTLDDMQIPRTELKPSNAPFHVADFETAYHAILGRPALAKFMAVPYYTYIMMKMPGPRGVISQRSDIKQAVTCDKESCEMAQTHETTLAREEIRLAATTASEGEVPSTKLTKTEESDAKTKKIPLDPSDLDKTVDRKDAIKEELTKLLVAGFIKEVLHLDWLANPVLIGRNVEAYVDDVVVKTKQKDDLIVDLEETFTSIRAFKMKLNPEKCIFGVPSGKLLGFMVSQRGIQANPEKINAILNMKPPSSQKDVQKLTGCMAALSRRAAPPLQSPSSVAVATIGFAKSSPSPSTASPPPKTVGAPSPSSTRRASPLPPRRRRRPLVFRRRFGHRLEILVREFLGVTRRHHRVRQVIAVPVHRFAAAEDRRSAVAVVDPKSFAASSSSPPPSVGLPPPFWSPVSSPRRPLRAGALRLCRSAAVRRRACAARAVRSAEPPPLSVTSSLASSSLFP

SEQ ID NO: 181416 - protein, 2018 aa, Oryza sativa
  unsure (1)..(2018): unsure at all Xaa locations
  Clone ID: PAT_MRT4530_78692C.1.pep
MGSISGIDDFAFPPGQAFRFGSLNFTTNDFRKISLLDXDSNQSGRNQVPVPFGIPNSAEAYSKIISPESAPNHSDEIQSTPPRPDQDDGPYPSILMRLPDDLAAVFTTKTSPTRRSRQAPASAPIQSRSREVGVILQPLGTVSTEELDSYLSSPGVSSXPTEILDCDDFGYHYDHGDFDDSYEDNXTPLFFGVFMANNETEEQRRAREAEEERTRQETERRRLEEERQRQERERLQREQQDRERVAKEAEDRRQRALESGRQARDLIGQQDVDGTAVFRTPXQNAVAAITLLDTLLKEDTLNQADHVVNILNQTKTMIATSVPANSASTRTPTGSRVPHLRSQDYHQPSLSITGAGSSRRSRGHDELSVRSPPERYRERRVERPHSPHRRCPVDLRDTINQRRAARGHHSPDRYDDDMDGVAAFTNDLRRVDWPTGFKPTGIEKYDVTTNPESWLTVYGLAIRAAGGDSKAMANYLPVALADSARSXLHGLPRGTIGSWAELHDHFIANFQGIFERPGTHFDLYNIIQKSGESLRDYIRRFSEQRNKISDITDDVIIVVFTKGIRHDDLVGKFGXKPPKTVKQMFEKANEYAKAEDAIMASKQSGTTWKPKKDTPTTGGSGSNNRKDRKHKPEELVATTSPSSRQRPRVNTFDKIMNSQCPHHPNSNHVAKDCFVYKQFAEQYVKNARKPSDGDQSTSKKKDDEDDAPTGFQDHRKELNHIFSGPLAYESKRKQKLTEREINAVQPNTPQYLRWSEIAIKFDRLDHHDRVVHPGRYPLVLDLVVRNVKLRRTLIDDGSALNILFAKTLDDMQIPRTELKPSNAPFHGVILGLSATPLGQITLPVTFGTRENFRTENVCFEVADFETAYHAILGRPALAKFMAVPHYTYMMMKMPGPRGVISLRSDIKQAVTCDKESCEMAQICEITLAREEIXLAATTASEGEVPATKLTKTEESDAKTKKIPLDPSDPDKTANNKDIFAWKPSDMPGIPREVIEHSLHVKEDAKPIKQRLRRFAXDRKDAIKEELTKLLAAGFIKEVLHPDWLANPVLVWKKTGQWHMCVDYTDLNKSCPKDPFGLPRIDQVVDSTAGCELLSFLDCYSGYHQIXLKESDCLKTSFITPFGAYCYITMPFGLKDAGATYQRMIQRCFSTQIGRNVEAYVDDVVVKTKQKDDLITDLEETFASIRAFRMKLNPEKCIFGVPSGKLLGFMVSQRGIQANPEKINAILNMKPPSSQKDVXKLTGCMAALSRFVSQLGERGMPFFKLLKKTDDFQWGPEAQKAFEDVKKLLTTPPVLASPHPQEPLLLYMSATFQVVSTVLVVEREEEGHIQKVQRPIYFVSEVLADSKTRYPQVQKLLYGVLITVRKLSHYFQSHSVTVVTSFPLGDILHNREANGRIAKWALELMSLDISFKPRTSIKSQALADFLAEWTECQEDMSEEKMEYWTMHFDGSKRLTGTEAGVVLISPTGERLNYILWIHFFASHNVAEYEALLHGLRIAISLGIRRLIVRGDSQLVVNQVMKEWSCLDDNMTAYRQEVRKLEDKFDGLELTHVLRHNNEATDRLAXNFGSKREAAPSDVFVEHLYEPTVPRKETIEAMDTQGVSMIEADWREPFIRFLTKQELPQDKNEAERISRRNKLYIIHGTELYKKSPSGILQRCVSLEEGRQLLKDIHSGICGNHAAARTIVGKAYRQGFFWPTAVSDADKIVRTCESCQFFARQIHLPAQELQTIPLSWPFAVWGLDMVGPFKRAVGGYTHLFVAIDKFSKWIEAKPVITIIADKARDFFINIVHRFGVPNRIITDNGIQFTGGAFKDFCEDFGIKICYASVAHSMSNGQVERANGMVLQGIKARVFDRLRPYAGKWVDXLPSVLWSLRTTPSRATSQSPFFFVYGAETMLPSEVEFESLRFQNFNEERYEEGRVDDINRLEKAREAALIQSTRYLQGLRRYHNRNVRSRAFLVDDLVLRKIQTTQDRHKLSPLWEGPFIIAEVTRPGSYRLKREDGTLINNSWNIEHLRRFYA

SEQ ID NO: 181417 - protein, 769 aa, Oryza sativa
  Clone ID: PAT_MRT4530_78693C.1.pep
MALLYPKPYSPRVAMADDHYSSKRKYDDPSPPPRRTGFSSAPPAASPPSGGAPASYNSVPPPPADEIQLAKQRAQAIAARLFNAAEAKRPRLDAGGDDDDAGAGVGSLGSSGGGGGGRATGLGFSSSAGGARSVCVIMIVTIILCLLFRKNGHGSAIPSLSSHGSTPQYSSYGGYQGTSKTIEIPNGRVGVIIGKSGETIKNLQLQSGAKIQVTRDLDALPGSQTRPVELSGTPDQISRAEQLINEVLAEADAASSGNLSSRKYNAPQPGADQFQMKIANNKVGLVIGKGGETIKSMQAKSGARIQVVPLHLPPGDPATERTVYIDGTQEQIETAKQLVIEVTNVQSSLAPIVLHMGDDRWASAMLLENIDLDVQTIFLQNRARNPMSGGYSQQGYRPPRPQSNWGPHGGAPMQQPGYGYMQPGAYPGAPPQYGAPQQPYGSYPPASGGYQTGWDQSSNQQSQQAPPGTGYDYYNQQQQPQQQQSAPGTAAPGDATSYNSSQPPAYASQGYDSSYAQQSGGQQQAYDYSSYYQTQGQQQGYSQQTGYDQQGYGTSGYGSAANSTQDGSAPSYGAQGVAGQASPGQQTSTPAAGSHPGYSSQPPTSAASSYPVQGSAPQSGYGAPPPQTGYGTQPQPQGGYSQGSYGAPPQGQKAPPNTSPYGQAPPPGSAPGGYGQYGYSQNQQGYGAPPPYPGAPAASHPGYGQQQSYGDPYGSGSYGQPAAYSTEATTAAASQDQSASAPATGAAPATTAAPAPTAPENSGAQSPAS

SEQ ID NO: 181418 - protein, 67 aa, Oryza sativa
  Clone ID: PAT_MRT4530_78694C.1.pep
SESWRLLSLSFVMGFLPTHYNAMKGSNSNAYMGAYMNSGLIVHSLCKRRGCLVRKQFLEEVVVKFSN

SEQ ID NO: 181419 - protein, 84 aa, Oryza sativa
  Clone ID: PAT_MRT4530_78695C.1.pep
CLLNIYSLRFIIPDFLALLIFIYMLINLDTYLYRFTNIYMNMDNTKKTCIIKRRKYMFTGVLAILHSGARNVFVSLRWWLGVFM

SEQ ID NO: 181420 - protein, 2006 aa, Oryza sativa
  unsure (1)..(2006): unsure at all Xaa locations
  Clone ID: PAT_MRT4530_78696C.1.pep
MGSISGIDDFAFSLGQAFRFGSLNFITNDFGKISLLYSDSNQSGRNQVPVPFGIPNSAEAYSKIISPESASNHSDEIQSTLPRSDQDDGSYPSILMKLPDDLAAVFTAKTSPTRRSRRAPASAPIQSRSREVGVILQPLGTVSTEELDGYLSSPDVSSRPTEILDYDDFDNFDDSYEDNYTPLFFGVFMADNETEEQRRAREADQDRVRXEAERRRLEEERQRQERERLQREQQDRERVAKEAEDRRQRALESGRXARELIGQQDVDGTAVFRTPQQNAVAAITLLDTLLKEDALNLAVHVVNILNQTKTMIAASVPANSAGTRTPTGSRVPHHQPSLSVTGTGSSRRSRGHEERSVHSLPERHRERRAERPRSPPRQRPVDLRDTINQRRAARRHRHSPNRYDDDVDGVAAFTNDLRRVDWPVGFKPTRIEKYDGTTNPESWLTVYGLAIRAAGGDSKAMANYLPVALADSARSWLHGLPRGTIXSWVELRDHFIANFQGTFERPGTQFDLYNVVQKSRESLRDYIRRFSEQRNKISDITNDVIIAAFTKGIRHEDLVGMFRRKPPRTVKQMFEKANEYAKTEDAITTSKQSGTTWKPKKDTPTAGESGSNNHKDRKRKPEELVATTSPSSRQRPRVNTFDKIMNSQCPHHPNSNHVAKDCFVYKQFAEQYVKNARKPADGDQGTSKKKDDEDDAPTGFQDHRKELNHIFGGPLAYESKRKQKLTEREINAVQPNMPQYLRWSETAIKFDRSDHPDRVVHPGRYPLVLDPVVRNVKLRRTLIDGGSALNILFAKTLDDMQIPRMELKPSNAPFHGVIPGLSATPLGQITLPVTFGTRENFRTKNVCFEVADFETSYHAILGRPALAKFMAVPHYTYMMMKMPGPRGVISLRSDIKQAVTCDKESCEMAXTHETTLAREEIRLAASTASEGEVPATKLTKTKESDAKTKKIPLDPSDPXKTANNKDIFAWKPSDMPGIPREVIEHSLHVKEDAKPIKQRLRHFAQDRKDAIKEELTKLLAAGFIKEVLHPDWLANPVLVRKKTGQWRMCVDYTDLNKSCPKDPFGLPRIDQVVDSTAGCELLSFLDCYSGYHQIRLKESDCLKTSFITPFGAYCYITMPFGLKNAGATYQRMIQRCFSTQIGRNVEAYVDDVVVKTKQKDDLIPDLEETLTSICAFKMKLNPEKCIFGVPSGKLLGFMVSQRGIQANPEKINAILSMKSPSSRKDVQKLTGCMAALSQFVSRLGERGMPFFKLLKKTDNFQWGPEVQKAFENFKKSLTTPPVLASPHPQEPLLLYVSVTSQVVSMVLVVEREEEGHIQKVQRPIYFVSEVLANSKTRYPQVQKLLYGVLITVRKLSHYFQSHSVTVVTSFPLGDILHNREANGRIVKWALELMSLDISFKPRTSIKSQALADFLAEWTECQEDMPEEKMEYWTMHFDGSKRLTGTGAGVVLISPTGERLSYVLWIHFSASHNVAEYEVLLHGLRIAISLGIRRLIVRGDSXLVVNQVMKEWSCLDDNMTAYRQEVRKLEDKFDGLELTHVLRHNNEAADRLANFGSKREAAPSDVFVEHFYEPTVPRKETIEAMDTQGVSMIEADWREPFIKFLSKQELPQDKNEAERISRRSRLYIIHETELYKKSPSGILQCCVSLEEGRQLLKDIHSGICGNHAVARTIVGKAYRQGFFWPTAMSDADKIVRTCEGCQFFARQIHLPAQELQTIPLSWPFVVWGLDMVGPFKRAVGGYTHLFVAIDKFSKWIEAKPVITITADKARDFFINIVHRFGVPNRIITDNDTQFTGGAFKDFXKTSALKICYASVAHPMSNGQVERANSMILQGIKARVFNRLRPYAGKWVDQLPSVLWSLRTTPSRATGQSLFFLVYGAEAMLLSEVEFESLRFRNFNEEGYEEGRVDDINRLEEAREAALIQSTRYLQGLRRYHNRNVRLRAFLVGDLVLRKIQTTQDRHKLSPLWEGPFIIAEVTRPGSYRLKREDGTIINNSWNIEHLHRFYA

SEQ ID NO: 181421 - protein, 135 aa, Oryza sativa
  unsure (1)..(135): unsure at all Xaa locations
  Clone ID: PAT_MRT4530_78697C.1.pep
LPAQELQTIPLSWSFAVWGLDMVGPFKKVVGGYTHLFVAIDKFSKWIEAKPVITITVGKARDFFINIVHRFGVPNRIITDNDTQFTGGVFKDFCEDFGIKICYASVAHPMSNGQVERANGMVLXGIKARVFDRLH

SEQ ID NO: 181422 - protein, 1557 aa, Oryza sativa
  unsure (1)..(1557): unsure at all Xaa locations
  Clone ID: PAT_MRT4530_78698C.1.pep
MAAFRFGSFNFITNDFGKISLLDSDSNQSGRDQSRHLPLEDLGELQLRPXSDLDLGRLALYSNLLGQSRRKSWMATSAPPASVLDQPRSSTTMTSATTTTTATSTTSTTAMRITTRPSSSAYSWLTTKRRNSAKPEKRTKIAHGKKLNVADXRKSDSDKSENDYSQNAVAAITLLDTLLKEDALNQADHVVNILNQTKTMIAASVPANSASTRTPTAGFKPTGIEKYDGTTNPESWLIVYGLAIRAAGGDSKAMANYLPVALADSARSWLHGLPRGTIGSWAELRDHFIANFQGTFERPGTQFDLYNIVQKSGESLRDYIRRFSEQCNKISDITDDVIIAAFTKGIRHEDLVGKFGRKPPRTVKQMFEKANEYAKAEDAITASKQSGTTWKPKKDTPTAGGSGSNNNNDRKRKPEELVATTSPSSRQRSRVNTFDKIMNSQCPHHPNSNHVAKDCFVYKQFAEQYVKNARKPSNEDQGTSKKKDDEDNAPTEIAIKFDRSDHPDRVVHPGRYPLVLDPVVRNVKLRRTLIDGGSALNILFAKTLDDMQIPRMELKPSNAPFHGVIPGLSATPLSQITLPITFGTRENFRTENVCFEVADFETAYHAILGRPALAKFMAVPHYTYMMMKMHGPRGVISLRSDIKQAVTCDKESCEMAQTHETTLAREEIRLAATTASEGEVPATKLTKNEESDAKTKKIPLDPSDPDKTANNKDIFAWKPSDMSGIPREVIEHSLHVKEDAKPIKQRLRRFAQDRKDAIKEELTKLLAAGFIKEVLHPDWLANPVLVRKKTGQWRMCVDYTDLNKSCPKDPFGLPRIDQVVDSTAGCELLSFLDCYSGYHQIRLKESDCLKTSFITPFGAYCYITMPFGLKNAGATYQRMIQRCFSTQIGRNVEAYVDDVVVKTKQKDDLIADLEETFTSIRAFKMKLNPEKCIFGVPSGKLLGFMVSQRGIQANPEKINAILNMKPPSSQKDVQKLTGCMAALSRFISRLGEWGMPFFKLLKKTDNFQWGPEAKKAFEDFKKLLTTPPVLASPRPQEPLLLYVSATSQVALLHGLRIAISLGIRQLIVRGDSQLVVNQVMKEWSYLNDNMTAYRQEVRKLKDKFDGLELTHVLRHNNEAANRLAKFGSKREAAPSDVFVEHLYEPTVPKKETIEAMDTQGVSMIETDWREPLIKFLTKQELPQDKNEAERISRRSRLYIIHEAELYKKSPSGILQRCVSLEEGRQLLKDIHSGICGNHAAARTIVGKAYRQGFFWPTAVSDADKILQTIPLSWPFAVWGLDMVGPFKRAVGGYTHLFVTIDKFSKWIEAKPVITITADKARDFFINIVHRFGVPNWIITDNGTQFTGGAFKDFCEDFGIKICYASVAHPMSNGQVERANGMILQGIKARVFDRLHPYTGKWVDQLPSVLWYLHTTPSRATGQLPFFLVYGAEAMLPSEVELESLRFQNFNEEGYEEGRVDDINRLEEAREAALIQSTRLQGLRRYHNRNVRLRAFLVGDLVLRKIQTTQDRHKLSPLWEGPFIIAEVTRPGSYRLKREDGTLINNYWNIEHLRRFYA

SEQ ID NO: 181423 - protein, 75 aa, Oryza sativa
  unsure (1)..(75): unsure at all Xaa locations
  Clone ID: PAT_MRT4530_78699C.1.pep
RXXXPPPTVPLAPAPPHHRHGPAELSTLARNRNSGXAIKEMDANARRRRQHNASSCSMLHARCIEWCLKFXRSQX

SEQ ID NO: 181424 - protein, 319 aa, Oryza sativa
  unsure (1)..(319): unsure at all Xaa locations
  Clone ID: PAT_MRT4530_7869C.1.pep
PPFSRFSPIPSLPVVPSSLPTVALSLPRCRPXPAASPASPERLPAAPSPPPASQLPPLPRPTLRFARXTAGGAFPPSPSSFLRAGRLQPPLSPCXAPVDVATTFLGSTTPLSSPASPPPRPNFAGTPSSPRRPLLPPRRLVAPLHHHLHQRRSGVFHAVPSSSQPLLPAFIVISDRSRRRRPVGRPARRLAAPPPSSASXRRGPRRPRPRAAAAGCPRRLLAGPGRRRRPRPLVVPDRRGVRPSVKPFSSVVRVRQASRCSPVLVFVLGSASSSLVPAAARFRPRIAAEAVPSPFVSVVPVCLRRARSSLSLPRLVAWW

SEQ ID NO: 181425 - protein, 72 aa, Oryza sativa
  Clone ID: PAT_MRT4530_786C.1.pep
TSPVPSISSAPRSKHQETKREGEREIEGESPFLSPPLLSSSVRWPLTGSKKKTSLPFMILSLEFLRFYLVFL

SEQ ID NO: 181426 - protein, 176 aa, Oryza sativa
  Clone ID: PAT_MRT4530_78700C.1.pep
PRRIHSRLLELKLAPITRSILTHKPEHAVDSPPTPPTPHPTDRAPHLPSRPRSQPPASNHPGNQPHCPSAARFDLPRDATSAPPRLQPTMPPPHSKPPASSGKRRGRRRGLPIDRGQRREGLGFDSQGWTDRSGRTPGRGGGGCLGFLALIYGGIFWNRERVKGACRREREEEKKG

SEQ ID NO: 181427 - protein, 106 aa, Oryza sativa
  Clone ID: PAT_MRT4530_78701C.1.pep
MAKVTAMGGSTALGDSEDLAGREGAAATVAMMVASGGGSDDRVGGTRATVTTTTVTAAMTTMMLRAGGEHGSGGSFPPLLLPIPDLAKGEVAAAAMAATAGGRQRI

SEQ ID NO: 181428 - protein, 133 aa, Oryza sativa
  unsure (1)..(133): unsure at all Xaa locations
  Clone ID: PAT_MRT4530_78702C.1.pep
HLSSLGADPGRSCGRRAVAAAATGDGRGGSRRWMRGGWNQRRLPSSQIRCRRLRRMEAAWRVDTAAAPRGGQWRRPSPPDLAPSDPNPILPNARPPPHPHGAQDFPRHLSTYPTRQRRRTTYXRRRRVXRTTP

SEQ ID NO: 181429 - protein, 50 aa, Oryza sativa
  unsure (1)..(50): unsure at all Xaa locations
  Clone ID: PAT_MRT4530_78703C.1.pep
IIIFXXGVSTFIRLWDPLRLLRVVGGLRNKYNYFHFPNISHSKLKTGCTS

SEQ ID NO: 181430 - protein, 58 aa, Oryza sativa
  unsure (1)..(58): unsure at all Xaa locations
  Clone ID: PAT_MRT4530_78704C.1.pep
RRKDTKXXEXXTPRGHXEKGXRATPQAKQDTTAXNPEDKSTRAREATKRTXXQTXRRE

SEQ ID NO: 181431 - protein, 269 aa, Oryza sativa
  Clone ID: PAT_MRT4530_78705C.1.pep
MPPTGALHAGGRHLLPLRRAPGAAQQPWSHVRSHLISSSKRPSPSPSPPPPPPPPLPVAPSTSAFVQTAGRRSGGGAGAGAAVGSGVVAWYLGSIEARPVLTKSVTAAAIFTVADLSSQMITLGPEDSLDLVRTLRMASYGLLISGPSLHIWFNFVSKLLPKQDVMNTFKKMFLGQAVYGPIINSVFFSYNAGLQGETIPEIMARLKRDLIPTIKSGLIYWPLCDFITFKFIPVHLQPLVSNSFSFLWTIYITYMASLKKADVDVTTSS

SEQ ID NO: 181432 - protein, 337 aa, Oryza sativa
  unsure (1)..(337): unsure at all Xaa locations
  Clone ID: PAT_MRT4530_78706C.1.pep
KQKTTEEIADDTIKLPFIHDADVYSAAPPDLAARHVPARGTDRGDGAGAVYYFFCPVHRGGGGVGARRRQRAVGGGGGANGEAGHCGCWHPEGGXKKAVLDAGGRRVGHLRRLSYGVRERGSGRRLTRLGWCMTEFGVDHGGGGGGEADAGGLVLCKMYRSPRAAQVEASLQAAAASTSGSKRKQAADDLIHAPASSRHRHADVMPAGVNGDEVGSIHPSVQFPPPPEEQTLVQTRDGPRTDHEVIMALAMGATVDELLGPKHGEPGESSPFPAPAAEPCSISGGGDIFWTASGVVPCPDMAMAFPAPPAGEFSWDKELAWIRELLSGSRPSSCSAV

SEQ ID NO: 181433 - protein, 185 aa, Oryza sativa
  Clone ID: PAT_MRT4530_78707C.1.pep
MLAPGVPRFPPPPPPPDTRPPFMAPGVNARPLPPPPPGLPPAQMQMAPFGVPPGPPPMLPPPFYPGPPIQTGDFAAFGPRPNVPQQPSYVKSAAPTVVKRPLAQHTPELTAMVPASVRVKRESALLKPKPKVQQSATTSSSALKPSVAPIRSEPRPSSSVSKPQSIDDSYMAFLEDMKELGALDE

SEQ ID NO: 181434 - protein, 44 aa, Oryza sativa
  Clone ID: PAT_MRT4530_78708C.1.pep
CLTTGLQHRLGYRTMNTKKHQLLRSLGGCEPISERQDNRYCIVN

SEQ ID NO: 181435 - protein, 259 aa, Oryza sativa
  Clone ID: PAT_MRT4530_78709C.1.pep
MAMTTAAVAAAAQPKEVKLYGAWGSAHAAMARNALELKGVRYEYVEEDLERKSETLLLRLNPAHAGKVPVLVVVDDDGGGGGCPLAESLVILEYVDEVWPQAPRLLPPPSSPRARAAARFWARFFHGEVSPLSRAAAVLAPTPEERAEAVREMKARMAVMEAGFERDFPSSVVGGPFVHGATPGLLDVILGSCAAGTRAISAMAGEEVVEPDALPHVHASMAAFDERVAGFGTSVPHELLLARLLEREERRRAAASASA

SEQ ID NO: 181436 - protein, 353 aa, Oryza sativa
  unsure (1)..(353): unsure at all Xaa locations
  Clone ID: PAT_MRT4530_7870C.1.pep
MDLLRQPRGGARGPGPREWGPRGSLTVHGGPGAPGLAPTGAVGPTRQPHPRARAADGRAPHGSRGTSPKAATPAQPTGGGALVPRLEGKGETNRRSTAHPGSTATTGTATGAEEGGGAARVDGDGGVPAIGDRNGEVDEVGEDAAKPKETAPKRETVRGDDGGGPELGGDGGERERRRELDSGGERERRGSETAEGGTGSVYIGLGGGESGRMWGKRARKIRPPLMXPARLGGKFPNESEGEREGKMGGKMEGITGNISPLLIARGVDGXAGFAAAAALGHGRGGGSGGRKGMTGGPHPSAREAGGPAHQRHARGEEAGWAAXGEEREGEGAGPSRPKGERGMERXFLGFFFL

SEQ ID NO: 181437 - protein, 230 aa, Oryza sativa
  Clone ID: PAT_MRT4530_78710C.1.pep
MVEKASAVARKLDVSVGRCSTSPYGSGGLPSPTSPLDRAALHAPSPRGVWRHRDAGGVGLGILAALEAQEEEEARKPAVSAVAIAASASASSSAAATTTRRRAARLEVSELGCSGRCATSLCGSGAGAAAFRVAEFLACCDLCRRPLDGKDIFMYRGERAFCSMECRYHAIVSDEFQQEKDRKRRAAAAAAPRDIPSKVSAAPSTAAAEIAGSPCSGGGQIFFTTGIVAA

SEQ ID NO: 181438 - protein, 1388 aa, Oryza sativa
  unsure (1)..(1388): unsure at all Xaa locations
  Clone ID: PAT_MRT4530_78711C.1.pep
MQPALKPIERFRWSRAPIAAVHGGAGRRRRDRGRLRHAVLLSKDTTFVLKVAFRFSSLDFITNDFGKISLLDSDPNQSGENQVSAPFGIPNSAKICSKLISIELASNHSNEIQYTSTSPDQNDGAYPPILMKLHDDLAAVFTTRASSPRRPRRKSASTPIPPSSREVGVILQPLSTISTDQLEVYLSSPGVDSRPIEIVEYDEFGYRYDNHNLDDFDESFEDNYTPLYFGVFMADNETEEQRQAREAEXGNKHEILSGNKTLRGQRSSAPPNRTPSPRSPFSTPSSXRRTQPSRSRRQHFEPDQDHDRXSVPVNSGSVRTPTAGFKPTGIEKYDGTTNPESWLTVYGLAIRAAGGDSKAMANYLPVALADSARSWLHGLPRGTIGSWAELHDHFIANFQGTFERPGTQFDLYNVIQKTGKSLRDYIRCFSEQRNKISDITDDVIIAAFTKGIHHEDLVGKFRRKSPKTVKQIFEKANEYAKAEDAIIASKQSGTTWKPKKDMPAAGERGSNNRKDRKRKPEELVATTTPSSRQRSRVNTFDKIMNSQCPHHPNSNHVAKDCFVYKQFAEQYAKNAHKLSDGDQGTSKKKDDEDDAPTGFQDFCKELNHIFGGPLAYESKRKQKLTEREINAVQPNTPQYLRWSEIAIKFDRSDHPDRVVHPGRYPLVLDPVACNVKLRRTLIDGGSALNILFAKTLDDMQIPRTELKPSNAPFHGVIPGLSATPLGQITLPVTFSTRENFRTENVCFEVADFETAEVIEHSLHVKEDAKLIKQRLCRFAQDRKDAIMEELTKLLAAGFIKEVLYPDWLANPVLIRLKESDCLKTSFITPFGAYCYITMPFGLKNAGATYQRMIQRCFSTQIGRNVEAYVDDVVVKTRQKDDLITDLEETFTSIRAFRMKLNPDKCVFGVPSGKLLGFMVSHRGIQANPEKVNAILNMKLPSSQKDVQKLTGCMAALSRFVSRLGERGMPFFKLLKKTDNFQWGPEAQKAFEDFKKLLTTPPVLASPHPQEPLLLYVSATPQVVSAVLVVEREEEGHVQKVQRPIYFVSEVLADSKTRYPQVQKLLYGVLITVRKLSHYFQGHSVTTECQEDTPEEKMEYWTMHFDGSKRLSGTGAGVVLISPTGERLSYVLWIHFSASHNVAEYEALLHGLRIAISLGIWRLIVRGDSQLVVNQVMKEWSCLDDNMTAYRQEVRKLEDRFDGLELTHVLRHNNEAADRLDNFGSKREAAPSDVFVEHVYEPTVPSKEIIKATDTQDVSMIEADWREPLIRFLTKQELPPDKDEAERISRRSRLYIIHETELYKKSPTGILQRCVSLEEGRQLLKDIHSGICGNHAAARTIVGKAYRQGFFWPTAVSDADKIVRTCEGCQFFARQIHLPAQELQTIPLS

SEQ ID NO: 181439 - protein, 189 aa, Oryza sativa
  unsure (1)..(189): unsure at all Xaa locations
  Clone ID: PAT_MRT4530_78712C.1.pep
IXFWGXXKPKXXFAWAXKFFVSXWEXNPXGETFPXKXGGVLGGGXGPKXNXXXGXGXXKRGGXKXFPXGKGXGXKXNXGGGVKFLGXXGLKXFRFPVLKRXGEMGGEXFXXXGXGXAXXNPXVGNKPXIKGXQRGGFPPGGARFRNSESPRGRELGRSLSRIGHGGQQEIFADEPPQGVFLLPLMAFHC

SEQ ID NO: 181440 - protein, 999 aa, Oryza sativa
  Clone ID: PAT_MRT4530_78713C.1.pep
MARGSALLDGSVLPPSRIVNERHAGLPRRFMPESATGREIVMLGEGRPAPDYPGRSIFFLPFAMAGLVPPFSHFFMDVLEFYDLQMAHLTPNAVMTLAIFAHLCEMFIGVRPSLQLFRWFFTVQSVSPPSVVGGCYFQPRGPVLNRYIPCVLRKKWDDWKSDWFYTPLADEARLRLPSQPPAQVSSWRAPVDLGEEYDAVLDRLAGLRSQGLTGAMVYGDYLRRRIAPLQRRARSAWEYTGPEDYMRTHQGARWDWAPEDFKIVVQRVLNLSSAEASRLPQEILPLCIDPDRVSILTIMLGVGASEERAPKGHDGAGESRPGKKSAPGGGRASGPRVGGSGSSRPADAPGKRKLGGTPPPSPPRGGGAVRTSAMSRRIPPAAPSPASPRSKIQRPQRSGGGSLTGVKPQPAFGKLKRPPGRPPGFAKQRRLLGRRPPGLAKPKKLPRRRPPGLARLKRQLLLARHSGPLPRAALRRHPPEAARDEAAGASPGPTSPGDAQDQTGPGDIPEPSASSGGPSRVAFSPRRLFSSSLVAPVSAEPIMQALAAANTAVLDGFSAQVEALRAERAELEAAWARVEEGRRSVDAMVEVGRKAHRRHISELEARKAALAEIAREVEEEREAALVATTAMVEAQDTLRLQHASWEAELKSKLDAAQGVLDSAAARERRATEAEAASRRREEALEARAMALEEHAGAVERGLMDREATTALREATLAAHDAACAEEESALRLREDALAERERALEEAEATTRRLADSLSLREAAQEEQARRNLESVRAERAALEQRVANLEAREKELAAGARIGGAAAGESDLAARLAAAEHTVADMQRALDSSTGEAEALRLAGEIGPGMLWDAVSRMKRAGRQAGLWGGQTTVPPTNLEGLAPHLNRMAWVLERLPEELEKTIKASSRDLARGAVELVLASYQARDPNFSPWMALEEFPPGTEDEARARVGDAADHIVNGFEGSAPRLAFAPSSDEEGDTSSEDGGGDEAGDPGAYE

SEQ ID NO: 181441 - protein, 67 aa, Oryza sativa
  Clone ID: PAT_MRT4530_78714C.1.pep
STSGYPPDDTPAMLPGPPKTTRLNSPMHNVNNRAGRRIWNMVILKRPYIICTNNIGNYLKYYQVTGA

SEQ ID NO: 181442 - protein, 1023 aa, Oryza sativa
  unsure (1)..(1023): unsure at all Xaa locations
  Clone ID: PAT_MRT4530_78715C.1.pep
MARGSAPLEGSVLPPSRIVSERQAGLPRRFMPESATGREVVALGEGRPAPHYPGRSVFFLSFAMAGLVPPFSSFFMDVLELYDLQMAHLTPNAVMTLAIFAHLCEMFIGVRPSLRLFRWFFTVQPVSPPSVVSGCYFQPRGPVLNRYISCVLRKKWDDWKSDWFYTPLADKARLRLPSQPPAQASSWRAPVDLGDGYDAVLDRLAGLRSQGLTGAMVFGDYLRRRIAPLQRRARGAWEYTGSEDYMRTHQGGRWDWAPEDFEMVVQRVLNLSSVEASLIPQGVLPLCSDPERANILTIMQPVGASGERAPRGHDGAGGSRRGEQSTPGGGRASGPRDGGPGGSRPADARGKRKQEDTPSPSPPRGGGAVRASSRRPEGAVPTSQPEGERKKKRLRKMGVTEPCRGNLISPPRWSFSRPPRSEIPSRPPRHSKSGRSEAEETATAEARRREAVRREAADRLREAEEAAQEAVRVRQAEEATREEARLHRAGKSAREAEATRARQAACQAPDPTPPEATTTSESTHDEAAGAPLGPDPSGDVQDEPASGDAPESGTSIGGPSRIAPTPRRLSPLPYAAPLNTEPLLQALAAANTMVLDGLGAQMEVLQAERAELDAAWARVEEGRRSVEAMVEAGRKAYRRHASELEARRRELAEIAREVEEEREIALIATAVLNEARDDLRLQYGSRVAELEKKLDAARGVLDATTARERRATENEAASRRREVTLEARATALEERARAREKDLADRETAVAIQEATLAAHEAACAEEESALRLREDALTERERSLEEAEAAAQRLADSLSLREAAREEQARRNLEGARAKRAALDQRAAELEARAKELDARARSGEAAAGDGDLAARLAAAEHTIADLQGALDSSAGEVEALRLAGEVGPGMLRDAVSRLDRVGRQAGLWGERTAKYAANQGGLAQRLSEMAGTLQRLPEELEETIKSSSRDLARGXAVELVLASYQARDPDFXPVRDAADHIVHSFEGTAPRLAFALDSDEEGGDGGVDDSDHEAGDPGASK

SEQ ID NO: 181443 - protein, 1008 aa, Oryza sativa
  Clone ID: PAT_MRT4530_78716C.1.pep
MARGSALLDGSVLPPSRIVSEKQAGLPRRFMPESATGREIVMLGEGRPALDYPGRSVFFLPFAMAGLVPPFSSFFMDVLEFYDLQMAHLIPNAVMTLGIFAHLCEMFIGVRPSLRLFRWFFTVQSVSPPSVVGGCYFLPRGPVLNCYIPCVLRKKWDDWKSDWFYTPLADEAHLRLSSQPPAQAPSWRAPVDLGDGYDAVLDRLAGLRSQGLTGAMVYGDYLRRRIAPLQRRARGAWEYTGSEDLMRTHQGVRWDWAPEDFKILVQRVLNLNSVEASLIPQGILPLCSDPDRASILTIMIAVGASEEQAPKGHDGAGGSRKGEQSTPGGGRASGPRDRGPGGNRPTDARGKRKLGGTPPSSSPRGGGAVRAGSRRPEGAVPTSQPEGERKKKRLRKMGETEPSRGNLISPPRWSFNRPPRSDIPSRSSHHLKSGQSEAEDPAAAEARRRESDRREAADRLREAEEAAREAARARQADDTAWEEAARARQAEEAAREEAARVRQAEEAAREEAARVRRAEAMAASEAVHDEAADASLGPTPSGDAQDQTEPLLQALAAANTAVLDGFNAQVEALQAERAELDAAWARVEEGRRSVEAMVEAGRKAHRRHVSDLEARKTALAEIAREVEEERGAALIATTAMIEAQDSLRLQHGNWEAELKKKLDAAQGVLDAAAAREQRATETEAALRRREEALEARAMALEERACVAEKVLADREAAVTSREATLAAHESACAEEESALRLREDALAERERALEEAEAEAQRLADSLSLREAALTEQARRNLESVRAERAALEQRAADLEAREKELDARACIGGAAAGESDLAARLADAEHTVADMQRALDSSAGEAEALRLAGEIGPGMLWDAVSRLDRAGRQAGLWKGQSMTRPANLEGLAPHLTKMAWALQQLPEELEKTIKSSSRDLAQGAVELVLASYQARDPNFSPWMALEEFPSGTEDDARARVRDAADHIVHSFEGSAPRLAFAPNSDEEGDASGADDRDDEAGDPGASD

SEQ ID NO: 181444 - protein, 1024 aa, Oryza sativa
  Clone ID: PAT_MRT4530_78717C.1.pep
MARGSALLDGSVLPPSRIVSERQAGLPRRFMPESAIGREIVMLGEGRPAPDYPGRSVFFLPFAMAGLVPPFSSFFMDVLEFYDLQMAHLTPNAVMTLAIFAHLCEMFIGVRPSLRLFRWFFTVQSVSPPSVVGGCYFLPRGPVLNRYIPCVLRKKWDDWKSDWFYTPLADEARLRLPSQPPAQASNWRAPVDLGDGYDAVLDRLAGLRSQGLTGTMVYGDYLRRRIAPLQRRARGAWEYTGSEDYMRTHQGVRWDWAPEDFKIVVQRVLNLNSVEASLIPHGILPLCSDPDRASILTIMTAVGASEEGAPKGHDGAGGSRRGDQSTPGGGRASGSRDGGPGSGRPADARGKRKQGGTPPPSPPRGGGAVRASSRRPEGAAPTSQPEGERKKKRLRKMGETEPSRGNLISPPKWSFNRPPRSEIPSRPSRHSKSGQSEAEDPAAAEARRRESDRREAADRLREAQEAARARQAEETAWEEAARARRAEETAREEAARARQAEEAAREEAGFRQDEAMATSEAVRDQDQTGPGDIPESGTSIGGPSRVASSPRRLFPTPSITPLSAEPLLQALAAANTAVLDGFSAPVEALQAERAELDAAWARVEEGRRLVEAMVEVGRKAHRRHVSELEARKKVLAEIAKEVEEERGAALIATTVMNEAQDTLRLQYGSWEAELGKKLNAAQGVLDAAAAREQRVAETEAASRRREEALEARAMALEERACAVETDLADREAAVAIREATLAAHESACAEEESALRLREDALTERERALEEAEAAAQRLADSLSLREAALAEQARRNLECVRAERAALDQRAADLEAREKELDSRARSGGAAAGESDLATRLAATKLTIADMQRALDSSAGEAEALRLAGEIGPGMLWDAVSRLDRAGRQAGLWKGQTMKYSTNQGGLAQHLSKMAGALQQLPDELEKTIKSSSRDLAQGAVELVLASYQARDPNFSPWMALDEFPPGTEDSARAQVRDAADHIVHSFEGSAPRLAFAPNSDEEGDAGGADDSDGEAGDPGASD

SEQ ID NO: 181445 - protein, 890 aa, Oryza sativa
  Clone ID: PAT_MRT4530_78718C.1.pep
MARGSAPLDGSVLPPSRIVSERQAGLPRRFMPESATGREVVALGEGRPVPHYPGRSVFFLSFAMAGLVPPFSIFFMDILEFYDLQMAHLTPNAIMTLAIFAHLCEMFIGVRPSLRLFRWFFTVQPVSPPTVVGGCYFQPRGQVLNRYIPCILRKKWDDWKSDWFYTPLADEARFRLPSQPPAQASSWRAAVDLGDGYDAVLDRLAGLRSQGLTGAMVFGDYLRRRIAPFQRRAQGAWEYTGPEDYIRTHQGRKWDWDPEDFRMVVQRVLNLSSVEASLIPQGVLPLCCDPERAKILAIMQRDPVAPPRHSKSGRSEAEETATAEARRREADRREAADRLREAEEAAQEAVRVRQAEEAAREEARLHRAEESVREAEAARARQTACQTPDPTPPEATTTSEATHDEAAGAPLGPDPSGDAWDEPASGDAPESGTSIGGPSRAAPTPRRLSPLSSAAPLSAKPFLQALAAANSTVLDWLSAQMEALQAERAELDAAWARVDKGRRSVEAMVEAGRKAHRWHTSQLEARRRDLAEIARELEEKLDAARGVLDAAAARERWAAENEAASRQREEGLEARATALEERARALDAKERDLADREAAVANREATLVAHEAACAEEESALRLREDALTERGRALEEAEAAAQRLADSLFLREAAREEQARRNLEGACAEKAALDQRAAELEARAKELDARAHSDGAAAGHGDLAARLAAAEHTIAELQGALDSSAGEVEALRLASEVGPGMLRDAVSRLDRVGRQAGLWGGRYAKYAANQGGLAQRLSEMAGALERLPEELEETIKSSSRDLARGAVELVLASYQARDPDFSPWAALEEFPPGTKDGARAQVRDAADHIVHSFEGTAPRLAFALDSDEEGGDDGADDSDDEADDPGALE

SEQ ID NO: 181446 - protein, 85 aa, Oryza sativa
  Clone ID: PAT_MRT4530_78719C.1.pep
FSPSGFRTSHCSCLSVIRLPCLGILRFPVFPSNVCSLVGLCFLCFAYWIPNTFLTVGCFVCLWRLTFMLNLPFLFVLFLFSSFSL

SEQ ID NO: 181447 - protein, 253 aa, Oryza sativa
  unsure (1)..(253): unsure at all Xaa locations
  Clone ID: PAT_MRT4530_7871C.1.pep
MPASTSTKSGSSEAAASGPREWGPRGSLTVHGGPGARGXTPTGAAGPTRQPHPRARAADGRAPRGSRSVRPKAATAARPAGGSALAPMVAAGDHRHGGAAAERGEGKGETKRRSTAHPESTATTKTAAGAEEGGGAARVDGVDGVPAVGERSGGVDEVGEDAAKPKEAAPGREMVRGDDGGGPELGGDGGERVRRRGLDSNPAYGRNPRDRQAGLSPKQQRTNPLPRHLDYRAAARVAFICPGECPSTPDFIH

SEQ ID NO: 181448 - protein, 171 aa, Oryza sativa
  Clone ID: PAT_MRT4530_78720C.1.pep
MNIPRTQCDQQNKQRTASVDVEVRKSSGSQSSISRDGGSGGSGSRCRHGGRRDNDEQSSRVEQSCGKHSPITWSPAYPVQISGEGCHMASYKHSYIVTWHSIITPGCQRPASGSAIPALKSNESVNPALRSGGSGSGQISRPRPRERWRWERRPDDDGTGGDDYNDDEGSD

SEQ ID NO: 181449 - protein, 1013 aa, Oryza sativa
  unsure (1)..(1013): unsure at all Xaa locations
  Clone ID: PAT_MRT4530_78721C.1.pep
MGFVSGIDDFVFPPGQAFQFGSLDFITNDFGKISLLDSDSNQSGRGQISTYSPGIDSRPSEIVEYDDFGYRYDYXNLDDFDEGFEDNYTPLYFGIFMADNETEEERKAREAEELRXNRKPNDADWKRSAKHKSENGYNVSHRNANGLQKRLRTGDNVPWMPGDKHRNLLGNKTSRGQRRPVDLRDTINQRRAARGYAPHHSPDRYDDDVDGVAAFTSDLRRVDWPAGFKPIGIEKYDGTTNPESWLTVYGLAIXNYLPVALADSARSWLHGXTFERPGTQFDLYNVIQKSRESLRDYIRRFSEQRNKISDITDDVIIAAFTKGVRHTDLVGKFGRKPPRTVKQMFEKANEYAKAEDAITTSKQSGTTWKPKKDTPTTGGSGSTNHKDRKRKPEELVATTTPSSRQRSHVNTFDKIMNSQCPHHPNSNHAAKDCFVYKQFAEQYAKNAHKASDGDQSTSKKKDEKAKADRTEINAAQPDTPQYLRWSETTIKFDRSDHPXEWSTRDGTPCTRENFRTENXHVILGRPALAKFMAVPHYTYMMMKMPGPRGDISLRSDIKQAVTCDKESCEMAQTREITLAREEIRLATSTASEGEVPATKMPKSGEGDAKTKKIPLDSSDPTKTAVIGAELDLVIEHSLLVKEDAKPIKQRLRRFAQDRKDAIKEELTKLLAAGFIKEVLHPDWLANPVLVRKKTGQWRMCVDYTDLNKSCPKDPFALPRIDQDIIRSDCLKTSFITPFGAYYYITMPFGLKNAGATYQRMIQRCFSTQIDRNVEAYVDDLVVKTKQKDDLITDLEETFASIRAFRMKLNPQKCIFGVPSGKLLGFMVVSTVLVVEREEEGHVQKVQRPIYFVSKVLADSKTRYPQVQKLLYGVLMTVSKLPHYFQGHSVTVVTSFPLGDILHNREANGRIAKWALELMSLDISFMPRTSIKSQALADFVTEWTECQEDMCHAQKFTNQNFEAECALNPCLGPARVHKRQFLTYRSTSYKNGDDYKCSRKEKRARLGNLTSAAG

SEQ ID NO: 181450 - protein, 110 aa, Oryza sativa
  Clone ID: PAT_MRT4530_78722C.1.pep
MYEEATKELENQRALTLSLSDHGDLYGCRPNDLLMGRPIPTSTSAGSRRDVGTQLFADDMTSVRPPGIYLTRTNVPSPGASTLALARDECLETLILTGRGEACVRSPVAT

SEQ ID NO: 181451 - protein, 79 aa, Oryza sativa
  unsure (1)..(79): unsure at all Xaa locations
  Clone ID: PAT_MRT4530_78723C.1.pep
NALCFIFSCAEPAPQGIFANFSLLLTEGRVEEPDVXDLGTIFEEEQTKAPVLTGSQEDGDDEDIDWDDPLHFPAGKRRL

SEQ ID NO: 181452 - protein, 146 aa, Oryza sativa
  unsure (1)..(146): unsure at all Xaa locations
  Clone ID: PAT_MRT4530_78724C.1.pep
MVGPFKKAVGGYTHHFVAVDKFSKWIEAKPVITITTDKARDFFINIVHRFRVPNRIITDNGTQFTGGVFKDFCEDFGIKICYASVAHPMSNGQVERANGMXYGAEAMLPSEVEFESLRFRNFSEERYGEDRVDDINRLEEAREAAL

SEQ ID NO: 181453 - protein, 1771 aa, Oryza sativa
  unsure (1)..(1771): unsure at all Xaa locations
  Clone ID: PAT_MRT4530_78725C.1.pep
MGSVSGVDDLAFPPGQAFRFSSLNFITNEFGKISLLDSDSNQSGRDQVPTPFGILNSAENYFKIISPKSALNHSDEIQSTPQRPDQDDGSYPSILMRLPNDLAAVFTAKTSPTQRSRRAPASAPIQSRSREVGVILQPLGTVLTEELDGYLSSPGVSSRPTEILDYDDFGYHHDHDDFDDSYKDSYTPLFFGVFMADNETEEQHRAREVEEERARQETERRRQEEERQRQERERLQREQQDRERVAKEAEDRRXRALESGRRARELIGQQDVDGTTVFRTPQQNAVAAITLLDTLPKEDALNQVDHVVNILNQTKTMIAASVLANSASTRTPTGSRVPHLRSHDYHQPSLSIIGTGSXRRSRDHDEXYFHSPPERHGERRVERLRSPPRQRPVDLCDTINXRHAARGHRHSPDRYDDDVDGVAAFTNDLRRVDWPAGFKPTGIEKYDGTTNPESWLTVYGLTIRAAGGDSKAMANYLPVALADSARSWLHGLPRGTIGSWAELRDHFIANFQGTFERPGTQFDLYNVIQKSGESLRDYIRRFSEQRNKISDITDDVIIAAFTKSIRHEDLVGKFGRKPPKTVKQMFEKANEYAKAEDAITASKQSGTTWKPKKDTPAAGGSGSNNHKDRKRKPGELVATASPSSRQRSRVNTFDKIINSQCPHHPNSNHAAKDCFVYKQFAEQYAKNARKPSDRDQGTSKKKDDEDDAPTGFQDSRKELNHIFGGPLAYESKRKQKLTEREINAVXPNTPQYLRWSEIAIKFDCSDHPDRVVHPGRYPLVLDPVVRNVKLRRTLIDGGSALNILFAKTLDDMQIPHMELKPSNAPFHGVIPGLSATPLGQITLPVTFGTWENFRTENVCFEVAYFETAYHAILGXPALAKFMAVPHYTYMMIKMPAPRGVISLWSDIKQAVTCDKESCEMAQTREITLAREEIRLTTTMASEGEVPATKLSKTKEGNDKTKKIPLDPSDPTKTVNNKDIFAWKSSDMPGIPREVIEHSLYVKEDAKPIKQRLRHFAQDRKDAIKEELTKLLAAGFIKEVLHPDWLANPVLVRKKIGQWRMCVDYTNLNKSCPKDPFGLPRIDQVVDSTAGCELLSFLDCYSGYHQIXLKESDCLKTSFITPFGAYCYITMPFGLKNAGATYQRMIQIYFSTQIGRNVEAYVDDVVVKTKQKDDLIADLEETFASIHVFRMKLNPEKCIFGVTSGKLLGFMVSQRGIQANPEKINAILNMKPPSSQKDVQNLTGCMAALSRFVSRLGERGMPFFKLLKKTDNFXWGPEAQKALEDFKKLLTTPQVLASPHPQEPLLLYVSATSQVVSTVLVVEREEEGHIQQVQRPIYFVSEVLAYSKTRYPQVQKLLYGVLITVRKLSHYFQSHSVMVVTSFPLGDILHNHEANGRIAKWALELMSLDISFKPRTSIKSQALADFLAEWTECQEDMPEEKMEYWTMHFDGSKRLTGTGAGVVLISPTGERLSYVLWIHFSASHNMAEYEALLHRLRIAISLGIRRLIIRGDSQLVINQVMKEWSCLNDNMTAYRQEVRKLEDKFDGLELTHVLGHNNEAANRLSNFGSKREAAPSDVFVEHLYEPTVPRKETIEAMDTQGVSMIEADWREPLIRFLTKQELPQDKNEAEQISRRSRLYVMHETELYKKCPSGILQRCVSLEEGRQLLKDIHSGICGNHAAAXTIVGKAYRQGFFWPTAVSDADKIVRTCEGCQFFARQAHLPAQELQTILLSXLFAVWGLDMVGPFKKXVGGYTHLFEILNTFVNFVLRHF

SEQ ID NO: 181454 - protein, 384 aa, Oryza sativa
  Clone ID: PAT_MRT4530_78726C.1.pep
MALDIGGGGAGDLLSALPDDVLHLILLRLRSAAAAARTSVLARRWRSLWTTLPELRFPAVTDLARVTAALLSHDAPLLHRLELCSHDPAPHEVAAVLHLAARSLAGKLLLDIVMRKKRNPVAAAAAGIGAAFHIPCFRKATEISIRFAYLTIRLPPFGVFAKLSVLRLTRFRLDDSQCDHLGDIVSSERLVKSAIRSKTLLTVGLFELEELQQLTISAPMLRTLHLVHCLDKRAHFKAVSNVDLYLIYPSSMVDCEFLMEDMNTLPAIEILSLRSITAGHAFGPCVFQLLRTSTGVRELHLDLDHHLKGEVSCSSGCICYKPSDWESMDICLNFLQKVEINNLSGAEYEICFVKRLLTWAPVLKMITVMFGPSVTVSEEVFNLL

SEQ ID NO: 181455 - protein, 28 aa, Oryza sativa
  Clone ID: PAT_MRT4530_78727C.1.pep
YVDPDFTKFALQFNCNLLSVTYVHSFSF

SEQ ID NO: 181456 - protein, 360 aa, Oryza sativa
  unsure (1)..(360): unsure at all Xaa locations
  Clone ID: PAT_MRT4530_78728C.1.pep
MSAVQERGRGRRHVGPIGSGTREGGGGGMLGTAQAGRPAMGRRPKTTAHARRAAALMGERGKEGGEGIPHLRARRPARRKKAAATTGDAEARTGGGDTLGEDGEALGMEKATATTKMAGRRWKQWRAHRRRGEIGAPAVIRGNEAAAEVALAAAKLTAVVGWRGGDPSGSDARPKATASGGASNKRRERDRRHGRARRMRENERGGSGECFYGQXGEDVAGNPPDLAGDVGRRERERGGIRNRIPPSQARXGPGDAGEEAATWGGRGSGAAWAREERRRRWRGGFGGGCRRRRVAGGRGRPDRWAPPVSVPERGGRRTGRPTRGRPSGRGMGRRPNKGKGGKRKKRKRIFLGLKLHLGDF

SEQ ID NO: 181457 - protein, 146 aa, Oryza sativa
  Clone ID: PAT_MRT4530_78729C.1.pep
MASSGDPSAVVVPRNFRLLEELERGEKGIGDGSVSYGMDDADDIYMRSWTGTIIGPHNTVHEGRIYQLKLFCDKDYPDRPPTVKFHSRINMTCVNPENGLVDQRKFSLLSNWRREYTMEAILTQLKKEMAASHNRKLVQPPEGTFF

SEQ ID NO: 181458 - protein, 63 aa, Oryza sativa
  Clone ID: PAT_MRT4530_7872C.1.pep
FFFFFFFYPCEERSRSVYCIVMLSSYMFEHFDVPAPHSLETTSFHAIHINDKTATKYIHFTIS

SEQ ID NO: 181459 - protein, 942 aa, Oryza sativa
  unsure (1)..(942): unsure at all Xaa locations
  Clone ID: PAT_MRT4530_78730C.1.pep
MARGSAPLDGSVLPPSRIVSERQAGLLRRFMPESATGREVVELGEGRPAPHYPGRSVFFLPFAMAGLVPPFSSFFMDVLEFYDLQMAHLTPNAVMTLAIFAHLCEMFIGVRPSLRLFRWFFTVQPVSPPSVVGGCYFQPRGPVLNRYIPCVLRKKWDDWKSDWFYTPLADEARLRLPSQPPAQASSWRAPVDLGDGYDAVLDRLAGLRSQGLTGAMVFGDYLRRQIAPLQRHARGAWEYTGPEDIMRTHQGRKWDWDPEDFRIVEVGASGERAPRGHDGAGGSRRGEQSTPGGGRASGPRDGGPRGSRPTDARGKRKQEDTPSPSPPRGGGAVRASSRRPEGAVPTSQPEGERKKKRLRKIGGTEPSRGNLISPPRWSFRRPPRSEIPSRPSRXHSKSGRSEAKETATAEARRQEADRREAANSLREAEEAAQEAVRARQAEEAAWEEARLHRAEEAVRETEAARARRADCQAPDPTPPEATTTSEATHDEAVGAPLGPDPSGNAQDEPASGDVPESGTLIGGPSRAASFTRRLFPMPSAAPLSAEPLLQALATANTTVLDGLSAQIEVLQAERAELDAAWARVEEGRRSVEAMVEAGRKAHRWHTSEIEARRRDLAEIAREVEEERETALIATAVFNAARDDLCLQYGSRGVELEKKLDASRQREEALEAHATVLEERARALDTRERELAGREAAVAIREATLAAHEAACAEEESALRLREDELTERERALEEAEAAAQLREEQARLNLEGARAERAALDQRATELEARAKELDARARSGGAAAGDGDLAAHLAAAEHTIAELQGALDSSAGEVEALRLAGEGGLAQRLSEMAGTLQRLPEELEETIKSSSRDLARGAVELVLASYQARDPDFSPWAALDEFPPGTEDDARAQVRDAADHIVHSFEGTAPRLAFALDSDEEGGDGGVDDSDDEAGDPGASK

SEQ ID NO: 181460 - protein, 54 aa, Oryza sativa
  Clone ID: PAT_MRT4530_78731C.1.pep
VWRRVSTCGRTSCGTWSCTRARCTPTVMMSADVAPRSGPAQHQTKAGAAASRGR

SEQ ID NO: 181461 - protein, 134 aa, Oryza sativa
  unsure (1)..(134): unsure at all Xaa locations
  Clone ID: PAT_MRT4530_78732C.1.pep
MCRPCPCWSSRTPGTPTPPPPPRTRRTGATASSTLSRRTRSTSPPCSRRRRPRPPPCRRCRRXSCHRSSRTRRRRRRGATAASPGAHGRARRAARRSRPATRPSPPPAPRRCSATPATPPTRTGGAPPSPGAPA

SEQ ID NO: 181462 - protein, 90 aa, Oryza sativa
  Clone ID: PAT_MRT4530_78733C.1.pep
HIVLQVDLPYAVAGAALRVAACVDVRPYQLRDVVVYTCTLHPAGLHPALTWRPGAVQLSTRQKPERRRPEAGLRGRRTWGPTVAARFASN

SEQ ID NO: 181463 - protein, 350 aa, Oryza sativa
  Clone ID: PAT_MRT4530_78734C.1.pep
MAMAMAMHRFSLCCVVLLVLAPLAAVAWRPWPPRNGSGEVEGIGASKKFEGSSDFVKLQYHMGPVLAADITVHPIWYGRWPAEQKRTIRAFLRSLSPPGSGSGDGGIPSPSVAAWWRTVRLYTDQTSANVSGVVRLGREKCDARASRGGRLTRLDIQSVVRDAVTARTRPLPVDSSGVYLVLTSPEVVVENFCGQVCGFHYFTFPSVVGYTLPYAWVGNSAARCPEVCAYPFAIPSYVGGGRRAEAPPNGDVGVDGMVSVIAHELAELASNPLANAWYAGEDPSFPTEIADLCEGIYGTGGGGAYTGQLLTDGRSGASYNVNGVGGRKFLVQWVWNPILSYCSGPNALDQ

SEQ ID NO: 181464 - protein, 145 aa, Oryza sativa
  Clone ID: PAT_MRT4530_78735C.1.pep
PGCSLYRLAFQKGPGFKNFFFPPPDFNLVLANRPPFGLRDFFPVFFLEKKGLGFGPLWGPKTPGVVLVFFWGGPGLGPPSFFKGLFFYNWFSTPPLPLGCLAALFFLGIFLKKKKKKKKKKKKKKKKKKKKKKKKKKKKKKKKKK

SEQ ID NO: 181465 - protein, 70 aa, Oryza sativa
  Clone ID: PAT_MRT4530_78736C.1.pep
KKKKKKKRGEGEKKKKKKKKKKKRTTRKKGTKTKKHKKKKKNRGVLFCGPQCFLPGRLLYNFLWGGGPAL

SEQ ID NO: 181466 - protein, 151 aa, Oryza sativa
  Clone ID: PAT_MRT4530_78737C.1.pep
MLNGLEIMKLGRADNLNSAGSHGRRKKILIGTLSAALGVAVLACALLCLLAVLRRRRQAPTPAPEEKESTQLPWSQHTQDGSSWVDMSNASGAGMTGGLHRMSMQLNISLADITAATENFNERNLIGVGGFGNVYSGVLRDGTRVAVKRAM

SEQ ID NO: 181467 - protein, 46 aa, Oryza sativa
  Clone ID: PAT_MRT4530_78738C.1.pep
MLSAVEEMPSGLPSLPEKLDSPSAGQEEERRDGLWLGEIVGLGLAE

SEQ ID NO: 181468 - protein, 210 aa, Oryza sativa
  unsure (1)..(210): unsure at all Xaa locations
  Clone ID: PAT_MRT4530_78739C.1.pep
YDRLARGIIAIFRLEYMRKPTVDDVQHIIXKWKKCSNSXKAMYTHGDYGAATIIVEAVASCDRWIWHCLFGVAGSNDEISVLNQSHTFTYXLMGISIRMRYTVEIXYNLGYYXANGIYLEWATLVQSIWHRQLEKEKMFPLHQESTRKDVECAFGILIACFEVVTTLTHLWEQSGIINIMTRCIIKHNMIVKDECHLGPMDAHEFEQGRS

SEQ ID NO: 181469 - protein, 303 aa, Oryza sativa
  unsure (1)..(303): unsure at all Xaa locations
  Clone ID: PAT_MRT4530_7873C.1.pep
RSTKLALHFSAGHLFISHSPPPPRIAPHPAVPARIKERGIIPRNPLSRFPLFPLSLSLGFARXINPANLAGVFNGAEISAXFPLSPATLSPSRCYIIAPRAPLFRFRRSPLALAVGFVLAPCSSLSAVAVDLRFAADVAPVLLPTRRPLRPLRRVVADSVRASASPADRRSTVVIVIPNRAAVFLRSGRRSRRRRCPGVSRRPPFAFPLPSSLSGATPPRRWSPAATIGARVRAAPVGRAGEAALGRALAAAKWARPSAARARGCGXARDPRRRPPPAACARSTVDRAADGWAPHPVDPVRAP

SEQ ID NO: 181470 - protein, 121 aa, Oryza sativa
  unsure (1)..(121): unsure at all Xaa locations
  Clone ID: PAT_MRT4530_78740C.1.pep
RDGRQRRRDGGQHGARGDERAARQRRDGGVARQRRWNARAATGRRRRRRGSGGAGCEETATARGVARGARRRDGDGDGDTTATATARSARRGRRQRRGAXRRQRRGARGDVTASSAARGKR

SEQ ID NO: 181471 - protein, 171 aa, Oryza sativa
  unsure (1)..(171): unsure at all Xaa locations
  Clone ID: PAT_MRT4530_78741C.1.pep
VSAVAAPPGAHPRRPQGQGGVPASPPRPRHARRRRARRDPXPPPPSRCRAFLSGRSPAAPVKWTPAPAPAPRRSSSVAARTWCRLPPLPPVAEKPXRSRDVCSLADRRRRCERERERDHQVGVGSGGSGDRHRRLCSPPRSSPLEQGRATPPRRGARLPRQEPAAAGDPRP

SEQ ID NO: 181472 - protein, 57 aa, Oryza sativa
  unsure (1)..(57): unsure at all Xaa locations
  Clone ID: PAT_MRT4530_78742C.1.pep
SCPTSRGKSFQCELVFAKRGINLIMMXAGELESGNAGEPAKLIRQRXREAADMINKG

SEQ ID NO: 181473 - protein, 74 aa, Oryza sativa
  Clone ID: PAT_MRT4530_78743C.1.pep
EPLIIEQQGNPYFLTANREGEFYWWSISTYYTYSVCCGGLRPHDTWIHTWFMLAACMSSTSICFQGYWVERESI

SEQ ID NO: 181474 - protein, 72 aa, Oryza sativa
  Clone ID: PAT_MRT4530_78744C.1.pep
VEADQEDAGEAVGRRGGRSSSGVRSRVASSGCYFPPPCLFLSCRLLVVLFFFLAYLFRFLLPPLLLYSLLIF

SEQ ID NO: 181475 - protein, 58 aa, Oryza sativa
  Clone ID: PAT_MRT4530_78745C.1.pep
RAAGIRHEERERERELVSSFFFFFFFYNMDSLAHHRSRKTDEVHILQYTTKILEANQL

SEQ ID NO: 181476 - protein, 402 aa, Oryza sativa
  Clone ID: PAT_MRT4530_78746C.1.pep
MAAKWQEAPAPGVRVLLFAVAAAALLLVVSARKVGETCAADRNCDAGLHCETCVADGNVRPRCTRVTPVDPQTKARDLPFNRYAWLTTHNSFARLGTRSRTGTAIATAWNQQDTITDQLNNGVRGLMLDMYDFRNDIWLCHSFGGACQNFTAFVPAVEVLGEIERFLARNPSEVVTVFVEDYVESPMGLTRVLNASGLTKYVFPAWRMPKSGGDWPRLSDMVRDNHRLLLFTSKSAKEAAEGIPYEWHYVVENQYGTKGMIKGRCPNRAESAAMNDLSRSLVLVNYFRDLPNFPVACKDNSAELLDMLTTCHDLSADRWANFIAVDFYKRSDRGGAAEATDRANGGLGNGTCTTARHGGTPKGIFNATSGATALLRPPTATLQWQQLIILVPSTLAALLLSL

SEQ ID NO: 181477 - protein, 500 aa, Oryza sativa
  Clone ID: PAT_MRT4530_78747C.1.pep
MDSPGGAAAAAAAAESSNRAGEDAKSDGVSCQNSRRPNLSLQIPNRAFDDTLPTSTRIKISPSPNSARSGLPPRPNSTRTKSSIRGIIPQRSFKAKSSLQDGDQTILLIPDTPSSSGQQVKATTSRSFSFTKVINSLSAKRTHSLPVTPVAASGPSSHEGHADNLPSTVKNEVETQIRRSLSAPGNHDSKDLRRTASSGLIRVIPTTPRPVPVETVASNDGIEEAVDAPEDGGEDIPEEDAVCRICLVELNEGGETLKLECSCKGELALAHQECAIKWFSIKGNKTCDVCRQEVQNLPVTLLRIQIRTVNRQPRNGVQQRAAHPHRFWKETPVLVMVSTLAYFCFLEQLLLKMGAVLAILLASFTGFGIAISLNAMLIEYLRYHGDDKSGSLNCISNFDEIRDMVKMFVNLQSHHDHFHYNFSQQQAYASQADRTITSRQAYPTYTLPHASEADNTIQPHNIHSQKAGFFSQMGTLKKRHMDGWSISLPVIVPKNWCQIM

SEQ ID NO: 181478 - protein, 1718 aa, Oryza sativa
  unsure (1)..(1718): unsure at all Xaa locations
  Clone ID: PAT_MRT4530_78748C.1.pep
MGFVSGIDDFAFPPGQAFRFGSFNFITNDLSKISLLDSDHVPVPFGIPNSAEAYSKIIYPESASNHSDKIQSTLPRPDEDDGSYPSILMKLPDDLAAVFTTRTSPTRRSRRAPASAPIQSRSREVGVILQPLGTVSTEELDGYLSSPGISSXLIEILDYDDFGYHYYLSDLDNFDDSYEDNYTPLFFGVFMADNETEEQRQAREADQDRVRQEAERRRLEEERQRQEXRXLQREQQDRERIAKEAEDRRQRALESGRRGRELIGQQDVDGTAVFAXPQQNAVAAITLLDTXLKEDALNQANHVVNXTKTMIVASVLANSASTRTPTGSRVPHLRSHDYHQPSLSIIGIGSNRRSRGHDERSVHSPPERHRERRVERPRSPPHQRLIDLRDTINQRRAARGHRHSPNRYDDDVDGVAAFTNDLXRVDWPAGSKPTGIKKYDGTTNPESWLTVYGLAIHAAGGDSKAMANYLPVALADSARSXLHGLPRGMIGSWXHPGRYPLVLDLVVHNVKLRRTLIDDGSALNILFAKTLDDMQIPRTELKPSNAPFHGVIPGLSATPLGQITLPVTFGTRENFRTENVCFEVADFETAYHAILGRPALAKFMAVPHYTYMMMKMPGPRGVISLRSDIKQAVTCDKESCEMAQTHETXAREEIRLAATTASEGEVPATKLTKTEENDAKTKKISLDPSNPDKDCESMLITFLQNNKDIFAWKPSNMPGIPREVIEHSLHVKEDAKPIKQRLRRFAQDRKDAIKEELTKLLAAGFIKEVLHPDWLAKSXLVQKKTGQWRMCVDYTDLNKSCPKDPFGLPRIDQVVDSTAGCELLSFLDCYSGYHQIRLKESDCLKTSFITPFGAYCYITMPFGLKNAGATYQRMIQRCFSTQIGRNVEAYVDDVVVKTKQKDDLIADLEXNPEKCIFGVPSGKLLGFMVSQRGIQANPEKINAILNMKPPSSQKDVQKLTGCMAALSRFVSRLGERGMPFFKLLKKTDNFXWGPKAQKAFEDFKKLLTTPPVLASPHPQEPLLLYVSATSQVVSTVLIVEREEEGHIQKVQRPIYFVSEVLADSKTKYPQVQKLLYGHSVTVVTSFPLRDILHNREANGRIAKWALELMSLDISFKPRTSIKSQALADFLAEWTECQEDMPEEKMEYWTMHFDGSKRLTGTGAGVVLISPTGERLSYVLWIHFSASHNVAEYEALLHGLRIAICLGIRRLIVRGDSQLVVNQVMKEWSCPDDNMTAYRQEVHKLENKFDGLELTHVLRHNNEAADRLANFGSKREAAPSDVFVEHLYEPTVPRKETVEAMDTRGISMIEADXREPFIKFLSKEELPQDKNEAERISRRSRLYIIHETELYKKSPSGILQRCVSVEQGRQLLKDIHSGICGNHAAARTIVGKAYRHGFFWPTAVSDADKIVRTCEGCQFFARQTHLPAQELQTNPLSWPFAVWGLDMVGLFKRAVGGYTHLFVAIDKFSKWIEAKPVITITADKARDFFINIVHRFGVPNRXITNNGTQFTGGAFKDFCEDFGIKICYASMAHPRSNGQVERANGKILHGIKARVFDRLRPYAGKWVDQLSSVLWSLRTTPSRATGQSPFFLVYGAEAMLPSEVEFEXTXFRNFNEEGYEEGRVDDINRLEEAREAALIQSTRYLQGLRRYHNQNVRSRAFLVGDLVLRKIQTTQDRHKLSPLWEGPFIIAEVTRPGSYRLKREDGTLINNSWNIEHLR

SEQ ID NO: 181479 - protein, 859 aa, Oryza sativa
  Clone ID: PAT_MRT4530_78749C.1.pep
MARGSALLDGSVLPPSRIVSERQAGLPRRFMPESATGREIVMLGEARPAPDYPGRSIFFLPFAMAGLVPPFSSFFMDVLEFYDLQMAHLTPNASVSPPSVVGGCYFLPRGPVLNRYIPCALRKKWDDWKSDWFYTPLADEAHLRLPSQPPVQASSWRAPVDLGDGYDAVLDRLAGLRSQGLTGAMVYGDYLRRRIAPLQRRARAAWEYIGPEDYIRTHQGVRWDWAPEDFKILIQRVLNLNSVEASLIPHGILPLCSDPDRVSILTIMTTVGASEEQAPKGHGGAGGSRRGDQSTPGGGRASGPRVGGSGSNRPTDARGKRKLGGTPPPSPPRGGGAARASSRRPEGAAPTSQPEGERKKKRLRKMGGTEPSQGNLISPPRWSFNRPPRSDVPSRPSRHPKSGQSEAEDPAAAEERRRESDRREAADRLREAEEAAREAARARQAEDTAREEAARARQAEEAAREEAARARQAEEAAREEAARARQTEAMASFEAAHDKAAGASLGPTPSGDAQATASGAARDEAAGGSPGPAPSGDAQDQTGPGDIPELSASSGGPSRVAFSPRRLFSSSSAAPLSAEPLLQALAAANTAVLDGFSAQVEALRAERAELEAAWARVEEGRRSVDAMVEVGRKAHRRHISELEARKAALAEIAREVEEEREAALIATTAMIEAQDSLRLQHGRWEAELKKKLDAAQGAAATGAAARTGDRGGRQGGRGGAHQGRGDEGWGKAGKLGVGAPRGEGGTAARRRSASENRRTAAGGTGARGTVFRRDPGREKRRPRRWREVVRVATVPRKRGGEKERMPGGRLKAAAAGKRGGARGGSVPEAERGNGVEAGLRHGAAKPTEVADWRGGGWSG

SEQ ID NO: 181480 - protein, 282 aa, Oryza sativa
  unsure (1)..(282): unsure at all Xaa locations
  Clone ID: PAT_MRT4530_7874C.1.pep
DGRAHLAAARARLKAASPARLTGXGAPAPRWSPPATIGAPERRPRERREGGKRTAVFGSPRDNDDDENGGRSGGKRRRGSGXTXRRCSGGRRAKRSGGRGRRQHGEADGGVAESGGGPERRRRRNGARRRRRRERSTARARIRRRERAASGGNGRAELGEQLYSTERGRTRPERKETGAGISGSIDVAGEDYGMNPDGSEGEREGKSGETGEGITGGTGPRRTPREEGDDKWAPPVSESGGRARLSTARARAGSRWAAGEEREREREVGRAGPRGKGGKKEL

SEQ ID NO: 181481 - protein, 995 aa, Oryza sativa
  Clone ID: PAT_MRT4530_78750C.1.pep
MARGSALLDGSVLPPSRIVSERQAGLSRRFMPESATGREIVTLGEGRPAPDYPGRFVFFLPFAMAGLVPPFSSFFMDVLEFYDLQMAHLTPNAVMTLAIFAHLCEMFIGVRPSLRLFRWFFTVQSVSPPSVVGGCYFQPRGPVLNRYIPCALRKKWDDWKSDWFYTPLADEARLRLPSQPPAQVSSWRAPVDLGDGYDAVLDRLAGLRSQGLTGAMGVRWDWAPEDFKILVQRVLNLNSVEAALIPQGILPLCSDPDRASILTIMMAVGASEERAPKGHDGAGGSRRGEQSTPRGGRASGSRDRGPGSSRPANARGKRKQGGTLPPSPPRGGGAARASNRRPEGAAPTSQPEGERKKKWPRKMGETEPSRGNLISPPKWSFNRPPRSEIPSRPSRHSKSGQSEAEDPAAAEALRRESDRREAADRLREAEEAAQEAARARQAEETAREEAARARQAGEAAREEAARARQAGEAAREEVGFRQDEAMATSEAARDEAAGASLGPTPSGDTQATTSGAAGDEAAGASLGPTPSGDAQDQPGPGDIPESGTSIGGPSRVASSPRRLFPTPSIALLNAEPLLQALAAANTTVLDGLSAQVEVLQVERAELDAAWARVEEGRRSVEAMVEVGRKAHRRHVSELETRKKVLAEIAKEIEEERGAALIATTRAAETEAASRRREEALEACAMALEERACVVERDLADREAAVAIREATLAAHEAACAEEEFTFRLREDALTERERALEGAEAAAQQLAVNLSLREAAQEEQARRNLEGARAERAVLNQRAAELEARAKELDARARSGGAATGESDLAARLAAAERTIADLQGALDSSAGEVEALRLAGEVGPGMLWDAVSRLDCAGRQVGLWRGRTVKYAANQGGLAQRLSKMVGALQRLPEELEKTIKSSSRDLAQGAVELVLASYQARDPNFSPWMALDEFPPGTEDCARAQVRDAADHIVDSFEGSAPRLAFAPNSDEEGNAGGADDSDVEADDPGASD

SEQ ID NO: 181482 - protein, 1384 aa, Oryza sativa
  Clone ID: PAT_MRT4530_78751C.1.pep
MGSLTRAEEEETAAAEEWSGEAVVYVNGVRRVLPDGLAHLTLLQYLRDIGLPGTKLGCGEGGCGACTVMVSCYDQTTKKTQHFAINACLAPLYSVEGMHIITVEGIGNRQRAVWNYLCDEVVTCWLKTLRKERLAMAHGSQCGFCTPGFVMSMYALLRSSEQPPTEEQIEDSLAGNLCRCTGYRPIIDAFRVFSKRDDLLYNNSSLKNADGRPICPSTGKPCSCGDQKDINGSESSLLTPTKSYSPCSYNEIDGNAYSEKELIFPPELQLRKVTSLKLNGFNGIRWYRPLKLKQVLHLKACYPNAKLIIGNSEVGVETKFKNAQYKVLISVTHVPELHTLKVKEDGIHIGSSVRLAQLQNFLRKVILERDSHEISSCEAILRQLKWFAGTQIRNVASVGGNICTASPISDLNPLWMATGATFEIIDVNNNIRTIPAKDFFLGYRKVDLKPDEILLSVILPWTRPFEFVKEFKQAHRREDDIALVNAGMRVYIRKVEGDWIISDVSIIYGGVAAVSHRASKTETFLTGKKWDYGLLDKTFDLLKEDVVLAENAPGGMVEFRSSLTLSFFFKFFLHVTHEMNIKGFWKDGLHATNLSAIQSFTRPVGVGTQCYELVRQGTAVGQPVVHTSAMLQVTGEAEYTDDTPTPPNTLHAALVLSTKAHARILSIDASLAKSSPGFAGLFLSKDVPGANHTGPVIHDEEVFASDVVTCVGQIVGLVVADTRDNAKAAANKVNIEYSELPAILSIEEAVKAGSFHPNSKRCLVKGNVEQCFLSGACDRIIEGKVQVGGQEHFYMEPQSTLVWPVDSGNEIHMISSTQKAPQKHQKYVANVLGLPQSRVVCKTKRIGGGFGGKETRSAIFAAAASVAAYCLRQPVKLVLDRDIDMMTTGQRHSFLGKYKVGFTDDGKILALDLDVYNNGGHSHDLSLPVLERAMFHSDNVYDIPNVRVNGQVCFTNFPSNTAFRGFGGPQAMLIAENWIQHMATELKRSPEEIKELNFQSEGSVLHYGQLLQNCTIHSVWDELKVSCNFMEARKAVIDFNNNNRWRKRGIAMVPTKFGISFTTKFMNQAGALVQVYTDGTVLVTHGGVEMGQGLHTKVAQVAASSFNIPLSSIFISETSTDKVPNATPTAASASSDLYGAAVLDACQQIMARMEPVASRGNHKSFAELVLACYLERIDLSAHGFYITPDVGFDWVSGKGTPFYYFTYGAAFAEVEIDTLTGDFHTRTVDIVMDLGCSINPAIDIGQIEGGFIQGLGWAALEELKWGDDNHKWIRPGHLFTCGPGSYKIPSVNDIPLNFKVSLLKGVLNPKVIHSSKAVGEPPFFLGSAVLFAIKDAISAARAEEGHFDWFPLDSPATPERIRMACVDSITKKFASVYYRPKLSV

SEQ ID NO: 181483 - protein, 1205 aa, Oryza sativa
  unsure (1)..(1205): unsure at all Xaa locations
  Clone ID: PAT_MRT4530_78752C.1.pep
MPFTRSLRRRHGWSIFTNDLRRVDWPAGLKPTGIETYDGTTNPESWLTVYGLAIRAAGGDSKAMANYLPVALADSARSWRHGLPRGTIGSWTELRDHFIANFQGTFERPGTQFDLYNVIQKSGESLRDYIRRFSEQRNKISNITDDVIIAAFTKGIHHEELVGKFGRKPPKTVKQMFEKANEYAKDENAIAASKQLGPTWKPKKDAPTTGEGGSNNHKDRKLVHPGRYPPVLDPVVRNVKLRRSLIDGGSALNILFAKTLDDMQIPRTELKPSNAPFHGVIPGLSAMPLGQITLPVTFGTRENFRTENVCFDVADFETAYHAILVHPALAKFMAIPHYTYMMMKIPGPRGVISVRSDIKQAVTCDKESCEMAKTREIAIAREDIRLATTTSREGEESALVTFLQNNKNIFAWKPSDMPGIPREVIEHSLHVKEDAKPIKQRLRRFAQNRKDAIKEELTKLLAAGFIKEVLHPDWLANPVLVRKKTGQWRMCVDYNDLNKSCPKDPFGLPRIDQVVDSTAGCELLSFLDCYSGYHQIRLKESDCLKTSFITPFGAYCYITMPFGLKNDGATYQCMIQRCFSTQIGRNVEAYVDDVVIKTKQKDDLITDLEKTIASIRAFRMKLNPEKCTFGVPSGKLLGFMVSHRGIQVNPEKVNAILNMKPPSSQKDVQKLTGCMAALSRFVSRLGERGMPFFKLLKKTDNFQWGPEAQKAFEDFKKLLTTPLVLASPHPQEPLLLYVSATSQVVSTVLVVEREEEGHVQKVQRPIYFVSEVLADSKTRYPQVQKLLYGVLITVRKLSHYFQGHSVTVVTSFPLGDILHNREANGRIAKWALGLMSLDIPFKPRTSVKSQALADFVAEWTECQEDTPEEKMEYWTMHFDGSKRLSSTGAGVVLISPTGERLSYVLWIHFSASQNVAEYESRLRLGALTWSGRXRKAVGGYTHLFVAIDKFSKWIEAKPVITITADKARDFFINIVHRFGVPNRIITDNGTQFTGGVFKDFCEDFGIKICYASVAHPMSNGQVERANGMVLQGIKARVFDRLNPYAGKWVEQLPSVLWSLRTTPSRATGQSPFFLVYGAEAMLPSEVEFESLRFRNFREERYREDRVDDLHRLEEAREAALIQLARYLQGLRRYHNRNVRSRAFLVGDLVLRKIQTTRDRHKLSPLWEGPFIISEVTRPGSYRLKREDGTPIDNSWNIEHLRRFYA

SEQ ID NO: 181484 - protein, 917 aa, Oryza sativa
  unsure (1)..(917): unsure at all Xaa locations
  Clone ID: PAT_MRT4530_78753C.1.pep
MASSACPTPLLLLLLPLAAAAASLPPLPLSTASRWVVGADGRRVKLACANWASHLEPVAAEGLSRRGVGDIAARVAAMGFNCVRLTWPTYLATNATLASLPLRWSLERFGMRESVAGVRVNNPGLLDLPLIDVFQEVVSALARNNIMVILDNQMTTPGWCCSTTDGNGFFGDKYFDPEEWLNGLKTMATMFRKTKNVVGMSLRNELRGPYENVSLWYMKEGAESVHTANPDVLVILSGLEFDNTLNFVVPNQIHLSFTGKIKQYLVAFLKHQQCDLLTHPHSWPLHFTHVKDQQHSLGEIVVFRPWQSREASPFPMPKQPRRRSTRYKSTSPLLLLGVSHCRTAGVDMRLVVVWLAAVAVLGLASHGRPAAAAAATTLSTASRWIVDEGGNRVKLACVNWPSHLEPMLAEGLGKQPVGAIAKDVVAMGFNCVRLTWATFMVTNASYSSLTVAQSFQRLNLTESLAAIRVNNPSLVDLKLIDAFKARXFLGENGVMVILDNHVSKPGWCCGNNDGNGFFGDAYFDPDVWVDGLTKMATMFAAVPSVVAMSLRNELRGPRQNSADWYKYMQRGAEAVHAANPRVVVILSGMSFDNDLAFLNSRQVNVSFAGKVAFEVHWYGFSDGQAWRAGNANQVCARVAASVSRRALYLLDQGWPVFLSEFGVDNRGGNVNDNRYYGCVAAVAADLDLDWALWTLQGSYYLREGVLGLDEVYGVLDWAWCKPRNDTADWTSFXEHGPLRGPGLAEAAPYTVMFHPTTGRCVVRRSSSVVQTTLELGSCGEAEAWAYTASQQRLSPRDSPLLCLRAEGAGRPARLGLSCGDELARWSLTSDSKLHLAVNASSSSSSPETSNGGMLCLDVGDDGRSLVTNPCRCLSADNSCDPESQWFKLVTSTRSVAATNTMLAQLPPKLRSWKIRSL

SEQ ID NO: 181485 - protein, 956 aa, Oryza sativa
  Clone ID: PAT_MRT4530_78754C.1.pep
MARGSAPLDGSVLPPSRIVSERQAGLPRRFMPESATGREIVTLGEGHPAPRYPGRSVFFLPFAMAGLVPPFSSFFMDVLEFYDLQMAHLTPNAVMTLAIFAHLCEMFIGVRPSLRLFRWFFTVQPVSPPSVVGGCYFQPRGPVLNRYIPCVLRKKWDDWKSDCSVEASLIPQGVLPLCSDPDRANILTIMMAVGASEERAPKGHDGASGSRKGDQSTPGGGRASGPRDGGSGGSRPADARGKRKQEGTSSPSPPRGGGAARVSSRRPEGATPTPQPEGERKKKRLRKMGGTEPSRGNLISPPRWSFNRPLRSEIPSRPSCQSKSGQSEAENAATTEARRRESDRREAADRLREAEEAAREAARARQVEEAAREEARLRQAEATTSSEATREIDRQEAADRLREAEEAAQVAVRARQAEEAAREEARLRQAEATTTSEAARDEAAGASLGPTPSGDAQDKPGPGDVPESGTSIGGPSRAASSPRRLSPTPSAAPLSAEPLLQALAVANTTVLDGLSAQMEALQAERAELDAAWARVEEGRRSVEAMVEVGRKAHRRHASELEARRKVLGEIAREVEEERGAALIATTVMNEAQDDLRLQYVSWEAELGKKLDAARGVLDAAAARERRAAETEVASRRREEALEARAMAMVERACVVERDLADREATVAIREVTLAAHEAACAEEESALRLREDALIERERALEEAEAAAQRLAESASLREAALEEQARRNLEGARAERAALNQRAAELEAQARELDARARSGGAATGDSDLAARLAAAEHTIADLQGALNSSTGEVEALRLAGEIGPSMLRDAVSRLDRAGRQAGLWGGRTVKYAANQGGLAQRLSEMAGTLQRLPEELERTIKSSSRDLARGAVELVLASYQARDPDFSPWTALDEFPPGTEDGARAQVRDAANHIVHSFEGSAPRLAFALNSDEEDDDGGVGDSGDEAGDPGASE

SEQ ID NO: 181486 - protein, 1047 aa, Oryza sativa
  Clone ID: PAT_MRT4530_78755C.1.pep
MARGSALLDGSVLPPSRIVNERHAGLPRRFMPESATGREIVTLGEGRPAPDYPGRSIFFLPFAMAGLVPPFSHFFMDVLEFYDLQMAHLTPNAVMTLAIFAHLCEMFIGVRPSLQLFRWFFTVQSVSPPSVVGGCYFQPRGPVLNRYIPCVLRKKWDDWKSDWFYTPLADEARLRLPSQPPAQVSSWRAPVDLGEEYDAVLDRLAGLRSQGLTGAMVYGDYLRRRIAPLQRRARSAWEYTGPEDYMRTHQGARWDWAPEDFKIIVQRVLNLSSAEASRLPQEILPLCIDPDRVSILTIMLGVGASEERAPKGHDGAGERRRGEQPAPGGGRASGPRVGGSGSSRPADAQGKRKLGGTPPPSPPRGGGAARASSRRPEGAAPTSQPEGVRKKKRLRKTGETEPYRGNLISPPRWSFNRPPRSDVPSHSSRHPKSGQSEAEDPAAAEERRRESDRREAAARLREAEETAREAARVRQAEDAAREEAARARQAEEVAREEAARARQAEATAAAGASLGPTPSGGPQATSSEAARNEAAGASPGPTSPGDAQDQTGPGDIPEPSASSGGPSRVAFSPRRLFSSSSVAPVSAEPIMQALAAANTAVLDGFSAQVEALRAERAELEAAWARVEEGRRSVDAMVEVGRKAHRRHISELEARKAALAEIAREVEEEREAALVATTAMIEAQDSLRLQHGSWEAELKKKLNAAQEVLDAAAAREQRATEAEVALRWREDTLEARAMALEEHAGAVERGLADREAAAGLREATLAAHEAACAEEESTLRLREDALAERERSLEEAEATTQRLADSLSLREAAQEEQARRNLECVRAERAALEQRAADLEARAKELDARARVGGAAAGESDLAARLAAAEHTVADMQRALDTSTGESEALRLAGEMGPDMLWDSVSRMDRAGRQAGLWKGQTRMRPVNLEGLAPHLNRMAWVLERLPEELEKTIKSSSRDLARGAVELVLASYQARDPNFSPWMALEEFPPGTEDDARARVGDAADHIVNGFEGSAPRLAFAPSSDEEGDASGEDDGGDEAGDPGAFE

SEQ ID NO: 181487 - protein, 1808 aa, Oryza sativa
  unsure (1)..(1808): unsure at all Xaa locations
  Clone ID: PAT_MRT4530_78756C.1.pep
MGFVSGIDDFAFPPGQAFRFGSLNFITNDFGKISLLDSDSNQSGRDQSRHLPLEDLGELRLRPRSDLDPGRLALYSNLLGQSRRKSWMATSAPPASVLDQPRSSITMTSAATTTTATSTTSMTAMRITTRPSSSAYSWLTTKWRNSAKSEKRTKIAHGKKLNVADWRKSDSDKSENDYSEAEDRRQRALESGRRARELIGQQDVDGTAVFRTPQQNAVAAITLLDTLLKEDALNQDDHVVNILNQTKTMIAASIPANSASTRTPTGSRVPHLRSQDYHQPSLSIAGAGSSRKSRGHDERSVRSPPERYRERQVELLHSPHRRRPIDLRDTINQRRAARGHHSPDRYDDDVDGVAAFTSDLRRVDWPAGFKPTRIEKYDGTTNPESWLTVYGLAIRAAGGDSKAMANYLPVALXDSARSWLHGLPRGTIGSWAELRDHFIANFQXTFERPSTHFDLYNIVQKSGESLQDYIRHFSKQRNKISDITDDVIIATFTKGIRHEDLVGKFGRKPPKTVKQMFEKANEYAKAEDAITASKQSGTTWKLRKDTPTAGGSGSNNHKDRKRKPEELVATTSPSSRQRSRVNTFDKIMNSQCPHHPNSNHTAKDCFVYKQFAEQYVKNARKPSDEDQGTSKKKDDEDDAPTGFQDHRKELNHIFGGPLAYESKRKQKLTEREINVVQPNTPQYLQWSEIAIKFDRSDHPDRVVHPGQYPLVLDPVVRNVKLRRTLIDGGSALDILFSKTLDDMQIPRTELKPSNAPFHGVIPGLSATPLGQITLPVTFGTRENFRTENVCFEVADLETAYHAILGRPALAKFMAVPYYTYMMMKMPGPRGVISLQSDIKQAVTCDKESCEMAQTREITLAREEIRLAATMASEGEVPATKMPKSGESDAKTKKIPLDPSDPNKTSDRKDAIKEELTKLLAEGFIKEVLHPDWLANPVLVRKKTGQWRMCVDYTDLNKSCPKDPFGLPRIDQVVDSTAGCELLSFLDCYLGYYQIRLKESDCLKTSFITPFGAYCYITMPFGLKNAGATYQRMIQRCFSAQIGRNVEAYVDDVVVKIKQKDDLITDLEEAFASIRAFRMKLNPEKCIFGVPSGKLLGFMVSQRGIQANPEKINAILNMKPPSSQKDVQKLTGCMAALSRFVSRLGERGMPFFKLLKKTDNFQWGLEAQKAFEDFKKLLTTPPVLASPHPQEPLLLYVSATSQVPRTSIKSQALAXSSPSGLSAKKTCQRKRWNIGLCXFDGSKRLTGTGARVVLISPTGERLSYVLWIHFSASHNVAEYEALLHGLRIAISLGIRRLIVRGDSQLVVNQVMKEWSCLDDNMTAYRQEVRKLEDKFDGLELTHVLRHNNEAADRLANFGSKREAAPSDVFVEHLYEPTVPRKETIEAMDTQGVNMIEADWREPLIRFLTKQELPQDKNEAEQISRRSRLYVIHETELYKKSPSRILQRCVSLEEGRQLLKDIHSGICGNHAAARTIVGKTYRQGFFWPTAVSDADKIVRTCEGCQLFARQTHLLAQELQTIPLSWPFAVWGLDMVGPFKKALGGYTHLFVAVDKFSNWIEAKPVVTITADKARDFFINIVHRFGVPNRIITDNGTQFTGGVFKDFCEDFGIKICYASVAHPMSNGQVERANGMVLQGIKARVFDRLRPYASKWVDQLPSILWSLRTTPSRATGQSPFFLVYGAEAMLPSEVEFESLRFRNFREERYEEDRVDDINRLEEAREVALIQLARYLQGLRRYHNRNVRSRAFLVGDLVLRRIQTTQDRHKLSPLWEGPFIIAEVTRPGSYRLKREDGTLVSNSWNIEHLRRFYA

SEQ ID NO: 181488 - protein, 1046 aa, Oryza sativa
  Clone ID: PAT_MRT4530_78757C.1.pep
MARGSAPLDGSVLPPSRIVSERQAGLPRRFMPESATGREIVTLGEGRPAPRYPGRSVFFLPFAMAGLVPPFSSFFMDVLEFYNLQMAHLTPNAVMTLAIFAHLCEMFIGVRPSLRLFRWFFTVQPVSPPSVVGGCYFQPRGPVLNRYIPCVLRKKWDDWKSDWFYTPLADEARLRLPSQPPVQASSWRAPVDLGDGYDAVLDRLAGLRSQGLTGAMVYGDYLRRRIAPLQRRARGAWEYTGSEDCMRTHRGVKWDWVPEDFKVMVQRVLNLSSVEASLIPQGVLPLCSDPDRANILTIMMAVGASEERAPRGHDGAGGSCRGEQSTPGGGRASGPRDGGSGGSRPADARGKRKQEGTSSPSPPRGGGAARVSSRRPEGAAPTPQPEGERKKKRLRKMGGQNHPGETSFPLQSGRLTDPLAGSSHAHCGHIHSPNASFHSPILFVFWSFFCFSEISSRPSRHSKSGQSEAEDTATAEARRRESDRREAADRLPEAEEAAREAVQARQAEEAAREEARLRQAEAATTSEAARDEAADASLGPTPSGDTQDKPGPGDVPESGTSIGGPSRAASSPRRLSPMPSVAPLSAEPLLQALAVANTTMLDGLSAQMEALQAERAELDAAWARVEEGRRSVEAMVEVGRKAHRRRASELEARRKVLEEIAREVEEERGAALIATTVMNEVQDDLHLQYGSWEAELGKKLDAARGVLDAAAARERRATETETASRRREEALEARAMALEERACVVERDLADREAAVAIREVTLAAHEAACAEEESALRVREDALTERERALEEAEATAQRLAESTSLREAAQEEQARRDLEGVRAERAALNQRAAELEAQARELDARAHSGGAATGDSDLAARLAAAEHTIADLQGALNLSTGEVEALRLAGEIGPSMLRDAVSRLDRAGRQAGLWGGRTAKYAANQGGLAQRLSEMAGTLQRLPEELERTIKSSSRDLARRAVELVLASYQARDPDFSPWTALDEFPPGTEDGVRAQVRDAANHIVHSFEGSAPRLAFALNSDEEGDDGGVGDSGDEAGDPSASE

SEQ ID NO: 181489 - protein, 1720 aa, Oryza sativa
  unsure (1)..(1720): unsure at all Xaa locations
  Clone ID: PAT_MRT4530_78758C.1.pep
MGSVSGIDDFAFPPGQAFRFGSLNFITNDFGKISLLTRIRTSRGEIRSPRRSVFRTRPRPTPRSSLPSRLQTTRTRSNLLLRDQIKMXPRHLLLEDLGELRLRPRSDLDPGRLALYSNPLGQSRRKSWMATLAPPVSVLDQPRSSTTTTSATTTTTTTSTTSTTAMRITTRLSSSAYSWLTTKRRNNAEPEKWTKSAHGKKLNVANWRKSDSNRSENDYSVSNKIANGLXKEANSASARTPTGSRVPHLRSQDYHQPSLSIDGARSSRRSRGHDERSVRSPPERYRERRVERPHSPHRRRPIDLRDTINQHRAARGHHSPDRYDDDVDGVAAFTSDLRRVDWPAGFKSTGIEKYDGTTNPESWLTVYGLAIRVAGGDSKAMANYLPVALADSARSWLHGLPRGTIGSWAELRDHFIANFQGTFERPGTHFDLYNIIQKSGESLRDYIRRFSEQRNKISDITDDVIIAAFTKGIRHEDLVGKFGHKPPKTVKQMFEKANEAPVQSEEKAKKRRRSSMSRLVLLRNNRAGAPPTKCLNDRVKSELLIWDPMQPTAGGSGSNNHKDRKRKPEELVATTSPSSRQRSRVNTFDKIMNSQCPHHPNSNHVAKDCFVYKQFVEQYVKNARKPSDGDQGTSKKKDGEDDVPLGFQDHRKELIHIFGGPLAYESKRKQKLTEREINAVQPNTPQYLRWSEIAIKFDRSDHPDRVVHPGRYPLVLYPVVRNVKLQRTLIDGSSALNILFAKTLDDMQIPRTELKPSNAPFHGVILGLSATPLGQITLPVTFGTRENFRTENVCFEVADFETTYHAILGRPALAKFMAVPHYTYMMMKMPGPRGVISLRSDIKQAVTCDKESCEIAQTHEITLAREEIRLAATTASEGEVPTTKLSKTEEGDDKTKKIPLDPSDPTKTANNKDIFAWKPSDMPGIPREVIEHSLHVKEDAKPIKQRLRRFAQDRKDAIKEELAKLLAAGFIKEVLHPDWLANPVLVRKKTGQWRMCVDYTDLNKSCPKDPFGLPRIDQIGRIVEAYVDDVVVKTKQKYDLIADLEETFASIRAFRMKLNPEKCIFGVPSGKLLGFMVSQRGIQANPEKINAMLNMKPPSSQKDVQKLTDCMAALSRFVSRLGERGMPFFKLLKXLTISSGDPKHKKPLKTSKNFSLHQFWPRHIHKSRCCYTCRRPLRFGPSVKKTCQRKRWNIGLCXFDGSKRLTGTGAGVVLISLTGERLSYVLWIHFSASHNVVEYEALLHGLRIAVSLGIRRLIVRGDSQLVVNQVMKEWSCLDDNMTAYRQEVRKLEDKFDGLKLTHVLRHNNEAADRLANFGSKQEAAPSDVFVEHLYEPTVPRKETIEAMDTQGVSMIEADWREPLIKFLTKQELPQDKNEAKQISRRSRLYVIHETELYKKSPSGILQRCVSLEEGRQLLKDIHSGICGNHAAARTIVGKAYRQGFFWPTAVSDADKIVRTCEGCQFFARQTHLPAQELQTIPLSWPFVVWGLDMVGPFKKAVGGYTHLFVAVEKFSKWIKTKPVVTITADKARDFFINIVHRFGVPNRIITDNGTQFTGGIFKDFCEDFGIKICYASVAHPMSNGQVERANGMVLQGIKARVFDRLRPYAGKWVEQLPSVLWSLRTTPSRATGQSPFFLVYGAEAMLPSEVEFESLRFRNFREERHEEDRVDDINRLEEAREAALIQSARYLQGLRRYHNRNVRSRAFLVGDLVLRRIQTT

SEQ ID NO: 181490 - protein, 275 aa, Oryza sativa
  Clone ID: PAT_MRT4530_78759C.1.pep
MVSRGTFVFAVLVALPILSLPVSGYEQNYTAGRRSTMSLGRGYGWSSGGATWYGGPQGDGSEGGACGYQSAVGQRPFSSMIAAGGPSLFKNGKGCGSCYQIKCTGNRACSGRPVTVVITDSCPGGVCLNEAAHFDMSGTAFGAMANRGMGDRLRSAGVLKIQYKRVPCRFAMNVAFKVDAGSNPYYLAILVQYANGDGDLAAVHIMKARGGGGWKAMQQSWGATWRLNSNTGKPLSPPFSIRLTSGSGKVLVANNVIPSGWQAGLTYRSTVNYAA

SEQ ID NO: 181491 - protein, 1707 aa, Oryza sativa
  unsure (1)..(1707): unsure at all Xaa locations
  Clone ID: PAT_MRT4530_7875C.1.pep
PGLEWYIPGLEIELCSQXGCSESLGLCNGMPRFKPEYLFGVEGFVQELRTMSFTIGFGTAPLYAQIPHDRDKEKCCVKVTLNSDREDLPSVIFEAGGGSYPHACQEVARIAIGELXDRYNDLLADTEYRYHPHQPQGRDRASYVDPEGIENDASTRHLVEMLWAMDESHAEVVSATQAREDRNHGKIYKLEDKVDRLEKELTELKGEAPPQKARVRLTARKRALFIPRYQLVPKMVNTCSNGNGPNNNNNNNKXEIPTLAQVLAQQAQLMNMMMQQLQNQQNXGNNHAPPQNKLAEFLRVRPPTFSSTTNPVEAGDWLHVIEKKLDLLQGTNQEKVSFASHQLHGPASKWWDHFRLNRATAEPITWLEFTAAFRKTHVPSRVVSLKKKEFRALTQGSRSVTKYMHEFNRLARYAPEDVCTDEERQEKFLEGLNDELSYPLMTRDYSDFQKLVDKAIRQEDKYNRMEQKKRRIAHFKAQQRNSQRSRLTMGPQAVSQGGSSSVVRPQRQFFNNNAGNNNRNQAPRPVATPVQHQPVKREQGNKPGVCFNCGEAGHYSDKCPKPRRVKIVPVQNNSNAPTSKARVNHVAAAEAQGAPDVILGMFPVNSVPATVLFDSGATHSFLSMSFAGNHGMEMEDLRRPLMVSXPSNQGLSSQRSPSVRIEIQGVPFLANFILLESKDLDVILGMDWLARYKGVIDCDNSKVTLTSNDGQVVTVHALPTEPLRSSLNQITLEEIPIVRDYPDVFPDDLPGMPPKRDIXFRIDLVPGTTPIHKRPYRMAANELAEGXIKRQVDDLLQKGYIRPSSSPWGAPVIFVEKKDHTQRMCVDYRALNNVTIKNKYPMPRIDDLFDQLKGATVFSKIDLRSGYHQLRIKEEDIPKTAFTTQYGLFECIVMSFRLTNAPAFFMNLMNKVFMEYLDKFVVVFIDDILIYSRTKEEHEEHLRLALEKLREHQLFAKFSKYEFWLSEVKFLGHVISARGVAVDPSNVESVTNWKQPNTVSEIRSFLGLAGYYRRFIENFSKIAKHMTRLLQKDVKYKWSKECEQSFQELKNRLISAPILILPDPKMGFQVYCDASKLGLGCVLMXDGKVVAYASRQLCPHEKNYPTHDLELAAVVHALKIWRHYLFGTHTEVYTDHKSLKYIFTQPDLNMRQRIWLELIKDYDMGIHYHPGKANVVADALSRKGNCNATEGRQLPWELCKEFERLNLGIVSRGFVAALEAKSTLIDXEAQTNDPDIQEIKKNMRRGKAIGYLEDEQGTIWLGERICVPDNKELKGTVLKEAHDTLYSIHPGSTKMYQDLMEKFWWASRKREIAEYVAVCDVCQRVKAEHQKPAGLLQPLKIPEWKWEEIGMDFITGLPRMSSGHDSIWVIVDRLTKVAHCIPVRTTYSGNRLAELYMARIVCLHGVPKKIVSDQASQFTSKFWKKLLEEMASKLNFSTSYHPQTDGQTERVNQILEDMLRACVLDFDGSCYKNLPYAEFSYNNSYQASLQMAPYEALYGRKCRTPLLWDQTGERQVYGTDILREAEEKVKIIQERLRIAQCRHKRYADNRRRDLSFEKGDHVYLRVTPLRGVYRFHTKGKLAPRFVGPYKIVSRRGEVAYQLELPQSLAGVHNVFHVSQLKXCLRVPTEEANPEQIEIQEDLTYVEKPIRILETDERRTRNRVIRFCKVQWSNHSEEEATWEREDELKSAHPHLFASSSESQGRDSV

SEQ ID NO: 181492 - protein, 583 aa, Oryza sativa
  unsure (1)..(583): unsure at all Xaa locations
  Clone ID: PAT_MRT4530_78760C.1.pep
MARGSAPLDGSVLPPSRIVSERQAGLPRRFMPESATGREMVALGEGRPAPDYPGRSVFFLSFAMAGLVPPFSNFFMDILEFYDLQMAHLTPNAIMTLAIFAHLCEMFIGVRPSLRLFRWFFTVQPVSPPTVVGGCYFQSRGQVLNRYIPCVLRKKWDDWKSDWFYTPLADEARLRLPSQPPAQASSWRAAVDLGDGYDAVLDRLAGLRSQGLTGAMVFGDYLRRRIALLQRRARGAWEYTGPEDYMRTHQGRKWDWDPEDFRMVVQRVLNLSSVEASLIPQGVLPLCCDPERANILTIMQEVGASGERAPRGHDGAGGSRRGEQSSPGGGRASGPRDGGPGGSRPADARGKRKQEGTPPPSPPRGGGAVRASSRRPEGAVPTPQPEGERKKKRLRKMGGTESCRGNLISPPRWSFSRPPRSEIPSXPPRHSKSGRSEAEETATAEARRREADRREAADRLWEAKEAAQEAVRXAARARQAACQTPDPTPPEATTTSEATHDEXAGAPLGHDPSGDAWDEPASGDAPESGTSIGGPSRAAPTPRRLSPLPSAAPLSAEPLLQASAAANNTVLDGLSAQMEALQA

SEQ ID NO: 181493 - protein, 397 aa, Oryza sativa
  unsure (1)..(397): unsure at all Xaa locations
  Clone ID: PAT_MRT4530_78761C.1.pep
MEPEGGVRLPTLDRVRRGVRSSCDTESWECFQCGSINLPVEKLLFDLPAFHCRGCEAPFLGEMNFCYDLVKANKRSLIGGLDNIKNQYDNPECIAYSIASCLEIADRIKTVLQGKNPDSVKEIDPTAIVDMFDGKCLANCSDGTSGIGKLVTMALAVQTDGIQSXADHSRLYTAVAVETIDKYDFEGICATLADGIPLVGAFYCGSRLEKLEYCQIYRVPKLSKFLDRNLIPTGHAAVIIGAGMRCGIQYLYFLNSWGNFFCPRYDKDGNLVKAGVGKLRFYDLLCNPIMFITDSAKRVGLNRQLLPMGTGKLSDHNKSMLMGRKQTDVIPEDLSIGVTSEFVGNQPQXISSKRKMANATLDGDGQTQKRNKCRTFGRSSVDLNEANNKRNAKEDEM

SEQ ID NO: 181494 - protein, 44 aa, Oryza sativa
  Clone ID: PAT_MRT4530_78762C.1.pep
SLSCYHLPSYLKTSMLNLSLCSEDHLIERDTLMWKRVAEGLVQE

SEQ ID NO: 181495 - protein, 41 aa, Oryza sativa
  Clone ID: PAT_MRT4530_78763C.1.pep
MVADEENGNGWVGEQEEILSREGQLRQLSNVLESAKDKKSC

SEQ ID NO: 181496 - protein, 93 aa, Oryza sativa
  Clone ID: PAT_MRT4530_78764C.1.pep
LDYWHSASSFLTVIYCAAASCRLRLSLQTPARHDQRARIDRFVVHRLPHIAAVDGDQSCRRLHGYLMVAGSFPSVCLRYVCFVLQLHNQAADA

SEQ ID NO: 181497 - protein, 114 aa, Oryza sativa
  Clone ID: PAT_MRT4530_78765C.1.pep
MQGCFPFRSTHRRQPLRHGGGGGVTVVVSRGGGGGGAARVKIVVGEDELDRIAAGVTRRQCAVGSPELLQQQARATEVAAAPMPMRRPESEGGALVAGRRGEWQPALDGIPEEA

SEQ ID NO: 181498 - protein, 37 aa, Oryza sativa
  Clone ID: PAT_MRT4530_78766C.1.pep
AVDAVLLGSCSLVCYAPRHSPAQPVTLCGPEQASSKF

SEQ ID NO: 181499 - protein, 358 aa, Oryza sativa
  unsure (1)..(358): unsure at all Xaa locations
  Clone ID: PAT_MRT4530_78767C.1.pep
FFSPKNXGGFFFFWGFFXKXFXKGAPKXGKXFSPPPPXWGXKGFFFGXLKNPFFFXRGFXKKPPKGGKXXGXPLGEKKGVLGAPFGVFPGGKKIFPPPQKXPPPFSPKRGPKXPPXKGAXKXXXKXRXXFFPXIFFXPKXXXPPXGKXXKGGXFXXPXGPPPQKGXLFPQKKFFXXKXKGGXXXFXWGXFGFSXKKKNPPQXXFGXVLKGXXXFFPXKXXGXPXXXXIXGGFXQXXXXKGGVXNXLXPXXXIXXXKXPFFSPPPGGKTVGXFLXKFPXXGGXKPPPLWGXKXPXKXXXREXRFXLFSQREXPXKGFXXGGALFGGXSPXNPKVWEPFPGFXXPEKXGXGPRPKRPPPQ

SEQ ID NO: 181500 - protein, 271 aa, Oryza sativa
  unsure (1)..(271): unsure at all Xaa locations
  Clone ID: PAT_MRT4530_78768C.1.pep
TPGDTPSNPSRRRLASPPPPXAQPPPHPPPPPPPPLPPPRXPPSPLPPLPRXPSPGAPPPAHAAAAXPSPLAADVRIRPPMCLGDADXPPQRRPPLSSPSPSVAAXPSPHLRPPPQPASPPLAPPSPTRAIRKPPPPHGLQEPPSSCPPRTNPPPRPQPXPPPPASPPPSPLTPPAPAPPQPXPPPQSPPPSRPTRALPLPLTPPPPPRSFPSPRPPRTSPPWAPARGRGGWTTPPCSLPSRRARAPSPSPLRRGPCSRLPRSPEEVAGSR

SEQ ID NO: 181501 - protein, 102 aa, Oryza sativa
  Clone ID: PAT_MRT4530_78769C.1.pep
PPPQSPPPSRPTRALPLPLTPPPPPRSFPSPWRREATWRRWLSSRRPPRTSPPWAPARGRGGWTTPPCSLPSRRARAPSPSPLRRGPCSRLPRSPEEVAGSR

SEQ ID NO: 181502 - protein, 154 aa, Oryza sativa
  Clone ID: PAT_MRT4530_7876C.1.pep
MENQGSRFRRAPSSLVLRVATTALPESHMVCGEEFRIKILKFQYFGEPTARFSETGPDETRFGTQIVGDFGETTTAVVTWQNDLRQQGSVMQENSSMAHGLAVPPAIDVWGDGGSLGASWAPVGGWWWGARTVVACSEVLRMVAADGNNEDATI

SEQ ID NO: 181503 - protein, 199 aa, Oryza sativa
  Clone ID: PAT_MRT4530_78770C.1.pep
MPRKPKVSSARFVHGGVRRGRENASSRGPSTKRCSAEEKLERPSTKGYLYPKPTQVKEVGELMTGKPATVTITVLSLGGRRRRPPSGGARAISEIPLWKSSDSNLVSDPRAKGQSQAEGSLTARLTHRAETKVGLSDPTVPSGRVHIDGKVWHLDVGSSPPGAVGGSKGWAVRPLMRYVSWVQNVVRQFGPYPVWALEH

SEQ ID NO: 181504 - protein, 142 aa, Oryza sativa
  Clone ID: PAT_MRT4530_78771C.1.pep
MEAVALRQAQPSAAFASALSGGPHCQYAPRPCCRRLRSMSSTTASFPPLWSLELEAGEVAMGGDGRGGIVVAVGEQLARVVVGAVPHHRFASCAAATARRERVGRRDDVDLFRWSSSPLCDMDGRRGNDDEVSGDRDRNGAR

SEQ ID NO: 181505 - protein, 604 aa, Oryza sativa
  Clone ID: PAT_MRT4530_78772C.1.pep
MATTTAERDGVEEEQKKRKQGGFRTMPFILANEICDRFATAGFGANLITYLTQQLHLPLVEASNTLTNFNGTSSLTPILGALAADAFAGRFWTIIAGSVFYQLGMLALVASALLPSLRPAPCAPTHGAASCRRATGWQLAVLYLALLCTSLGSGGIRPCVVAFGADQFDGQQQKQRQKGGGGAAAAAAGRKRSYFDLYFFTMGLAVLLALTVVVYIQENVGWGWGFGIPAIAMFVSIVVFVAGYPLYVRLKPGGSPFTRLAQVVAAAFRKRRAAVPEDPGMLYQDKELDALISTNGRLLHTNQLTFFDRAAIVTPGDIAGSGEPDLWRLSTVHRVEELKSIVRLLPIWSAGILLATAASHNGTFTIQQARTMDRHLTPRLEIPPATMSIFTTVAMLAGLALYDRAFVPLARRVTGLPSGITYFQRMAIGLGISILGVASAALVEVRRRGAAADHGLLDSPAAVVPISVFWLVPQYAVHGVAEAFSSVAHMEFLYDQAPESMRSSAAALFWLSSSLGNYMGTVLVTAVQRATRGGGEWLQDNINRGRLDCYYWLVTTLMVLNLGYYLVCFHFYTMKPLEVAEEDDDEKECELSSVHKNGGPGGLV

SEQ ID NO: 181506 - protein, 310 aa, Oryza sativa
  unsure (1)..(310): unsure at all Xaa locations
  Clone ID: PAT_MRT4530_78773C.1.pep
MSWWHVGARERVVGLCLKCSASERKMELEDQGSDPMSVSAQQSAFAVGVLSDLNAFHRFTGNSLCPYQLADAYSSDTVIVSSPRKEVDDPSLGHVSVPVWLIILSDQLLIIALARTDDFHHVKVSMKKILFSMFYSILVGEEPDSLVFGTEWKKGGDSRMRKRIPLKELNEEPYEEKLERPSTKGYLYPKPTQVKEVGELMTGKPATEAPVNAARNYTGXKVAKFLVGLGGKRRRPPSGGARAISEIPLWKSSDSNLVSDPRAKGQSQAEGSLTARLTHRAEMKVGLSDLTVPSGRAVAQRIKVTLGITC

SEQ ID NO: 181507 - protein, 150 aa, Oryza sativa
  Clone ID: PAT_MRT4530_78774C.1.pep
MPRKPKVSSARFVHGGVRRGRENASSRGPSTKRCSAEEKLERPSTKGYLYPKPTQCRKVKEVGELMTGKPATEAPVNGGRNYNGPKVAKFLVGLGGRRRRPPSGGARAISEIPLWKSSDSNLVSDPRAFPAQLRWKAKKAPFRGGPSHHN

SEQ ID NO: 181508 - protein, 90 aa, Oryza sativa
  Clone ID: PAT_MRT4530_78775C.1.pep
TWGRLAPPKLGPKMGSIARPVFLVLGGPLVNERVCARCMVILWSCARLVFCCEKKRLYVVQGLSQGVWLITLTGGATLNAPPAIMNGRPF

SEQ ID NO: 181509 - protein, 757 aa, Oryza sativa
  unsure (1)..(757): unsure at all Xaa locations
  Clone ID: PAT_MRT4530_78776C.1.pep
MASLLTLPSLSLSNPSASAAAAGAGAAPSLRLRAAFRCWALRRAGGGRWAAAGAIASPNSVLSEHAFKRLQLSDEEEEEEEGAYGSDEEGVEAVGGGEGDEDELAIARLGLPEQLVSTLEKRGITHLFPIXVRAVLIPALDGRDLIARAKTGTGKTLAFGIPMIKQLMEEDDGRSVRRGRIPRVLVLAPTRELAKQVEKEIKESAPKLSTVCVYGGVSYNVQQNALSRGVDVVVGTPGRIIDLINGGSLQLGEVKYLVLDEADQMLAVGFEEDVETILQQLPAERQSMLFSATMPGWVKKLSRRYLNNPLTIDLVGDQDEKLAEGIKLYAIPLTSTSKRTVLSDLITVYAKGGKTIVFTKTKRDADEVSLALTNSIASEALHGDISQHQRERTLNGFRQGKFTVLVATDVAARGLDIPNVDLIIHYELPNDPETFVHRSGRTGRAGKAGTAILMFTNSQRRTVRSLERDVGCRFDFISPPAIEDVLESSAEHVIATLRGVHTESIQYFIPAAERLQEELGPNALASALAHLSGFSQPPSSRSLISHEQGWVTLQLTRDPGYGRGFFSPRSVTGFLSDVSSAGXSADEVGKIFLTADEKVXFDLPEERDICATDIHFKFGNKIKKKKLPALQDDGPATDSYGRFSNSDRGFRNRRSRGGGSRGGRGGWDSDGEDRFRRGGRSFRSDNDSWSDDDFGGGRRSNRSSSFGGRGSSYGSRSSSSFGGRSSSFGSRDSSRSFSGACFNCGESGHRASDCPNK

SEQ ID NO: 181510 - protein, 100 aa, Oryza sativa
  unsure (1)..(100): unsure at all Xaa locations
  Clone ID: PAT_MRT4530_78777C.1.pep
WVFGIVGSAPAWQRHQRRSSRRCTTSQCWKIVPXGGEAYVGGSANAPRNDSVPTVRIFYKAHEGFSITIFKICRADEGCCFASPVVASWAPGHHPPLKYQ

SEQ ID NO: 181511 - protein, 361 aa, Oryza sativa
  Clone ID: PAT_MRT4530_78778C.1.pep
MKYCVSSVAAARNWKTGTVAASIQTRRGINCLALRLAGGGRLEQEQKDGRRCSRYPGEETRSALNRAVGEAESRVCAWSQAICILVTQRREPGRANRSIPRSSTWHPSGAGCRRSALQRQRANELFNDGTNQGDGASMMAGLGFHPPLITCKFMADAPMLYHCSTSADMWNHCTGAPVGQHSCAEDHATPPGHSYSHRGRLIYRRPRLIAPCRPPPPPDAPLALVQSPAIDRASRSHIRTTSIFSSQFNHTNMFSKFNGAYAAPKLSGSLRRWKGVGDAGRAPWHRRWPWCTSYWTPGSTARCVRNSELRVRGKLRRRRFTGLTRTSSRFMLTWFFTKSVSRIRIRTTSNFTSEFSHHTNV

SEQ ID NO: 181512 - protein, 521 aa, Oryza sativa
  unsure (1)..(521): unsure at all Xaa locations
  Clone ID: PAT_MRT4530_78779C.1.pep
MADVEGQQPRXVSAVFRVQDRFANVSLGKVPEPGSVLWTDGLLSPCELIKGHTQLVRHISWPTVDSMQKXEVRVDIKREMSIDGRCGACMRLAERDVVENPRQAQFANNPSLFKHMTLHVRAILKNKLLTXYGERSCARKRALDRRAHLFFRPXERIARRCVYTIDDLRFIACRRKRSLSIGGGLQVEMGGISDGMQNHEEEDVPIVRQSXLAQNSLLTAMHVKGPSSNINVIRVAGGGVVFSVIAGLFRINADGVTGPQNTPYAFGDYTVLLFFVGFVLIGVGLIYLGFHNPVTHEKDKVRKIELQIILNQEIRRLATQVIRVKWSLHAREEIIIELLRHLRGNTTRVILDSIRKDTREMLEEQEAVRGRLFTIQDVMQSTVRAWLQPGFALLQDRSLRITHNLAIFGGGGMVLSIITGLFGINVDGIPGAQNTPYAFGLFAGLLFFVGFVLIGVGILYLGLQNPVTNEKVKVRKLELQDLVSAFQHEAEQHGKVREGLSRHSSSPKSSSASNVDYVLIS

SEQ ID NO: 181513 - protein, 464 aa, Oryza sativa
  Clone ID: PAT_MRT4530_7877C.1.pep
MEAESRKLLLALAVSLCCFVAASRAQSYIGVNYGEVADNLPAPEETAKLLKSTTISKVRLYGVDPGIMRALAGTGISLVVGVANGDIPSLAADPAAASRWLAANVLPFVPASTISVVAVGNEVLESGDASLAAALLPAMQNLRAAAAAAGDGAARIKFSTVNTMAVLAQSDPPSTGAFHPDISPQLTQILGFLSKTTAPFMINPYPYFAYQSDPRPETLAFCLFQPNAGRVDAGSKIKYTNMFDAQVDAVKSALGRAGYGDVEIVVAETGWPTRGDAGEAGATADNARAYVSNLVSHLRSGAGTPLMPGKPVDTYLFALYDEDLKPGPTSERSFGLYHTDLTMAYDAGLTSSSGGAASPSNGGASQQQPRGGGGGWCVASAGATEADLQADLDYACAQVGVDCGAIQAGGACFEPNTVRAHAAYAMNQLYQAAGRHPWNCDFRSSATLTSDNPSYGSCVYTGGQ

SEQ ID NO: 181514 - protein, 136 aa, Oryza sativa
  Clone ID: PAT_MRT4530_78780C.1.pep
KITNAFKDLPDTKRILRELCLLPQLCHPHLIQLYNIVRPARLSALDDIYLVTDLMEMDLHRVIHSSQTLSDGHVAYIMRQIFRALRYLHSADILHRDLKPSNILITSTCHIKLCDLGLSRYVNFATPTEQNFVPLT

SEQ ID NO: 181515 - protein, 115 aa, Oryza sativa
  Clone ID: PAT_MRT4530_78781C.1.pep
MCWGPARREQTSSDACSEEAVVDPAVVGCTSRGSSGVEACGRRIPWRRVGDGNTTVVSRTVGRLASFGAELSPLVLCVSASSFLRARDAVARPPHAGEVAIVPALTTLTGDTINE

SEQ ID NO: 181516 - protein, 1013 aa, Oryza sativa
  Clone ID: PAT_MRT4530_78782C.1.pep
MARGSALLDGSVLPPSCIVSERQAGLPRRFMPESATGREVVALGKGCPAPDYPGRSVFFLSFAMAGLVPPFSIFFMDILEFYDLQMAHLTPNAIMTLAIFAHLCEMFIGVRPSLRLFRWFFTVQPVSPPTVVGGCYFQPRGQVLNRYIPCVLRKKWDDWKSDWFYTPLADEARLRLPSQPPAQASSWRAAVDLGDGYDAVLDRLVGLRSQGLTGAMVFGDYLRRRIAPLQRRARGAWEYTGPEDYMRTHQGRKWDWDPEDFRMVIQRVLNLSSVEASLIPQGVLPLCCDPERAKILAIMQVVGASGERAPRGHDGAGGSRRGEQSTPGGGRASGPLDGGPGGSRPADARGKRKQEGTPPPSPPRGGGAVRASSRRPEGALPTPQPEGERKKKRLRKMGGTEPCRGNLISPPRWSFSRPPRSEIPSRPPPLPPRHSKSSRSEAEETATAEARRREADQREAADRLREAEEAAQEAVRVRQAEEAAREEARLRRAGESVREAEAARARQATCQAPDPTPPEATTTSEATHDEAAGAPLGPDPSGDAWDKPASGDALESSSSIGGPSRAAPTPRRLSPLPSAAPLSAEPLLQALAAANSTVLDGLSAQMEALQAERAELDAAWARVEEGRRSVEAMVEAGRKAHRRHASQLEARRRDLAEIAREVEEERETALIATAVLDEARDDLRLQYGSRAAELEEKLDAARGVLDAAAARERRAAENEAASRQREEALEARATALEERAHALDVKERDLADREAAVATREATLAAHEAACAEEESGLCLREDALTERGQALEEAEAAAQRLADSLFLREAAREEQARRNLEGARAERAALDQRAAELEARAKELDARAHSGGAAAGHGDLAACLAAAEHTIAELQGALDSSAGEVEALRMASEGGLAQRLSEMAGALERLPEELEETIKSSSRDLARGAVELVLASYQARDPDFSPWAALEEFPPGTEDGARAQVRDAADHIVHSFEGTAPRLAFALDSDEEGGDDGADDSDDEAGDPGASE

SEQ ID NO: 181517 - protein, 124 aa, Oryza sativa
  Clone ID: PAT_MRT4530_78783C.1.pep
MASSSSPPLLLLVSLLAAVAAAFLAAQALAQHQPQGNDTAAAGEGWRPRLRKTYVEGGAAGMVPRRRRLVGRFQICAVCTCCGGPHGVCIPAPCCYAINCNIPNRPFGVCSFTPRTCNCLNCHL

SEQ ID NO: 181518 - protein, 1047 aa, Oryza sativa
  unsure (1)..(1047): unsure at all Xaa locations
  Clone ID: PAT_MRT4530_78784C.1.pep
MARGSALLDGSVLPPSRIVNERHVGLPRRFMPESATGREIVMLGEGRPAPDYPGRSIFFLPFAMAGLVPPFSHFFMDVLEFYDLQMAHLTPNAVMTLAIFAHLCEMFIGVRPSLQLFRWFLTVQSVSPPSVVGGCYFQPRGPVLNRYIPCVLRKKWDDWKSDWFYTPFADEARLRLPSQPPAPVSSWRAPVDLGEEYDAVLDRLAGLRSQGLTGAMVFGDYLRRRIAPLQRRARSAWEYTGPEDYMRTHQGARWDWAPEDFKIVVQRVLNLSSAEASRLPQEILPLCIDPDRVSILTIMLGVGASEERAPKGHDGAGESRRGKQSAPGGGRASGPRVGGSGSSRPADAPGKRKLGGTPPPSPPRGGGAARASSRRPEGAAPTSQPEGVRKKKRLRKTGETEPCRGNLISPPRWSFTRPPRSDVPSHSSRHPKSGQSEAEDPAAAEERRRESDRREAAARLREAEEAAREVARVRQAEETAREEAARARQAEEAAREEAARARQAEATAAAGASLGPTPSGGPQATSSEAARDVAAGASPGPTSPGDAQDQTGPGDIPELSASSGGPSRVAFSPRRLFSSSSVALVSAEPIMQALAAANTAVLDGFSAQVEALRAERAELEAAWARVEEGRRSVDAMVEVGRKAHRRHISELEARKAALAEIAREVEEEREAALIATTAMVEAQDTLRLQHASWEAELKNKLDAAQGVLDSAAVRERRATEAEAASRRREEALEARAMALEEHAGTVEKGFTDREAATALREATLAAHEAACAEEESALRLREDALAERERALEEAEATTQRLADSLSLREAAQEEQARRNLECVRAERAALEQRAADLETREKELAARARIGGAAAGENDLAARLAAAEHTVADMQRALDSSTGEVEALRLAGEIGPDMLWDAVSRMKRAGRQAGLWRDQTTVPPTNLEGLAPHLNRMAWVLERLPEELEKTIKSSSRDLARGAVELVLASYQARDPNFSPWMALEEFPPGTEXDARARVGDAADHIVNGFEGSAPRLAFAPSSDEEGDASGEDDGGDEASDPGAFE

SEQ ID NO: 181519 - protein, 641 aa, Oryza sativa
  Clone ID: PAT_MRT4530_78785C.1.pep
MPCARAEDALPSAAIAALEMPSSAAAAAAAGGLIQKVGGGRRSGGSGRALHRSAHLSAEDDGHAPPPASCSKDDKIGGGGKREGSQRSRMRKYRSQLEQEVKKLQRQLEEEIDLHVALADAVMQNAGPVLNSSVKIPYKAQELLTNIASLESAVSKLEKDLNELYYQLCHERNERLLAESKPGCLPSTSPDHSLSTCTCTWEEHISSLRDLKFGGSESMRSTQQDLYSELEYEQDVGEDPEERQMVSLNRLFEKHRDVSLNRLLEKHRDEEMQESCSTDKEGEEDEKIDTLSFEQSILKITSMKLGNLWNNPNQLSEEMVRCMRNIFLRLSESSKMLPKESSDCSSSSAERLSGSTLASFSDSSIIPSMLRSPSVDSNRNDEMTTEASNFDPYKVNGKESRRDIGNYHSAAEVSWMSVGKEQLEYASEALKKFRFLVEQLSKVNPNSMNCDERLAFWINLYNALIMHAYLAYGVPRNDIKLFSLMQKSLMLALNKFKITEEHKKYSIDGTEPLVLFGLSCGMFSSPAVRIFSAANVRQELQESLRDYVQASVGISDRGKLLIPKLLQSYAKGNVEDSLLADWICHHLTPDQVAVIRDSSSQRKQRLLGARSFTVVAFDSKFRYLFLPDSSGSQKPEPKRTS

SEQ ID NO: 181520 - protein, 887 aa, Oryza sativa
  unsure (1)..(887): unsure at all Xaa locations
  Clone ID: PAT_MRT4530_78786C.1.pep
MARGSAPLDGSVLPPSRIVSERQAGLPRRFMPESATGREVVALGEGRLAPDYPGRSVFFLSFAMAGLVPPFSNFFMDVLEFYDLQMAHLTPNAIMTLAIFAHLCEMFIGVRPSLRLFRWFFTVQPVSPPTVVGGCYFQPRGQVLHRYIPCVLRKKWDDWKSDWFYTPLADEARLRLPSQPPAQASSWRETVDLGDGYDAVLDRLAGLRSQGLTGAMVFGDYLRRRIAPLQRRARGAWEYTGPEDYMRTHQGRKWDWVPEDFRMVVQRVLNLSSVEASLIPQGVLPLCSDPDRANILIIMQAVGASGERAPRGHDGAGGSRRRKQSTPGGGHASGPRDGGPGGSRPADARGKRKQEGTPPXSPPRGGGAVRASSRRPEGAVPTPQPEGERKKKRLRKMGGTXHAGGTSSRLRGGRLADLPAARSRRAPPPFQVRPAEEAAREEARLRRAGESVREEEAARARQAACQAPDPTPPEATTTSEATHDEAADAPLWPDPSGDAWDEPASGDAPGSGTSIGGPSCAAPTPRRLSPLPSAAPLSAEPLLQALAAANTTVLDGLSAQMEVLQAERAELDAAWARVEEGRCSVEAMVEAGRKAHRRHASELEARRRDLAEIAREVEEERETALIATAVLDEVRDDLRLQYRSRAAELEKKLYAARGVLDAAAARERRAAEIEAASRQREEALEARATALEERARALDTKEKDLAGREAAVATREATLAAHEAACAEEESALRLREDVLTERGRALEEAEAAAQRLADSLFLREAAREEQARHNLEGAHAERAALDQRAAELEARAKELDARAHSGGAAAGDGDLAARLAAAEHTIAELQGALDSSAGEVEALRLANEVGPGMLRDAVSRLDCAGRQAGLWGGRYAKYAANQGGLA

SEQ ID NO: 181521 - protein, 110 aa, Oryza sativa
  Clone ID: PAT_MRT4530_78787C.1.pep
MGELPKMDLEFRRLVDEEEELNEDGGCGRGDRAPRGAVGLPLLLLEMWSAATASLSRSPTAAPARHRARPPPLQSHVRPPSLRPPPADHRRARLPPAASLLNKEEKIEKK

SEQ ID NO: 181522 - protein, 897 aa, Oryza sativa
  Clone ID: PAT_MRT4530_78788C.1.pep
MGSVSGIDDLVFPSGQAFRFGSLDFITNDFGKISLLDSDPNQSGKNQVSVPFGITNSAKIYSKLISIESASNHSDEIPSTPTPPDQDDGAYPPILMKLPDDLAAIFTTRASSPRRPRRKSASTPILPSSREVGVILQPLGMISTDQLEGYFSSPGVDSRPTEIVEYDEFGYRYDNRDLDDFDESFEDNYTPLYFGVFMADNETEEQRQAPGFKPTGIEKYDGTTNPESWLTVYGLAIRAAGGDSKAMANYLPVALADSARSWLHGLPHGTIGSWAELRDHFIANFQGTFERPGTQFDLYNVIQKSGESLRDYIRRFSEQRNKISNITDDVIIAAFTKGIRHEDLVGKFGRKPPKTVKQMFEKANEYAKAEDAIIASKQSGPTWKPKKDVPTTGGGGSNNHKDCKRKPEELVATTTHSSRQRSRVNTFDKIMNSQCLHHPNSNHAAKDCFVYKQFAEQYAKNARKTPDGEQSTSKKKDDDDDAPTGFQDHRKELNHIFGGPLAYESKRKQKLTEREINDVQSDTPQYLRWSEITIKFDRSDHPDRVVHPGRYPLVLDPVVRNIKLRRSLIDGGSALNILFAKTLDDMQIPRTELKPSNAPFHGVIPGLSATPLGQFTLPVTFGTRENFRTENISFEVTDFETAYHAILGRPALAKFMAVPHYTYMMMKMPGPRGVISLRSNIKQAVTCDKESCEMAQTREIAIAQEDIRLAATTASEGEVPTAKISKSGESEAKTKKIPLDPSDPTKTAVIGAELDYIFAWKPSDMPGIPREVIEHSLHVKEDAKPIKQRLRRFAQDMKDAIKEELTKLLAAGFIKEVIHPDWLANPVLVRKNTGQWHMCVDYTDLNKSCPKDPFGLPRIDQIRLKESDCLKTSFITPFGAYCYFTMPFCNAPIFVRD

SEQ ID NO: 181523 - protein, 141 aa, Oryza sativa
  unsure (1)..(141): unsure at all Xaa locations
  Clone ID: PAT_MRT4530_78789C.1.pep
MEGGGESSSSPCRPAVAVELAPCSPMPPPSRAAAVGDTSPXGPRPATPXPHAHSAAVLLSQSSLLKSSSPCRRRARVCPAHAELANPGRQHLPPRAPSSPTPALVPAAAXPSSPPLPCRPAEAQERKKGRREKKKEGSKKY

SEQ ID NO: 181524 - protein, 328 aa, Oryza sativa
  unsure (1)..(328): unsure at all Xaa locations
  Clone ID: PAT_MRT4530_7878C.1.pep
QPRRVADKRTPLDTTRPGLTTAQRVRXATLKGRGRGSERRDPYHHATRRGKDNDERTRRRRXGEGTTSAAILERRRDTAGTRLDDAEARTKTMTGLQXTGAGEEATRXASSSCTETRTAWNTPLRXTXRWRRSETTSRETDGTSTRRTNGDDDDGPRSGSVEGEARPRATLPLXCRRWRRRRRPAHWHGERGCRRDRGRGGARDGVPAKXRATPWLGRGRGWRSGAGRGGGDVGRRTRDAAEAAGGGTVAATPLXCRWGCTSGGLRGKQMVGRRRGGGCDAGGGDGTAGRRADAAAGAAEDGRRHGREGTTAGRWLETTGDRGRGIKR

SEQ ID NO: 181525 - protein, 90 aa, Oryza sativa
  Clone ID: PAT_MRT4530_78790C.1.pep
NIHLWSSTGTDGTLFPATLLAYPLAVQAFGLAMHIVQPHPSLMLPSLQLAIVYVGHNKQHVRWLKLDRMKHCTCHMCVGQRCNPWDTALG

SEQ ID NO: 181526 - protein, 1018 aa, Oryza sativa
  Clone ID: PAT_MRT4530_78791C.1.pep
MARGSALLDGSVLPPSRIVSERQAGLPRRFMPESATGREIVTLGEGRPAPDYPGRSVFFLPFAMAGLVPPFSSFFMDVLEFYDLQMAHLTPNAVMTLAIFAHLCEMFIGVRPSLRLFRWFFTVQSVSPPSVVGGCYFQPRGPVPNRYIPCALRKKWDDWKSDWFYTPLADEVRLRLPSQPPAQASSWRAPVDLGDSYDAVLDRLAGLRSQGLTGAMVYGDYLRRRIAPLQRRARGAWEYTGSEDFMRTHQGVRWDWAPEDFKILVQRVLNLNSVEAALIPQGILPLCSDPDRASILTIMMAVGASEERAPKGHDGAGGSRRGEQSTPRGGRASGSRDRGPGSSRPADARGKRKQGGTPPPSPRGGGAARASSRRPEGAAPTSQPEGERKKKRPRKMGETEPSRGNLISPPLKWSFNRPPRSEIPSRPSRHSKSGQPEAEDPAAAEARRRESDRREAADRLREAEEADEAMATSEAARDEAAGASLGPTPSGDAQATTSGVAGDEAAGASLGPTPSGDAQAQPGPEDIPAFGTSIGGPSRVASSPRRLFPTPSAALLSAEPLLQALAAANTTVLDGLSAQVEALQAERAELDAAWARVEEGRRSVEAMVEVGCKAHRRHISELETRKKVLAEIAKEVEEERGAALIATTVMNEAQDTLRLQYGSWEAELGKKLDAAQGVLDAAAAREQRAAETEAASRRREEALEARAMALEERACVVERDLADREAAVTIREATLAAHEAACAEEELALRLREDALTERERALEGAEAAAQQLADSLSLREAAQEEQARRNLEGARAERAALNQRAAELEARAKELDARARSGGAAAGESDLAARLAAAEHTIADLQGALDSSAGEVEALRLAGEVGPGMLWDAVSRLDCAGRQVGLWRGRTVKYAANQGGLAQRLSKMAGALQRLPEELEKTIKSSSRDLAQGAVELVLASYQTRDPNFSPWMALEEFPPGTEDRARAQVRDAADHIVDSFEGSAPRLAFAPNSDEEGNAGGADNSDDEAGDPGASD

SEQ ID NO: 181527 - protein, 243 aa, Oryza sativa
  unsure (1)..(243): unsure at all Xaa locations
  Clone ID: PAT_MRT4530_78792C.1.pep
SGRGCGARRWRGGSPACGGGRGGGGRRRSATPRRTGGACGSAPSTPPRPPPPPTTTPXPPPRPRRRPQPPLPPXVAPAPPPPPPPPPPTAEEKKLLLFPPPLPPRKKAMLFPLPLPPRKKPLLYPPPLPPKKKPLPPPSPPPQPPLPEKENTPLPPLLLPPKKKPLPPPSPTAAAKEEPIELEHAAPPPPFVPRPXGPSWPAAAAGSGRSSRAAAAASPPSTPPPPPSRRPAAPDPPPRLPPS

SEQ ID NO: 181528 - protein, 47 aa, Oryza sativa
  Clone ID: PAT_MRT4530_78793C.1.pep
MPQNDPMLDLCEMSMVTFMGSCRFYNTCISFKVIMEIWKQPRGCTVA

SEQ ID NO: 181529 - protein, 1612 aa, Oryza sativa
  unsure (1)..(1612): unsure at all Xaa locations
  Clone ID: PAT_MRT4530_78794C.1.pep
MGSVSGIDNFAFPPGQAFWFGSLNFITNDFGKISLLDSDSNQSGRDQPKHLPLGDLGELRHRPRSXSRSREVGVILQPLGTVSTEEMDGYLSSPGVSSXPTKILDYDDFGYHYDHGDLDNFDDSYEDNYTPLFFGVFMAANETEEQRRAREADQDRARQEAERRRXRKSDSDRSENDYSTKTMIAASVPANSASTRTPTSSQVPHLRSQDYHQPSLSIAGAGSSRRSRGHDERSVRSPPERYRERRVERPHSPHRRRPIDLRDTINQRRAARGHHSPDRYDDDVDGVAAFTSDLRRVDWPAGFKPTEIEKYDGTTNPESWLTVYGLAIHAAGGDSKAMANYLPGTFERPGTQFDLYNVVQKSGESLRDYIRRFSEQRNKISDITDDVIIAAFTKGIRHEDLVGKFGRKPPKTVKQMFEKANEYAKAEDAITASKQSGTTWKPKKDTPTAGGSGSNNRKDRKCKPEELVATTSPSSRQRPRVNTFDKIMNSQCPHHPNSNHVAKDCFVYKQFAEQYVKNALKPSNGEQGTSKKKDDEDDAPTGFQDHRKELNHIFGGPLAYESKRKQKLTEREINVIQPNMPQYLRWSEIAIKFDRSDHPDRVVHPGRYPLVLDPVVRNVKLRRTLIDGGSALNILFAKTLDDMQIPRTELKPSNASFHGVIPGLSATPLGQITLPECALITFLQNNKDIFAWKPSDMPGIPREVIEHSLHVKEDAKPIKQRLRHFAQDRKDAIKEELTKLLAAGFIKEVLHPDWLANPVLIRLKESDCLKSSFITPFGAYCYITMPFGLKNAGATYQRMIQRYFSTQIGRNVEAYVDDVVVKTKQKDDLITDLEETFTSIHAFRMKLNPEKCIFRVPSGKLLEFMISQRGIQANPEKINAILNMKPPSSQKDVQKLTGCMAALSRFVSRLGERGMPFFKLLKKTDNFQWGPEAQKAFKDFKRLLTTPPVLASPHPQEPLLLYVLATSQVVSTILVVEHEEEGHIQKVQRPIYFVSEVLADSKTRYPQVQKLLYGVLITVRKLSHYFQSHSVTVVTSFPLGDILHNREANGRIAKLALELMSLDISFKPRTSTKSQALADFLAEWTECQEDMPEEKMEYWTMHFDGSKRLTGTGAGVVLISPIGERLSYVLWIHFSASHNVAEYEALLHGLRIAISLGIRRLIVRGDSQLVVNQVMKEWSCLDDTMTAYRQEVRKLEDKFDGLELTHVLRHNNEAADRLANFGSKREAAPSDQXVFVEHLYEPTVPRKETIEAMDTQGXRQLLKDIHSGICGNHAAARTIVGKAYRQGFFWPIAVSDADKIVRTCEGCQFFARQIHLPAQELQTIPLSWPFAVWGLDMVGPFKRAVGGYMHLFVAIDKFSKWIEAKPVITITADKARYFFINIVHRFGVPNRIITDNGTQFTGGAFKDFCEDFGIKICYATVAHTMSNGQVERANGMILQGIKARVFDRLRPYAGKWVNQLSSVLWSLRTTPSRATGQSPFFLVYGAEAMLPSEVEFESLRFWNFNEERYEEGRVDDINRLEEAREAALIQSTRYLQGLRRYHNRNVRSRAFLVGDLVLRKIQTTQDRHKLSPLWEGPFIIAEVTRPVSHPDFRFRIYKLFNKLIIEFILNVH

SEQ ID NO: 181530 - protein, 2021 aa, Oryza sativa
  unsure (1)..(2021): unsure at all Xaa locations
  Clone ID: PAT_MRT4530_78795C.1.pep
MGFVSGINDFVFPPGQTFWFGSLDFITNDFGKISLFDSDSNQSGRGXVSAPFGIPNSAXIYPKIISAELASNHSDEIQSTITRHDQDDGAYPPILMKLPDDLAAVFTTRASSSRRSRRDPASAPIQSSSKEVGVILXPLGTVLTEQLDGYLSSPGVDSRPTEIIEYDDFGYRYDYRNLDDFGEDFEDNYTPLYFGIFMADNETEEQRKAREAEEQCVQKEAERHRLEEERQAQERERLQHEQXERERAAKEAEDRRQRALDARXRARELIGQQDVKGTAVFHTPQQXAVAAITLLDTLLMEDALNQANHVVNILNQTKTMIATLVPINSASIRTPTGSRVPPLRSXDYHQPSLSAVGAGSSRRSRDHNERSVHSPPDRRRERRAERPRSPHRRRPIDLRETINQRRAARGYVXHHSPDRYDDDVDGVAAFTSDLRRVDWSAGFKPTGIEKHDGTTNPESWLTVYGLAICAAGGDSKAMANYLPVALAHSARSWLHGLPRGTIGSWAELRDHFIANFQGTFERPGTQFDLYNVVQKSGESFRDYIRRFSEQRNKISDITDDVIIAAFTKGIRHDDLVGKFGRKPPRTVKQMFEKANEYAKAEDAITASKQSGTTWKPKTDMPTTGGXGNTNHKNHKCKPEELVATTTPSSRQRSRVNTFDKIMNSQCPHHPNSNHTAKDCFVYKQFAEQYAKNARKTNDGDQSTSKKKDDEDDAPTGFQDHRKELNHIFGGPLAYESKRKQKLTEREINAVQPGTPQYLWWLEIAIKFDCSDHPDRVVHPGRYPLVLDPVVRNVKLXRSLIDGGSALNILFAKTLDDMQIPCTELKPSNAPFHEVIPGLSSTPLGQSTLPVTFGTRENSCTENICFEVADFETAYHAILGRPALAKFMAVPHYTYMMMKMPGPRGVISLRSDIKQAVTCDKESCEMAQTREITLARQEIRLAASTATEGEVPATKMTKSGEGDAKTKKIPLDPSDPTKTANNKDIFAWKPSNMPGIPREVSEHSLHVKEDAKPIKQRLRRFVQDRKDAIKEELTKLLAAGFIKEVIHPDWLANPILVRKKTGQWRMCVDYLNKSCPKDPFGLPRIDQVVDSTASCELLSILDCYSGYHQIRLKESDCLKTSFITPFGVYCYITMPFGLKNAGATYQRIIQRCFSTQIGRNVEAYVDDVVVKTKQKDDLITDLEETFASIRAFRMKLNPEKCIFGVPSGKLLGFMVSHRGIQANPEKINAILNMKPPSSQKDILKLTGCMAAFSWFVSRLGERGMPFFKLLKKTDNFQWGPEAQKAFEDFKKLLTTPPVLALPHPQEPLLLYVSATAQVVSTVLVVEREEEGHIQKVQRPIYFVSEVLADSKTRYPQVQKLLCGVLITVRKLSHYFQGHSVTVVTSFLLGDILHNREANGRITKWALELMSLDLSFKPRTSIKSQALADFVAEWTKCQEDTPAEKIEHWTMHFDGSKRLSGTGAGVVLIFPTGERLSYVLWIHFSASHNVAGYEALLHGLRIAISLGIRHLIVRGDSQLVVNQVMKEWSCLDDNMTAYRQEVRKIEDKFDGLELTHVLRHNNEAADRLANFGSKRETAPSDVFVEHLYEPIVPNXRNKQGHGRXDVNMIEADWREPFIRFLTKQELPQDKDEAERISRRSRLYVVHETELYKKSPSGILQRCVSLEEGKQLLKDIHSGICGNHAAARTIVGKAYRQGFFWPTAVSDADKIVRTCEGCPFFARQTHLPAQELQTILLSWPFAVWGLDMVGPFKKAVGGYIHLFVAVDKFSKWIEAKPVITITADKARDFFINIVHRFGVPNRIITDNGTQFTGGVFKDFCEDFGIKICYASVAHPMSYGQVERANGMVLQGIKTRVFDRLHPYAGKWVEXLPSIFWSLRTTPSLATGQSPFFLVYGADAMLPSEAEFELLRFRNFSEERYGEDRVDDINRLEEPXEAALIQSARYLQGMRCYHNRNVRSRAFLVGDLVLRKIQTTRDRHKLSPLWEGPFIISEVTRPGSYRLKREDGTHVDNSRNIEHLRRCYA

SEQ ID NO: 181531 - protein, 93 aa, Oryza sativa
  unsure (1)..(93): unsure at all Xaa locations
  Clone ID: PAT_MRT4530_78796C.1.pep
CPTFFRYRFESSRTRLPSSEFCRKFDGXLPIKNGYRQNGRKKAHIISANISGRDYRFHFRHRQFPIPTETVGANRKRXPEFLDISIPFSPLPR

SEQ ID NO: 181532 - protein, 1784 aa, Oryza sativa
  Clone ID: PAT_MRT4530_78797C.1.pep
MGFISGIDDFAFPPGQAFRFGSLNFITNDFGKISLLDSDSNQSGRDQVLVPFGIPNSAEAYSKIISPESASNHSDEIQSTLPRPDQDDGPYPSILMKLPDDLADVFTAKTSSTRRSRRAPASAPIQSRSREILDYDDFGYHYDHGDLDNFDDSYEDNYTPLFFGVFMADNETEEQRRAREADQDRARQEAERRRLEEERQRQERERIQREQQDHERVAKEAEDRRQRALESGRRARELIGQQDVDGTATKTMIAASVPANSASIRTPIGSRVPHLRSHDHHQPSLSITGTGSSRRSRGHDERSVHSPPERHRERRAERPRPPPRQRPVDLRDTINQRRAARVGFKPTGIEKYDGTTKPESWLTVYGLAIRAAEGDSKAMANYLPVALADSARSWLHGLPRDTIGSWAELRDHFIANFQGTFERPGTQFDLYNIFDITDDVIIAAFTKGIRHEDLVGKFGRKPPRTVKQMFKKANEYAKAEDAITTSKQSGTTWKPKKDTPTAGGSGSNNHKDRKRKPEELVATTSPSSRQRPRVNTFDKIMNSQCPHHPNSNHVAKDCFVYKQFAEQYVKNARKPADGDQGTSKKKDDEDDAPTGFQDHRKELNHIFGGPLAYESKRKQKLTEREINAVQPNTPQYLRWSETAIKFDRSDHPDRVVHPGRYPLVLDPVVRNVKLRRTLIDGGSALNILFAKTLDDMQIPRTELKPSNAPFHGVIPGLSATPLGQITLPVTFGTRENFRTENVCFEVADFETAYHAILGRPVLAKFMAVPHYTYMMMKMPGPRGVISLRSDIKQAVTCDKESCEMAQTHETTLGREKIRLAATTASEGEVPATKLTKTEESDAKTKKIPLDPSDPDKTANNKDIFAWKPSDMPGIPREVIEHSLHVKEDAKPIKQRLRRFAQDRKDAIKEELTKLLAAGFIKEVLNPDWLANLVLVRKKTGQWRMCVDYTDLNKSCPKDPFGLPRIDQVVDSTAGCKLLSFLDCYSGYHQIQLKESDCLKTSFITPFGAYCYITMPFGLKNAGATYQRMIQRCFSTQIGRIVEAYVDDVIVKTKQKDDLIADLEETFTSICAFKMKLNPEKCIFGVPLGKLLGFMVSPRGIQANPEKINAILNMKPLSSQKDVQKLTGCMAHHGGAQPWGPEAQKAFEDFKKFLTTPPVLASPHPQEPLLLYVSATSQVVSTVLVVEREEESHIQKVQRPIYFVRKVLADSKTMYPQVQKLLYGVLITVRKLSHYFQSHSVTVVTSFPLGDILHNREANGRIAKWALELMSLDISFKPRTSIKSQALVDFLAEWTERQEDMPEEKMEYWTMHFDGSKRLTGTGAGVVLISPTGERLSYVLWIHFPASHNVAEYEALLHGLRIAISLGIHRLIVRGDSQLVVNQVRKLEDKFDGLELTHVLRHNNEAADRLANFGSKWEAAPSDVFVEHLYEPTVPRKEVVEAMDTHGVNMLEADWREPLIKFLTKQELPQDKNEAERISRCSRLYIIHEAELYKKSPSGILQRCVSLEEGRQLLKDIHSGICGNHAAARTIVGKAYRQGFFWPTAVSNADKIVRTCEGCQFFARQTHLPAQELQTIPLSCPFAVWGLDMVGPFKRAVCGYTHLFVAIDKFSKWIEAKPVITITADKARDFFINIVHRFGVPNRIITDNGTQFTGGAFKDFCEDFGIKICYASVAHPMSNGQVERANGMILQGIKARVFNRLRPYACKWVDQLPSVLWSLCTTPSRATGQSPFFLVYSAEAMLPSEVEFESLRFWNFNEEGYEEGRVDDINRLEEAREAALIQSTR

SEQ ID NO: 181533 - protein, 997 aa, Oryza sativa
  Clone ID: PAT_MRT4530_78798C.1.pep
MARGSAPLDGSVLPPSRIVSERQAGLPRRFMPESATGREIVTLGEGRPAPRYPGRSVFFLPFAMAGQVPPFSSFFMDVLEFYNLQMAHLTPNAVMTLAIFAHLCKMFIGVRPSLRLFRWFFTVQPVSPPSVVGGCYFQPRGPVLNRYIPCVLRKKWDDWKSDWFYTPLADEARLRLPSQPPAQASCWRAPVDLGDGYDAVLDRLAGLRSQGLTGAMVYGDYLRHQIAPLQRRARGAWEYTGSEDCMRTHRGVKWDWVPEDFKVMIQRVLNLSSAEASLIPQGVLPLCSDPDRTNILSIMMAVGASEEQAPRGPDGAGGSCRGEQSTPGGGRASGLRDGGSGGCRPADARGKRNEISSRPSRHSKSGQSEAEDTATAEARRRESDRREAADRLREAEEAAREAVRARQAKEAAREEARLRQAEATTTSEATRETDRQEAADRLQEAVEIDQVAVRAHQAEETAQEEARLRQAETATTSEAARDEAAGTSLGTTPSGDTQDKPGPGDIPEPGTSIGGPSRAASSPRRLSSTPSVAPLSAEPLLQALAVANTTVLDGLSAQMEALQAERVELDAAWARVEEGRRSVEAMVEVGRKAHRRHASELEARRKVLEEIARDVEEERGAALIATTVMNEAQDDLRLQYGSWEAELGKKLDAARGVLDAAAARERRAAETEVASRRREEALEARAMALEERACVVERDLADREAAVAIREVTLAAHEAACAEEESALRLREDALTERERALEEAEAAAQRLAESASLREAAQEEQARRNLEGARAERAALNQRAAELEAQARELDARARSGGAATGDSDLAARLAAAEHTIADLQGALNSSTGEVDALRLAGEIGPSMLRDAVSRLDRAGRQAGLWGGRTAKYAANQGGLAQRLSEMAETLQRLPEELERTIKSSSRDLARGAVELVLASYQARDPDFSPWMALDEFPPGTEDGARARVHDAASHIVHSFEGSAPRLAFALSSDEEGDDGGVGDSGDEAGDPGASE

SEQ ID NO: 181534 - protein, 1552 aa, Oryza sativa
  Clone ID: PAT_MRT4530_78799C.1.pep
MGFVSGIDDCAFLPGQAFRFGSLNFITNDFGKISLLDSDSNQLGRDQVLVPFGIPNSAEAYSKIISPKSASNHSDEIQSTLPRPDQDDGSYPSILMKLPDDLAAVFTVKTSPTRRSRRAPASAPIQSRSREVGVILQPLGTVSTEELDGYLSSPGVSSRPTEILDYNDFGYHYDHGDLDNFDDSSEDNYTPLFFGVFMADNEMEEQRQAREADQDRARQEAEPVFRTPQQNAVAAITLLDTLLKEDTLNQADHVVNILNQTKTMIAASVPANSASTRTPTSSRVPHFRSHDYHQPSLSIIGTGSSRRSRGHDERSFHSPPERHRERRAKRPHSPPHQRPVDLRDMINQRRAARGHRHSPNRYDDDVDGVAAFTNDLRRVDWPASFKPTGIEKYDGTTNPESWLTVYGLAIRAAGGDSKAMANYLPVALADSAQSWLNGLPRGTIGSWAELRDHFIANFQGTFERPGTQFDLYNVVQKSGESLRDYIRRFSEQRNKISDITDDVIIAAFTKGIRHEDLVGKFGCKPPRTVKQMFEKANEYAKAEDAITASKQSGTTWKPKKDTPTAGGSGSNNHKDRKRLSATPLGQITLLVTFGTGENFRTKNVCFEVADFETAYHAILGRPALAKFMAVPHYTYMMMKMPGPRGVISLRSDIKQAVTCDKESCEIAQTHETILAREEIRLAATTTSEGEVPATKLTKTEESDAKTKKIPLDPSDPDKTAVIGAELDYIFAWKPSDMPGIPREVIEHSLHVKEDAKPIKQRLRRFAQDRKDAIKEELTKLLAAGFIKEVLHPDWLANPVLVRKKTGQWRMCVDYTDLNKSCPKDPFGLPRIDQIGRNVEAYVDDVVVKTKQKDDLIADLEETFTSIRAFRMKLNPEKCIFRVPSGKLLGFMVVSTVLVVEREEEGHIQKVQRPIYFVSEVLADSKTRKLSHYFQSHSVTVVTSFPLGDILHNHEANGRIAKWALELMSLNISFKPRTSIKSQALADFLAEWTECQENMPEEKMEYWTMHFDGSKRLTGTGAGVVLISPTGERLSYVLWIHFSASHNVAEYEALLHGLRIAISLGIRRLIVRGDSQLVVNQVMKEWSCLDDNMTAYRQEVRKLENKFDGLELTHVLRHNNEAADRLANFGSKREAAPSDVFVEHLYKPTVPRKETVEAMDAQGVSMIEADWREPFIKFLSKQELPQDKNEAERISRRSRLYIIHETELYKKSPSGILQRCVSLEEGRQLLKDIHSGICGNHAAARTIVGKAYRQGFFWPTAVSDADKIPFAVCGLDMVGPFKRAVGGYTHLFVAIDKFSKWIEAKPVITITADKARDFFINIVHRFGVPNRIITDNGTQFTGGAFQDFCEDFSIKICYASVAHPMSNGQVERANGMILQGIKARVFDRLRPYAGKWVDQLSSVLWSLRTTPSRATGQSPFFLVYGAEAMLPSEVEFESLRFRNFNEEGYEEGRVDDINRLEEAREAALIQSTRYLQGLRRYHNRNVRSRAFLVGDLVMRKIQTIQDRHKLSPLWEGPFIIAEVTRPGSYRLKREDGSNVDNSWNIEHLRRFYA

SEQ ID NO: 181535 - protein, 129 aa, Oryza sativa
  Clone ID: PAT_MRT4530_7879C.1.pep
MVFLDEAGQQQLPEVRVNIIHDDNDDGGDLPPSSLSFRWKTKKYRLWRVPEQVRAINKEEAYAPKFVSVGPYHRRHAGAGDRNRLCGEKLKKRYLHELLRDVEPDDHKHGGILQRCKSSLQEIVDDIRW

SEQ ID NO: 181536 - protein, 184 aa, Oryza sativa
  unsure (1)..(184): unsure at all Xaa locations
  Clone ID: PAT_MRT4530_787C.1.pep
MDRQRQQSSRGNATATRGGGSSGKGGGXCVGKAAGKKPXKVVYISNPMRVKTSAAGFRALVQELTGRNADPSKYSPRASADDDDGGGGGGGGELAAASDGAGEPGPGAAAASPDTGAAAASDAADALVAAGHPAAATFDDEGGGGGGGYYDDDDDDIFRSQLLDTSYSVFSPPTLLYDHPHSKV

SEQ ID NO: 181537 - protein, 68 aa, Oryza sativa
  Clone ID: PAT_MRT4530_78800C.1.pep
MTRGRRLRAAASARSCGAAVLVTHDPALRPGAKMELGCLVRANIAANDDTHACALQREDDDGSAGRAC

SEQ ID NO: 181538 - protein, 149 aa, Oryza sativa
  unsure (1)..(149): unsure at all Xaa locations
  Clone ID: PAT_MRT4530_78801C.1.pep
ADTRRRGRRARRDTSRDPQPTGGGASTRSAPHLRRRRWRCRRAPPPRRGCSPCRRCSSSSPPPRSLSSSSYRPSPRPPPRTSAPARPRPPRTPPLPSPPPPPPAPRRPSPPPPPTSPGSSLSSPPTPXPAPRXPRRMAPPPQGHQPPHP

SEQ ID NO: 181539 - protein, 515 aa, Oryza sativa
  unsure (1)..(515): unsure at all Xaa locations
  Clone ID: PAT_MRT4530_78802C.1.pep
MFCLYLDGLIEELCDNGIGCFMGNVFAGAFGYADDLTLLSPSVTALQEMIKTCLDYAIKFDILFNPEKSQLIVFSCNGKPVMDPGITINGRHIDIASKVTHLGNDISKNINDFDISKQWRVAIRRVWKIPWQTHCHLLPYLAGVMDPELWFAKRCLSFVLKAMNSKNYTVAHIAGMARYGAHSVLGGNIRFLNDKYFMDNNEIQKQWAVQCQVNDETIRIVEQGSRPCTFQCEYIADFMRKKKNLAVKVGKLNLHLQKWEELKVNKNMNVNRFVFVRKYLQEQVKTAYLNISDSFLGVTKTEKKEWITDDTWQAIDKRKGAKKQAMEAKSDILKESPGSDNLNAELFKAVPELAAKILLPLFATIWETKAVPDDWSEGVIVKLPKKGSLKNCNNWRGITLLSIPSKILAKIVFTRTIDAVDQSLRREQTGFRKGKGCTDHIFALRNSIEQFDSIHLNSLWRILRKYGIPEQLDLVIKSFYINFTCRVGNSNHKFQVKIEXRQGCVISALLFNIAI

SEQ ID NO: 181540 - protein, 162 aa, Oryza sativa
  unsure (1)..(162): unsure at all Xaa locations
  Clone ID: PAT_MRT4530_78803C.1.pep
MPRFVHLLLSSNSGGLPFFSGAGDTPXTPAGSRPWAAEDQRWAVDFGGRRGGXRHRRSHGDGGGQWAGVGGGAKASVRLGGSGQWLRIRRQGAVGDREDGGVGAPRRRRLEEKERGGRGRGEGEGARXGGLADAVNSFRLAGEAGSGAVGWWRRWITRGTGG

SEQ ID NO: 181541 - protein, 39 aa, Oryza sativa
  Clone ID: PAT_MRT4530_78804C.1.pep
MGHVKAQSMPYRPTDIHVIYNNLLNRGSTGGSPVRPSDR

SEQ ID NO: 181542 - protein, 171 aa, Oryza sativa
  Clone ID: PAT_MRT4530_78805C.1.pep
VVLARWRRWWDLVLVVGAAVVRMRMVAAVIEDVEHALLTPTVLLRGLSDAMVTDLVSGLRGVRHAMVKMLITYFDNLPFVYVQVLFLCIESFCYQLFLSLHFYLSALIISSFLLLFLVYLLFIFSFYFCFFLYYWFSPFIFFFFLYCSFSIFFFFPSFFLFFLFFCHFLLL

SEQ ID NO: 181543 - protein, 518 aa, Oryza sativa
  Clone ID: PAT_MRT4530_78806C.1.pep
MGGDHGKLMKSLKGAAQKYLGVGFLLGFFLVLLTYFTVSEQFAIAAPNAIRKTSPGHASPTIPPPVEEKRPQLPPIIEQRQAPKAEHEHAAVVQEKTPSAEEIEIQKETEEDHTKEKPTDDVTTTVEESAPAKKPACDIQGPWASDVCSIDGDVRIHGAAHDVVIPPPIEGGGSNPNPREWRVVPYSRKHMGGLKEVAVREVASAAEAPACDVRSPVPALVFAMGGLTGNYWHDFSDVLIPLYLQARRFDGEVQLVVENIQMWYVGKYKRVLDRLSRHDIVDMDRDDKVRCFPGAVVGIRMHKEFSIDPARDPTGHSMPEFTKFLRDTFSLPRDAPVSLVDNAAAVRPRLMIISRRHPRKLMNVEEVVRAAERIGFEVVIGDPPFNVDVGEFAKEVNRADVLMGVHGAGLTNSVFLPTGAVLIQVVPYGKMEHIGKVDFGDPAEDMRLKYMAYSAGVEESTLVETLGRDHPAVRDPESVHRSGWGKVAEYYLGKQDIRLDLARFEPLLRDAMDYLKHQ

SEQ ID NO: 181544 - protein, 96 aa, Oryza sativa
  Clone ID: PAT_MRT4530_78807C.1.pep
MGGRGKKKSVLASLFGFKSGGERRRQQQQEEMATAAAAGRKQQQRSYYCPERRRRVWPSDEDNDNYYAERDIDRRASEFIDKVHRGMLIAGGEQDG

SEQ ID NO: 181545 - protein, 91 aa, Oryza sativa
  unsure (1)..(91): unsure at all Xaa locations
  Clone ID: PAT_MRT4530_78808C.1.pep
MTAAEIGKQEGDEPVVVEDDDDDEDDDDEDDKDDDDAEGGDXSGRSKQSRSAKYSRKAMAQLGLKPITGVRRVTVLMLFFSFLSSRRRLPS

SEQ ID NO: 181546 - protein, 329 aa, Oryza sativa
  Clone ID: PAT_MRT4530_78809C.1.pep
MAPLLSPPLLADSVAKFHCSSTPTPCSGSVRRWAITRFAGAGRRRDWHRRRRTSGRGVLTVSAVAAESPSSGGGVAEDYYAVLGVMPDATPQQIKKAYYNCMKACHPDLSGNDPDVTNFCMFINEVYTVLTDPIQRAVYDEIHGYAATATNPFFDDSAPRDHVFVDEFSCIGCKNCANVCSKVFEIEEDFGRARVYNQSGNAELIQEAIDTCPVDCIHWTSAAQLSLLEDEMRRVERVNVGLMLAGMGSSVDVFRMEKVRRRVSQEDSGKGSSWSDVWGAPTRYRKNEDEARERAKRAAAAARRWREYSRKGADKPPTFKLPEAVSNKE

SEQ ID NO: 181547 - protein, 639 aa, Oryza sativa
  Clone ID: PAT_MRT4530_7880C.1.pep
MAAGGKGWVERARRGVKTAWFMVAMVASLLMASAPALVAAGDVAVALWLEVRLGCLRCHGLRGHLERYGFRSSLVDIPLVSIARSVVITCVYLMSDASGLSHGPYLGTATCCSLASLLILLIKASVYSPAQEIGPELSPSLADHKLSLKKLSGMPVLFLSSLVFALGHVVVAYRTSCRARRKLLIHGIDPESILAYKNAYPGCYKTPRSPTPYSGKFYSRSDSETKRKSVAHDDRDIPISFLADGDSMFIACQGITVHYKLSDPSSCISSATDTFPEIHHDVISASISPRRQRHDSPPSASTNTRRLLNRSFSHQYHQTSLYAPLLVEPVTSPTLSDDTPVLSVDDGSADVCLKPMGFDLEAGEQGKFAVVLVHGFGGGVFSWRHVTNLLSRQVGCTVLAFDRPGWGLTSRPRRKDWEDKNLPNPYELGSQVDLLISFCSDMGLRSVVLVGHDDGGLLALKAAEKLRASGDSRKVEVKGVVLIGVSLSREVIPAFARILLHTPLRKKHMVINRRAWFDATKLTTDVLNLYKAPLFVEGWDEALHEVGRLSFSTVLSSKRAADLLRSVEDLPVLVVAGSEDALVSSKSTQVMASRLVNSRLVTISNCGHLPHEECPKALLSALSPFISGLVSSDDSLQRL

SEQ ID NO: 181548 - protein, 45 aa, Oryza sativa
  Clone ID: PAT_MRT4530_78810C.1.pep
VHWSNTFNCSFMTITTVYPTINKSTRVVALLVSHTNKCIMLVRHY

SEQ ID NO: 181549 - protein, 213 aa, Oryza sativa
  Clone ID: PAT_MRT4530_78811C.1.pep
MWLREDKDGELREETGNWKNRFVSPCFLVDDQQMIKFMVDGKCNQLEIKWLAFAFDQEMIKSTGTPLNPRARFRTCIGVKQISQVSVCFSHQHAFGTLGGMRVVTFFIMVDNKQTSKPPSDIGPDNIIPITLDKLTPEQMLEYEQMMNNLKSQCLHSFKQTRSGTVIQRYKLKMVPNDDSESGTSKDGKAKGDKANNDEPKDEAVIPYILKDI

SEQ ID NO: 181550 - protein, 126 aa, Oryza sativa
  Clone ID: PAT_MRT4530_78812C.1.pep
MKSPLADDDEEGERSFVATTGTGMASSASLPERGMARMVALLVNLADEAPAAAAVLFVALATRAVLAVRHLDRRDPCGTRRPPCARRPPPRPPRPARRSPSAGATPATRAALADRCRAARARRPLC

SEQ ID NO: 181551 - protein, 1030 aa, Oryza sativa
  Clone ID: PAT_MRT4530_78813C.1.pep
MARGSALLDGSVLPPSRIVSERQAGLSRRFMPESATGREIVTLGEGRPAPDYPGRSIFFLPFAMAGLVPPFSSFFMDVLEFYDLQMAHLTPNAVMTLAIFAHLCEMFIGVRLSLRLFRWFFTVQSVSPPSVVGGCYFQPRGPVLNRYIPCALRKKWDDWKSDWFYTPLADEARLRLPSQPPAQASSWRAPVDLGDGYDAVLDRLAGLRSQGLTGAMVYGDYLRRRIVPLQRRARGAWEYTGSEDFTRTHQGVRWDWAPEDFKILVQRVLNLNSVEAALIPQGILPLCSDLDRASILTIMMAVGASEERAPKGHDGAGGSRRGEQSTPRGGRASGSRDRGPGSSRPADARGKRKQGGTPPPSPPRGVGAARASNRCPEGAAPTSQPEGERKKKRPRKMGETEPSRGNLISPPKWSFNRPPRSEIPSRPSRHSKSGQSEAEDPAAAEALRRESDRREAADRLREAEEAAQEAARARQAEETAREEAGFRQDKAMATSEAARDEAAGASLGPTPSGDTQATTSGAAGDEATGASLGPTPSGDAQDQPGPGDIPESGTSIGGPSRVASSPRRLFPTPSIALLNAEPLLQALAAANTTVLDGLSAQVEVLQTERAELDAAWARVEEGRRSVEAMVEVGRKAHRRHVSELETRKKVLAEIAKEVEEERGAALIATTVMNEAQDTLRLQYGSWEAELGEEARRRPGRAAETEAACRRREEALEARAMALEERACVVERDLADREAAVTIREATLAAHEAACAEEEFTLRLREDALTERERALEGAEAAAQQLAVNLSLREAAQEEQARRNLEGARAERAVLNQRAAELEARAKELDARARSGGAATGESDLAARLAAAERTIADLQGALDSSAGEVEALRLAGEVGPGMLWDAVSCLDCAGRQVGHWRGRTVKYAANQGGLAQRLSKMAGALQRLPEELEKTIKSSSRDLAQGAVELVLASYQARDPNFSPWMALDEFPPGTEDRARAQVRDAADHIVDSFEGSAPRLAFAPNPDEEGNAGGADDSDVEAGDPGASD

SEQ ID NO: 181552 - protein, 48 aa, Oryza sativa
  Clone ID: PAT_MRT4530_78814C.1.pep
MGAAVLRFACLRASFLLQMRQWMASWRRTNLRGLTMLNLLLPDLWCPS

SEQ ID NO: 181553 - protein, 2012 aa, Oryza sativa
  unsure (1)..(2012): unsure at all Xaa locations
  Clone ID: PAT_MRT4530_78815C.1.pep
MGFVSGIDDFVLPPGQAFRFGSLDFITNDFGKISLLDSDSNQSGRNQVPVPFGIPNSAEAYSKIISPESISSHSDEIQSIPPRSDQDDGSYPSILMKLPDDLAAVFTAKTSPTRRSRRAPAPAPIQSRSREVGVILQPLGTVSTEELDGYLSSPGVSSRPTEILDYDDFGYHYDHGDFDNFDDSYEDNYTPLFFGVFMADNETEEQRRAREAEQDRARQEAKRRRLEEERQRQERERLQREQQDHERIAKEAEDRRHRALESGRRARELIGQQDVDGTAVFRTPQQNAVAAITLLDTLLKEDALNQADHVVNILNQTKTMIAASVPANSASTRTPTGSRVPHHQPSLSITGTGSSHRSRGHDERSVHSLLERHRERRAKQPRSPPRQRPVDLRDTINQHRAARGHRHSPNRYDDDVDGVAAFTNDLHRLDWPVGFKPTGIEKYDGTTNPESWLTVYGLAIRAAGGDSKAMANYLPVALADSARSWLHELPRGTIGSWAELRDHFIANFQGTFERPGTQFDLYNVVQKSGESLRDYIRRFSEQRKKISDITDDVIIAAFTKGIRHGDLVGKFGRKPPRTVKQMFEKTNEYAKAEHAITASKQSGTTWKPKKDTPTAGGSGSNNHKDRKRKPEELVATTSPSSRQRPRFNTFDKIMNSQCPHHPNSNHVAKDCFVYKTVRGAIRQERTSKKKDDEDDAPTGFQDHRKELNHIFGGPLAYESKRKQKLTEREINAVQPNTPQYLRWSETAIKFDRSDHPDRVVHPGRYPLVLDPVVRNVKLXRNIIDSGSALNILFTKTLDDMQIPRTELKPSNAPFHGVIPGLSATPLGQITLPVTFGTRENFRTENVCFEVADFETAYHAILGRPALAKFMAVPHYTYMMMKMPGPRGVISLRSDIKQAVTCDKESCEMAQTHETTFAREEIRLSATTTGEGEVPATKLTKTEESDAKTKKIPLDHSDPDKTANNKDIFAWKPSDMPGIPREVIEHSLHVKEDAKPIKQRLRCFAQDRKDAIKEELTKLLAAGFIKEVLHPDWLANPVLVRKKTGQXRMCVNYTDLNKSCPKDPFGLPRIDQVVDSTAGCELLSFLDCYSGYHQIRLKESDCLKTSFITPFGAYCYITMPFGLKNAGATYQRMIQRCFSTQIGRNIEAYVDDVVVKTKQKDDLIADLEETFTSIRAFKMKLNPEKCIFGVLSGKLLGFMVSQRHTGQPRGIQANPEKINAILNMKPPSSQKDVQKLTGCMTALSRFVSXLGERGMPFFKLLKKTDDFQXGPETQKAFEDFKKLLTTPPVLASPHPQEPLLLYVSVTSQVVSTVLVVEREEKGHIQKVQRPIYFVSEVLADSKTRYPQVQKLLYGVLITVRKLSHYFQSHSVTVVTSFSLGDILHNREANGQIAKWALELMSLDISFKPRTSIKSQALADFLAEWTECQEDMPEEKMEYWTMHFDGSKRLTGTGAGVVLISPTGERLSYVLWIHFSASHNVAKYEALFHGLRIAISLGIRRLIVCGDSQLVVNQVMKEWSCLDVNMTAYRQEVRKLEDKFDGLELTHVLRHNNEAADRLANFGSKREAAPSDVFVEHLYEPTVPRKEITEAMDTQGVGMLEADWREPFIKFLSKQELPQDKNEAERISRRSRLYIIHETELYKKSPSGILQRCVSLEEGKQLLKDIHSGICDNHAAARTIVGKAYRQGFFWPTDVSDADKIVRTCEGCQFFARQTHLPAQELQTIPLSWPFAVWGLDMVGPFKRAVGGYTHLFVAIDKFSKWIEAKPVITITADKARDFFINIVHRFGVPNQIITDNGTQFTGGTFKDFCEDFGIKICYASVAHPMSNGQVERANGMILQGIKARVFDRLRPYAGKWVDQLSSVLWSLRTTPSRATGQSPFFLVYGAKAMLPSEVEFESLRFRNFNEEGYEEGRVDDINRLEEAREAALIQSTRYLQGLRRYHNRNVRSRAFLVGDLVLRKIQTTQDRHKLSPLWEGPFIIAEVTRPGSYRLKREDGTIINNSWNIEHLRRFYA

SEQ ID NO: 181554 - protein, 1909 aa, Oryza sativa
  unsure (1)..(1909): unsure at all Xaa locations
  Clone ID: PAT_MRT4530_78816C.1.pep
MGFVSGIDDFVFPPGQAFQFGSLDFITNDFGKISLLDSDSNQSGRGQISTXFGIPNSAEVYPKIISTELASNHSDGIQSTSTRPDQDDGAYPPILMKXPDDLAAVFTTRASSPRRPRWDPALAPARPSSREVGVILQPLGTVSTXQLDGYLSSPGIDSRPSEIVEYDDFGYRYDYXNLDDFDEGFEDNYTPLYFGIFMADNETEEERKAREAEELRVQQEAERRRLEEERQAXERERLQCEPQERERAAKEAEDWRQRALDAGRQAXELIGQQDVEGTAVFRXPQQNAVAAITLLDILLKEDALNQANHVVNILNQTKTMIAALVPINSASVHTPTGSRVPHLRSQDYHQPSLSVVGAGSTRRSRGHDERSIHSPPKRHREHRVEXPHSPHRRRPVDLRDTINQRRAARGYAPHHSPDRYDDDVDGVAAFTSDLRRVDWPAGFKPIGIEKYDGTTNPESWLTVYGLAIXNYLPVALADSARSWLHGLPCGTIGSWAELRDHFIANFQGTFERPGTQFDLYNVIQKSRESLRDYIRRFSEQRNKISDITDDVIIAAFTKGVRHTDLVGKFGRKPPRTVKQMFEKANEYAKAEDAITTSKQSGTTWKPKKDTPTTGGSGSTNHKDRKRKPEELVATTTPSSRQRSHVNTFDKIMNSQCPHHPNSNHAAKDCFVYKQFAEQYAKNAHKASDGDQSTSKKKDGEDDALTGFQDHRKELNHIFGXPLAYESKRKQKLTERXINAAQPDTPQYLRWSETTIKFDRSDHPDRVVHPGRYPLVLDPVVHNVKLRRSLINGGSALNLLFAKTLDDMQIPRTELKPSNAPFHRVIPGLFVTPLGHTLPITFSTRENFRTENXHVILGRPALAKFMAVPHYTYMMMKMPGPRGDISLRSDIKQAVTCDKESCEMAQTREITLAREEIRLATSTASEGEVPATKMPKSGEGDAKTKKIPLDSSDPTKTANNKDLFAWKLSDMPGIPRVVIEHSLLVKEDAKPIKQRLRRFAQDRKDAIKEELTKLLAAGFIKEVLHPDWLANPVLVRKKTGQWRMCVDYTDLNKSCPKDPFALPRIDQVVDSTAGCELLSXDWYSGYHQIXDCLKTSFITPFGAYYYITMPFGLKNAGATYQRMIQRCFSTQIDRNVEAYVDDLVVKTKQKDDLITDLEETFASIRAFRMKLNPQKCIFGVPSGKLLGFMVSRRGIQANPEKINAILNMKPPSSXKDVQKLTGCMAALNRFVSRLGEPGMPFFKLLKKTDNFXWGPEAQKAFEDFKKLLTTPPVLASPHPQEPLLLYVSATSQVVSTVLVVEREEEGHVQKVQRPIYFVSKVLADSKTRYPQVQKLLYGVLITVRKLSQYFQGHSVTVVTSFPLRDILHNRKANGWIAKWALELMSLDLSFKPRTLIKSQALADFVAEWTECQEDMPVEKMEYWTMHFDGSKRLSGTRAGVVLISLTGERLSYVRKLEDKFDGLELTHVLRHNNEVADRLANFGSKREATPSDMFVEHLYEPTVPRKKIIEATDTQEVSMIEADWREPLMRFLTKQELPQDKNEVERISRRSKLYVIHETELYKKNPSGILQRYVSLEEGRQLLRDIYSGICGNHAIARTIVDKAYRQGFFWPTAVSDADKIVRTCEGCQFFARQTHLPAQELQTIPLSWPFTVWGLDMVGPFKKAISGYTHVFVAVDKFSKWIEAKPVVTITTDKARDFFINIVHRFGVPNRIITDNGTQFTGGVFKDFCEDFGIKICYAPVAHPMSNGQVERANGMVLQGIKARVFDRLRPYAGKWVEQLPSVLWSLRTTPSRATGQSPFFLVYGAEAMLPSEVEFESLRFRNFSEERYGEDRVDDLNRLEEAREATLIQSARYLQGMRRYHNRNVRSRAFLVGDLVLRKIQTTRDRHKLSPLWEGLFIVSEVTRPGSY

SEQ ID NO: 181555 - protein, 411 aa, Oryza sativa
  Clone ID: PAT_MRT4530_78817C.1.pep
MEFPTAGGSRFADGHMNNNNGFVQAVAGDPLAVVRDALLSQLQHDRLRQEIIVAELAKIERAMALRDASPSPSPSPGTPLERLRQVSILLRKLAPCKADTCLLGQYFANFLFSCKTWSCAVCEVQTSSERNLRDHYGGQKHQSKVAGLELKAKTATVKTTAKPSPVAGQRAHAARWSCSVCQVHCNGEWHFDTHLKGKRHQANTQALLEQSNKNSGNSESHDGTKAQPSNVSHHAEKKKRKKKKEEEEEATWICRACQAVCTCESDLQNHLRGRRHQLKVQALPEAAKQEKNNPPKLAKNPNKQPSEWVCSLCQAKCNTESQLEHHRRSTRHQQKVESLGWNAKESDLGTLQGMSSDGSSSKSVKISATMDKQKATYFCEVCSLKCTSQRMLADHLSGKKHIKQLELQLFS

SEQ ID NO: 181556 - protein, 956 aa, Oryza sativa
  unsure (1)..(956): unsure at all Xaa locations
  Clone ID: PAT_MRT4530_78818C.1.pep
MAGLVPPFSIFFMDILEFYDLQMAHLTPNAIMTLAIFAHLCEMFIGVSPSLRLFRWFFTVQPVSPPTVVGGCYFQPRGQVLNRYIPCVLRKKWDDWKSDWFYTPLVDEARLRLPSQPPAQASSWQAAVDLGDGYDAVLDRLVGLRSQGLTGAMVFGDYLRRRIAPLQRRARGAWEYTGPEDYMRTHQGRKWDWDPEDFRMVVQRVLNLSSVEASLIPQGVLPLCCDPERANILTIMQEVGASGERAPRGHVGAGGSRRGEQSTPGGGRASGPRDGDPGGSRPADARGKRKQEGTPPPSPPRGGGAVRASSRRPEGAVPTPQPEGERKKKRLRKMGGTEPCRVNLISPPRWSFSRPPRSEIPSHPPPPRHSMSGRSEAEETATAEARRREADRREAADRLREAEEAAQEAVRVRQAEEAAREEARLRRAGESVREAEAARARQAACQAPDPTPPEATMTSEATHDEAADAPLGPDPSGDAWDEPASGDAPGSGTSIGGPSRAAPTPRRLSPLPSAAPLSAEPLLQALAAANTTVLDGLSAQMEVLQAERAELDAAWARVEEGRRSVEAMVEAGRKAHRRHASELEARRRDLAEIAREVEEERETALIATAVLDEVRNDLRLQYGSQAAELEKKLDTARGVLDAAAARERRAAEIEAASRQREEALEARATALEERARALDAKEKDLADREAAVATREATLAAHEAACAEEESALRLREDALTERERALEEAEAAAQRLADSLFLREAAREEQARHNLEGARAERAALDQRAAELEARAKELDARAHSGGTAAGDGDLXARLAAAEHTIAGLQGALDSXRAGRQAGLWGGRTAKYAANQGGLAQRLSEMAGTLQRLPEELEETIKSSSRDLARGAVELVLASYQARDPDFSPWAALDEFPPGTEDGARAQVRDAADHIVHSFEGTAPRLAFALDSDEEGGDDGADDSDDEAGDPGASE

SEQ ID NO: 181557 - protein, 898 aa, Oryza sativa
  unsure (1)..(898): unsure at all Xaa locations
  Clone ID: PAT_MRT4530_78819C.1.pep
MAGLVPPFSSFFMDVLELYDLQMAHLTPNAVMTLAIFAHLCEMFIGVRPSLRLFRWFFTVQPVSPPSVVGGCYFQPRGPVLNRYIPCVLRKKWDDWKSDWFYTPLADEARLRLPSQPPAQASSWRAPVDLGDGYDAVLDRLAGLRSQGLTGAMVFGDYLRRRIAPLQRHARGAWEYTGPEDTMRTHQGRKWDWDPEDFRIVVQRVLNLSSVEASLIPQGVLPLCCDPERANILTIMQEVGASGERAPRGHDGAGGSRRGEQSTPGGGRASGPRDGGPGGSRPADARGKRKQEDTPSPSPPRGGGAVRASSRRPEGAVPTSQPEGERKKKRLRKIGGTEPSRGNLISPPRWSFSRPPRXARRREADRREAANRLREAEEAAQEAIRARQAEEAAWEEARLHRAEESIRETEAGACTRAXCQAPDPTPPDADDDXSEATHDEAAGAPLGPDPSGDAXDEPASGDVPEFGTSIGGPSLAQMEVLQVERAELDAVWARVEEGRRSVEAMVEAGRKAHRWHTSELEARRRDLAEIASEVEEERETALIATAVFNAARDDLCLQYGSRGAELEKKLDASRQREEALEARATVLEERARALDTKERELAGREAAVAIREATLAAHEAACAEEESALRLREDALTEREQALEEAEVVAQRLADSLSLREAAREEQACRDLEGARAERAALDQRAAELEARAKELDARARSGGAAAGDGDLAACLAAAEHTIAELQGALDSSAGEVEALRLAGEVGPGMLRDAISRLDRAGRQAGLWGGRIAKYAANQGGLAQRLSEMARTLQRLPEELEETIKSSSRDLARGAVELVLASYQARDPDFSPWAALDEFPPGTEDDACAQVRDATVHIVHSFEGTAPRLAFALDSDEEGGDGGVDDSDDEAGDPGASK

SEQ ID NO: 181558 - protein, 360 aa, Oryza sativa
  Clone ID: PAT_MRT4530_7881C.1.pep
MGIEQCLQLFLANMPKNESLLSATTYFWSNTINAIIFGHGPMTPTLLDIKMLTGLDITSLANPISLKNKSEYKIKTKAGGGWSGYIKRCRAIGPITDEEHISFLNLWLERFIFCGTTCGPTANFLHLAQAIHEEKSIPLEWKKHIFYQPTAFYLTIINTSIGPQDEDDGTKSSIRAKLLISDDLKANLLDLVNRLNVSLDALVVDCEPVWSKFNAIQALISKDLADVISPAAHLDQYNLKLQRAQQRLIDRQERQSLEATVTSSRQQILDYKSKLDKLIVGPESSQKKLDKLKQKESELLAQLEQIRQEMASEQQSNIIEFKSYRRAKIKIKASIKYLAGLTRAMKPIPGTDAEDRRTIE

SEQ ID NO: 181559 - protein, 230 aa, Oryza sativa
  Clone ID: PAT_MRT4530_78820C.1.pep
MVRGKTQMKRIENPTSRQVTFSKRRNGLLKKAFELSVLCDAEVALIVFSPRGKLYEFASASTQKTIERYRTYTKENIGNKTVQQDIEQVKADADGLAKKLEALETYKRKLLGEKLDECSIEELHSLEVKLERSLISIRGRKTKLLEEQVAKLREKEMKLRKDNEELREKCKNQPPLSAPLTVRAEDENPDRNINTTNDNMDVETELFIGLPGRSRSSGGAAEDSQAMPHS

SEQ ID NO: 181560 - protein, 78 aa, Oryza sativa
  Clone ID: PAT_MRT4530_78821C.1.pep
VWNFGSSEPDGLDFNVLKNLQNLQADKSYKFEQRTNGETTNATLTTSDRNITAALPLKLELNVHTQSRYLVATASGTP

SEQ ID NO: 181561 - protein, 831 aa, Oryza sativa
  unsure (1)..(831): unsure at all Xaa locations
  Clone ID: PAT_MRT4530_78822C.1.pep
MARGSALLDGLVPPFSSFFMDVLEFYDLQMAHLTPNAVMTLGIFAHLCEMFIGVRPSLRLFRWFFTVQSVSPPSVVGGCYFLPRGPVLNRYIPCVLRKKWDDWKNDWFYTPLGDERRLRLSSQPPAQGFSWRAPVDLGDGYDAVLDRLGGLRSQGLTGAMXKQAPKGHDGAGGSRRGDQSTPEGGRASGPRVXGGSGSNRPTDARGKSNLGGTPPPSPPRGGGAVRASSRRPEGAAPTSQPEGERKKKRLRKMGETEPSRGNLISPPRWSFNRPPRSDIPSRSSHHPKSGQSEAEDPAAAEARRRESDRREAADRLREAEEAAREAARARQAEDTAREEAARARQAEEAAREEAARDQTGPGDIPEAGTSIGGPSRAASSPRQLFPMPSVAPLSAEPLLQALAAANTAVLDGLSAQVEALQAERAELDAAWARVEEGRHSVEAMVEAGRKAHRRHVSDLEARKTALAEIAREVEEERGAALIATTVMNEAQDSLRLQHGNWEAELKKKLDAAQGVLDAAAAREQRAAETEAALRRREEALEARAMALEERACVAEKDLADHEAAVASREATLVAHESACAEEESALRLREDALAERERALEEAEAEAQRLADSLSLREAALTEQARRNLESVRAERAALEQRAADLEAREKELDARARIGGAAAGESDLTARLADAEHTVADMQRALDSSAGEAEPSAGLWKGQTIKPAANLGGLAQRLSKMAGALQQLPEELEKTIKSSSRDLAQGAVELVLASYQARDPNFSPWMALDEFPPGTEDSARAQVRDAADHIVHSFEGSAPQLAFAPNSDEEGDASGADDVEDEAGDPGASE

SEQ ID NO: 181562 - protein, 215 aa, Oryza sativa
  Clone ID: PAT_MRT4530_78823C.1.pep
NRVGCQRQKPKGSQSSERSLRHTSWGVVGGSLKSWSSSSRLDGLGGAMQIAYGYGRGPKRKAEEEREGREGRGGRGERRASEQLWLRPNPTAPPPPLLAFFGESPFADSQIPLRFTTFALSAAPPIGIKKKRAASLAAPPPPPPPCRPQPLVWLVGSSAIEDGAGEDADEADREPHEPPGHLLQAPQRPAKKAFELSVLCDAEVALIVFSPRGKL

SEQ ID NO: 181563 - protein, 148 aa, Oryza sativa
  Clone ID: PAT_MRT4530_78824C.1.pep
MAEFLFEDIFTVTRPDPDGKKFDRVSRIEARSDQFDMYMQLDVATDVYPMHPGDRFTMVLVPTLNLDGTPDSAFFTQAGRKTLADKYEYVMHGKLYKISEDKDTSDPKTKKVEMYASFGGLLVMLKGDPSSAANFELDQRLFLLMRKV

SEQ ID NO: 181564 - protein, 107 aa, Oryza sativa
  Clone ID: PAT_MRT4530_78825C.1.pep
MMSSKCANSWMMTMKKKKIHLLFNEVDLGAFTNCSSALGTLKPSQLVLRLFIDSEMLTMMESPSQTVLRTFIDLMTTMMVMMKDLHKLFFGPSLIDDDVNSDGKLVI

SEQ ID NO: 181565 - protein, 1612 aa, Oryza sativa
  Clone ID: PAT_MRT4530_78826C.1.pep
MGFVSGIDDFAFPPGQAFRFGSLNFITNDFGKISLLDSDSNQSGRDQVQVPFGIPNSAKTYSKIISPESASNHSDEIQSTLPRPDQDDGSYPSILMKLPDDLAAVFTVKTSPTRRSRRAPASAPIRSRSREVGVILQPLGTVSTEELDGYLSSPGVSSRPTEILHYDDFGYHYDHGDLDNFDDSYEDNYMPLFFGVFMADNETEEQRQAREADQERTCQETERRRLEEERQRQERERLQREQQDRERVAKEAEDRRQRALESGRRARDLIGQQDIDGTTVFRTPQQNAVAAITLLDTLLKEDALNQADHVVNILNQTKTMIAASVPANSASTRTPTGSRVPHLRSQDYHQPSLSIIGTGSSRRSRDHGERSVHSPPERHRERRVERPHSPPHQHPVDLRDMINQRRAARGHRYSPDRYDDDVDGVAAFTNDLRRVDWPVSFKPTGIEKYDGTTNPESWLTVYGLAIRAVGGGSKAMANYLPVALADSARSWLHGLPRGTIGSWAELRDHFIANFQGTFERPGTQYDLYNVIQKSGESLRDYIQRFSEQRNKISDITDDVIIAAFTKGIRHEELVGKFGRKPPRTVKLMFEKANEYAKAEDAVTASKQSGPSWKPKKDTPATGGSGSNNHKDRKRKPEELVATAAHSSRQRSRVNTFDKIMNSQCPHHPNSNHVAKDCFVYKQFAEQYAKTARKPSDGDQGTSKKKDDEDDAPTGFQDHRKELNHIFGGPLAYESKRKQKLTEREINAVQPDTPQYLRWSEIAIKFDRSNHPDRVVHPGRYPLVLDPVVRNVKLRRTLIDGGSALNILFAKTLDDMQIPRTELKPSNAPFHGVIPGLSAIPLGQITLLVTFGTRENFRTENVCFEVADFKTAYHAILGRPALAKFMAVPHYTYMMMKMPGPQGVISLRSDIKQAVTCDKESCEMAQTHEITLAREEIRLAATTASEGEESALITFLQNNKDIFAWKPSDMPSIPREVIEHSLHVKQEAKPIKQRLRHFAQDRKDAIKEELTKLLAVGFIKEVLHPDWLANPVLVRKKTGQWRMCVDYTDLNKYCPKDPFGLPRIDQVVDSTAGCELLSFLDCYSGYHQIRLKESDCLKTLFLTPFGAYCYITMPFGLKNAGATYQRMIQRCFSTQIGRNVEAYVDDVVVKTKQKDDLIADLEETFTSIRAFKMKLNPEKCIFGVPLGKLLGFMVSQRGIQANPEKINAILNMKPPSSQKHVQKLTGCMAALSRFVSRLGEWGMPFFKLLKKTDNFQWGPEAQKAFEDFKKLLTTTPVLASPHPQEPLLLYVLATSQVVRKLEDKFDGLELTHVLRHNNEAADRLANFGSKREAAPSDVFVEHLYEPTVPRKETLEAMDTQGVSMIETDWREPLIKFLTKQELPQDKNEAERISRRSRLYIIHKTELYKKSPSGILQRCVFLEEGRQLLKDIHSGICGNHAAARTIVGKAYRQGFFWPTAVSDADKIVRTCEGCQFFARQIHLPAQELQTIPLSWPFAVWGLDMVGPFKRAVGGYTHLFVAIDKFSKWIEAKPVITITANKARDFFINIVHRFGEPNRIITDNGTQFTGGAFRDFCEDFGIKICYASVAHPMSNGQVEHANGMILQGIKARIFD

SEQ ID NO: 181566 - protein, 1623 aa, Oryza sativa
  unsure (1)..(1623): unsure at all Xaa locations
  Clone ID: PAT_MRT4530_78827C.1.pep
MGFFSGIDDFAFPPGQAFQFGSLNFITNDFGKISLLDSDSNQSGRDQVPVAFGIPNSAEAYSKIISXDSASNHSDEIQSTLPRPDQDDGHLPPEDLGELRLRPRSNLDPESSRPTEILDYDNFGYHYDHGDLDNFDDSYEDNYTPLFFNVFMADNETEEQRQAREADQDSARQEAERRRLEEERQRQERERLQREQQDRERIAKEAEDRRQRALESGRXVRELIGQQDVDGTAVFRTPQXNAVAAITLLDTLVKEDVLNQADHVVNILNQTKTMIAASVPANSASTHTPTGSRVPQLQSHDYHQPSLSIIGIGSSRRSRGHDERSVHSPPERHRERRVERPRSPPHQRPVDLRDTINQRRAARGHRHSPNRYDDDVDGVAAFTNDLRRVDWPAGFKPTGIEKYDGTTNPESWLTVYGLAIRAAGGDSKAMANYLPVKSGESLRDYIRRFSEQRNKISDITDDVIIAAFTKGIRHEDLVGKFRRKPPRTVKQMFEKANDRAPLVKPKKDTPTVGGSGSTNHKDRKRKPKELVATTSPSSRQRSRVNTFDKIMNSQCPHHPNSNHVAKDCFVYKQFAEQYVKNARKPSDGDQGTSKKKDDEDDAPTGFPDHRKELNYIFGGTLAYESKRKQKLTEREINAVQPNTPQYLRWPEIAIKFDRSDHPDRVVHLGRYPLVLDPVVRNVKLRRTLIDGASALNILFAKTPDDMQIPRTELKPSNAPFHDVIPGLSATPVGQITLPVTFGTRENFRTENVCFEVADFETAYHAILGRPALAKFMAVPHYTYMMMKMPGPGGVISLRSDIKQAVTCDKESCEMPQTHETTLAREEIRLAATTASEGEVPATKLTKTEESDAKTKKIPLDPSDPDKTANNKDIFAWKPSDMPGIPREVIEHSLHVKEDAKPIKQRLRRFAQDRKDAIKEELTKLLAAGFIKEVLHPDWLANPVLVRKKTGQWRMCVNYTDLNKSCPKDPFGLPRIDQIGHNVEAYVDDVVVKTKQKDDLIADLEETFKSIRAFKMKLNPEKCIFGVPSGKLLGFMVSQRGIQPNPEKINAILSMKPPSSQKDVQKLTGCMVALSRFVSRLGERGMPFFKLLKKTDNFQWGPEAQKAFEDFKKLLTTPPVLASPHPQEPLLLYVTATYQVPRTSIKSQALADFLAEWTECQEDMPEEKMEYWTMHFDGSKRLTGTGARVVLISPTGERLSYVLWIHFSASHNMAEYEALLHGLRIAISLGIRRLIVRGDSQLVVNQVMKEWSCLDDNMTAYRQEKSPSGILQRCVSLEEGRQLLKDIHSGICGNHATARTIVGKAYRQGFFWPTAVSDADKIVWTCEGCQFFARQTHLPAQELQTIPLSWPFAVWGLDMVGPFKRAVGGYTHLFVAIDKFSKWIEAKPVITITTDKARDFFINIVHQFGVPNRIITDNGTQFTGGAFKDFCEDFGIKICYASVAHPMSNGQVECANGMILQGIKARVFDRLRPYAGKWVDQLPSVLWSLRTTPSRATGQSPFFLVYGVEAMLPSEVEFESLRFRNFNEEGYEEGRVDGINRLEEAREAAFIQSTRYLQGLRRYHNRNVRSRAFLVGDLVLMKIQTTQDRHKLSPLWEGPFIIAEVTRPGSYRLKREDGTLINNS

SEQ ID NO: 181567 - protein, 2195 aa, Oryza sativa
  unsure (1)..(2195): unsure at all Xaa locations
  Clone ID: PAT_MRT4530_78828C.1.pep
MLAPPTDDELLHAQADMLRHSLYFVTSMAFQCAVKLGIPTAIHRAGGTASLPDLVAALSLPPAKLPFLRRLMRLLVNSGVFAAADDTATGWAGMYRLTPLSWLLVEGEGAAPVVDGHPSQVLVVLAATSRHFVEAAMGLADWFGKDLPPSSSAPPSPFEEVHGAVLFDESMASLHPEVDTVFNQALAAYDHSGFATVLRECSEVFQGVQSLTDCRGGDGAAAKAIVEAFPHIKCTVLDFPRVIGNKRGDGVVNYVAGDMFRAIPPAQAVMLKLVLHHWSDEDCVKILTQCKKAIPARKDGGKVIIIDIVIGAPSGPLLEAQLLMDVGMMVATKGRQRDENDWRDLFKKAGFNNYKIVKKLRARAVFERGAPSELAGREVRPQKDVLAARNWCSVAGLERKKVVLEETNRAVTPDDLSQVGVASSSRRLSAMGFVSGIDNFAFPPGQAFRFGSLNFITNDFGKISLLDSDSNQSGRDQVPVPFGIPNSAEAYSKIISPESASNHSDEIQSTLPRPDQDDGFYPSILMKLPDDLAAVFXPRHLLLEDLGELRLRPXSNLDLERLALYSNLLGQSRRKSWMVTLAPPASILDQPRSSTTTTSATTTTTVTSTTSTTAMRITTRPSSSARLKIDSNAPWNPGAERESSLGNKTSMEQWSXRTPQQNAVAAITLLDTLLKEDALNQADHVVNILNQTKTMIAASVPANSASTRTPTGSQVPHLRSHDYHQPSLSIIGTGSSRRSRGHDERSVHSPPERHRERRVERPHSPPHQRPVDLRDTINQRRAARGHRHSTNRYDDDVDGVAAFTNDLRRVDWPAGFKPTGIENTFERPGTQFDLYNVVQKSRESLRDYIRRFSEQRNKISDITDDVIIAAFTKGIRHEDLVSKFGRKPPRMVKQMFEKANEYAKAEDAITASKQSGTTWKPKKDTSTAGGSGSNNHKDRKRKPEELVATTSPSSRQRSRVNTFDKIMNSQCPHHPNSNHVAKDCFIYKQFAEQYVKNARKPSDGDQGTSKKKDDEDDAPTGFQDHRKELNHIFDGPLAYESKRKQKLTEREINAVQPNTPQYLRWSEIAIKFDRSDHPDRVVHPGRYPLVLDPVVRNVKLRRTLIDSGSALNILFAKTLDDMQIPRTELKPSNAPFHGVIPGLLATPLGQITLPVTFGTRENFRTENVCFEVADFETAYHAILGRPALAKFMAVPHYTYMMMKMPGPRGVISLRSDIKQAVTCDKESCEMAQTHETTLAREEIRLAATTASEGEVPTTKLTKTEESDAKTKKIPLDPFDPDKTADRKDAIKEELTKLLAAGFIKEVLHPDWLANPVLVRKKMGQWRMCVDYTDLNKSCPKDPFGLPRIDQVVDSTAGCELLCFLDCYSGYHQIRLKESDCLKTSFITPFGAYCYITMPFGLKNAGATYQRMIQRCFSTQIGRNVEAYVDDVVVKTKQKDDLIADLEETFTSIRAFKMKLNPEKYIFGVPSGKLLGFMVSQRGIQANPEKVNAILNMKPPSSQKDVQKLTGCMAALSRKLSHYFQSHLVTVVTSFPLGDILHNREANGRIAKWALELISLDISFKPRTSIKSQALADFXPSGPSAKKTCQRKRWNIGLCXFDGSKRLTGTGAGVVLISPTGERLSYVLWIHFSASHNVAEYEALLHGLRIAISLGIRRLIVRGDSQLVVNQVMKEWSCLDDNMTAYRQEVRKLENKFDGLELTHVLQHNNKAADRLANFGSKREAAPSDVFVEHLYEPTVPRKEIVEAMDTQGVSMIEAYWREPLVKFLTKQELPQDKNEAERIFRRSRLYIIHETELYKKSPSGILQRCVSLEEGRQLLKDIHSGICGNHAAARTIVGKAYRQGFFWPTAVSDADKIVRTIVGKAYRQGFFWPTAVSDADKIVRTCEGCQFFARQTHLPAQELQTIPLSWPFAVWGLDMVDPFKRVVDGYTHLFVAIDKFSKWIEAKPVITITADKARDFFINIVHRFGVPNRIITDNGTQFTGGAFKDFCEDFGIKICYASVAHPMSNGQVERANGMILQGIKARVFDRLRPNAGKWVDQLPSVLWSLRTTPSRATGQSPFFLVYSAEAMLPSEVELESLRFRNFNEEGYEEGRVDDINRLEEAREAALIQSTRYLQALRRYHCRNVRLRAFLVGDLVLRKIQTTQDRHKLSPLWEGPFIIAEVTRPGSYRLKREDGTLINNSWNIEHLHRFYA

SEQ ID NO: 181568 - protein, 135 aa, Oryza sativa
  Clone ID: PAT_MRT4530_78829C.1.pep
MEPLYKQVHGKKDLYVSSLVDMYAKCGRVRDARMIFEAMPSRNVVSWNAMIGGYAMHGEAENAHKHGISPRMEHYSCMVTLLGRAGFMEMWSLLSPWVMAVLDLLPPRWEGSPPPLPIAKCPPPPPRLIWSAATK

SEQ ID NO: 181569 - protein, 105 aa, Oryza sativa
  unsure (1)..(105): unsure at all Xaa locations
  Clone ID: PAT_MRT4530_7882C.1.pep
RTLISPSHAGRGATTIAAALDCRRSAVXHPSSRRHRSPRHRRHRRPRLPPLRRCRIRRLPATDPRRRLALNRSPSPSSHPSPSTDPHRRRRPGFTSPPTPSAPSY

SEQ ID NO: 181570 - protein, 165 aa, Oryza sativa
  unsure (1)..(165): unsure at all Xaa locations
  Clone ID: PAT_MRT4530_78830C.1.pep
HSCFLHQSTARVAARVASPXPATRTHLLLCRSQXXDXXXXSRRAALALLAGTTXXXGXKVAPPXAGYGXAXNXFXXPXTNXXFIXYSGEGFXLLIXPXGTXXGXXFPGQVLRYXEHFXPTANVSVIIXPPPQXNXXXFGXPQEFLPXVNSCLQAGLLRNLKGLIR

SEQ ID NO: 181571 - protein, 558 aa, Oryza sativa
  unsure (1)..(558): unsure at all Xaa locations
  Clone ID: PAT_MRT4530_78831C.1.pep
MSRFWRPGSEKPTAAIVEDEEGGVLFLPTSTSSSSSSGFGYASLERQRQRLPVYKYRKAILYLVERHATTIVVGETGSGKSTQIPQYLKEAGWAEGGRLIGCTQPRRLAVQGMTMIKFLTDGVLIREMMEDPLLTKYRRKNSMLESADHLPNPEPAILSVEGKGYTVEIHYVEEPVSDYLQAAVNTVLIIHEKEPPGDILVFLTGQDDIDAAVKMLNEEIQHRGRHYLGCYSSDDLLILPLYSGLPRGDQDLIFTPTSKGKRKVVISTNIAETSLTLEGVVYVVDSGFSKQKCYNPISDIESLVVAPISKASARQRAGRAGRVRPGKCFRLYTEEFYLKEMQPEGIPEMQRSNLVSCITQLKALGIDNILGFDWPASPSPEAMIRALEVLYSLGILDEHAKLTVPLGFQVAEIPLSVWVSTRGVKKEFDDFKLRFAAAEKKVINIRGXLVSIFKGFGISLRSCDRDTEVVRXGIIAGAFAYACHLEGRFFPHTSPAYSQNVISLXKPIIRVNSKWFIYQSLVSSDKHFMRNVIAIEPSWLTEAAPHFYQFRTPNPALH

SEQ ID NO: 181572 - protein, 1767 aa, Oryza sativa
  Clone ID: PAT_MRT4530_78832C.1.pep
MAATASSSSTATASPLLLPSARRPLPSSKPWLPDGRAFRGSRALSSAARRCFCCCCRCEAAGEAGTAPPPQQRGVDDGGVVCTSATRSRRRSVLGVAVGVSSALALGLAAFDDALAAGLPPEEKPKLCDAACEKDLENVPMVTTESGLQYKDIKVGEGPSPPIGFQVAANYVAMVPNGQIFDSSLEKGQPYIFRVGSGQVIKGLDEGILSMKVGGLRRLYIPGPLAFPKGLTSAPGRPRVAPSSPVMFDVNLLYIPVVLRNRQGLPNEHNVLSVKSETVGKGKFSVLQKGTFERLGTQFDLYNVVQKSGESLRDYIRRFSEQRNKISDITDDVIITAFTKGIRHEDLVGKFGRKPPRTVKQMFEKANEYAKAEDAITTSKQSGTTWKPKKDTPTVGGSGSNNHKDRKRKPEEPVATTSLSSRQRPRVNTFDKIMNSQCPHHPNSNHVAKDCFVYKQFAEQYVKNARKPSDGDQGTSKKKDDEDDAPTGFQDHRKELNHIFGGPLAYESKRKQKLTEREINAVQPNMPQYLRWSEIAIKFDRSDHPDRVVHPGRYPLVLDPVVRNVKLRRTLIDGGSALNILFAKTLDDMQIPRTELKPSNAPFHGVIPGLSATPLGQITLPVTFGTRENFRTENVCFEVADFETAYHAILGRPALAKFMAVPHYTYMMMKMPGPRGVISLRSDIKQAVTCDKESCEMAQTHETALAREEIRLAATTASEREVPATKLTKTEESDAKTKKIPLDPSDPDKTDNNKDIFAWKPSDMPGIPREVIEHSLHVKEDAKPIKQRLRRFEQDRKDAIKEELTKLLAAGFIKEVLHPDWLANPVLVRKKTGQWRMCVDYTDLNKSCPKDPFGLPRIDQVVDSTAGCELLSFLDCYSGYHQIQLKESDCLKTSFITPFGAYCYITMPFGLKNVGATYQRMIQRCFSTQIGRNVEAYVDDVVVKTKQKDDLIADLEETFTSIRAFKMKLNPEKCIFGVPSGKLLGFMVSQRGIHANPEKINAILNMKPPSSQKDVQKLTGCMAALSRFVSRLGERGMPFFKLLKKTDNFQWGPEAQKAFEDFKKLLTTPPVLASPHPQEPLLLYVSATSQVLADSKTRYPQVQKLLYGALITVRKLSHYFQSHPVTVVTSFPLGDILHNREANGRIAKWALELMYLDISFKPRTSIKSQALADFIAEWTECQEDMPEEKMEYWTMHFDGSKRLTGTGAGVVLISPTGERLSYVLWIHFSASHNVAEYEALLHGLRIAISLGIRRLIVRGDSQLVVNQVMKEWSCLDDNMTAYRQEVRKLEDKFDGFELTHVLRHNNKAADRLANFSSKREAAPSDVFVEHLYEPTVPRKEAIEAMDTQGVSMIEADWREPLIKFLTKQELPQDKNEAERISRRSRLYIIHEAKLYKKSPSGILQRCVSLEEGRQLLKDIHSGICGNHAAARTIVGKAYRQGFFWPTAVSDADKIVWTCEGCQFFARQTHLPAQELQTIPLSWPFAVWGLDMVGPFKRAVGGYTHLFVTIDKFSKWIEAKPVITITADKARDFFINIVHRFGVPNRIITDNGTQFIGGAFKDFCEDFGIKICYASVAHPMSNGQVERANGMILQGIKARVFDRLRPYAGKWVDQLPSVLWSLRTTPSRATGQSPFFLVYGAEAMLPSEVEFESLRFRNFNEEGYEEGRVDNINRLEEAREAALIQSTRYLQALRRYHNRNVRSRAFLVGDLVLRKIQTTQDRHKLSPLWEGPFIIAEVTRPGSYRLKREDGTLINNSWNIEHLRQFYA

SEQ ID NO: 181573 - protein, 664 aa, Oryza sativa
  Clone ID: PAT_MRT4530_78833C.1.pep
MSTRSTTSSVLNFLRHVSFPPDPRLLPSALKSCSALRLARALHAAAAVAGVSRDAFVASSLLHAYLRFGATADARSVLDGMPHRTVVGWSALIAAHASHGDAEGAWGLLERMRSDGVEPNVITWNGLVSGLNRSGRARDAVLALVRMHGEGFLPDATGVSCALSAVGDVGDVAVGEQLHGYVVKAGCRLDACVATALIDMYGKCGRADEIVRVFDESSHMDVASCNALVAGLSRNAQVSEALRLFREFVGRGIELNVVSWTSIVACCVQNGRDLEAVDLFREMQSEGIEPNSVTIPCVLPAFANIAALMHGRSAHCFSLRKGFHHDIYVGSALVDMYAKCGRVRDARMIFEAMPYRNVVSWNAMIGGYAMHGEAENAVRLFRSMQSSKEKPDLVTFTCVLGACSQAGWTEEGRSYFNEMQHKHGISPRMEHYACMVTLLGRAGKLDDAYDIINQMPFEPDGCIWGSLLGSCRVHGNVVLAEVAAENLFQLEPENAGNYVLLSNIYASKKMWDGVNRLRDMMKTVGLKKEKGCSWIEIKNKVHMLLAGDSSHPMMAAITEKLKHLTMEMRRLGFAPSTDYVLHDVEEQEKDDILSVHSEKLAVALGLISTSHGTPLQVIKNLRICGDCHEAMKFISSFERREIYVRDTNRFHHFKDGKCSCADYW

SEQ ID NO: 181574 - protein, 200 aa, Oryza sativa
  unsure (1)..(200): unsure at all Xaa locations
  Clone ID: PAT_MRT4530_78834C.1.pep
QNLARQRQSLTVNNEPAQLNSLTLASSKTNTTRYVIKLSKFYNPIRLPTTVLTSNGHXIYIRTPFWVYEYLMKSNQSPLSNGSSLIFKFHLSRSQSXKQTHVSXDPLIXVFGTSHYREFXIPICSSDCFXYLVIICFFDLLAGIRLICTGNINNSLRDVSIAKAQHNNISYGCSRVNNFSPKSXLSLTHRKIGPIRTVSV

SEQ ID NO: 181575 - protein, 89 aa, Oryza sativa
  unsure (1)..(89): unsure at all Xaa locations
  Clone ID: PAT_MRT4530_78835C.1.pep
MKHNYGKPSSTPMMMTHAMDLQQHLCCMQLRGMKAQXHTRATSCLEDRTSMQQDIFAGXLGEHEMMNMXMQMPYMCNMAPVNFQLSSCG

SEQ ID NO: 181576 - protein, 217 aa, Oryza sativa
  Clone ID: PAT_MRT4530_78836C.1.pep
MVSNKNAMSSSVLFLAALLLLSCSSMSSAARWLEEEYPPHPAVPELPKHEEPPHPVVPELPKHEEPPHPAVVPELPKHEEPPHPVVPELPKPEVPHAAVPELPKPELPPHPAVPELPKHEEPPHPVVPELPKHEEPPHPVVPELPKHEEPPHPVVPELPKHEEPPHPVVPELPKHEEPPHPVVPELPKHDEPPHPVVPELPKHEEPPHPVVPELPKH

SEQ ID NO: 181577 - protein, 275 aa, Oryza sativa
  Clone ID: PAT_MRT4530_78837C.1.pep
DFENGLVSLDSRQMEITDFFRQRYQWDVLAARSIWAFGPEKQGPNILLDDTLSVEVDKNLLNAVKDSIVQGFQWGAREGPLCDEPIRNVKFKILNANIAPEPLHRGGGQIIPTARRVVYSAFLMANPRLMEPVYYIEIQTPIDCVSAIYTVLSRRRGHVTADVPKPGTPIYVVKAFLPVIESFGFETDLRYHTQGRAFCLSVFDHWAIVPGDPLDKNIVLRPLEPAPIQHLAREFMVKTRRRKGMSEDVSINKFFDEAMMNELAQQAADLHLQMM

SEQ ID NO: 181578 - protein, 452 aa, Oryza sativa
  Clone ID: PAT_MRT4530_78838C.1.pep
MFLLLWFLDTLLQGQAMDRRNQAPPVDSSACLCRVERSVAGAAAARLMPRAKACAQPSLRASIHPLKPKRSPGRDHRGGGGAGGGGGRQCPLIPGLPDDLAVACLIRVPRGDHWKLRLVCRRWSRLLAGNYFYGLRRRLGLAEQWVYAVKRDGEGRVSWDVLDPARLAWRALPPVPGEYAGAAGFGCAVLGGCHLYLLGGSDPRRGPMRRVVFYSARSNRWHRAPDMLRRRHGFGCCVMGNRLYVAGGEGCGVGGGGGGGLRSVEVFDPAKNRWSFVSDMAASLMPFVSAVHGGRWYVKGLGAQRQVMSQVYSPEADAWSAAHELDAMVTGWRSPSASLGGRLYAADCKDGCRLRAYDEAAGAWSGRVDGGQHAGSSHAVEAAAMVALHGKLCVVRNDMSVSVVDVAAASPRWETVVGKGQMKAFVANLLSAIAGGRGRAKNRVLHCQVLEA

SEQ ID NO: 181579 - protein, 172 aa, Oryza sativa
  Clone ID: PAT_MRT4530_78839C.1.pep
MAVDPALLRAAPPDPPPADAIDAVAIRRPAEIHFSPDHSCRPVSGSLAPPPAVIPTAIRPAAGERRIEMAFLDGLYGGGGGRRRMATTAKGAGAGRRRSSAAVAAPRPVRQLYWKLRSRLRSSSSKRHGGGGAAARFGYDLLILLERMGFSAKWRDWVALILSASSSRVSLF

SEQ ID NO: 181580 - protein, 330 aa, Oryza sativa
  Clone ID: PAT_MRT4530_7883C.1.pep
MATRNRTPLYRKYRDALRHVRAPAGAPSSSSSGGGGGGGGGGPVIEMASLLRSNRPYAPLSTDDPSAASSRSAVTVGLPPAWVDVSEEISANMQRARTKMAELAKAHAKALMPSFGDGRDDQRAIEILTHEVTDLLKRSEKRLQKLSMKDSSEDSNVRKNVQRSLATDLQSLSMEFRKKQSTYLKQLRQQKEGQDGVDLEMNMNGSKSTFELGDDEFEDVGFTEVQMSKLKKSEAFTREREREIEQVVESVNELAQIMKDLSVLVIDQGTIIDRIDYNIQNVAASVEEGYKQLQKAERTQKKGGMVMCATTLVILIFIMVGLLIKLEVLF

SEQ ID NO: 181581 - protein, 47 aa, Oryza sativa
  Clone ID: PAT_MRT4530_78840C.1.pep
VKVLMSAKFSTGQYTGPSPGYGAHKLDKRPRLKIELLEPDRMFNFQR

SEQ ID NO: 181582 - protein, 37 aa, Oryza sativa
  unsure (1)..(37): unsure at all Xaa locations
  Clone ID: PAT_MRT4530_78841C.1.pep
FFFFFFFFFFFFFFFFFFFFFFFFXPFKSNIHTHSRQ

SEQ ID NO: 181583 - protein, 79 aa, Oryza sativa
  Clone ID: PAT_MRT4530_78842C.1.pep
MGGRVGTSRRLRLRLGRQQQAPPARSEPIMADVKIETDVTFGAQPKKRTFRKNSYRGVDLHTLLDMTTNDLEQLFPARA

SEQ ID NO: 181584 - protein, 235 aa, Oryza sativa
  Clone ID: PAT_MRT4530_78843C.1.pep
MASAQDPFYIVKDEIQESIEKIQDTLHQWKQTPENTGEHVHLTKEIIASCESIQWQVVELEKAISVAERDPAYYGLNEVEIGKRRNWTSTARNQVVSIRRCVEAGKQKSAFGHSVNPSELVRSKQHIAQDNDDFIASESDQQMLLIKRQDEELDELSASVQRIGGVGLTIHDELVGQERLLGELSLDMETTTNRLDFVQKRVAMVLKKASLKGQIMMIAFLVVLFIILLVLVFLT

SEQ ID NO: 181585 - protein, 244 aa, Oryza sativa
  Clone ID: PAT_MRT4530_78844C.1.pep
ASWRTRCSATSSPSSRLGRRRARRRSRRGGATCSPPCTRCPWPRPTPTTPRSAATSARRTAAASTPSRRRSSPPSSPPRSSRATAASTAAPGSPTPCSRRPPTTASRSISASAAPRSATAPTLSATARTSPRTTTTTTTMTMPRTSNMTTPPTTTTRNKKREIARRRRRDGLLVIAPLARTTTTTSPPPTTRSCSPTTPRTSTSNPPASAPAPTRTRWPASPPSPTSATSSSGEAFPTTTPPPR

SEQ ID NO: 181586 - protein, 340 aa, Oryza sativa
  Clone ID: PAT_MRT4530_78845C.1.pep
MAAAAVKSPEPPFAFRPARPPLPPLLDDEEDGEFEFSVPAAAAVLSAADELFSGGRLVPMLPPPPRRPPSSSSPPCSPPPCLEVPPSEPASPRAPRCGGHRWRDLLTLVSKRTSDGEAKDRVVGGSPRRREAHAQPLLSRASSSSSSASSCDSGIRNARRPPRTRSAPVASLLHLMSKKPAAVDAPPKRRDHHHQRFLARASSSSSSSASSSSDSGRNSRTPWHPPGPARPRPAVAAESPRVSASGRVVFRGLERCSSSPATAGIGPRRPRPRGMERSFSANVRVDPVINVFGFGHLFLPSSPAKEKKADKDRDIAGGGGGGGRRNRPAKLAMVLRDPQD

SEQ ID NO: 181587 - protein, 63 aa, Oryza sativa
  Clone ID: PAT_MRT4530_78846C.1.pep
MTQACSSFETTDVPMWGPAAEHTLSPDVSWSKPHTGATSSFEDGIFEGYLVAVTIYIRCCTES

SEQ ID NO: 181588 - protein, 110 aa, Oryza sativa
  Clone ID: PAT_MRT4530_78847C.1.pep
ERGLIGSYQDWCEGMSTYPRTYDLIHADSVFTLYKNRCEMDIILLEMDRILRPEGTVIIRDDVDMLVKVKSPADGMRWDSQIVDHEDGPLVREKILLVVKTYWTAKEQDQ

SEQ ID NO: 181589 - protein, 83 aa, Oryza sativa
  Clone ID: PAT_MRT4530_78848C.1.pep
NSGAARLFLCFLRTTIGGVFFCLAVKPWGCLVPARGNGSRYCFPQNCLPFRLFTGFYRKTLTNFALNRVVILRATTDLEFFFF

SEQ ID NO: 181590 - protein, 377 aa, Oryza sativa
  Clone ID: PAT_MRT4530_78849C.1.pep
MLTDELERKRYRTLILMADTFLANDLRQFPSAKRKASLYTSTLANIFILMLKGSTGIQLLSLFSGYMKDDVSSAVETQLAESCRLESGVETCRLLVSSVAVKCEASNSPSTTVGFDRMIAADYDLFHHMSFSPSLQNLQSPTFFTTRSSESYLGESSIYGGGARPALAQFSYSQPIAATSAAHLVRWTAAGEPMTGDGGFRSSKRLKTATTATTQPPRHGVKCHAKPRNQTTKATCKKRSQKLGDRITALQQLVSPYGKTDTASVLHEAAACIRQLHQQIQILTAPYPGTSSSSASSQQQVVFSVLESCSHVMSFFTAIATVLWLQDAGGGGGTATELRRRGLCVAALSPAVVSLAAEGGRRRTDVEDQKRIWFSNQ

SEQ ID NO: 181591 - protein, 61 aa, Oryza sativa
  Clone ID: PAT_MRT4530_7884C.1.pep
MFNITCICDRLTASKLLSQQLSMLRICLVLLICNSGSLSHPLLPQHVRLRYSVNMHARVRA

SEQ ID NO: 181592 - protein, 348 aa, Oryza sativa
  Clone ID: PAT_MRT4530_78850C.1.pep
MDGLHTELALGLIGCCGGDGQQQTAPFVAKTYQMVCDPRTDALVRWGRDNNSFVVVDPAAFSQLLLPCFFKHGNFSSFVRQLNTYVSIIQSPAPGFRKVHPDRWEFAHESFLRGQTHLLPRIVRRKKRGEGGGGGGGASCSFGGGAGEHQVAAAAASVGMSGEEEDAAEDVLAKEAALFEEVQRLRHEQTAIGEELARMSQRLQATERRPDQLMSFLAKLADDPNAVTGHLLEQAAERKRRRQHLPSHEPTVCPLPPAPPPQPPQPLLALAGAAAMDGTYWWTTEHHHHHHHQMKPMTVLPSLEPPTASCGVHQVPELGGGGVMGLTTDGEAKVEPPFPFCLLGQAFF

SEQ ID NO: 181593 - protein, 137 aa, Oryza sativa
  unsure (1)..(137): unsure at all Xaa locations
  Clone ID: PAT_MRT4530_78851C.1.pep
HLHVGPPVRFIVFSFFPISLHHDLLKPSVNVKLHRLSLALVGVVPSDIAGCSXTTVPIMADTDKPGVMYDDINGCEAQKQELREGVKLPLTHPVLLHGPPGAGKSMRAKVIVCETSVGILRHEQHQACMVQWAEYGA

SEQ ID NO: 181594 - protein, 222 aa, Oryza sativa
  Clone ID: PAT_MRT4530_78852C.1.pep
MSAGDTLDKLVVFLAKRDGIDKLVKTFQYVSKLAHWAAESSSPGLAGRAKNWETSAGLSRKAFRTGRFLTGLNGLRRAPGEFGALAVLANAGEMVYFFFDHFTWLSRVGVLDAWLARRMSFISAFGESVGYVFFIAMDLIMIRRGLRQERKLLREGGKDKDKEVKKIRMDRVMRLMATAANVADLVIGIADIEPNPFCNHAVTLGISGLVSAWAGWYRNWPS

SEQ ID NO: 181595 - protein, 52 aa, Oryza sativa
  Clone ID: PAT_MRT4530_78853C.1.pep
WRRRQRSPSHPQDVQPYLITSLDCCCENGHPIILLLLHPAFIARSDSTLTLI

SEQ ID NO: 181596 - protein, 37 aa, Oryza sativa
  Clone ID: PAT_MRT4530_78854C.1.pep
MWPPFSLSPRGVGPLPFRPRGPRRPDPLWVLRRMYGL

SEQ ID NO: 181597 - protein, 111 aa, Oryza sativa
  unsure (1)..(111): unsure at all Xaa locations
  Clone ID: PAT_MRT4530_78855C.1.pep
MAETPSITTAAFPPKFAVHRLHLPPRNRLDPALHCTSNIRKSFGYLIGWVYIVIDQEFVCTQKKKKKKNPMNEHIKNTYFHQKKKKKKKKKXKKKKKKKKKKKKKKKKKKK

SEQ ID NO: 181598 - protein, 236 aa, Oryza sativa
  Clone ID: PAT_MRT4530_78856C.1.pep
MDGGGDPVDEFLIGGGGEDGDLGVFCDGVPTLPCDGGLGIDDVSGDTCCLDQSVLGKRGRDESSSSGPKSKACREKIRRDRLNDRFLELSSVINPDKQAKLDKANILSDAARLLAELRGEAEKLKESNEKLRETIKDLKVEKNELRDEKVTLKAEKERLEQQVKALSVAPTGFVPHLPHPAAFHPAAFPPFIPPYQALGNKNAPTPAAFQGMAMWQWLPPTAVDTTQDPKLWPPNA

SEQ ID NO: 181599 - protein, 82 aa, Oryza sativa
  Clone ID: PAT_MRT4530_78857C.1.pep
MVLAVDLLNPSPAAEAKKHKLKTLVPAPRSFFMDVKCPGCFTITTVFSHAQTVVICQGCTTVLCQPTGGKARLTEGCSFRRK

SEQ ID NO: 181600 - protein, 143 aa, Oryza sativa
  unsure (1)..(143): unsure at all Xaa locations
  Clone ID: PAT_MRT4530_78858C.1.pep
MAATPASKDVETSAGAAASTVVVVAAASGXGKPSLWXAGESGGTVPSSPAGGHRGERAADLVQPPCRRLATPLALLPTTLLPPPPRSFPRRRQRPSLAPASPSLSPPCSPPLPSCFPPHPSSCGPSPLPVSRSVSHSRRAAAG

SEQ ID NO: 181601 - protein, 38 aa, Oryza sativa
  Clone ID: PAT_MRT4530_78859C.1.pep
NLISSINTYYSNKHIHSNINTLSHTYKLHYLKSYLHPQ

SEQ ID NO: 181602 - protein, 60 aa, Oryza sativa
  Clone ID: PAT_MRT4530_7885C.1.pep
MQADRVHRSRSARHGRLIVSANRRVVASPGSIWVAADLESIHMLSHCCSTQCVVLPFFQV

SEQ ID NO: 181603 - protein, 72 aa, Oryza sativa
  Clone ID: PAT_MRT4530_78860C.1.pep
QHIHHKFISILDTFKKEIYTTTEFPTHPQAQQLRHTYNNYICSTNHRHYPISYIHHCIFYIQKLYHKTNPPH

SEQ ID NO: 181604 - protein, 466 aa, Oryza sativa
  Clone ID: PAT_MRT4530_78861C.1.pep
MASASDPAEVELHGQREPHASSSSTDASIPAPTSAAAAAADVPPPPSSSSSPPPPPPSSVEGRTKQPGGGGRGADAASSTSAAAAVEQKGKKKISASDDREQAEGDEEERKSDSQKKKLAGRRRRRRLNLAAYQGDAKKPSDDVNLARRPGKLPWDDPRVWKPHVTPVSTVKKSLGISILVYISNKFLRRKGSPAGFSNLKYKQQPLVQHQKIPLASAPEHYGLRSGLRRIMSANLLILLNEYSDFRPEQVLDMVGTDEENRLLAAVGAIDHRQWASGFSQSHKLFVRFNMHGYCITDSQVFEKLIQNVMRWKRRQKGVASADSRRQKLLEFFSSYSKSDGILAFLKYAAANWICSHREEYEPNIAGLGGGYTLEAWCEIYLLQPREQTDHIQMTAVAAALGVPLRVENLHNGPAQDIYTADGVNIPRVTLLYTGVHYDILYPRHPSGGSGSKSSTQRAGCFRPFW

SEQ ID NO: 181605 - protein, 89 aa, Oryza sativa
  unsure (1)..(89): unsure at all Xaa locations
  Clone ID: PAT_MRT4530_78862C.1.pep
RGXXXRXEEXNHTPRLRMHNGMTPVLPNKDDLISHQKHDFGKEKGKENAQEDKFPAFGNRPLSLELGVAGSLEIERDGEHQGEHLSRRG

SEQ ID NO: 181606 - protein, 223 aa, Oryza sativa
  Clone ID: PAT_MRT4530_78863C.1.pep
MAADKGVKVFGMWASPMAIRVEWALRLKGVDYEYVDEDLANKSEALLRHNPVTKKVPVLVHDGKPLAESTVIVEYIDEAWKHGYPIMPSDPFDRAQARFWARFAEEKCNAALYPIFMTTGEEQRKLVHEAQQCLKTLETALEGKKFFGGDAFGYLDIVTGWFAYWLPVIEEACGVEVVTDEALPLMKAWFDRVLAVDAVKAVLPPRDKLVALNKARREQILSA

SEQ ID NO: 181607 - protein, 566 aa, Oryza sativa
  unsure (1)..(566): unsure at all Xaa locations
  Clone ID: PAT_MRT4530_78864C.1.pep
NGGSTKQQIGKGLYSLTNFVEKSIKMAPHEALYGRKCRSLVCWYETGENKLVGPEFVRTKQSTIDIIRERLKIAQSRQKSYADERRRELEFNVGELVYLKVSPNRMTKRFGIQGKLSPRYIGPFKIIGRKGAVAYXLKLPATLSTVHNIFHVSQLRKCLKEPEEKIKQDQVXLKSDLSYDERPSKILAEDWKQLRNRTIKFCKNFTVYCDASKTGLGCVLMQNQKVIAYASRQLRPHEVNYPTHDLELVAVVFALKIWRHYLYGAKCELYTDHKSLKYIFTQKDLNMRQRRWLELIKDYDLEINYHPGKANVVADALSRKAQVTQIVREENMPKENFASLNRINVEVIQGPATTVINNMILECELSSQIQDKQQDDAYIREEIQRIKAGKFSEFKLDDKELLWYKGRICVPNVPKIKELILREAHQTXYTMHPGSPKMYMDLKERFWWRNMKREIAKFVSECDVCRRVKAEHQNPAGLLQPLPIPEWKWEQIGIDFITGLPRTKKHNDAIWVIADRLTKSAHFIPIPTLITSPHSQDSRKSLSPQDKAIKKELLNQPVPFQVIWST

SEQ ID NO: 181608 - protein, 74 aa, Oryza sativa
  unsure (1)..(74): unsure at all Xaa locations
  Clone ID: PAT_MRT4530_78865C.1.pep
SSELREEEKEEEAEKTTATATRQNLRDAATVAQLTALDAERLISMIVKAXSTARLHKRNCRPCAQHLKTIRGLL

SEQ ID NO: 181609 - protein, 61 aa, Oryza sativa
  Clone ID: PAT_MRT4530_78866C.1.pep
DPSLLIHTPQAGRIQEPQPEVPCLAYGVRVTEQTYTRMQSSDHSGLTMIIGMAIGLKGKLE

SEQ ID NO: 181610 - protein, 438 aa, Oryza sativa
  Clone ID: PAT_MRT4530_78868C.1.pep
MDTPPPMQSDAAAPAAVVDYSNLTTDLVIDIHGRLAFVDRLAVGAVFGAAGHAVKPEAPWLVLPGDTPETSRLYSVADRRVAATRAPDPAMRGCCVVGSSGGWVVTADTRARLHMANPVTGEQHELPAITTCPFFYVTNPTWPLFHVNILQDQLIRVRHGGGEKVPAARLPLCTLVADQMRGWVYRKVVLSTSPRPGAYAAMLLLDVDRHRGNPAFATSDDPAWRVALSPDGVEDAIHHRGKFYSITYSGVVEEWDRRGVDGVFTSRAVSRKLPAITDGGGGHHHRRYLVAAPGGGELMVVTKSFKVVEIGERYMDSERRVCFTVQVLDDGDEGGRWRRAASIGQAAVFVGASSNSVCVSTKAHPELRPDCVYFAADELVKGPFCRDEDRGFHSYHSCDDKKRVVGVYSLKDGGRAEGLPELGDHATWPPPAWFTPLI

SEQ ID NO: 181611 - protein, 54 aa, Oryza sativa
  Clone ID: PAT_MRT4530_78869C.1.pep
VDQLIGGAPIPMAEVAYKFELRKPLVTPEQLQSEKDIEDNLVHLLTQQHFKTFI

SEQ ID NO: 181612 - protein, 775 aa, Oryza sativa
  Clone ID: PAT_MRT4530_7886C.1.pep
MLLVGVLLLLFFNLHLPTAAIDTLTLGQSLLWNQTLVSNGGNFELGLFSPGKSNKHYLGIWYKKISKKTVVWVANRERPILEPSSCHLELSVHGDLRLFSTAPSNTLLWSSNASASSSPSPPRTTVATLQDDGNLVVNSNATRSRSRSPSSTTTTHVAWQSFDHPTDTWLPGARLGYDRGRGVHSFLTSWTDSENPAPGAFSMVIDARGLAKFDLLAGGEHRYWTTGLWDGEIFANVPEMRSGYFTGVPYAPILFWSLPHDACDGYSSCGPFGVCSNATNPECRCPAGFEPRSSEEWRLENAAGGCAPAGAGNDKACAHTCLVDCSCTAYVHDGAKCLVWNGELVNMKAYAANENGQGDPGLAGAVLHLRVAHSEVPASSTEHSWKKSMVILGSVVAAVVLLLASLVTVVAVAAVLRMRRRRGKVTAVQGSLLLLDYHAVKTATRDFSEKLGSGSFGTVFKGALPDGTPVAVKKLDGLRQGEKQFRTEVVTLGMIQHVNLVRLRGFCCEGNKRALVYDYMANGSLDSHLFVMSGSSSGPDSKQVTLTWSQRYNVAVGVARGLAYLHEKCRECIIHCDVKPENILLDQEMAARLADFGMAKLVGRDFSSVLTTMRGTVGYLAPEWLAGTPVTAKADVYSFGLLLFELVSGRRNSTAPSSSSEGGPGIYFPVHAVVKLNEGDVAGLVDERVAKDADPKEVERLCKVAGWCIQDEEGDRPTMGLVVQQLEGIANVMLPPIPSRLHILAIENEWVRGVPEDERCSKSGSKPETEAIEEM

SEQ ID NO: 181613 - protein, 124 aa, Oryza sativa
  Clone ID: PAT_MRT4530_78870C.1.pep
MAHEKLFSESEKTRRKINGLPYLYWNVRHDGGWGAAGQPHHLTATASQAVASPIRLAAAAAALPVAAVASLGLVLGHDRHGGGRRVGGQAASRHHLLSSRRSPIPIRLAVAVASAGAAAAGLEE

SEQ ID NO: 181614 - protein, 749 aa, Oryza sativa
  Clone ID: PAT_MRT4530_78871C.1.pep
MARAVHDRLPFLATPPPAPARGRNPPLAEMLRLVGAATVDSDAAAAAADEEANALSLPLPRGGVTPPPPGGRTIQFRLAFTSLTYSVRAARRARPGGGDGGGGFRLPLQNRCDRVTAAAPDAHSSRARVLLDGITGEAREGEILAVMGASGSGKSTLIDALANRISRDALKGSVTLNGEPLTGNVIKSISAYVMQDDLLFPMLTVAETLSFAAEFRLPRALPAAKKRTRVLELIEQLGLRAAADTIIGDEGHRGVSGGERRRVSIGTDIIHDPILLFLDEPTSGLDSTSAFMVVQVLRNIAESGSIVITSIHQPSQRILGLLDRLILLSGGRTVFSGPPSAIPAYFAEFGYPVPDDENRAEFALDLIREFESLPAGTGQLVSFNKTWQVMHAARHNPNDDPWAPTMSLKEAISASISRGKLVSGSDVAGEAASMHTYANPFWVEMKVLTKRSAINTRRMPELFLIRLGAVVITGAILATVFYKLDQSPKGAQERLGFFAFAMSTMFYTCADALPVFLHERYIFLRETAYGAYRRTSYVLSNAIVSFPPLVVLSLAFAFTTFFAVGLAGGVSGFAFYTLAILASFWAGSGFVTFLSGVIPHVMIGYTVVVAILAYFLLFSGFFINRDRIPDYWIWFHYLSLVKYPFEGVLQNEFGRGGECYVRGTQMFDNSPLAVLPDTVKTRVLASIGTALGVKIGPNTCVMTGHNVLREAAVTQLGKWECLLVTAAWGFFFRLLFYFSLVLGSKNKRR

SEQ ID NO: 181615 - protein, 166 aa, Oryza sativa
  Clone ID: PAT_MRT4530_78872C.1.pep
CILCLHKHCVISATRYPDDPYDRLWWPSQNTSEWIKISTTSMVRRYPDDVYEVPAAVLKTAATTSSNSTVLNFLWLAPASWAAAPAHLLGLHFTDFQQEQLREFHIYYNGESFVPDGKSYSPPYLLANYWNDSSPTVSDNGLSYKISIVATNASVLPPMLNACSPG

SEQ ID NO: 181616 - protein, 141 aa, Oryza sativa
  Clone ID: PAT_MRT4530_78873C.1.pep
EYFLELSRSRYTASSNFLAAGSSACLQASTAASDRRRRRSRRRGDSPVSPERPRYKPELLRRRTQPQPGSQPREREWGRHASSCHEGRRRALAGVRFLAFRNEQSGATPPALRFPHRSPGCPHVSARGASRLRGSYKQRPS

SEQ ID NO: 181617 - protein, 69 aa, Oryza sativa
  Clone ID: PAT_MRT4530_78874C.1.pep
MDSCGRVMADEDFVEERRFWAWENHRGFLVDVGASVEYEEDDDYDYDGDHQEMDWDNLFPYYLDSFMGL

SEQ ID NO: 181618 - protein, 244 aa, Oryza sativa
  Clone ID: PAT_MRT4530_78875C.1.pep
MSNTLLRVHPSELKIPYEYKRKRSCCMQLTNKTNQYVAFKVKTTNPRKYSVRHACGILPPRSSCDITVTMQAPVEMLSDYHCKDKFLVQSVAVGYGATMRDFVPELFTKAPGRVIEEFKLRVVYVAANPPSPVPEEEEEEEEDASPQSEVMSHGVKMTSVFDAVTVSTLTDRSADKVSSAEGVSVESMLVAEREYPVEENQKLQQQMELLRAARSSQQGFSAMFVLLVFMSSVCIGHFMKQIKV

SEQ ID NO: 181619 - protein, 151 aa, Oryza sativa
  unsure (1)..(151): unsure at all Xaa locations
  Clone ID: PAT_MRT4530_78876C.1.pep
MQSDAVARSPRQTVRVGGRRPTADPSRGSSEAYGFVGSIAAVAAAAAYLAWAYLPEPWLRFLGVTYYPARHWALAMPSLLLEAAAQGMVLYMASNFLLAPAPTXLATISDEFAREPAACGTATGEEKPIEDISDISIDKINNLMFGNASSS

SEQ ID NO: 181620 - protein, 795 aa, Oryza sativa
  unsure (1)..(795): unsure at all Xaa locations
  Clone ID: PAT_MRT4530_78877C.1.pep
MASLSESEGTNRGSMWELDQNLDQPMDEEASRLKNMYREKGMKKLDVYTVLIEVTELKFSSLLLLRLAFQSLGVVFGDLGTSPLYVFYNAFPHGVDDEEDVIGALSLIIYTLTLIPLLKYVFVVLRANDNGQASFPSQYHIXIRCRVRRSTSRHSSCEAGPLPRLLIPYSGQAAYIIANKDHVAXCLLSLNSDGILTPAISVLSASGGIKVQNPNMSTDVVVIVSVIILIGLFSMQHYGTDKVGWLFAPIVLLWFILIGSVGALNIHKYKGSVLKAYNPVYIYRYFQRRNSDSWASLGGIMLSITGTEALFADLCHFPVFAIQIAFTLIVFPCLLLAYTGQAAYIIAHKDHVADAFYRSIPDSIYWPAFVIATAAAIVASQATISATYSIIKQALALGCFPRVKIVHTSKKFLGQIYIPDINWVLLILCIAVTAGFKNQSQIGNAYGTAVVIVMLVTTFLMVPIMLLVWKSHWILVVTFIVLSLMVEIPYFSACLLKIDQGGWVPLVIATAFFIIMYVWHFCTVKRYEFEMHSKVSMAWILGLGPSLGLVRVPGIGFVYTELASGVPHIFSHFITNLPAIHSVVVFVCVKYLPVYTVPMDERFLVRRIGPKNFHIFRCVARYGYKDLHKKDEDFEKMLFNCLLSFLRLESMMEGYSDSDDFSVPEQRTEGSISNAFLAEKTNNNTMCSNGELSYSSQDSIVPVQSPLRGNSLLRYSSQASHTVSDELEFLNRCKDAGVVHILGNTIVLARRDSGIIKKIAVNYMYAFMRKICRENSVIFNVPHESLLNVGQIYYI

SEQ ID NO: 181621 - protein, 744 aa, Oryza sativa
  Clone ID: PAT_MRT4530_78878C.1.pep
MYECTKKEIKPYTPGENLQKWLADEKARDQFVIRAGTFTEVYWNDARQKMPELVFQKQYWTDSFIQWSPLGTYLATVHRQGSQVWGGDDKFERLMRFAHAQVKLIDFSPGEKYLVTYSSHEPSNPRDTHRVVLNIFDVRTGKVMRDFKGSADEFSASGNISVSGVSWPIFRWGGGKDDKYFARLGKNVISVYETETFSLLDKKSLKVENVVDFCWSPTDPIIALFVPELGGGNQPARVSLVQIPGKEELRQKNLFSVSDCKMYWQNSGEYLAVQVDRYTKTKKSTYTGFELFRIKERDIPIEVLELDNKNDKIIAFAWEPKGHRFAVIHGDGPKPDISFYSMKTSNNISRVSKLTTLKGKQANALFWSPGGRFIVFAGLKGFNGQLEFYNVDELETMATGEHFMATDIMWDPTGRYLASAVTSVHEMENGFQIWSFSGKQLYKVSKDHFFQFLWRPRPPSLLTPEKEDEIAKNLRKYSKKYEQEDQDAFNQLSEQERKRRKQLQEEWEGWVAKWKQLHEEERPYRMELRDGEASDDEEEYDTKEVEIEEEIIRRFSNPSSCRLGIFLCLGEFQVQASRRCKMQSDAVARSPRQTVRVGGRRPTADPSRGSSEAYGFVGSIAAVAAAAAYLAWAYLPEPWLRFLGVTYYPARHWALAMPSLLLEAAAQGMVLYMASNFLLAPAPTLLGHYLRGTCSDIFCLLPDEFAREPAACGTATGEEKPIEDISDISIDKINNLMFGNASSS

SEQ ID NO: 181622 - protein, 83 aa, Oryza sativa
  unsure (1)..(83): unsure at all Xaa locations
  Clone ID: PAT_MRT4530_78879C.1.pep
MAWEEILGFSGVRISPLGCYLSAKFWRGGLSTEIVSSLQMIAGGAFGGNXGVRPVPPDQGVFXLDRLHDCDLDMIDHXACLHQ

SEQ ID NO: 181623 - protein, 843 aa, Oryza sativa
  Clone ID: PAT_MRT4530_7887C.1.pep
MLLVGVLLLLFFNLHLPTAAIDTLTLGQSLLWNQTLVSNGGNFELGLFSPGKSNKHYLGIWYKKISKKTVVWVANRERPILEPSSCHLELSVHGDLRLFSTAPSNTLLWSSNASASSSPSPPRTTVATLQDDGNLVVNSNATRSRSRSPSSTTTTHVAWQSFDHPTDTWLPGARLGYDRGRGVHSFLTSWTDSENPAPGAFSMVIDARGLAKFDLLAGGEHRYWTTGLWDGEIFANVPEMRSGYFTGVPYAPNASVNFFSYRDRLPGAVGNFMLDVNGQMRRRQWSETAGKWILFCSLPHDACDVYGSCGPFGVCSNATNPECRCPAGFEPRSSEEWRLENAAGGCVRRHPLECHGDGFLALPYTVRLPNGSVEAPAGAGNDKACAHTCLVDCSCTAYVHDGAKCLVWNGELVNMKAYAANENGQGDPGLAGAVLHLRVAHSEVPASSTEHSWKKSMVILGSVVAAVVLLLASLVTVVAVAAVLRMRRRRGKVTAVQGSLLLLDYHAVKTATRDFSEKLGSGSFGTVFKGALPDGTPVAVKKLDGLRQGEKQFRTEVVTLGMIQHVNLVRLRGFCCEGNKRALVYDYMANGSLDSHLFVMSGSSSGPDSKQVTLTWSQRYNVAVGVARGLAYLHEKCRECIIHCDVKPENILLDQEMAARLADFGMAKLVGRDFSSVLTTMRGTVGYLAPEWLAGTPVTAKADVYSFGLLLFELVSGRRNSTAPSSSSEGGPGIYFPVHAVVKLNEGDVAGLVDERVAKDADPKEVERLCKVAGWCIQDEEGDRPTMGLVVQQLEGIANVMLPPIPSRLHILAIENEWVRGVPEDERCSKSGSKPETEAIEEM

SEQ ID NO: 181624 - protein, 60 aa, Oryza sativa
  Clone ID: PAT_MRT4530_78880C.1.pep
MGEASRWPVKGGEDERLEVKKGKNGGGDLNCFCRARMAWAGVTGVRPASEASGRGCHGTG

SEQ ID NO: 181625 - protein, 134 aa, Oryza sativa
  unsure (1)..(134): unsure at all Xaa locations
  Clone ID: PAT_MRT4530_78881C.1.pep
GGWFVWAAPLPVSLSSGLCVLNLFSGAGHAEEPEGGPHHTERGKPGPPGPAGGKKKPGGPRAPGGHSPSKGNGGKGGHTPGGGHGAGEKTLEKGPPPPXGAARQEGRAPPGPPRGAPGPPPGPGPGTSPPPPRG

SEQ ID NO: 181626 - protein, 477 aa, Oryza sativa
  Clone ID: PAT_MRT4530_78882C.1.pep
MRQPQSRKLLQLQALSLLLFIIALHSRLHGCSGQGEAADGSASTAAAPMEEKEKRALYAAIEGFVGKGWNGSALYPDPCGWSPIQGVSCDLFNGLWYPTVMSIGPVLDNSLRCSADAKFSPQLFDLKRLKTLSFYSCFPATNPTPIPATSWDKLAGSLETLEFRTNPGLTGPIPASLGRLSSLQSLVFVENNLTGAVPAELGSLVRLRRLVLSGNGLSGQIPASLGNGHFAEQLLIMDVSNNSLTGSLPSSLGGLKGLLKMDLSNNLLQGSLPPELAGLGSLTLLDLRNNSFTGGLPSFLQGMASLQDLLLSNNPLGGSLGQLGWERLRGLATLDLSNLGLVGAIPESMAALTRLRFLALDHNRLTGDVPARLAELPNIGALYLNGNNLTGTLQFSPAFYQRMGRRFASWDNPGLCYSNAAVDAAHAPPGVTVCKVAGGVGDGRKPEASSSLMATSSASNLINGFCFFLWMVATSLL

SEQ ID NO: 181627 - protein, 144 aa, Oryza sativa
  Clone ID: PAT_MRT4530_78883C.1.pep
MVTGEEDLFVSGTSIEGKKKLQLLDDDGRIGLELIPPSALASPMQRIWIPTRTPLIDTDWYKVVVCSLGLITKPSGNSVDSTACTLTSGASSSKSPVVLPGIAHFGASNAGFDIELTIRDLEFLHTSRHPLDAEITCPRDNRAT

SEQ ID NO: 181628 - protein, 103 aa, Oryza sativa
  Clone ID: PAT_MRT4530_78884C.1.pep
PRAQLRHCRIQCCQQAARTVSQQSAQLAASQSSQDVEELRGEHARWHTGSKARSVSAVSQEYYGRRGVSQSGAGVLTGEGSVGGGLLQASKHTSSRGMYPACS

SEQ ID NO: 181629 - protein, 258 aa, Oryza sativa
  Clone ID: PAT_MRT4530_78885C.1.pep
MRPFSLPHQTPSIRAKNVREEGDGADKWAPPVGDSGASDNRGPRHGLVHHVAHMWRRRGADMAATSGGGADAAHGDGDPAGRPPVAATHSKQAREAAGEGEKEGEGGEFSPRATTMRRTGKRPTAAQEAANRVPVMTGERGAADGAQGLLKEEKGLGGCEGVGNGEERRPEAMGVTELTIERGRRNSSGIPVKRSGCRGAVRRGGAGGGHGAAWDGRERRQTATRGGECGGDLWFAVEVVIRWRIVEMEERPACSEVW

SEQ ID NO: 181630 - protein, 74 aa, Oryza sativa
  Clone ID: PAT_MRT4530_78886C.1.pep
HPSPSPPPSHRCRAITSPSPSRPVRRAPSHRAAAASPSSSRGRCRVLPSPSSPSPPRALSPSPPHRARAPRRHA

SEQ ID NO: 181631 - protein, 199 aa, Oryza sativa
  unsure (1)..(199): unsure at all Xaa locations
  Clone ID: PAT_MRT4530_78887C.1.pep
DYITQQVTCGHQPLGARFHDAARCIFTSVQLYERRGCCFRWQQTHSEEHXKRFYVRAGEGGKITWMIKQKTDSLDGERKGASRNLKSWMASNDLSCDGTVHVKEGFIREGDTASVIGVLKKHHAYDIVDAPSGVVTTGCQFTRYYHILSNTDVRIGVEYTSSILVIVRLGVVIGDGRLTCSYSTCDFVDKEMAPSDIRS

SEQ ID NO: 181632 - protein, 309 aa, Oryza sativa
  unsure (1)..(309): unsure at all Xaa locations
  Clone ID: PAT_MRT4530_78888C.1.pep
WRIVSKPNDLVSSILKTKYFNNASFWKAPFNVSQSTLWSSISKIRNLWGQNKNYDFDKISQVFAKEATNSISHVRVIHQDTEDKLCWIHTSSAECNTKSAYKEVFKSFHYNHHQIXKAMNDHNFKAKNWEPFQVCNATISMVQSYNSVHQTQHDSSEVTQTEQHLLMLTXYPFRYCTLCYVDASWKINISDFGIFIHDPGSHAVTLIKARSKSFTSPLVDXQHLFQVTKFCLALQLQHTFFLSDNKTLVSTLQQQDFIAQPXNWSLRSLLFELHALSAGKQIAIRWIPREANKHADIKQEPLLLITFLS

SEQ ID NO: 181633 - protein, 426 aa, Oryza sativa
  Clone ID: PAT_MRT4530_78889C.1.pep
MHKIGSGMYVSGPAPDRGKERRQLSSGSVATPPYTGGDVSRSGELGRMFDIGGAGVSPASSRRSSGPLPRPLPLLPSPASGPLSQLSHSGLLVGPSPPPPPPQTQQSPAGSWRKSSRRREEAAAAPEAARGRARLGVSVACYVAASVAATAGLGAGAFFLVAWHRWEVLSAAGGAVAAVAAAFAWNVRRRDAEAERFFRRLPDTVFDQSDMPIGELVKITGQVTCGHQPLGARFHDAARCIFTSVQLYERRGCCFRWQQTHSETRTANFYISDRNTGKRFYVRAGEGGKITWMIKQKTDSLDGERKGASRNLKSWMASNDLSCDGTVHVKEGFIREGDTASVIGVLKKHHAYDIVDAPSGVVTTGCQFTRYYHILSNTDVRIGVEYTSSILVIVRLGVVIGDGRLTCSYSTCDFVDKEMAPSDIRS

SEQ ID NO: 181634 - protein, 654 aa, Oryza sativa
  unsure (1)..(654): unsure at all Xaa locations
  Clone ID: PAT_MRT4530_7888C.1.pep
MPGSREMSIISGGMWSDGNDFAELLWENGQAVVHGRKKHPQPAFPPFGFFGGTGGGGGGSSIRAQERQPCGIDASAKAGGGCSAEVIAPSVHGCGAGFGATMRDNGDLDTVRRIHYPTFVDEDAVAPPAPAVSDEHIISMGTGQCVPAVVVATAMQPXQASPPAHFPHGAIGFGYGMGVIAMSRNPALQMPPVPGAPTTRAEPQPQPQLAAGKLGTSTMPMFGVPVQTIPSSASSVPPFASLAGLPVRPSGVPQVSGAMANMSARPATGVSESTAAMSEQGSYTGSKSRXFTNADHHAGAYTEFAHMVPGVNQNHXMFSDWPGRAKPVHKTEARKAPEATVATSSVCSGNGAGSDELWRQQKRKCQAQAECSASQDDDLDDEPGVLRKSGTRSTKRSRTAEVHNLSERRRRDRINEKMRALQELIPNCNKACYVLQIDKASMLDEAIEYLKTLQLQVQMMSMGTGLCIPPMLLPTAMQHLQIPPMAHFPHLGMGLGYGMGVFDMSNTGALQMPPMPGAHFPCPMIPGASPQGLGIPGTSTMPMFGVPGQTIPSSASSVPPFASLAGLPVRPSGVPQVSGAMANMVQDQQQGIANQQQQCLNKEAIQGANPGDSQMQIIMQNVPVLKRSMAEEFHMVEDATRLQAVILDFQCSFL

SEQ ID NO: 181635 - protein, 375 aa, Oryza sativa
  Clone ID: PAT_MRT4530_78890C.1.pep
MEIEFTYQVKWEMSEDGSPATYFSFFMVLPFMESSTALQMESEPIVGCDGDGCASGAGTWPLHHFRRLDGVHCRLCSSCLLLEYRSFYCCCCFLLLGPEPPAHFDDGDPILAPPVPVATCRLCNEAVAHRYCLQSDDDTFVCAACVAAAHGWRFSYTPTAPPPAALAATTTGGVVSDAPLDIRATRIMLLASRISLAVLRKAAAAARATAERLFVEAKAEKARAYRALAVALGVDAEVPSANHGADEPEPLPMLQAPPPPEDMAPESSSTATNMGALPPSENVAPPESDASSVAMALAMAPPSENLPSEGNLVAMAMGLDLNAPPPSPAADTIGVGDVAEMTMAAEASSSSPPLPPPPPPQPRRRPLQLFPDDDM

SEQ ID NO: 181636 - protein, 54 aa, Oryza sativa
  unsure (1)..(54): unsure at all Xaa locations
  Clone ID: PAT_MRT4530_78891C.1.pep
HASVEEPAKITIGEALEAAALAAGGTPVELSDAAXAIHAVEAKATGTDTYMPQR

SEQ ID NO: 181637 - protein, 128 aa, Oryza sativa
  Clone ID: PAT_MRT4530_78892C.1.pep
MAARQLPQSLIQMNLVKGFVVALAMVSVSMGHNADKKQVVTIGMDVLDCPVCFEPFKPPIFQCSVGHFICSSCCNKLNKCPGCSRTSFEHCLGMERIVESAVVPCTYAEHGCTNKMSRPELALNRTSP

SEQ ID NO: 181638 - protein, 78 aa, Oryza sativa
  unsure (1)..(78): unsure at all Xaa locations
  Clone ID: PAT_MRT4530_78893C.1.pep
VSRQVDAELDKXKSXSKEEAAXSFAARAVAXEAEAAIAEAEEAARAAEAAEAEVTLQRLFLDAVVTTMQNRNHASAVY

SEQ ID NO: 181639 - protein, 959 aa, Oryza sativa
  Clone ID: PAT_MRT4530_78894C.1.pep
MDPAAPLLALSKAISSSSRSKPSLLASPHHFLLSRGRGSGACGCLPPAPPPPRRTPFAASSASASAARRLAVPGDLLLLSLARLALRGPAPRAEARRWFASLSAASNGPPRGGGGGGGGDGGGGGGGGGGWKRPRASQGTAVAEEASGQEADVIILDVGGMSCGGCAASVKRILESEPQVRSANVNLATEMAVVWAVPEDEDAKNWKLQLGEKLANQLTTCGYKSNLRDSSKASSQTVFERKMDEKLQQLKQSGRELAVSWALCAVCLLGHISHLFGVNAPLMHLLHSTGFHLSLSIFTFIGPGRRLILDGLNSLFKGSPNMNTLVGLGALSSFAVSSIAAFVPKLGWKTFFEEPVMLVAFVLLGKNLEQRAKLKATSDMTGLLNILPSKARLMVDNDPEQSSFTEVPCDTLSVGDYIVVLPGDRVPADGVVKSGRSTVDESSLTGEPMPVTKIAGTEVSAGSINLNGKITVEVRRPGGETAMSDILRLVEEAQTREAPVQRLADKVAGNFTYGVMALSAATYTFWSIFGSQLVPAAIQHGSAMALALQLSCSVLVIACPCALGLATPTAVLVGTSLGATRGLLLRGGDILEKFSEVDAIVFDKTGTLTIGKPVVTKVIASHREGDENTKDSCNNEWTGEILSLAAGVESNTTHPLGKAIMEAAQAANCLYLQAKDGSFMEEPGSGAVATIGEKQVSVGTLDWIRRHGVLHNPFADGENFGQSVAYVAVDGTLAGLICFEDKLREDSHQIIDILSKQGISVYMLSGDKKSAAMNVASLVGIQADKVIAEVKPHEKKSFISELQKEHKLVAMVGDGINDAAALASADVGIAMGGGVGAASDVSSVVLMGNRLSQLVDALELSKETMRTVKQNLWWAFLYNIVGLPIAAGALLPVTGTVLTPSIAGALMGFSSVGVMANSLFLRMRLSSRQQPIHKPQATISDVLPNAAESEKSYPSKWSA

SEQ ID NO: 181640 - protein, 241 aa, Oryza sativa
  Clone ID: PAT_MRT4530_78895C.1.pep
TFVAPCYALNKIEIDTKLPIFGDQKWVIWICSFNIPMAPGKTRSIVCSARNFFQFSMPGKAWWQLVPRWYEHWTSNLVYDGDMIVLQGQEKIFLSASKESSADINQQYTKIMFTPTQADRFVLAFRAWLRKFGNSQPDWFGNPSQEVLPSTVLSKREMLDRYEQHTLKCSSCKGAYNAFQTLQKVFMGATVAFCATAGIPADVQFRLLLAAAALVSAAVAYAFYTLQKNFVFVDYVHAEID

SEQ ID NO: 181641 - protein, 324 aa, Oryza sativa
  Clone ID: PAT_MRT4530_78896C.1.pep
MAKKQSLLLAMMLVVAGLAVSAMADRKLMSLVKPQPNQLTYHNGAVLSGDIPVSILWYGRFTPAQKAVVTDFVLSLAAPLQAAPAPSVSQWWGSIHRLYLSKAVAVGKNGGAHGGGGGGRAKNARVVLSGQVSDEGCSLGKSLKLSQLPTLAARARPGKGGVALVLTAQDVAVEGFCMSRCGTHGPVSRAGAAYAWVGNSATQCPGQCAWPFHQPVYGPQAAPLVPPSGDVGMDGMVINVASMVAGAVTNPFGDGFYQGERGAALEAATACTGVYGKGAYPGYAGALLVDKATGASYNAHGAHGRKYLLPALFDPDTSACSTLV

SEQ ID NO: 181642 - protein, 186 aa, Oryza sativa
  Clone ID: PAT_MRT4530_78897C.1.pep
PGCRNRHEAIRCSRCKAYINPFMRYVDQGRRFICNLCGFSNDTPREYICNLGPDGRRRDADDRPELCRGTVEFVASKEFLVRDPMPAVYFFLIDVSMNAIQTGATAAACSAISQAISDLPEGPRTMVGIATFDSAIHFYSLKRAQQQPLMLIVPDVQDVYTPLQKDLILPVSECRENLEQLLESIP

SEQ ID NO: 181643 - protein, 215 aa, Oryza sativa
  Clone ID: PAT_MRT4530_78898C.1.pep
MALSRRTRHCLVLLLVSLALLPLGMATDPIGGYCSESGTSDAEINGKTRRRSINSVVSDLVAKAASNGGFATSSAGKGNNVFYGLAQCRGDVSASDCKACLVEAANYTLSFCHYASDSRMWYDYCFMRYKNANFIGQVDTRVDASCTRDLAPLACAQCLSTAVSDFGDICNAAEGCQIEYSTCWVRYEIYPFYFPLKTDGRATTDMTKYTKVVVH

SEQ ID NO: 181644 - protein, 72 aa, Oryza sativa
  Clone ID: PAT_MRT4530_78899C.1.pep
RLVIPDALRVLRLQHGHKYCKLGDLSAAVGWRHQETVSELEAKRKSKSAAFYEAKKKLRALRAKAESQVAGQ

SEQ ID NO: 181645 - protein, 462 aa, Oryza sativa
  Clone ID: PAT_MRT4530_7889C.1.pep
MALSAETGKVVQWRRWAFANLGSVLSNFGSLWLLLAPLLAAYAPRRLFKTYFNLFLRRHARRLLAVVDPYVTVDVSEPGGASAHYSRYGRVTDSGDSTYEEVKAYLSDGCAGEARELRAEGASEGDGVVISMRDGQDVADEFRGAALWWTRYDYKAWSYIDFDHPTTFDTLAMDTARKREIIDDLDAFRSDRDFYRRAGKPWKRGYLLHGPPGTGKSTMIAAMANYLDYDIYDVELTVVKDNNDLRRLLIETTSKSIIVIEDIDCSLDLTGDRAATQRRGRQNDRDDGSRRHDRDGSMVTLSGLLNFIDGLWSACGGERIVVFTTNHVDKLDAALIRRGRMDMRIEMSYCGIEAFKTLAKNYLDVDDHRLFGPVGEILGRESITPADVAECLMTAKRAGSDDESSRLEIVIDELKQTAEANAKAKAEAEAKAKAEAEEEAKAAEMDRDNTREEQNGRKSPKI

SEQ ID NO: 181646 - protein, 504 aa, Oryza sativa
  Clone ID: PAT_MRT4530_788C.1.pep
MADDSASPSPSSASPLQHHREALKSSVRNTAASRRREQAIAIGKERREALIRAKRVCRAPISGSDEAEMEEGDMVVDEEKACLEAKTAHAVEELKSALSIQGKGVQKKKIEALRDLRRLLSQPEVPLVDTAIKAGAVPLLVQYLSFGSSDEQLLEAAWCLTNIAAGEPEETKSLLPALPLLIAHLGEKSSTLVAEQCAWAIGNVAGEGAELRSTLLAQGALRPLTRLMFSSKGSTARTAAWAMSNLIKGPDPKAANELITIDGVLNAIIASLEKEDEELATEVAWVVVYLSALSDRGISLIVLRGLGNLIAADDYMVDSVLTVGHNIIDQALSGLIKCLKSDNRVLRKESSWALSNIAAGSFEHKKLIFASEATPVLIRLVTSMQFDIRREAAYTLGNLCVVPTGNCELPKIIVEHLVAIVDGGALPGFIHLVRSADVDTAGLGLQFLELVMRGYPNKQGPKLVEMEDGIEAMERFQFHENEQMRNMANGLVDEYFGEDYGLDE

SEQ ID NO: 181647 - protein, 90 aa, Oryza sativa
  Clone ID: PAT_MRT4530_78900C.1.pep
GAPLLLPSPLRLSAVILRASAPFHRLRLAPRSAGRALGSSLDAVAPTGGAGSSSAPAAWAPAHPPWSAQRQKTKLQRYVGWYLGEFRVYC

SEQ ID NO: 181648 - protein, 61 aa, Oryza sativa
  Clone ID: PAT_MRT4530_78901C.1.pep
LSLLQMFSDDVRSKLLDDADKYKELVFNTRCMALYFEGLGLNILRNDKMDQSAELVKVARI

SEQ ID NO: 181649 - protein, 811 aa, Oryza sativa
  unsure (1)..(811): unsure at all Xaa locations
  Clone ID: PAT_MRT4530_78902C.1.pep
GLSCGYSWAPLIKVKPVKTWPDWYKRVLASKQTHXEELGISQCLALTLANMDXDEPMISAATYFWSNTLNAFLFNQGPMTXLLIMITGLDITSSANPISMNTKNKFTLRTRSIGGWSGFIALNMGTGPVSAKELTTFLIMWLEKFLFCGPSYGPTTNXQHIAETLVDKRRFPLGKYLLGYLYQTLNAASARIAVDSVVGAGGPWWLLHVWLNPHTIKVSHISDLAEADFPALEPTEDDEGNEITTRRCMSFGKAASTYSEXRLXSAEFFSNWFGNFYDGFPRDSRIWFAYEHSNNFEHLADFRFDEINSEKYDKSREVFTMAISPCILSVGIHQGRNIQVSYELYHPISAARQLVMGQLPIGLLFADKIQTRGEITSALMMDRLLNIPGPPLGSIEDIQLALVRSATFDRWWIEWRKHLFHQSASMYLTNIHPEXIPQTIESSPPHVSQSGIDIRYAAGLLPNSGRFAPSIIGYNAPKTSTLLHGQSREPIPSEAGKRKRTKSSAVVPSFTKKKYKKQKAAAADDLPNIDPDVEKFLNDEEIEEAVDDAAADISEAREQMPPADSHAPQRTPPTPTHPARHLKVSLQKKLATKKKPPTPPPLPPRSPTPPRHESSEHTPSAVGSHHIEEEAAPAPAIPVLADMFSFDIKQFFDQEEEITSLPLALLIDDVKTTLSDDQARIISPAVYLDHHRFKLEKARQRIVDRRERKELEATIQANRQTINKDKSKLDKMTVDSIQIYIDRLKSRRAELLAELGKKPRSKLRNSIKHLSDLSKSLKVIPGTDATDAQAIDDIEQIRQWAISAINKLVSS

SEQ ID NO: 181650 - protein, 92 aa, Oryza sativa
  unsure (1)..(92): unsure at all Xaa locations
  Clone ID: PAT_MRT4530_78903C.1.pep
LVLGRPNLSSLRSFSTADGGARRGRRHNPLQPRRRRRCGSASALVARPQGKITRLNALLHAVIEVNSDALQQPARADTASXASSHRYCGPLH

SEQ ID NO: 181651 - protein, 138 aa, Oryza sativa
  Clone ID: PAT_MRT4530_78904C.1.pep
GASSLAAIPDTADTARLGCRERSGNPSSRRTAARTPRCPRDACTRSPSACTTCSTSPASSGSRPPPRPRGGAPRRGAPARTLGRRSRGPTPSRTSPPWCSRSSRRAPARARSPAGRRGRTRPPSCRARRTPRCTCAAP

SEQ ID NO: 181652 - protein, 188 aa, Oryza sativa
  Clone ID: PAT_MRT4530_78905C.1.pep
QRLIVTVSRIEGKKRKCSQRIGSSDLGGTPQSTTKWAQDFFQGRSRASLSQEPKRNKNQKSGKRGKMANARRALRSEPIKSRPKLAHPGKIRPPHLTHPRTAKKTDARSTQIGENGGTKPNPTSSSPDPIQPETKSSEAARARIPGGPGEWEIFERRARSLGGGSRTRRRRGVRRGGGGRGGGVGSGG

SEQ ID NO: 181653 - protein, 128 aa, Oryza sativa
  unsure (1)..(128): unsure at all Xaa locations
  Clone ID: PAT_MRT4530_78906C.1.pep
NFQDFYSDSSTHIFTRAMSTRXQEATVLDSMFSCLLTNQRVGGYTNTRLSKFNKLKKSINQPXESTPGVVIFIFASKQIFYFSNSNYFTSNFGFWTLPXSTPNFSKYQXSRFNLHVREFGVISQSAWF

SEQ ID NO: 181654 - protein, 72 aa, Oryza sativa
  unsure (1)..(72): unsure at all Xaa locations
  Clone ID: PAT_MRT4530_78907C.1.pep
NXNNGXIVRLPPPQPELLPTLMLHDLAAYQFTTSSSSAGSSHQSLPAGAVVSGAGNGGRRRTSIVVIRWWLC

SEQ ID NO: 181655 - protein, 216 aa, Oryza sativa
  Clone ID: PAT_MRT4530_78908C.1.pep
MAQLGDLKTRPVEGVVFISTSHIIDGELREMESTVVVTWAMRAPPSVTAKDVECAIAYEFGLCISELTVSLHFPEAFLLKYKHRRHCEETVKQGFAKGHGIEVHFIQCCSLKNATGSALMYRVKLCLDGVPMHLWALDINIQESNWIRDIDILRITTVEHIQQFVHLWSMIRRMNQLNDEQDGVWLNLTANRQYLARSAYRLQFLGAARSAFNQLI

SEQ ID NO: 181656 - protein, 363 aa, Oryza sativa
  Clone ID: PAT_MRT4530_78909C.1.pep
MPSFTSSTDLSIRFATTESSSYDSHSFSDEPDIGTWIQRADLQMLQLFGKELVALIDRSIQEINREHGQARGASEMRRLLKLAVVITMLPTSPDLLPVILRLYATLGTFPIDQLNGITKELRKCVRKILRRVCSLSQTQSGLYHVAQRGGVHKITLYVMNYVKFLWEHDSVINNIIAYQADGESENGEEWTQVDSFVQHFIGRLDALLERMARHESMMGLECISLLNNAHFILNRLRKLEVKSALQQDWILRYENQVKHQITRYLELSWLPVMSCLDAHTPTQALFPCFHLPLTTRFYEMLESTCAEQQNWRIEDPKLRNNVRKAVSSHVVQCYQAHLQKKGMKLHKYIPQEIENKLMELFEG

SEQ ID NO: 181657 - protein, 69 aa, Oryza sativa
  Clone ID: PAT_MRT4530_7890C.1.pep
PGPGRFSPRDPLVRVGRNGFNHVDKGLHLLKCHGPGFAAANLPTVRFLNPGFGFAFKNGKAFKLKNILV

SEQ ID NO: 181658 - protein, 97 aa, Oryza sativa
  Clone ID: PAT_MRT4530_78910C.1.pep
MPAVTLRIAKVVGQPVTLHGAGRTFAGVHAAAQVAHFDDPVGQIPPHRWSKILNGHLPQDIIVRGSAAVDSHWHARFSALWRRYRYSIYTDPRVPSS

SEQ ID NO: 181659 - protein, 117 aa, Oryza sativa
  Clone ID: PAT_MRT4530_78911C.1.pep
IQLLEDIPEDAHDPTDIGTWIQRADLQMLQLFGKELVALIDRSIQEINREHGQARGASEMRRLLKLAVVITMLPTSPDLLPVILRLYATLGTFPIDQLNGITKELMKCVRKILRRVC

SEQ ID NO: 181660 - protein, 91 aa, Oryza sativa
  unsure (1)..(91): unsure at all Xaa locations
  Clone ID: PAT_MRT4530_78912C.1.pep
MHVVGEDFIWYTMEILCVYRMRNRIWNESQFGXIGXLKFVFCTGRFPRELGFPVQVWFMAIXTYCTSLVHGFRLPTSDINREGGCGLPVSL

SEQ ID NO: 181661 - protein, 424 aa, Oryza sativa
  Clone ID: PAT_MRT4530_78913C.1.pep
YQPGWAFLIGQGSVHDSSVLRIVCGRQLLGAAFMGNIVNTVNKFSGNNADGVPFRRCSYLPNSTCDENGSSVTRKSASATNGSINGHGTLYKDVGNEEMHLATDSTSKPGCRGDTNHCTNKERETRNVIVHTDSRQNGDATNSDNAVLICNQTAGHMSYGLDGESNRSSGSLAAVVSEVLVSKAPLEKRCRTNLQETGDLENTPNAHVSKRSRLHRVSPANSLFDREACDDLIDSAHNLDCSRTPNASVHDETVPNEDKTPCTSLDVRGCEGTPRASLKRRVNKKRTKREASYPTTPLNGNTGALVVIEPPLTRTKAKGKALSLATPESLKRSTRSGRLIVPRLDPGSQKIIYDMLYSQDGSILAITNLESPRLQVEKLSFVYPYFVQCHAGFTLSENRYCRFIEKQVKTAPVGLSKLMTSQPE

SEQ ID NO: 181662 - protein, 53 aa, Oryza sativa
  Clone ID: PAT_MRT4530_78914C.1.pep
MPKDVAVAVQELGRLSPSTCQCPSCRYLTDSQAMSTRGLYSNNAPPSAGLQAT

SEQ ID NO: 181663 - protein, 194 aa, Oryza sativa
  Clone ID: PAT_MRT4530_78915C.1.pep
MVKKDKGVVDHNDGGEAESESGIVVPPHKCSNFSLAVMLTARQVCPVVEGHDAAGSASLTELGPPELVRRGDDDEPSKFPWNQSSSKGWGGSKDNVNLPSSFLLHLLEPYRAPASPSSSSSPVAAPLQKNISCIQPSVRPELFAIAALSLTGRHRRRHHQLPTAVLHTCLTVGLTRTRLATHEEKEGRGGGGDR

SEQ ID NO: 181664 - protein, 578 aa, Oryza sativa
  Clone ID: PAT_MRT4530_78916C.1.pep
MDHHHHHLPPPPPRSPMENSASSKPPTPASTPSSRLAAAPSSRVSSAAPHPSPSSSAPTPASRTVYSDRFIPSRAGSNLALFDLAPSPSHHDAAAAAASPGAPPPSGSTPASSPYCALLRAALFGPTTPDRVASSASACSSSSSAGASPVGSPATGNIFRFKAEVPRNAKRALFSDGDDEGVLFPGVFTTRGTGPRKIPRSPYKVLDAPALQDDFYLNLVDWSSHNILAVGLGNCVYLWNACSSKVTKLCDLGVDDNVCSVGWAQRGTHLAVGTNQGKVQVWDATRCKRIRTMESHRMRVGALAWNSSLLSSGSRDKSILHHDIRAQDDYISRLAGHKSEVCGLKWSYDNRQLASGGNDNRLYVWNQHSAHPVLKYTEHTAAVKAIAWSPHLHGLLASGGGTADRCIRFWNTTTNMHLNCVDTGSQVCNLVWSKNVNELVSTHGYSQNQIIVWRYPTMSKLATLTGHTYRVLYLAISPDGQTIVTGAGDETLRFWNVFPSPKSQSSDSLSSIGATSFVRSYIRQLGAGALMYTMLGLNNIGQLMMLIASKLEYAKEAGEFLVQCPIPAGVVSCTVALL

SEQ ID NO: 181665 - protein, 52 aa, Oryza sativa
  unsure (1)..(52): unsure at all Xaa locations
  Clone ID: PAT_MRT4530_78917C.1.pep
DAYFNVCVXDXLAPXQXXGDXVLDXVLYNCHGINVXACXIVXTXHNKRLLXX

SEQ ID NO: 181666 - protein, 91 aa, Oryza sativa
  unsure (1)..(91): unsure at all Xaa locations
  Clone ID: PAT_MRT4530_78918C.1.pep
DIXIRVNKISVLALSFSFPNRETHYWYHDLTAQVKKKHRDACAVRLVAIPSRHIEDVILWCLSCGARSSDTGCTASDEQRHGIECLTFHPA

SEQ ID NO: 181667 - protein, 518 aa, Oryza sativa
  Clone ID: PAT_MRT4530_78919C.1.pep
MEDNKLILALGLSVLFVLLSKLVSSAMKPRLNLPPGPWTLPLIGSLHHLVMKSPQIHRSLRALSEKHGPIMQLWMGEVPAVIVSSPAVAEEVLKHQDLRFADRHLTATIEEVSFGGRDVTFAPYSERWRHLRKICMQELLTAARVRSFQGVREREVARLVRELAADAGAGGDAGVNLNERISKLANDIVMVSSVGGRCSHRDEFLDALEVAKKQITWLSVADLFPSSKLARMVAVAPRKGLASRKRMELVIRRIIQERKDQLMDDSAAGAGEAAAGKDCFLDVLLRLQKEGGTPVPVTDEIIVVLLFDMFTGASETSPTVLIWILAELMRCPRVMAKAQAEVRQAAVGKTRITENDIVGLSYLKMVIKEALRLHSPAPLLNPRKCRETTQVMGYDIPKGTSVFVNMWAICRDPNYWEDPEEFKPERFENNCVDFKGNNFEFLPFGSGRRICPGINLGLANLELALASLLYHFDWKLPNGMLPKDLDMQETPGIVAAKLTTLNMCPVTQIAPSSAEDAS

SEQ ID NO: 181668 - protein, 527 aa, Oryza sativa
  Clone ID: PAT_MRT4530_7891C.1.pep
MALSAETGKVVQWRRWAFANLGSVLSNFGSLWLLLAPLLAAYAPRRLFKTYFNLFLRRHARRLLAVVDPYVTVDVSEPGGASAHYSRYGRVTDSGDSTYEEVKAYLSDGCAGEARELRAEGASEGDGVVISMRDGQDVADEFRGAALWWTSVVREDAQGQQRAHTRRCQRLTFHHRDRRLVVDEYLPHVRRKGREILFSNRRRRLYTNNKSGDSFRYDYKAWSYIDFDHPTTFDTLAMDTARKREIIDDLDAFRSDRDFYRRAGKPWKRGYLLHGPPGTGKSTMIAAMANYLDYDIYDVELTVVKDNNDLRRLLIETTSKSIIVIEDIDCSLDLTGDRAATQRRGRQNDRDDGSRRHDRDGSMVTLSGLLNFIDGLWSACGGERIVVFTTNHVDKLDAALIRRGRMDMRIEMSYCGIEAFKTLAKNYLDVDDHRLFGPVGEILGRESITPADVAECLMTAKRAGSDDESSRLEIVIDELKQTAEANAKAKAEAEAKAKAEAEEEAKAAEMDRDNTREEQNGRKSPKI

SEQ ID NO: 181669 - protein, 77 aa, Oryza sativa
  unsure (1)..(77): unsure at all Xaa locations
  Clone ID: PAT_MRT4530_78920C.1.pep
LFGSSATVKETWRLGSSRKRHVNVKKXLXPHHXXXQPXPPTASRRGSLLPAPCPGPASSPSATSSPSSEHDIIHLNL

SEQ ID NO: 181670 - protein, 391 aa, Oryza sativa
  Clone ID: PAT_MRT4530_78921C.1.pep
MTPQLQPKQMHWARADSSDFGGQIPAPRSGHTAVSIGKSKVVVFGGFADKRFLSDIAVYDVENRIWYTPECNGSGSDGQAGPSPRAFHVAIVIDCNMFIFGGRSGGKRLGDFWMLDTDIWQWSELTGFGDLPSPREFAAASAIGNRKIVMYGGWDGKKWLSDVYIMDTMSLEWTELSVTGSVPPPRCGHSATMIEKRLLVFGGRGGAGPIMGDLWALKGVTEEGDPIAKRDLVPNVDSDSKPSNVTGGAQHSASQESQAGESPMIDLAKRLGISLSLEASASFVDEINDKELIELSSMLFGESPPTGDQHACIQALRDHWTSIPANSIQLQELGPLLRDYQRLILRRYLENSFTSFYEKEVHRFFHLKNASELRMDDIPILLMEYGKLLST

SEQ ID NO: 181671 - protein, 84 aa, Oryza sativa
  Clone ID: PAT_MRT4530_78922C.1.pep
FTSDQMMSPTVFGVFPVCSSSFDLAGRAVLLFLFHLISPWLDVRVVCAATICCWVRHMPIKDMEAPAIYIYAPGMTRTPIVNIW

SEQ ID NO: 181672 - protein, 463 aa, Oryza sativa
  Clone ID: PAT_MRT4530_78923C.1.pep
MQATGSGSWVAQASVLGCGGGGGGVVVVRRPSWDGGAAVGGRAKGFGVVRCCVQEKKPRVRKTKEERREMVESFVNTDYRVSNDGKFPSVNLTHKEVGGSYYIVREIVRDIIQENRVLGPGGLNATALSFEDCPDSVESPVTHELGQDSVEILDMSDDNQAGMDTVTDMSTQQLLGSSNLLDAGILNGALQNGNIADMACLETNSEKQDEVPCAQSAEIDPSSSEKLPPSFSHAPDSESEFEMDSRVVAHETTSSLTNGVISSGPSAVITNESLLQDHDDTTDNAVDEAVLCLQTNGSSQANETILQEHETRPESVMSNDVQTIDSQSNSRVDTFNSNTSEDTTKSIEVSEVQRLHPDEEEKAENLVSHAELDTKVFSHVEGKNGMVEEDNSELKQSISIITMEEHDSKPEHGDSTTTAISRHALCLLTLRCMLTVYNFLHASQNTTAYLCMCYYLMMLATGN

SEQ ID NO: 181673 - protein, 772 aa, Oryza sativa
  Clone ID: PAT_MRT4530_78924C.1.pep
MPLKFWDEAFLAACYLINRLPSKVIQFDTPLERLFKQVPDYKSLPTFGCACWPNLRPYNSHKLQFRSKQCVFLGFSNLHKGFKCLDVSTGRVYVSRDATFDEQVFPFANLHPNAGARLRAEISLLPSNLTNSTFDQGGEEQHDQKMFNIHVSNATDEVCVDAATDTGCDDGITGENGNENAGENTDAGALDRVHIASENRAGESLLDPAPDATSSQGEQAVSSGSASQGEQASSPQRSPARSSAGNQSPAAASTPVVSARMHAINVPTGSSAPTAHAQPSVSSEVMRPKTKLQSGIRKEKIYTDALGNKNWKEAMDNEYHALMKNKTWHLVFPKRGLNVIDCKWVYKVKRKADGSLDRYKARLVAKGFKQRYGIDYEDTFSPVVKAATIRTILSIAVSRGWTLRQLDVQNAFLHGVLEEEVYMRQPPRYEQGNYVCKLDKALYGLKQAPRAWYSRLSTKLHDLGFKSSKSDTSLFFYNKGDVTMFMLVYVDDIIVASSSSTATDVLLKNLNQEFALKDLGELHYFLGIEVRTVDDGIVLTQEKYAKDVLKRVNMSDCKAVNTPLSTSEKLSAHEGTPLGPVDSTRYRSLVGALQYLTLTRPDLSYSVNKVCQYLHALTTDHWAATKRILRYLKHTIKLGLKIRPNLMSWSARKQATVSRSSTEAEYKALANATAEIMWIHALLHELGVQVPRAAKVWCDNIGAKYLSANHVFHARTKHIEVDYHFVRERVARKLLQVEYISTKDQVADGFTKTLTVKLLDRLRGSVRDNFHT

SEQ ID NO: 181674 - protein, 113 aa, Oryza sativa
  unsure (1)..(113): unsure at all Xaa locations
  Clone ID: PAT_MRT4530_78925C.1.pep
MGKKTRCRGGGGRRPLAIQPRHGFEVPGLQHHALGERVGGGRRRGAVLVAPSISITALPXSLDDLPANAHPHVVRRALPHLRDLLRSLDHFPTGVAVFLSDLLXPQALAVAAV

SEQ ID NO: 181675 - protein, 170 aa, Oryza sativa
  Clone ID: PAT_MRT4530_78926C.1.pep
MAPMSAASSQPASAATPTSTADRLGAASSQAPPRPGRVPPSASAPPPAELRHGPNRCRRPPWRRLQPARLRHGPDKHHLQLGSAVASPLALVAEPPNVSSESAASIFVKIFGRQIMGRQAVDDMDRGDDRHPVGEGGNGKARRWCRCGGGGREMREVAVLQQLIGEVQEL

SEQ ID NO: 181676 - protein, 550 aa, Oryza sativa
  Clone ID: PAT_MRT4530_78927C.1.pep
MKIAKRQTWCSYKLIRFLICLLEFKSLTHVDAQIYNYLVTDNDKVKTLSLLVNKSQEVKRASKPRVFHSILDNVLLINISYETFAKPQRGCSKSPSPPIPAVGSFHMGLCKHVASWTSRSNRRGGEINRAVRGSGHYDLDDGCYSGRRQKKRERKERNNERKGEGKKLNCSRKGVNLFFLPWLAVKGAKRKTFANVEAINVGKKYTEGPSICYRDIKTSSNRKTRYTVSLNYTKPVTRGPSVVSTPVLVYVAAESTWDPRTLSRPTVDRQVRRRPVGRVGRGGPVACDGRCCGGCSDRGCKGRRRCFCELTGMDSGGGEVSEDTWGGEGRAAGGEAMEAAGGGQRRHLEVEARRAAPGSRPPCQAPPREPYGLHAARVMVSRDVHLSASSFVRLYLPPPAAGDKRLPVVVYFHGGGFVIGSAASPGYRRCLNDLAAACPAVTVSVATASPWSTRSRPPLAWVLSVADPWLAAHGPLSRVFLAGDSASDNIYHHLVMCHGLTSQHLSCRLKGIVMIHPWFWGKEPIGGKAATWGAEGAMGVRVPRRGGRRG

SEQ ID NO: 181677 - protein, 511 aa, Oryza sativa
  Clone ID: PAT_MRT4530_78928C.1.pep
MATPSMPAPAAEAAAAATTATANSMPLAPPQPPSSGAPFSQPPSTAGTVKTEAPPPPSTSASSAASAAAPAPAAAAAAAAAEESPCTITIPSYSAWFSYDSIHETERRLMPEFFEGEAAAASGSRGPEAYKYYRDTLVRRFRARPGRRLTLTEARRGLVGDVGSVRRVFDFLEEWGLINYGASPSGAKQGRDKKEEAALSQSSLPIGATMPSKLCTGCRTVCGLAYFSCEKADISLCARCYVRANYRPGLTSADFKRIEITEDAKSDWTDKETLHLLEAVLHYGEDWKKVSHHVGSRSEKDCIARFTRLPFGEQFMGPKEDKIQFGNDCDLNEESGSHISKRLRLTPLADASNPIMAQVAFLSAIVGSDVAVAAGQAAISAQSQVDISASETDSSINISKEEESSCTNGLSANDLLKEASANAQVQLEKERKAIEQSLSDIVGVQMKEIQDKIRRFEQKELLMEKERKQLHCLKELLFSDQLAVVQHQRRPPAVTTESKDDEKPKPVISIS

SEQ ID NO: 181678 - protein, 100 aa, Oryza sativa
  Clone ID: PAT_MRT4530_78929C.1.pep
PPGGRINFRKKPPGKFFKPFFRKFPPVPIKYRFNPLKFFFPGFFKKKNNRFSGIIFKQPAPGFKPPTISGIANALTDYGRLKFKKKAGFFACLIFGGGMD

SEQ ID NO: 181679 - protein, 77 aa, Oryza sativa
  unsure (1)..(77): unsure at all Xaa locations
  Clone ID: PAT_MRT4530_7892C.1.pep
MALSPLTKAVTGAPACNAPWMLAALPSXPFLTIWLTEEKLLNALLKIVFHEISADDAYASIDLHILEQPFDNMCDVS

SEQ ID NO: 181680 - protein, 133 aa, Oryza sativa
  Clone ID: PAT_MRT4530_78930C.1.pep
EGGGGAFSCGSISSWRGGGGEHRRRGVVAASSLSKTATDPQLPSPYLAWSKPDLAEAAGAVAQRDWRRHGWRRRRLARSMRAPVHASGAQGVARHGAVLSLAGGVGDSTVQRWMGRRCPGRRAVRPLRPAPLA

SEQ ID NO: 181681 - protein, 63 aa, Oryza sativa
  Clone ID: PAT_MRT4530_78931C.1.pep
NVWGGPFPPYSLFFSAKTHQTLCFSTWERKKGSLHPVSQNNGTDPCPSRGKPRRWFLVPARGR

SEQ ID NO: 181682 - protein, 126 aa, Oryza sativa
  Clone ID: PAT_MRT4530_78932C.1.pep
MSVWKPTLGVITPCSVRVGGGDGGSAARARDDAGRRRIVDSGRRTRPAATARVKLLGRKVEAGRRVGLRRRRNTGRRRVELDEGGGRGRRIGWLGAQEERRSRPAALCPRARFGMREQETDAELPQ

SEQ ID NO: 181683 - protein, 81 aa, Oryza sativa
  Clone ID: PAT_MRT4530_78933C.1.pep
MGRWPSRWLGWRSLPLANLFHLLMDQDQDSLRPADKAVYKTTSSSCCVEYGVLELRMMTGRNPQFLSAVSVAAQWYSYSYA

SEQ ID NO: 181684 - protein, 96 aa, Oryza sativa
  Clone ID: PAT_MRT4530_78934C.1.pep
CILFSVAPANSTRVCLLGGGQHLHHMYSIHLHICCIRIDTCPVRFSRILANSAGTVGLSLDVARLHQGGDLFTCDPYLIVCVGSVRRASTVPRCIS

SEQ ID NO: 181685 - protein, 94 aa, Oryza sativa
  Clone ID: PAT_MRT4530_78935C.1.pep
MGKDVAPLHFTVMVMGKILHRGGGARRLGTLSPDHIAASTGFSPWPPDTGRHPGAAGACECATHLVAVAASCTAEGPAYVLGEGVSVPAPAAYA

SEQ ID NO: 181686 - protein, 63 aa, Oryza sativa
  Clone ID: PAT_MRT4530_78936C.1.pep
RCSGVATPIAPRGWEFEPHPITSGNTTHTSDNYYGSSSFSSEGEQLICNQTLFASLQASLLGH

SEQ ID NO: 181687 - protein, 330 aa, Oryza sativa
  Clone ID: PAT_MRT4530_78937C.1.pep
MHSASDSTGRLAGGRPEEVDNCGAALSAREPDGPSEVSASPRLPATNATNASLSSATDRASRQIRPPRGRGCADLNARYRLLHAHPPATSVRFLLLVVFFYLNLLLVVVVVVVVVVVVVDDDDDLSATAVECLFEILRRLPGGCERGVSTCVSRSWFVMEDDELSAIGHHGEGERETNGSDLRHHRRCSCSLSTPLSSWRLWSPLSSSLPKLVGVAPAHGCVEVAEVSGEAVKVRQWWKRGEVTVEERQSVSLDDARNDGKCCPACATCTGMAEVTASFFSISMPSSIDEPGRCCSCSWWRRLRKRATCEEDRCRRGRRWSAATTGRRQR

SEQ ID NO: 181688 - protein, 93 aa, Oryza sativa
  Clone ID: PAT_MRT4530_78938C.1.pep
GVARCRHPRLQQPVGLVEAVRLHPSRQQPPCQPVRPQELVYRVVRRRATSSTHVRSWRRAGSSERQRAGGEQEEEEDGERPLRGHGRNAAAAG

SEQ ID NO: 181689 - protein, 275 aa, Oryza sativa
  Clone ID: PAT_MRT4530_78939C.1.pep
MGGGSIRAAAKAAMIGGYRSASAVRRAVLPASPAPQTAPSAAGEGRKAASTYAAIDDWVIPDREVFGPVPTHEEAMAATLDLKESFQFAKSAQLEPLPSGDLDGLIHSKTSEHEDNHEISLVSSGAPGRVVQAFTMLQDSPEAQEVVASLASDQNVWNAVMRNEKVMKFYKTYATKLNEDEVEGSESDSVQNSSELGSAGEAFMCYVEKMKALVSEMMTNLSSIMQDLVATSDEGQSKGKLKTMILDSKKDFANAPSAFVLLAIASIMVVLLKRA

SEQ ID NO: 181690 - protein, 638 aa, Oryza sativa
  unsure (1)..(638): unsure at all Xaa locations
  Clone ID: PAT_MRT4530_7893C.1.pep
GERAFPLVHLGPCMGAGDPRLANFRFRQVLIDESTQATEPECLIPLVLGVKQVVLVGDHCQLGPVIMCKKAARAGLAQSLFERLVILGVKPFRLQVQYRMHPCLSDFPSNCFYEGTLQNGVTVNERQTPGIDXFPWPVPNRPMFFYVQMGQEEISASGTSYLNRTEAANVEKIVTTFLRSGVVPSQIGVITPYEGQRAYIVNYMSRNGSLRQQLYKEIEVASVDSFQGREKDYIILSCVRSNEHQGIGFLNDPRRLNVALTRARYGIVILGNPKVLSKQPLWNSLLTHYKEHECLVEGPLNNLKQSMVQFQKPKKIYNDRRLFLGGGQGVMQGASFGAAGTNPVADKRSGHSFVPFGPPNGAHKPGVHPSGYPLPRMPFPPFAGAHSQPYAIPTRGSLHGPIGAVPPVPQPGNRNFGPRGNTGGPIGGHLAHQQSSQQAMGGMGSAFNFPGLENPSSQPSGGGPMSQTGLMTQMPVQGLSQTFRDGFSIGGMSQDFFGDDFKSQGSHVAYNIADFSTQASQGGYGVDYSQGPQSGYPGNYLNQNAHPGYSHMGAANDIVSQDHMAHGSHGMFTQAGYNDSSQDESSQMHFGMAGPGLQSQKRWCIDISCKYWAQAYVGALHGYLLRQALYKMAMAVDH

SEQ ID NO: 181691 - protein, 407 aa, Oryza sativa
  Clone ID: PAT_MRT4530_78940C.1.pep
MGAAAAAGFFFVLLFLSVQGGAVGYTRSDFPRDFVFGAATSAYQYDGAAAEDGRSPTIWDTFAHEGKTKDKGTGDVAADGYHKYKGDVKLMAETGLEAYKFSISWSRLIPNGRGAVNQEGLKYYNNVIDELAKRGIQPHIMLCHLDLPQALEDEYDGWLSPRIVEFGDRVLHWTTLAEPNIAALGGYDTGVLSPGHCSDPFGLTECTVGNSTVEPYITAHNMILTHAAVVRLYREKYQALQKGIVGINMFSLWSYPLTNSIADLQAAQRYKDFSYGWILHPLVFGDYPQVMKKTIDSRLPSFSQVQTELIKGAIDFIGINHYYSAYVNYRPLVEGVRDYVADRSMGSFTIIEKILYKTDPPTEKYEPTEYPNDPKGLQLALEYLRESYGDFPFYIEENVFDMLVKMK

SEQ ID NO: 181692 - protein, 53 aa, Oryza sativa
  Clone ID: PAT_MRT4530_78941C.1.pep
VLSSDLSMAVAHQAAHIRQHKFPFVHCTQWAAHNINGPINIPDVCEPKISETG

SEQ ID NO: 181693 - protein, 90 aa, Oryza sativa
  Clone ID: PAT_MRT4530_78942C.1.pep
MEMMVHACMMSSLVVIIAGYKAIWQTDVIPSHIIWIRPTFYLSRYAGHMGIWYPTIYTLQAKTQQSYATASRYVVESEIKPQDPSSRCTH

SEQ ID NO: 181694 - protein, 49 aa, Oryza sativa
  Clone ID: PAT_MRT4530_78943C.1.pep
MAAASTEMGSMATTGSTALARWSCTGDSHAHPAPPRQLVAGTQPTGVAA

SEQ ID NO: 181695 - protein, 113 aa, Oryza sativa
  Clone ID: PAT_MRT4530_78944C.1.pep
MTGCSKGSHELKRCCKATPSEEKEAKRMKETQTMVPEEQVEHLLSFVTMEPIPLPVVSADSDGNPNSLRNRMDRLLIRAINRVNTNSQVIRQMQANAREDLRTKGYVHALVAD

SEQ ID NO: 181696 - protein, 167 aa, Oryza sativa
  Clone ID: PAT_MRT4530_78945C.1.pep
RHGSRSGGGRRGCAAAARRGRRAPGPPATPARRRPSRRRRGRGRARRTRGPRGRAGAPAWRTWRAPRARRGTPARPPRPRRARGGRRRGAPRTRCSGTRSRRRRPRTARASRRRAPWRSRRCRRGRPPWRSSPGRCCRSRRRAASGRRGGGPAPPPCRRTPRTGSAP

SEQ ID NO: 181697 - protein, 114 aa, Oryza sativa
  Clone ID: PAT_MRT4530_78946C.1.pep
MFSNYGEGSGGGGPRGATQDDGDEEQAEVDTGDGNGGGSPRGNGGPEQRQPKHWCKTLGKEQVEVDPIGSTRYGSGLSSEGRRTSLVTTATYYGRGGLGSGKVEVDPIGSCPVN

SEQ ID NO: 181698 - protein, 1012 aa, Oryza sativa
  Clone ID: PAT_MRT4530_78947C.1.pep
MEYRYDIMGRPRGRGGGGGGGRGRFGGGGGSRFSAARDDPPPRRSSSGWGVAPPSRHLWVGSLSPGVAAADLSELFLRCGDVEGISRDPGRSFAFVTFAREEDAVAAVRELQGIHLRGAPIRIEFSKGDKGSSSSMDDRYSQHADQRRFTERGRNQQSSPEKSTDKSKRSRPAEPSEVLWIGFPVGLKVDEATLWEAFSPFGEVVKITTFPGRTYAFVQYTTIAAACRAKETLQGNIFNNPRVSICFSRSDSVSAEFGKGSLDAPYSPHLNSSVRPIFREQDFEDFPRARPFDSPPRDMYMPSPHYGPKRLSRDHDDVGFSRDNYLRYGPGVEPDPRSNFEPFRIQGLGPERRMSEDPYEQHRRSPAGDAPWHNIPFERSQGALPLEDSRYAREDPYPFSKKLRTGEAHDSELPEYPFSEFDRGKVGSAYPRRPFYGVPDDDIHPRGYQLAPMHGRNHVDPLRNPTPLVDRHIPGHAQDSFSRHVEVERSTPEYHEPLLKEEWKWDGTIAKGGTPICRARCFPVGKVLNFMLPEFLDCTARTSLEMLSKHYYQAASSWVVFFVPENDADMAAYNEFMNYLGDKQRAAVCKLGERSSLFLVPPSDFSEQVLRVPGKVSISGVILKFEQSDPEVSSPTRKPETFVSHLNHDVRAHEDLDALRRINPPDIRPLPQGSDYLGLSPGSYNPASAHLVPPYKFGNAPSYLESELAHQKHPPDSHREIAHDKQQQHPDVLPSRWSDNIYNPSPGSGNLNYLAESAIPHTSTDRTPEAYSFAPQGVPKVSTSGYAPVADEASNMSYPPMQPASQQVVRPQQPPSLPLSLPPEQLAQLATLLAQQNQPGKEPVDSLNKESGFIRNPHGHSSMMPHSSGSIPVQNSLPPAPPSASQLQVHAPPVQGSVPPNPSIMHTPNAPMPSHNTLPLPPMHPSGNPAHSSMPLRSFVPPLPEGPPPLRQHTSSALQAQPALPSGPQTSQQPSAQEDHHGDPQKRLQATLQLAATLLQQIQQQSKPGGQK

SEQ ID NO: 181699 - protein, 65 aa, Oryza sativa
  Clone ID: PAT_MRT4530_78948C.1.pep
IGFSLKVMVVLSPTPPLTGAMIPAFFIERKQCPRMIYRLPRRQRNNDEKGNLLPEVELNKANKCY

SEQ ID NO: 181700 - protein, 47 aa, Oryza sativa
  Clone ID: PAT_MRT4530_78949C.1.pep
VEGTNPVVYVLNVRDTSLRTYLIVNFDKWDVKFVNFRLFLNIRYQVI

SEQ ID NO: 181701 - protein, 59 aa, Oryza sativa
  Clone ID: PAT_MRT4530_7894C.1.pep
MICARIYNCSRHKLNIACLLYSLYIHLYAIFIPFFFLLVSGVFHLLFWIAWLISELPLC

SEQ ID NO: 181702 - protein, 378 aa, Oryza sativa
  unsure (1)..(378): unsure at all Xaa locations
  Clone ID: PAT_MRT4530_78950C.1.pep
MYRAKRAALSPKVKRRVGKYELGRTIGEGTFAKVRFAKNTENDEPVAIKILDKEKVQKHRLVEQIRREICTMKLVKHPNVVRLFEVMGSKARIFIVLEYVTGGELFEIIATNGRLKEEEARKYFQQLINAVDYCHSRGVYHRDLKLENLLLDASGNLKVSDFGLSALTEQVKTGVXDADYNGAAADIWSSGVILHILLAGFXPYRVDNMIAFYREICEYFFRCRCWFWXSSEERHDQEETEDQPTSMNAFELISLNQALNLDNLFEAKKEYKRETRFTSQCPPKEIITKIEEAAKPLGFDIQKKNYKMRMENLKAGRKGNLNVATEVFQVAPSLHVVELKKAKGDTLEFQKFYRTLSTQLKDVVWKCDGEVEGNGAAA

SEQ ID NO: 181703 - protein, 419 aa, Oryza sativa
  unsure (1)..(419): unsure at all Xaa locations
  Clone ID: PAT_MRT4530_78951C.1.pep
VEIGRPTKDGFFTNKTEAEGQKADSTAAHHHRLPDPLREKPTPLPPLDPPKADSLPAACPPSKSGGGRAPPAPTLPPSSEDPSLLPSPXPPPPSXCARLPPYPFSPPPGGGRAPPLPPKPEPPTTGRPPPRPAXRQPSSLSPPSPPPPPPPLPPGPASAXPFPSSMPSPELEGDGRQSERADEPPPPLPQPPTFAPXPSLPPPPSLDPPPXPPPSPPLPCLXPRPDGPPPQDRLPQPTMTPFPPLFSSPPXQAHRPAPAPPSPPPPTQTPRVPDAALGEEMQPADPPIPPPRPPPPMPSRKRGRGPTKGDDPAPDEAAPPRKPSPPLGPEPSPNGXRPVYAPRRSTSTPAISPPAPTGRRWPSSSPSTPRSCGARTPLLHPRAADPRAPRHGRRLADIAKVQQPRGARVHRRPLLYETT

SEQ ID NO: 181704 - protein, 153 aa, Oryza sativa
  Clone ID: PAT_MRT4530_78952C.1.pep
MSKWYIAQTHVCLVTIEDPDIPEIANVDTLYPMQSAPVTHLTGDIVEELYSDTTSLWEKLRDNIAGSLEEMMSALDRMRQKCKRIMRGHSTGMHQKSTVPQDTGLRTPYRNNRLPLLGLPHRQDPQLPHVLDVGKACGTVYDKPIGQCRCTLS

SEQ ID NO: 181705 - protein, 240 aa, Oryza sativa
  Clone ID: PAT_MRT4530_78953C.1.pep
MARNRIILKKVAKDSTRRLTFKKRRRGLIKKAGELASLCGIGVCVVVYGEGEVKPEVWPSAPEARAILSRFNSAPNIDRFKRVTNQEQYLRKRIAKARERTSKADDVNRERDATIMLYEAATDKRPVADLNVQELTNLGLVINERINHLKERIERLGGAALMAPPPSTQPTEASSSLPPLVPYANGAGMEGNKRMKVSTHQKGWFINMSTMTGDAGTSADVEGNTGVGTSARGDMMHLSN

SEQ ID NO: 181706 - protein, 360 aa, Oryza sativa
  Clone ID: PAT_MRT4530_78954C.1.pep
MASRTAGRERDPCEDEEVRVYSDSRGYFASGGRDVDVGPFPTSDELYAALDHHYHLRSKPCDPAPLPTQCEGLLRGASEPESAQALQEPDVLSVGELLGAIALKEPIISSPSSSPQAVPEDNIDAVPSGCCLSSSPGSVIWVHKPPEGRRGSYHIRMDRSGLFHTYPDMGGPFLSLNEAQDAFTSHLNILYPPLKFEERDGESIVDMMGLAYELKDVIHFQPIMESCTWFDHLNFTALTKGDNELDYQIHLFFAELMCLVGQKDYIVTCCCALKSDDNGNCYNCKLQNVNLKHPNDTNQYAGGHEYLCGIYDTEEMSESEDEEKEEQRIRKLYEDLEEPGLHEKLFGDVEETGLQEELFG

SEQ ID NO: 181707 - protein, 56 aa, Oryza sativa
  Clone ID: PAT_MRT4530_78955C.1.pep
EPYRRRNSSSSAAEFLGVPLPAKANSRHLPVVAWPHAVPHTGGKPAGNAVPSAEPE

SEQ ID NO: 181708 - protein, 329 aa, Oryza sativa
  Clone ID: PAT_MRT4530_78956C.1.pep
MAAPDGDATPPSVEERLRRLLLRARFIVEEADERLITNQAMLQQLNILRKEMYRGYFTLDIFRCHGYKGDNTKDHQVSNSFALSKFNPAKRVRLSRVSGHSVQKQLQQVLGSLEVAIEDTSEFVIRQLEREHIMNFLLKENTPGAENLGILPIIGPENVGKSTLIEHACDDERVRNHFSQIVCFNDNDLEDANMALQIKALKLVPVVPRHCALYVDEAEYSPWFESFQVWTSFLTGLMKTTALSAYMEILRRAALPRSFVMALSSVAFESSHCRGSIARIKRSGDSGGYYTLDRFRYHAHEQDNSKDNKVSNSFSKSKFNPAKRVRFFW

SEQ ID NO: 181709 - protein, 87 aa, Oryza sativa
  Clone ID: PAT_MRT4530_78957C.1.pep
MCEAVVVVPSSVQRRGRGRPSYPVLVQHTGAVGALVKYRDGIAGDQLQDGDVLRGATCTGMVPPFDDPSALSKGSRLVSVIENEMIV

SEQ ID NO: 181710 - protein, 52 aa, Oryza sativa
  Clone ID: PAT_MRT4530_78958C.1.pep
HSYIESEYTHVSSQLCILLSSILQRTILYFCWQPFLGQLDSLHLHPKKKKKK

SEQ ID NO: 181711 - protein, 122 aa, Oryza sativa
  Clone ID: PAT_MRT4530_78959C.1.pep
YRSLLRLPPGGLPPRPSKEDDQQEEREEEEEEEKLYVYLSLSLDESPFGRRGQPGRLRPPQYNRYRRCAALRCPTRRSRIRRILHPLTVYAIGGRAEPWNPAPTAAASADYASYRYRPGSPR

SEQ ID NO: 181712 - protein, 1094 aa, Oryza sativa
  unsure (1)..(1094): unsure at all Xaa locations
  Clone ID: PAT_MRT4530_7895C.1.pep
MAGMEAFEAYFRRADLNQDGRISGQEAVAFFQGANLPQQVLAQVWMHADKNKTGFLGRPEFFNALRLVTVAQSGRQLTPDIVQSALYGPAAARIPAPKIAGGGQAPPQMAAAGAPRPQVNAAVSPAPGQAGAPQPQMNVAGAPRPQGSGMMPGSAQIGGSQQVNAGAVPRPQGVNSMMPAASQGGALQPTQFATQRGMQSQPPSMGFNQQPPPSSTGFMRPTQPGAPAASLQGQGPGINQVPLGGGSMGAPAGWRGGNVGSVGGLPQATPGATAPQQATPGGFGLTLSSTMGMAPGQQAQGTPPSSMPPQSNSAVSAQDSKALVLSGNGSASGLGASNDIFSALTQPKSNVSTLSFPTSMAPNSSSFMSTPSGSQNLSNLAQFGSQQGIPTVSSGGSQPQQTHPITKPSVPAPTVSGVSAGVSNSASQWPKVTQSDIQKYTKVFADVDRDRDGKITGAEARTLFLSWRLPREILKQVWDLSDQDNDGMLSLREFCIALYLMERHRAGTPLPPALPDSLKYDEVLLRATGLPSTAYNGPSWQQNQGLPHKGPGAAGMPATGVRQPLPPHLQAQMDGANRPGQPRPHMPGMDNHAAPQANKDDGSGANSAVQEDAPKKVEVEKQVLDSREKLEYYRTKMQDLVLYKSRCDNRLNEITERASSDKREVESLAKKYEEKYKQVAELASKLAVEEHAFRDVQERKVELHDALVKMVQGGSVDGLLQVRADRIQYQLEEMEKAFSERCKHFGLQFKPSASVELPFGWEPGKQEGAIEWDEDWDKFEDEGFGFVKDNGTIVENPVASENVKVPSLWNDMDESPVASSNGHIKAERHYRAGDHAAESDLGYDFGEESVRSPSSAGRSASGSPFVSSNFAMHDSSPSKKETYSDHGGSESIFGDKYADETSWNFDDQDTESVWGSNAMNNESDHHGSAHNSFFGSDDFGVNPVRVGSPSGASTYGKKKSSFFDDSVPSSPAYTSGFSPKFSESRDDSSSYNLGRFDSFRSQESGFFPQESRFSRFDSINNSKGENVTGFDSPKSSTNFGRFDSFDDADPFGSSGPFKASGSRSPPKFXYTRVLFLVNSFVDTRLNSFEETPTR

SEQ ID NO: 181713 - protein, 120 aa, Oryza sativa
  unsure (1)..(120): unsure at all Xaa locations
  Clone ID: PAT_MRT4530_78960C.1.pep
ISGGSKFSPFFPSFPPINSLQITSPPFFAPQLFFFIIFAHYPPPPFYYTPPNFFLKXPPQMFFFPPKNLLKILPTPPPKIYKKPPPLLAVPPFKNPPFIIFFXHPPPPRLFFKQPKKKIF

SEQ ID NO: 181714 - protein, 73 aa, Oryza sativa
  Clone ID: PAT_MRT4530_78961C.1.pep
MRLAWTGLDPRMVEEEGKAEQTLDLAEVSGSENIATCHYRKSMEHVCMACLLVLIRVAGAGAGAGGGGGGGEG

SEQ ID NO: 181715 - protein, 415 aa, Oryza sativa
  Clone ID: PAT_MRT4530_78962C.1.pep
RRWWRRGISPVGGRRRRRVDLIRRWWWWRWPRRGRRPRRADRGARPRRESAKVAAAVANGKVGKKPALSQSASFPARGAAAKKAATPKQAKTTDGKGAVPNGSEKAAGRAVEKKVNSARTPAASRSLPVKSGSVDAPPNDASPETQESNENTTNALEQTLPEKMEDDVHSTTSSTNTPRAAAQRKNAAAAAGFSFRLQERAEKRKEFYQKLEEKIHAKELEQTNLQAKSKESQEAEIKLLRKSLTFKATPMPSFYKEQPPKVELKKIPPTRARSPKLGRHKPTNSAAAASVDGSVSCESPRSITNLAKLTESTENNKPHATARKPAQRSVTKIPSQASATAKTETKPLVTKQKTSNTKPKAPRAKVEQLQDNSVEIPPAEPSGPEGLTVEHGVEDATGPDRATTLVASNEVPVQG

SEQ ID NO: 181716 - protein, 104 aa, Oryza sativa
  Clone ID: PAT_MRT4530_78963C.1.pep
LGLRRAVGGRAVLEVEDAVLAVLGRALAGAAVQLLVRVVVAGDVASLDAHHRAPRLLRAAHGAHHHHRREEEDDGEGELHGCHSSFSSFLSLFDQCAICSCVLI

SEQ ID NO: 181717 - protein, 238 aa, Oryza sativa
  Clone ID: PAT_MRT4530_78964C.1.pep
MAADVSSVAMLLRWEAGRRGGAAGEVVTMDLLGGCGGDSRGGVVGGGGGEDDVVDLEVKVPAGWERRLDLMSGKTFLTPRLQCVHVGHQDLNLPPPPSSAAAAASTSAAVCTLDMVRSALERATAGRSAAAAAARGSPATSSSSSASTSSSSSSIGKRHRSPPSGGAVATPASPSMRAGGCPSCLTYVLIAEADPRCPRCAGNVPPLAGKPREASAGAGDGSGKKPKIDLNAAADDTE

SEQ ID NO: 181718 - protein, 99 aa, Oryza sativa
  unsure (1)..(99): unsure at all Xaa locations
  Clone ID: PAT_MRT4530_78965C.1.pep
LQCRSKILPFRFVSVPVDLILQSTRNKDKETAVKSINDSRSARTQSVYGNPYEALXLNPMTYTESYCRNRLNRLTLSDSNSADPXIVADLDSSRFLLCF

SEQ ID NO: 181719 - protein, 550 aa, Oryza sativa
  Clone ID: PAT_MRT4530_78966C.1.pep
MATATYFWSNTINTFLFNQGPMTPTLIDITMITGLDVTSSANPMSLNTKNQFDFRTKSIGDWSGYVAAYMGKGPVTPREHVAFLLMWLEKFLFCGSSCGPTTNWQFLAEALETKRQFPLGKILLSYLYQMLNNASAKIAVGSIIGVGGPWWLLQTWLNLVAMKAVNRPAMTEAEFPRLEPITDDDGEERTHRRCMSYREYASTPADAGAKLSAELLKDWFCSFYEGFQKDARVWFPYEDSANLNLPADFRFEDINSEKFDKSREVFLAAISPCILPVGIHQGRNIQTTESSPPRKSNSRRDIEYAPGLLPNGGGLAPPVIGYHAPKTSSLLQGQMREPADIGRKRKTKASAIDSSALAPKKKTKKNKPKLADDLPALDPSIEQALDEEDIEEDVDQAAAEKKKTTVKKKSAATTLKPAPPVRLSYINPLTYLITAGSHHVEEEEQPAAPAIPVLADLFSFDIKDYFDETEKETTSKALAGSGGGEGAAASRCLPFCATACRLGHRCLPSSRIRWRGGRSRRRCCLRRAVVTRPPPCARERTRPREAREEG

SEQ ID NO: 181720 - protein, 104 aa, Oryza sativa
  unsure (1)..(104): unsure at all Xaa locations
  Clone ID: PAT_MRT4530_78967C.1.pep
LQCRSKILPFRFVSVLVDLILQSTRNKDKETVVXSKNDSRSARTQSECGNPCEAHXLNPMTYTESYCRNRLYRLTLSDSNPADLVVADLDSSRFLLCFRNDLRL

SEQ ID NO: 181721 - protein, 32 aa, Oryza sativa
  Clone ID: PAT_MRT4530_78968C.1.pep
CVLNCCRKLKDNYGQNIDHYNKHLKKHILYRP

SEQ ID NO: 181722 - protein, 72 aa, Oryza sativa
  Clone ID: PAT_MRT4530_78969C.1.pep
MDVIPENVQIRTLFVTASTVGAEPTYDVASKLTGASGSGQSLTNGNETDAVANSVPFRTFSGTASTSGRSGR

SEQ ID NO: 181723 - protein, 170 aa, Oryza sativa
  Clone ID: PAT_MRT4530_7896C.1.pep
MEGGVSNDKQLLSAYVEIFARGVFNKEMSGRILSDHCYLDTHYMYLSRSIEAVIQVSTEIDSNDPRHVKFTAFCSGFDNEILLFNGKFCKDKSFEHIVAMKSKGKLVVRLEFEGSLFCWTFNNGELGAVNSPDDSVLKQFHVRVVFSPKQCVPTYNSFFLWRRSKSVQKA

SEQ ID NO: 181724 - protein, 69 aa, Oryza sativa
  unsure (1)..(69): unsure at all Xaa locations
  Clone ID: PAT_MRT4530_78970C.1.pep
FISSLSLSQQKYVKMRGWVYLTRSIVYTLKTITNYKYKWVNVTTKRXRAVGPFYLFIIYIPRPAERNQY

SEQ ID NO: 181725 - protein, 90 aa, Oryza sativa
  unsure (1)..(90): unsure at all Xaa locations
  Clone ID: PAT_MRT4530_78971C.1.pep
KLLAIAACXASSHFDVLGQSYRQYHLHSPVLLHQQVLIPYFFFVRCRYFISXSPFLKSSSXXXINNQFFQXLFLXSHQSYYHYIYIXHSI

SEQ ID NO: 181726 - protein, 76 aa, Oryza sativa
  Clone ID: PAT_MRT4530_78972C.1.pep
YKNTGSTTSEKLCMRVCHITKVLGPGMFIWLANRSMIIIRSSPCSRRRLDPHLDLSFPLHSNLENHLEMKWDFSSA

SEQ ID NO: 181727 - protein, 689 aa, Oryza sativa
  unsure (1)..(689): unsure at all Xaa locations
  Clone ID: PAT_MRT4530_78973C.1.pep
MAKSLLVSSLLAVVAAVVVGAGPNPQYCPPSSCGHLGNISYPFRLAXDSRPCVATPRPWYNLSCSSGRAAIQINTGTYYVSSINYTGEVFSVVDATLQDDDTNGTSCPLPRSDHLPYIDYWPPYLGESSTDSYGFFDLATASGTWACFVNCSRAITDIMPWYRPVTCLLPNNSFVFVSFDDCAVGELQPSCRYLAMIPFESRHISDNSSQLQNASYTDIIGFIRKGFSVRFPYRPDQYQSPRMSARECLKDSNRYFKERISHPSILNLTRAIFWSETNSEVDCGYEVAPQKDRIFLGTIVSAIDIIKFHFVLFRLVLGSLVVFIFLAHKYWKTRITIDAVEKFLRMQQMIGPTRFAYTDIIAITSHFRDKLGQGGYGSVYKGVLLPGNVHIAVKMLTGSSSCNGDEFISEVSTIGRIHHVNVVRLVGFCSEEMRRALVYEYMPRGSLDKYIFSSEKSFSWDKLNEIALGIARGINYLHQGCEMQILHFDIKPHNILLDDNFVPKVADFGLAKLYPRDKSFVPVSAARGTVGYIAPEMISRSFGVISSKSDVYSFGMLLLEMAGGRRNADPNAANSSQAYYPSRVYRELTRRETSEISDIADMHELEKKLCIVGLWCIQMRSCDRPTMSEVIEMLEGGTDELQVPPRPFFCDDEQLPGVESYNMPSDLTAISEEHEDDDDDSICLFESYQ

SEQ ID NO: 181728 - protein, 49 aa, Oryza sativa
  Clone ID: PAT_MRT4530_78974C.1.pep
MEVGTTITFVSLGSSYRISIPSLARSLRRIHAAAVRQPIGLPIVLVDGD

SEQ ID NO: 181729 - protein, 104 aa, Oryza sativa
  unsure (1)..(104): unsure at all Xaa locations
  Clone ID: PAT_MRT4530_78975C.1.pep
DPKLGPGYSAVQPRFLLLKXGVQDSLILFVILISAPQEVHVVSXRFPRVKFVTSVIEFGMNDDFLVIPGIGQFVDRYFGTDDFLFFPPFFCFGPNRVRLLFFFK

SEQ ID NO: 181730 - protein, 228 aa, Oryza sativa
  Clone ID: PAT_MRT4530_78976C.1.pep
MEAPFFFFLLLLVSSSPSTARLSAYGVNTEGQLAIVSAPILAFVRALIEIKNLLEDPHGVLKSWDQNSVDPCSWALITCSPDSLVTTLEAPGQHLSGLLAPSIGDLTNLETILLQNNNISGPIPAEIGKLANLKRLDLSSNQFHGEIPCSVGHLKSLQYLRLNNNTLSGPIPSASANLSHLVFLLLYLSYNNLSGPIPASLARRYNVVGNPLICEQDCYRMAPMAMFH

SEQ ID NO: 181731 - protein, 654 aa, Oryza sativa
  unsure (1)..(654): unsure at all Xaa locations
  Clone ID: PAT_MRT4530_78977C.1.pep
MATDAADEAPLLAEEPLRPGACSRELELREFRDRYVIRSVDGGGAFAVSRSNGSLRPLSAEEAAAGSDCRVSKIYGVAGVIRLLAGSYVLVITSQRDAGSYQGSPVYNVNSMKFLCCNEAIKHLTAQEKRDEAYFMSLLKIAETTHGLYYSYDRDLTLNYFLSYELLLRSLQRASKLPAGRVHKPLWKQFFKFIFQADPRFVWNKNLLEEFIEAKLDEFIIPLVQGNIQXSQIFSLLIFLFLSLLFTGTRMWRRGANLEGATANFVETEQLAEXKVRGSIPLLWEQIVDLSYKPCLNIIEHEETPKVVQRHFHDLSQRYGDTVVVDLTDKQGDEGNLSNAFAAEMERIPNIRISMYIKLSFYADVHFIYRYFLINSKGEIFLEQSGIVRSNCIDCLDRTNVTQIANALMHMALVKLNFYDMEPSHTFTVWVEHGDELSLEYAGSYALKGDLVRYGRQTLPGLIKDGMSALSRYYLNNFHDGVRQDALDLISGYYTVSKGISSPFQNGGFESATYLPVASAIIVGGITATTFTLSQAAGSLRLLWHHKRNQEAERKLRWINLRYSSSDCNVNCLLETEREKLFDGSSDVEKPRMKSTQEILTKYKFGGDAAAAAAHAKDKLKERGEKLAVNDFPILFFCIKLFSPFVYEQLNTKN

SEQ ID NO: 181732 - protein, 170 aa, Oryza sativa
  Clone ID: PAT_MRT4530_78978C.1.pep
MHKAAARTYVPSLTKIYHTVLSRLRIDGRKAGRLRMSFHIKLLLLQQISRADQRNISMPLPILALAACRTTCWLTRRVDRPKKARARMRRADERRRTWGTAGTTRLLAACHASTGLAVGARDCVAGCGSDGPAPNSSARAPRHAFHPALILLLRAYAGRAGLSAFGNYRH

SEQ ID NO: 181733 - protein, 351 aa, Oryza sativa
  unsure (1)..(351): unsure at all Xaa locations
  Clone ID: PAT_MRT4530_78979C.1.pep
MANDTNNTSSSVIATETTSASHVIKIDGYTVTKDLMENGEFVSSIPFSVGDFLWNVRYYPNGNCSKNADYLSFSVFLESHWAEDVKAKFSFKLLDTNNKPVRSRNFISNTHNFSRRGSNWGYSRFIKKRDLEQSEHLIDDSFTIRCDLTVMKGFSSKGSHCKPSVEVPAGRLDLHLGNLLSNKKMNGKDVTIYVGKERFRAHKCILAARSSVFRALFFGAMIAETPRTIEIEDMEAGVFRLLLHFMYNDSLPETWSQDAMMAQHLLVAADWYNVGRLKLICEEKLAKHIDCNMVATTLALAEQHSCQGLKEACLEFLXQPTNLERMMRTDGYKHLKISCPIVLNELIARLL

SEQ ID NO: 181734 - protein, 47 aa, Oryza sativa
  Clone ID: PAT_MRT4530_7897C.1.pep
MAFASPSLPGSAMMRAMAGSSGHLLLKPCDVEAGERIDDRWWLTVFW

SEQ ID NO: 181735 - protein, 50 aa, Oryza sativa
  unsure (1)..(50): unsure at all Xaa locations
  Clone ID: PAT_MRT4530_78980C.1.pep
QEQKTNFSADRSSSETYQDHMTYXVNKKLLKSTSSPFGSCAPEPKKATCF

SEQ ID NO: 181736 - protein, 68 aa, Oryza sativa
  unsure (1)..(68): unsure at all Xaa locations
  Clone ID: PAT_MRT4530_78981C.1.pep
PPLPLXSVSAVVVKKKRFCSPAFVAAVSRCRRRSCXGCLVAGACVRPLRRLRFLGGVGGGGGGLXSRR

SEQ ID NO: 181737 - protein, 363 aa, Oryza sativa
  Clone ID: PAT_MRT4530_78982C.1.pep
MDSPAGTDDPPPFAASGHYSLRPRDRRAPPSTNPRKRPRISIQNDVIGDIGEARGYARPMGLAAVLDLALSPSPSSDIWQNFAMEYRAKFVVWRLAFQVFTDKSLAINCDTGVDDQLNLMITKYHRKGGKIAVGKPEYKTIIEANLGISCLYDEFVMEVMWGLTNLMHSLVPEENSQLSKEDRLQMSQGLKMLLNRYGFDVKPGMVNKRILEAASDLYDCDDCEKKNNWSLRRAGRNLMDISSINSEDWGLLKLSTALMIVCYPEEKIIACLLKHSTDLLIASYPRREVIEYSQKMFSPDVLSKLVTDAPKYGIWIKKRTSKRIHEEMVFLYQQRIEKRKLLATLIGEATKVYEAEQAELLTN

SEQ ID NO: 181738 - protein, 128 aa, Oryza sativa
  unsure (1)..(128): unsure at all Xaa locations
  Clone ID: PAT_MRT4530_78983C.1.pep
LAHAAVGCFVTHCGWNSTVRRRSSAGVPMVAVPQWSDQTTNARYIEDVWXSGVRVRGGGGGDGGAVVRREEVERKVREVMEGERSKEFMRNAASWSSKARSAMGEGGSSDRNIAEFLSKYRLPPHGTK

SEQ ID NO: 181739 - protein, 183 aa, Oryza sativa
  unsure (1)..(183): unsure at all Xaa locations
  Clone ID: PAT_MRT4530_78984C.1.pep
MTTQPPSRRQVSSSAPSTRQVPYSAPGTPIPLPLLVGASREAPPLVGVSPHYEAYSAAAVLACRDGFVSFKKRRLNDGNGDCSNGTDEPSTCSNLNDVIYDDDVGINRKGVMXLLAMVRSXKDNAGNDDHDRKHNQDIEDLILNLKGLKMAVVIEIGLVICTFAVCFARRRTRTRRRHYILKR

SEQ ID NO: 181740 - protein, 81 aa, Oryza sativa
  Clone ID: PAT_MRT4530_78985C.1.pep
MVGINMTAQSLRIHLHQHGVKKTSSCAKNSHMTQLSHKFSKRYLSWSGSNLRLNLKVWLKLLQCDRKKKKKKLETSSPSCR

SEQ ID NO: 181741 - protein, 255 aa, Oryza sativa
  Clone ID: PAT_MRT4530_78986C.1.pep
MAADSSTAMTLYQGVPFHQQQNQIEIESMLSFQSSSIPPPPTPATMLLAPSSSSSDFRNYKFVTCSPADWPHHDLAILNDGLLRYAHEPNIIKYTKIAAMLPTRTIRDVALRCRWTKDNMVSSTLAANIQIQNPNNMPSDYSAQVAPPGPGFNSPHKRITGLVKKSHSLAPRKNVLRIDLWRVGPRVGGRCLKAQTVENMDLFLRTNNNIRTVLKRMSETPGIMGQMPPLPVPVNEGSLNTLLQMDRMVGAYGIP

SEQ ID NO: 181742 - protein, 52 aa, Oryza sativa
  Clone ID: PAT_MRT4530_78987C.1.pep
MGPKWSSIEKRDNWCTHAPPSETACTGRACNLTVAPDENALRVCPPSCETAT

SEQ ID NO: 181743 - protein, 56 aa, Oryza sativa
  Clone ID: PAT_MRT4530_78988C.1.pep
GVALPVAKLASEFLALDAIVNHVGNVVFANVVGLKKGLMNELVKGDSIKAYGEAKD

SEQ ID NO: 181744 - protein, 91 aa, Oryza sativa
  Clone ID: PAT_MRT4530_78989C.1.pep
VGAYPFVPPLFLNFGLQPRFGFEIFKHNFFLLQQFIGVILFHPFKLPPKHILRFLGAVLLIFSGSYTRSFFHNNSFNVIIFNPYIYKYLCH

SEQ ID NO: 181745 - protein, 609 aa, Oryza sativa
  Clone ID: PAT_MRT4530_7898C.1.pep
PCEVAGGDQPAMTTYRVCCFLRRFRAASNEPSEELGDVFQAYADGGGGVMGEEALRRFLREVQGEAAGGGDDELEATAREVMAFAAEQRLLRKGGAAAAGGGLTVEGFHRWLCSDANAALDPQKRVYQDMGLPLSHYFIYTGHNSYLTGNQLSSGCSEVPIVKALHDGVRVIELDLWPNAAKDAVEVLHGRTLTSPVGLMKCLEAIREYAFVASPYPVILTLEDHLTPDLQSKVAKMIKETFGDMLYVSETENMAEFPSPDELKGKIIVSTKPPKEYLQTKNDADADEAGVWGEEITDDKVAATAMTTEEKCAAAEEAVAAAAVDEEMQEAETDKKTQHGVDNEYRRLIAIPLTRRKHDMDQDLKVDPDMVTRLSLGEKAYEKAIVTHGAHIIRFTQRKLLRIFPRSTRITSSNYNPLMGWRYGVQMVAANMQGHGRKLWLTQGMFRANGGCGYVKKPDILMNNDPDKLFDPTSKLPVKTRLKVTVYMGDGWRFDFRKTHFDKCSPPDFYARVGIAGVEADTRMEQTKVKMDTWIPAWDHEFEFPLSVPELALLRVEVHESDNHQKDDFGGQTCLPVWELRRGIRSVRLCDHRGEPLRSVKLLMRFDFT

SEQ ID NO: 181746 - protein, 932 aa, Oryza sativa
  Clone ID: PAT_MRT4530_78990C.1.pep
MAEIAVLFVIKKIGIAVAGDTLKLAIPLFAKKTELKKVELVTALPVNMRQIKKELEIINAFLKELGMNGYKGEVVETWIRQVRRLAHDMEDVVDEFMYVVGKNKHKKSWACVKKIIKKPKPLFSLDEIATKADMINTELVELSKRLDRWTRPLSSGIYVPPTNYNSEQQLYLPGYDYSINDNELVGIDKNRQTLIESLRLEDCSLRIIAVWGMGGLGKSTLVNDIYKNEAIVSNFNCHAWLCISQSSKMHDIWQNMLKELCGEDNRGVDAENMNNRELRLELAKILRQKRYLIILDDVWLAADLLKIREVLVDNGLGSRVIITTRIEEVASIAEDGCKIRLEPLNNHDAWLLFCRKAFPKTENHMCPPELHQCGMDIVNKCGGLPLALVTIGSLLSLKPRNKKEWRLFYNQLISEVHNNENLNRVEKILNLSYKHLPNYLKNCFLYCAMFPEDYIIQRKRLIRLWIAEGFIEQKGTCSLEDVAEGYLTELVRRSMIQVVARNSFNRIQCLRMHDILRELAIFQSKKESFSTVYDDTHGVVQVGSDSRRVSVLQCNSEIRSTVDPSRLRTFLAFDTSMALSSASYFIFSESKYLAVLELSGLPIETIPYSVGELFNLRYLCLNDTNVKEFPKSITKLLNLQTLSLERTQLLNFPRGFSNLKKLRHLLVWKLVDATYKSLNNWESLEPFEGLWNLKELQSLCEVRATRDFVSKLGNLSQLRSLCITYVRSSHCAQLCNSLSKMQHLTRLHIRAMNEDEVLLLDDLMLPNPLEKLDLLGQLSKGTLESPFFTTHGNELLQLELSRCQLTVNLVAWLSKLSNLTELRLTRVYTGQQLSFHANCFPNLKKALLWDLQQVNQIYIQEGALSSLQYLHIDSLMELRDVPTGIEFLRSVKEAYFTMMHSDFVRNLRTGKGCLRNLLTCLENPAPTHNGAC

SEQ ID NO: 181747 - protein, 84 aa, Oryza sativa
  unsure (1)..(84): unsure at all Xaa locations
  Clone ID: PAT_MRT4530_78991C.1.pep
GLHLSKNDQAYHGPITRSRARNIQQXRFTPEDIITTPRKMGYVENDKGYIEEESAHAQPTAVYANKKMVYAAKAKLLRLVRPSQ

SEQ ID NO: 181748 - protein, 76 aa, Oryza sativa
  unsure (1)..(76): unsure at all Xaa locations
  Clone ID: PAT_MRT4530_78992C.1.pep
FFFFFXXXFIFSSXKAQSQSLLKXFYTXXLQXCSKKKKKKERKTKKXXSNGXYXDRQAXSHXXSPGVSQASGTPXR

SEQ ID NO: 181749 - protein, 220 aa, Oryza sativa
  Clone ID: PAT_MRT4530_78993C.1.pep
EPCALPTELDGLCWCPQHEEIGNATSTRRRRTAAGASDDAAEVGGGLGSGRRRRSRQRGDGAEIGGGRVGRRHGVRRRARPATPRRSAAGRRWSRQVRRRPRQVVSAEGRRSAAASAGCLGGGARTAAASAGCLGDAGKVGGRRRRWSAPALDLGALRKSDAGGEEKSRIGREGERIEGKAVGPTIGQAFLAGYIWPVQGELWPVGWLGQPVSQSIEARI

SEQ ID NO: 181750 - protein, 157 aa, Oryza sativa
  Clone ID: PAT_MRT4530_78994C.1.pep
MATFSSAVLEAEQSEARAKEVGRRRSGVSGGGRARRGGRGGSLRQQSDGGPAQAEKNWSPNRQHARGAAAVWNPQIHEGEHLGFHISGIMVESYELDSNSVHFSGSQIELIPMANVQPIYDDLELDYGLLLAHDIWAGTGICTYRNSGILHGIGEFG

SEQ ID NO: 181751 - protein, 153 aa, Oryza sativa
  unsure (1)..(153): unsure at all Xaa locations
  Clone ID: PAT_MRT4530_78995C.1.pep
MAPTVPAVSFPVXHAACAPLASLRRAVSVLVAAPPAVGAGLPSFVLVSCVFCLVLVSLAGLLVFVVWGGRYLFPLLSVAFVGVWLIGVFGWGCWGPAQALVLWGGLAGSKSGVVVCIGLRFGSFVLGXSLSVGCTWECGTLGVVGGTGGGVGP

SEQ ID NO: 181752 - protein, 64 aa, Oryza sativa
  Clone ID: PAT_MRT4530_78996C.1.pep
RIRIAVGNKKSSKERSKTGGAGPGGSRGRWRSRRGSRRQWRREQRQRQPQPAAGRPDRVRPSTA

SEQ ID NO: 181753 - protein, 134 aa, Oryza sativa
  Clone ID: PAT_MRT4530_78997C.1.pep
MAAPVASASASCFAPRSDHGGGWSYGGTRGVPSPRRGAARRLRRVLARSGGGGGGGGGGEGRGILDPLATPLQILGLDASASYTAAQLKAAFRARVVYRSLPPFALFAAYYVQGAQFLVTLKGALSAFVVVEPE

SEQ ID NO: 181754 - protein, 104 aa, Oryza sativa
  Clone ID: PAT_MRT4530_78998C.1.pep
MAPSLCRRRPFGIRRAGAQPPLAPPLRPTAEATVICNRGRQGRHHQGRRGHRRRCQGRRAPSIAASHLVRRRRLVTVKPAAASRSGSLPASPHHRAPCVSRRQQ

SEQ ID NO: 181755 - protein, 150 aa, Oryza sativa
  Clone ID: PAT_MRT4530_78999C.1.pep
MRIGWLIVKFLLKFPSNHNRRLQLGSPPFATPSSFTEKKGLDCLIIALEFSAVFLGLIQLWLRDAYSRTAASNTNDQATPVISTDASVIVGAEEWKAGAMASPTAGIRLTDWSEATGEVLQRQEKALSKRRLPENKEKLSLHIYLRGLRL

SEQ ID NO: 181756 - protein, 314 aa, Oryza sativa
  Clone ID: PAT_MRT4530_7899C.1.pep
MMDRGGVWMEGKRCRGRPCRCDAGGGGGVADRCTGEEGRAAEQLRRGGWRGSRRCAAASGRNRGVDEVEGYVTVPREGTAAPADAWAWRKGQPGEMPPRRKEKPARATVFRRSSGEEEVMPGMRAASWSRGRWWRRRPALRQGDRGGWRRPARRKWKGDGGNVAPGVTSRDGGQAGVEEVAATLEEATARPAARRQRRGNDSSTDLMVVLVHHQAYWSNLPNEDAMVLQDGSTNTKHAKTDLIGCIGDGCSHADAFLPSCVVLMDTNAARDCDLRLLRSVSESVEEINLGEFFPFNLRLRQDPDPDMHKRDSWL

SEQ ID NO: 181757 - protein, 421 aa, Oryza sativa
  Clone ID: PAT_MRT4530_789C.1.pep
MAFLGNGYCSSGSEGEDEDEGMEGYRKGGYHAARPGDRFAGGRFVAQRKLGWGNFSTVWLAYDTLLNRFVALKIQKSARDYAQAALHEIELLSAIAKGDPTNSKNVVQLLDHFKHAGPNGHHVCLVTEFLGDSLLRLIRYNRNKGIGLSGVKEICRSVLVGLDYLHRELGIIHTDLKPENVLLVSTINPSKDPVRSGFTPILERTVSNQYSGSVISFSEKMLKMRARRAVAKISLRRESLGGVAAEMEKERSLDGISLKCKIVDFGNACWGSQQLAGEIQTRQYRAPEVIIGAGYSYSADMWSFACMAFELATGEVLFAPKTCQGCSEDEDHLALMMETLGKMPKKIASSGTRSKDYFDRHGDLKRIRRLKFWPLERLLVQRYNFTEPDAQGLADFLRPILDFTPENRPTAAACLKNPWLN

SEQ ID NO: 181758 - protein, 322 aa, Oryza sativa
  Clone ID: PAT_MRT4530_78C.1.pep
MSQTQSNSNQTHLPTPNPSRARAMCGGAILADLIPSPRSGGHTKKNKRRRISDDEDFEAAFEEFDAGDDDSDSDSESEEVDEYDVVVDDDDSEDGVVVLPPPPPPPPVIPHERHGARRFRGVRKRPWGKWAAEIRDPVRGVRVWLGTFPTAESAARAYDAAARRLRGAKAKPNFPSAPPPSAAAHRRKKRRAHAATRSPSSPPATSEVTAASASASSDVPAPAFASFVGEPGHGGAKSMPTTSHTSQPAPPATVASENVDDPEVFDPYDVHGGLASYFAGGAYESLESLFAHGGDSAAVDQAASDHWPAALWSFADDGSFCF

SEQ ID NO: 181759 - protein, 151 aa, Oryza sativa
  Clone ID: PAT_MRT4530_79000C.1.pep
MAIIVAATAASELEEFRSCAHERWQRLHPKGKGEKNLSCSYDLAIGGWIRPKGGSGCSDPKAGPALAAEAENGSMMLWSCAPPKLVTIHARGEVNSCTTTDASITGPHGGWPNLATMNSGKSLIPQWSAREWRWRWQPALRGKKMQPLVRG

SEQ ID NO: 181760 - protein, 124 aa, Oryza sativa
  Clone ID: PAT_MRT4530_79001C.1.pep
MGYSPAREEKQAPAAGLIGETADGVAHKLANPAPATARCGDGSSGGGVRPELAANGGWRGDRRGSNGELGRAWLKKEKREEGEERKSRDSNLNPGHLAGPGVSGSGAWARESRGARGSGRRGPG

SEQ ID NO: 181761 - protein, 109 aa, Oryza sativa
  Clone ID: PAT_MRT4530_79002C.1.pep
QNAYLPPLFPMFEPPHPQEQEHPREEKVKVRIDKGQQLLLRQVEEEKEESQSSPVSTPFFPPPHEQAPTATPPPSPQHEHLSPSPMGPSDPVDSPSPPPFVSPYGVAPL

SEQ ID NO: 181762 - protein, 106 aa, Oryza sativa
  unsure (1)..(106): unsure at all Xaa locations
  Clone ID: PAT_MRT4530_79003C.1.pep
WSSSRQDPIAKKVELRGGGNARWTGQEGXLEAELLDVGSTDAPAWPSGGGGAHEXGSSGACSGRGRRWRRARGEGATSATDAGCWGGAGDACAAREXWRWRSIWRC

SEQ ID NO: 181763 - protein, 125 aa, Oryza sativa
  Clone ID: PAT_MRT4530_79004C.1.pep
MSTSSATSTATGTSIAPASTNAIATIFINPYTTISVKTHVPISLELRNPNFNKWKTLFRSMCGKFGLLDHLDSAPPADPDTSWEQADFCIRSWLFGSVADDTLDLAMELDQTARALWLAIADLFQ

SEQ ID NO: 181764 - protein, 51 aa, Oryza sativa
  Clone ID: PAT_MRT4530_79005C.1.pep
MGGSYRRTVFHPHIMHPVLKQHHGNMFAANGIGILYAEKAQWDIAKELFTQ

SEQ ID NO: 181765 - protein, 140 aa, Oryza sativa
  unsure (1)..(140): unsure at all Xaa locations
  Clone ID: PAT_MRT4530_79006C.1.pep
HSKAPPPWGACRCCRGGARCQLREPTASPPVGTSSQGPQEPTVSPPARSSGGEAPLAVAXMPPLPPLSPPLPPXAAPSPPAATSRRPPPPILRCRSSAVATTPVRQCVPPVPSPSRPLPSSPPLFVSLWSPRNDTQAARG

SEQ ID NO: 181766 - protein, 154 aa, Oryza sativa
  Clone ID: PAT_MRT4530_79007C.1.pep
LAAKYTITLDAIPLFEKPVLAVLRHRQQHLAATVELPLHLMRRGGWLEMVCGVGVGVACSYVSGIVVSDNGERRRQSETEKCTPVYGSSSSATGRGGAKTNDSSHTWHSRWRSKCAAARLARTLSYVSRTSFPGPHVSLPGHGPNQTQTRIRIP

SEQ ID NO: 181767 - protein, 97 aa, Oryza sativa
  unsure (1)..(97): unsure at all Xaa locations
  Clone ID: PAT_MRT4530_79008C.1.pep
RQRGKPAGGSQGQAEQGEPPPERLKAPRLRSPAQPHAKTTTQPGQNGSXPPTRGQTEKHPNQAKTRDPTPXQGRTAGTRSPFVLSPPRADERGRTRG

SEQ ID NO: 181768 - protein, 193 aa, Oryza sativa
  Clone ID: PAT_MRT4530_79009C.1.pep
PRTPPAARARARGSRGASPTSTTSRPPSGSSPRPRRGNTRATAVPPPATAPAAAPPRGLKREFSPPAETALPFFTNGFVDLTTAAAPPPAMMMTSSFTDSVATSESGGSPAKKARSDDVDSSEGSVGGGSDTLGFTDELEFDPFMLFQLPYSDGYESIDSLFAAGDANSANTDMNAGVNLWSFDDFPIDGALF

SEQ ID NO: 181769 - protein, 205 aa, Oryza sativa
  Clone ID: PAT_MRT4530_7900C.1.pep
MTTYRVCCFLRRFRAASNEPSEELGDVFQAYADGGGGVMGEEALRRFLREVQGEAAGGGDNKLEATAREVMAFAAEQRLLKKGGAASAGGGLTVEGFHRWLVQRRQRCTGSSETGEIGRVYRGVGAYNSIVGSEEEVYQDMGLPLSHYFIYTGHNSYLTGNQLSSGCSEVPIVKALHDGVRVIELDLWPNAAKDAVEVLHGSAYD

SEQ ID NO: 181770 - protein, 159 aa, Oryza sativa
  Clone ID: PAT_MRT4530_79010C.1.pep
ESPLAAPRFAALAVPLFHRLRTRPQKLPCWRRAARPNDEDYYLIDAPESIGDGFSFSGGKYTDGPSKSDEWFAQGRMVKAHPVYGNKGKAKDPIFGLTMGAESQSSNDHGVRWFCVEAGSSSNPPVLFIHGFPSQAYSYRNVLPVVSDNYHAIAFDWLG

SEQ ID NO: 181771 - protein, 238 aa, Oryza sativa
  Clone ID: PAT_MRT4530_79011C.1.pep
MLCFGRGDSIHACSERAGRATRPSFRVGMASSPASSYDCSFKILLIGDSAVGKSSLLVSFVSASHIDDEIAPTIGVDFKIKFLTVNGKKLKLTIWDTAGQERFRGITSSYYRGAHGIILVYDVTKRESFTNLADVWAKEIELHSTNKECIKMLVGNKVDKNEERMVTREEGLAFAQESGCLFLESSAKTRENVEKCFEELALKILEVPSLLEEGSSVVKRNSLKQKHENKAKNGGCCQ

SEQ ID NO: 181772 - protein, 286 aa, Oryza sativa
  Clone ID: PAT_MRT4530_79012C.1.pep
MIPLDVFTHLKKKKHDEHVKKRSKRSGRPKPRTMCGGAILAEFIPAPSRAAAATKRVTASHLWPAGSKNAARGKSKSKRQQRSFADVDDFEAAFEQFDDDSDFDDAEEEDEGHFVFASKSRVVAARPRRGNTRATAVPPPATAPAAAPPRGLKREFSPPAETALPFFTNGFVDLTTAAAPPPAMMMTSSFTDSVATSESGGSPAKKARSDDVDSSEGSVGGGSDTLGFTDELEFDPFMLFQLPYSDGYESIDSLFAAGDANSANTDMNAGVNLWSFDDFPIDGALF

SEQ ID NO: 181773 - protein, 141 aa, Oryza sativa
  Clone ID: PAT_MRT4530_79013C.1.pep
MALHQGPLTWPSCISYGADTRGHKFKVSLHRLSVGSSSTAYQHDVSRERSERSPPATVAEGAASPPDPPPFPPPPRYRRRRRIDADWMDSPRPRGWMAGPPPPPLSLSLSIKEEEETCGGVRLFGGAKRCVCRLHRATAAR

SEQ ID NO: 181774 - protein, 113 aa, Oryza sativa
  unsure (1)..(113): unsure at all Xaa locations
  Clone ID: PAT_MRT4530_79014C.1.pep
MAAAAADAFGARLLLASGDYIFPHQDQHLLRKWYRPPRQVISGRAGALSVGRGLEADDFLHPMDQADTXLLKAEQRVNYWWKSFLVPVDRQTFARNTELEVIHSLRTTLETLG

SEQ ID NO: 181775 - protein, 65 aa, Oryza sativa
  unsure (1)..(65): unsure at all Xaa locations
  Clone ID: PAT_MRT4530_79015C.1.pep
LCWAPSFFFFFFYWYIGVLSNNGLSACRNANNIIGGYDHQLTRTEEETKGXKXKPEHPAPACISR

SEQ ID NO: 181776 - protein, 103 aa, Oryza sativa
  unsure (1)..(103): unsure at all Xaa locations
  Clone ID: PAT_MRT4530_79016C.1.pep
MGFIFILRVQTYNRYNCIIRALSLIDNDGYPDLDPNRAQVIPYRLYRPSTSSTLINPYSIFXPIRYLANAXSDSKSNSIQHQIRFDLLPSSPNLMQNSVVNTS

SEQ ID NO: 181777 - protein, 1074 aa, Oryza sativa
  Clone ID: PAT_MRT4530_79017C.1.pep
MGVPAFYRWLAEKYPMVVVDVVEEEAVEIEGVKVPVDTSKPNPNGLEFDNLYLDMNGIIHPCFHPEDRPSPTTFAEVFQCMFDYIDRLFVMVRPRKLMYMAIDGVAPRAKMNQQRSRRFRAAKDAADAAAEEERLREEFEREGRKLPPKQQSQTCDSNVITPGTEFMAVLSIALQYYIHLRLNYDPGWKQVKVILSDANVPGEGEHKIMSYIRGQRNLPGFNPNTRHCLYGLDADLIMLALATHEVHFSILREVVYTPGQQDKCFLCGQVGHLAANCEGKVKRKAGEFDEKGEAIVPKKPYQFLNIWTLREYLEYEFRMQNPPFPIDFERIVDDFIFMCFFVGNDFLPHMPTLEIREGAINLLMAVYKKEFPSMGGYLTDACTPDLNKVEHFIQAVGSYEDKIFQKRARLHQRQAERIKREKAQAKRGDDLDPHVRDDLIVPVARFQGSRLASGPVPSPYEQNGSDKNNGGKNSRARKAARVSSSGSSIAAAIVEAENDLEAQERENKEDLKTMLKDALREKSDVFNSENPEEDKIKLGEPGWRERYYEEKFGARTPGQIEEIRRDVVLKYTEGLCWVMHYYYEGVCSWQWFYPYHYAPFASDLSGLGQLNITFELGSPFKPFDQLMGVFPAASSHALPVQYRQLMTDANSPIIDFYPTDFEVDMNGKRYSWQGIAKLPFIDEARLLAEIKKVEHTLTPEEARRNSIMFNMLFVNGSHPLSPYIYSLNSKFGHLPDRERNEIKEKIDPSSSCLVLCSGGMNGYISLCSGDPCPPVFRSPVDGLEDIMDNQVICTIYKLPDSHKHIARPPVGVIIPKKTVEATDLKPPPVLWHEDSGRRPHDNNNRRPYENSNRQNPAGAISGRQLGEAAHRLVVNSLNARSGGQYNTPSMPYQTIMNGMPYPNGIPPRMEQPAPGWHVPGDLPNGQVPPAYASSSGHYQNDRSGPSQYGRDNHGRYPYARDNHHDSRGRVPPYHQSGGNSYQSHSAPSAGPGRYAQPPPYAGGYGRSYQPAPYGGGQQWQQQQQQPYGSYAGSGPYGGGAPPARPNSRPQQSQNRYNTLDRNSNRRPPPGHGRH

SEQ ID NO: 181778 - protein, 56 aa, Oryza sativa
  Clone ID: PAT_MRT4530_79018C.1.pep
MKKWRLWYFALDVFVSFYVIQLINVIDELMMTTDVHFVFHSSHFGLEVAIHLCLII

SEQ ID NO: 181779 - protein, 85 aa, Oryza sativa
  Clone ID: PAT_MRT4530_79019C.1.pep
KGLLPFRRPGRSPESPLLAAVLMVGSLPAGRLALQGCSGTRGDALLGPLLIQGPAGAEVRSAAAIIVFTRPQWQRACSAAVQSLA

SEQ ID NO: 181780 - protein, 1021 aa, Oryza sativa
  Clone ID: PAT_MRT4530_7901C.1.pep
MASSSSAATISNPMFGLQISEKLTKHNHSLWSAQILTTLRGAQLDGHLSGTTEAPAAEIEKEEGDKKIKIMVSNPAYKAWFAQDLQVLGFLFSSLTREILQQVAGATTAAQAWSMIGDMFSTKSKAGSINVLLALTMTQKSPMTISEYIAKMRSLADEMAAAGEPLDDEELVAYIINGLDSDFDAVVEGIMATERIAPPSVSHVYSQVLSYENRMKIRQAYVTTSANAANCGGRGGRNSGGNRGRGGFGRGGRGGGRGNPAGNNQGRGRGNDSRPLCQVCHKRGHVASDCWHRYDDSYVPDEKLGDNYGFLEIHGKYFLIKDKATRRIILEDVWEPASTSLGAKKYYVSFIDDYSKFVWIYFLKHKSEVFQKFHEFQKLVERQFDRKILAMQTDWGGPPEIAATDALGTLDGVPGAHEELSESTQDSAPAAVSGLPTDTPGSLSQGEQERSPARTAVRSQPSHQSGGDTSAGSGVLSPAHGDNIVTSDVTAPGSSTSAAPAQQQIPAEVMRPKTRLQSGIRKEKVYTDGTVRYSCFTSSGEPQSLCEALGDKNWKHAMDIPPKKGLNIIDCKWVYKIKRKADGSLDRYKARLVAKGFKQRYGIDYEDTFSLVVKAATIRTILSIAISRGWSLRQLDVQNAFLHGVLEEDVYMKQLLGYEQKDGYVCKLDKALYGLKQAPRAWYSRLSTKLHELGFKSSKSDTSLFFYSKGDITMFMLVYVDDIIVASSSHDATNVLLKNLNREFALKDLGELHYFLGIEVKKVNDGIVLTQEKYAKDVLRRVNMSECKAVNTPLSISEILSAQGGTPLGPEDSTKYRSLVGALQYLTLTRPDLSFSVNKVCQYLHAPTTEYWVAAKRILRYLKHTVKLGLKINWAGCLDDRRSTGGFAVFIGPNLVSWSARKQATVSRSSTEAEYKALANATAKIMWIQTLLLELGVQVPRAAKVRCDNIGAKYLSSNPVFHTRTKHIEVDYHFVRERVARKLLQVEYISTTDQVADGFTKTLAVRQLEMFRNNLNLTCID

SEQ ID NO: 181781 - protein, 59 aa, Oryza sativa
  Clone ID: PAT_MRT4530_79020C.1.pep
EGMLTPRLGIGVHFVLGLFRKISYEPSILTDWTQLLVSTDSFEETFQGGDTNSFRNSCA

SEQ ID NO: 181782 - protein, 772 aa, Oryza sativa
  unsure (1)..(772): unsure at all Xaa locations
  Clone ID: PAT_MRT4530_79021C.1.pep
MQMQMQSRSRIRGRDPPPASSGGRYRRRSPSPRRHHRAPPSNPNPHRDRRXPDRPRRHHHEDSLPLHVHLPPRPDALLTAAADRRSRADVLIEAGRLAARYLVAQGVIPEHRLRAREDPLPAARNHDVDDPRSRRNADFPRDRGDDDRLSRRSGWDRRSNSFDSRRKYNDAASADRSARRSHDYDDQRRPTMSRSYSQNDRRVSSDSRLDRRRRSRSRSRSRSRSRSRSRTRTRSYNYGSRRDSDWRASGADLDHSKVPEPGIVRDGDADVGYGDADDVPRDLKAPHRSVVVMETKESASQAAANEDTAEVESEIIEVDQAQDIYGDDDDDGDDAVAAFNYPSVAEINVTQHKLSNSNEDVVHPSQSDEEPLHRQSQFSDAEEGMEGPISPRDSCLVEPVAEEVRDGMEAPQSEVETDNADLTKDEQDLPAWYGIFDLNVVESQENCEMVEISNDSPLDNGRDSVPDQVGQMSQGANCVTSGTQGQDEHAFDNHQSEDEQVPLNQRNGTDDFNNEQGVGNQTGDEHGQDNHQLEDDQMHINHVMDVHTLDNGLMNGEEMLLKRCADEHTDHGHLVETEEMLLNQGQSTSVQVLENYNMNGEQVQLNHDADEHSGDDRPIKNEQMLLNHVMGEDQMLLDQAADGQATLHGQSIGQMIPVINLEDDYEEQSDTIEFSESKDGNGAAPVGLWYPVPTPGHTEISRSPSPSPASEHERLEGDEDTMQRGWRLLHACMVVVTATRVCCFWLWRRLLGQEARRLSMAAVLRSLAASRC

SEQ ID NO: 181783 - protein, 867 aa, Oryza sativa
  unsure (1)..(867): unsure at all Xaa locations
  Clone ID: PAT_MRT4530_79022C.1.pep
MQMQMQSRSRIRGRDPPPASSGGRYRRRSPSPRRHHRAPPSNPNPHRDRRTPDRPRRHHHEDSLPLHVHLPPPPDALLTAAADRRSRADVLLEAGRLAARYLVAQGVIPEHRLRAREDPLPAARNHDVDDPRSRRNADFPRDRGDDDRLSRRSGWDRRSNSFDSRRKYNDAASADRSARRSHDYXDQRRPTMSRSYSHNDRRVSSDSRLDRRRRSRSRSRSRSRSRSRSRTRTRSYNYGSRRDSDWRASGADLDHSKVPEPGIVRDGDADVGYGDADDVPRDLKAPPRSVVVMETKESASQAAANEDTAEVESEIIEVDQAQDIYGDDDDDGDDAVAAFNYPSVAEINVTQHKLSNSNEDVVHPSQSDEEPLHRQSQFSDAEEGMEGPISPRDSCLVEPVAEEVRDGMEAPQSEVETDNADLTKDEQDLPAWYGIFDLNVVESQENCEMVEISNDSPLDNGRDSVPDQVGQMSQGANCVTSGTQGQDEHAFDNHQSEDEQVPLNQRNGTDDFNNEQGVGNQTGDEHGQDNHQLEDDQMHINHVMDVHTLDNGLMNGEEMLLKRCADEHTDHGHLVETEEMLLNQGQSTSVQVLENYNMNGEQVQLNHDADEHSGDDRPIKNEQMLLNHVMGVHDLDNHDQNSEQMLLNNGAGKQAADSAQLQEDQMLLDQAADGQATLHGQSIGQMIPVINLEDDYEEQSDTIEFSESKLTSQLLLLLHQLPSTMEIGGLEGALLLHRYYNDTFHISGNPSDDELMACCMLLFDEILLAGKTSSMAEHERLEGDEDTMQRRWRLLHACMVVVTATRVCCFWLWRRLLERKRTVKLCVTVQLIRQRWFMAGCTESSNSHLIPRRRPNKRDGAVDCNSV

SEQ ID NO: 181784 - protein, 53 aa, Oryza sativa
  Clone ID: PAT_MRT4530_79023C.1.pep
NSGWRCKKPTSLFIFLFSWMIRQLCPVVLYTILFLFGCFSHVPVQAPQCHIIS

SEQ ID NO: 181785 - protein, 810 aa, Oryza sativa
  unsure (1)..(810): unsure at all Xaa locations
  Clone ID: PAT_MRT4530_79024C.1.pep
MHRDAGIQINLAGPEQAADAMRAVMEMLAPHMSQREGAPGSARGVKMVKVCSTWGCIFPVFLDKVCFPLLLPTDQARPEEQDECNSSILDFGNSLVGVRAHLPRPPDALLTAAADRRSRADVLLETVRLAARYLVAQGVIPEHRLRAREDPLPAARNHDVDDPRSRRNADFPRDRGDDDRLSRRSGWDRRSNSFDSRRKYNDAASADRSARRSHDYDDQRRPTMSRSYSQNDRRVSSDSRLDRRRRSRSRSRSRSRSRSRSRTRTRSYNYGSRRDSDWRASGADLDHSKVPEPGIVRDGDADVGYGDADDVPRDLKAPPRSVVVMETKESASQAAANEDTAEVESEIIEVDQAQDIYGDDDDDGDDAVAAFNYPSVAEINVTQHKLSNSNEDVVHPSQSDEEPLHRQSQFSDAEEGMEGPISPRDSCLVEPVAEEVRDGMEAPQSEVETDNADLTKDEQDLPAWYGIFDLNVVESQENCEMVEISNDSPLDNGRDSVPDQVGQMSQGANCVTSGTQGQDEHAFDNHQSEDEQVPLNQRNGTDDFNNEQGVGNQTGDEHGQDNHQLEDDQMHINHVMDVHTLDNGLMNGEEMLLKRCADEHTDHGHLVETEEMLLNQGQSTSVQVLENYNMNGEQVQLNHDADEHSGDDRPIKNEQMLLNHVMGVHDLDNHDQNSEQMLLNNGAGKQAADSAQLQEDQMLLDQAADGQATLHGQSIGQMIPVINLEDDYEEQSDTIEFSESKIFLTILRLTSQLLLLLHQLPSTMEIGGLEGALLLHXGNPSDDELMACCMLLFDEILLEVIILYCGTAIL

SEQ ID NO: 181786 - protein, 130 aa, Oryza sativa
  Clone ID: PAT_MRT4530_79025C.1.pep
RGEGDRRRYRPPEEAGGGSRPRMRDLDCICICICNFLPYHPTLGGGGDRSPSLNGSSSNVLPFRGVKSGVCLLLQLLRYTPYVSSQLPRSSRGRSARSFGGGGGGGRRWLREARRGEARVCFCLSLSLVP

SEQ ID NO: 181787 - protein, 346 aa, Oryza sativa
  Clone ID: PAT_MRT4530_79026C.1.pep
MDALVVRRLGDPTLAPGGEASPFAPVTGDHPAPALASPTSVRVRVAATSLNFATYLQVQGKYQERPALPFVPGSDYAGFVDAVGPAVRRFRPGDRVCGLAAVGSFADLIVADEKQLFSVPDGCDLVAAGALPVAFGTSHLALVHRAELKAGQVLLVLGAAGGVGASAVQIGKVCGAVVIAVARGTEKLQYLKTIGADHVIDSSKESIMESAKSFLKAKGLKGVDVLYDPVGGKLTQDSLKLLNWGAHILIIGFASGDVPIIRANIALVKNWTIHGLYWGSYFTHRPPVLIDSLNELFSWLSKGLIKIQISHTYRLPEAHLAFAALRDRKAVGKVMIVMGSPAKSRL

SEQ ID NO: 181788 - protein, 997 aa, Oryza sativa
  Clone ID: PAT_MRT4530_79027C.1.pep
MPPKRKRGGGRPRKAPEDAAAKENGEKTNKEEETQASPEENGAGQTQASRTARKRRKGPVADPSSTELPPRKLRDRRNVPAVDYKENKHTKKMDGTSTMCHQCQRKDSGRVVRCRNGAEKNRRHRYCVKCIKRWYPHLTEDDFENCCPVCHNNCNCKTCLRTNVINKGDKEFADGKNKIKYSLRIARFLLPWLKQLHQEQMLEKSVEATIKGIDVTDLEVPQAQFNNDERIYCDNCRTSIVDFHRSCKSGHYDLCLSCCQELRQGLTTGTVVTCDTAVDVPEIEGKEGLQEGSSHSSAVGQGASDQQNDRLIGSAAPSEDCTPSLIWRAKSNGSIPCPPNAGGCGDCLLELRCLFKENFISDLLDKVNSVVNKETEQELGGSRCSCFTESGEVNNETSRKSACREDSNDNYIYCPTAREVQSGALDHFQQHWLNGQPVIVRDVLELTSGLSWEPMVMWRALREKRDKKEHERLSVIALDCLTWFEFMYHQDVLVVPVSYLGFNSTIETTLYFKLVDINIHMFFEGYSRGAVGSEDLPVLLKLKDWPQHSSFEERLPRHGAEFMSALPFREYTDPKSGPLNLAVKLPKHVKKPDLGPKTYIAYGVAQELGIGDSVTKIHCDMSDAVNILMHTDEVELKAERITAIEKKKESLRKDGKNLHVLRPDHDDDTSIALSESTEVPRSRGLENGSSIKQPAPNVAVMDQGGVHTDMVADEAEGNLSLSNGQSPNQSDAHNMDITFSKGETDHSICTINGGEEMGNGFGREDKCKSSHGVGSSESSDCQRRSRRRDACSSSATGEINETSMETNKFTISIEPKDDHPFVEGNQTEGGALWDIFRREDVSKLHDYLMKHAEEFRHYNYETVKQVSHPIHDQCFYLTNEHKRKLKEEHGIEPWTFEQKLGEAVFIPAGCPHQVRNLKSCIKVALDFVSPENVQECIRLTEEFRLLPKGHRVNEDKLEVKKIALYALDQAIDDITGKSCNERTKDEGEEEASAPSVS

SEQ ID NO: 181789 - protein, 480 aa, Oryza sativa
  Clone ID: PAT_MRT4530_79028C.1.pep
MLLSDTQQQQDARKPGAVRRPPAAPPDTRVTHVLCGHGQQAAALGGGGDGSAVSVSLGEKEEIVEAAVDQVKVLEDTVAVLEPGWRRSGVPGGAAVQVGGTAAAAEVSVSYREAGREKEDRREMLRIGDDDGRSDALERELKEKLRLRGDASPAKCTRQEQRWRSDHGIVDARERFVQAYGRLRDDLVGDDSCELTDEARRWLAQMIDYNVPGGEEASSKALQTSLGQMLDLISTHTGADDLAKYSIEGYRRIVKYKTAYYSFYLPVANALLLSGAKLEDFSGLKDILIEMGIYFQIQDDYLDCFADPNTIGKALGHADNNQIEVLHRNYGKKDSSSVSEVKRTYAALDLKDIFSEFERRCYNHLVTSIEAQKDHAAREILISFLKKIHQRKKYLQTESDQQIIPLPAFSFTGIGDGQPQPKPKSAMDSLFEHIRRSALASHSTRKYSTVASQSQQCVFVEWRFYQVMRRTIAFDGVPGM

SEQ ID NO: 181790 - protein, 496 aa, Oryza sativa
  unsure (1)..(496): unsure at all Xaa locations
  Clone ID: PAT_MRT4530_79029C.1.pep
LLGLILKLLRLPGNVWNPFSVSTLHLLLKGYIQDFYLNSLALWKLLNKITLHPARXEGQNEDTFDLDHSGDELFAKFYTSLDEINFFKTSSAGAEDPGQLSKATQFFDDALLGMRKSGRKRASLGDLAEFFKSKGNESMRSKQHLKAVELYTCAIALSRNNAIYYCNRAAAYTLLNMFNEAVEDCLKSIEIDPNYSKAYSRLGSAYFALGKYHDALYKGYLKASELDPSNENVWQNIEVTKKKLAEQRGPPEEQNTYAPQSQASHGQFPGQSSSGVPFTFFPPGNSPTPEFFANIINRVSDISQQSSEHSININLNDIFNHANVNGNSQGTPQTETSSNHTPPPSFPTNTAVPPPFSFTGSTEGNRPQQTSSGHEGEHGQPGMHRDAGIQINLAGPEQAADAMRAVMEMLAPHMSQREGAPGSARGVKMVKVCSTWGCIFPVFLDKVCFPLLLPTDQARPEEQDECNSSILDFGNSLVGVRVHKLRPAEERVYSTE

SEQ ID NO: 181791 - protein, 284 aa, Oryza sativa
  unsure (1)..(284): unsure at all Xaa locations
  Clone ID: PAT_MRT4530_7902C.1.pep
MTSPPAAAARRLGRAXLAGERRHFGTNGGHQRVERDAANSPVTKGAAEDQRTATATRLKRRRRSGRRRRRCSGGLRRRRRGGRGRRRLGDHDGSLPERRRXPERRRRTAGATAATAARCYSALRCYGRREAKARAAAGREELGGPFKGARRRRQRLTAAGDAKERSGSERXKADPIRPRIKHFPSRFSRCFQKGKGRGDPEDHFPSINSAGNGKDRRNWKXGGGATQLGFGRATAARERRXLTGGPHLSASEGARARRRTGPAWAEEREKGFGPTFGPKPKEDF

SEQ ID NO: 181792 - protein, 120 aa, Oryza sativa
  Clone ID: PAT_MRT4530_79030C.1.pep
REIKRTRGEGSSSGLLLLLFPASAAAAAGSPKSSLSAPSDSSTHIPARRTGRSWHHGARSIDRATGRPAASGILQLGETGKRENRSKASTSYYSVGERERGIRGGGGDSWGISAEKERNG

SEQ ID NO: 181793 - protein, 159 aa, Oryza sativa
  Clone ID: PAT_MRT4530_79031C.1.pep
RIVIYKTAYYSFDLPVANALLLSGAKLEDFSGLKDILIEMGIYFQIQDDYLDCFADPNTIGKIGTDIEDHKCSWLIVQALGHADNNQIEVLHRNYGKKDSSSVSEVKRTYAALDLKDIFSEFERRCYNHLVTSIEAQKDHAAREILKSFLKKIHQRKKW

SEQ ID NO: 181794 - protein, 432 aa, Oryza sativa
  Clone ID: PAT_MRT4530_79032C.1.pep
MLLSDTQQQQDARKPGAVRRPPAAPPDTRVTHVLCGHGQQAAALGGGGDGSAVSVSLGEKIAAMKTNIEHMPNMTVIGNVSSSSSPSSSGFLANGGDGREEIVEAAVDQVKVLEDTVAVLEPGWRRSGVPGGAAVQVGGTAAAAEVSVSYREAGREKEDRREMLRIGDDDGRSDALERELKEKLRLRGDASPAKCTRQEQRWRSDHGIVDARERFVQAYGRLRDDLVGDDSCELTDEARRWLAQMIDYNVPGGEEASSKALQTSLGQMLDLISTHTGADDLAKYSIEGYRRIVKYKTAYYSFYLPVANALLLSGAKLEDFSGLKDILIEMGIYFQIQDDYLDCFADPNTIGKALGHADNNQIEVLHRNYGKKDSSSVSEVKRTYAALDLKDIFSEFERRCYNHLVTSIEAQKDHAAREILISFLKKIHQRKK

SEQ ID NO: 181795 - protein, 110 aa, Oryza sativa
  Clone ID: PAT_MRT4530_79033C.1.pep
RHKFKNQNQAFGVRPRGLAGSAEFKPQQCLGKANSYQGKHLAAHTQNVQGQHPQLSRRVVSQPGYVLEEGDIGAAPAGEPPGVPQTWTIPNGGGGVMLLAGEIWLLARLL

SEQ ID NO: 181796 - protein, 126 aa, Oryza sativa
  unsure (1)..(126): unsure at all Xaa locations
  Clone ID: PAT_MRT4530_79034C.1.pep
FFELMDSGIHPGIIANDDLRRKGYQMVLEQTMRAMKTIQGSXLRSTTSERPXNILTNXNGLVEVCDLGLERVXFKEAGLTIYRTDYIETRRDRGXLVMGVRXERETPVNDIWRIGCIDVEVITGRP

SEQ ID NO: 181797 - protein, 328 aa, Oryza sativa
  Clone ID: PAT_MRT4530_79035C.1.pep
ARLVLSRRPGEATRRRRAPPPSPSPMALLLRVAKKSRATAAMALVGGRGVASSAVDSAAGRALATLDHVPKVIKFAALPPAAVDRQDAGAKPGVEKARRDVRRWRATRSWLRQASSSSAPVAVGCPTRRRPSPAAAAEKCSLPASPPTTAGVARRTYGTRGGWPCQAPPEALKEMEDAFRAQMKITEDAIKAHTAECLSSKKLLKAPRPLYQVFLVCVFVLAAVSILVIGFFDYALTVGEMTVVNFLNGKEFKAVKTDFMDEAEATLLDLAQQERVREVRNRYVQEAWTESMGCLIRALTLKSYRDSWFRTKEEDSNNSTTVATPSAK

SEQ ID NO: 181798 - protein, 462 aa, Oryza sativa
  Clone ID: PAT_MRT4530_79036C.1.pep
MGAPNEVTSYSSLSKIDSNNQGGHLSSLVPANIYPAQDYLYEPSLEPDFPSEYDSREDPFVPTRASSNINLKTVLTGLAAIVSGTNKNQDNTLQQQSFSTDVSFLGFDKDGDVNVHPSVCVPSAPPLLETNALQYSAYREVLQADPPEWLPDSSTSVCLQCSLPFTALTRGRHHCRFCGGIFCKDCSKGRCLMPMKFRQRDPQRVCDACYDRLDPLQGILINYNSNAMQPAKHDVMDWTSTRSWLNLPVGLSMEYEIYKATNTLNRYCQVARLNPEKSIPSSILKGAKGLAVITVAKAGAVLTYKVGTGLVVARRSDGSWSAPSAIASVGLGWGVQFGGELTDFIIVLHDRKAVKAFSSRMHLSLGAGLSAAAGPIGRAFEADVRASEKGSGLCYTYSCSKGAFVGVSLEGNVVTTRSETNLRFYGDAYLTTTDILFGKVEKPRAAQPLYSALDDLFSKMVY

SEQ ID NO: 181799 - protein, 70 aa, Oryza sativa
  Clone ID: PAT_MRT4530_79037C.1.pep
LPISLSAPRSSWLSALFNFLGLCPYSRYRANTCTCPRSCGMFTIVSLPLYRKVHVNVFACHILISKKRYG

SEQ ID NO: 181800 - protein, 415 aa, Oryza sativa
  Clone ID: PAT_MRT4530_79038C.1.pep
LFSPASPPPPSRSLAARSHHLRPAAPHLEMPSSSSAAAAACGPPEFTPGWKTVSTCAPDVVGEGVHVFDIFGYSDHKGMGAHEPIRSGAFSVAGLDWVACLYADGYGVAGIDDVSAYLRLLGDAPTPRVWVSCEVKLVDQRTGVASTPQPFLRYALAFGDKCKALHCMMIPRGQIEVEPYLVDDRLTMEFHVVVRRDPRVSRTARFPRILVPPPDIKRQFANLLQSKEGADVTFDVAGEPFSVHKLVLAMRSPVFKAELCGLLREPGTQPITIVDMQPAVFRALLQFIYTDQFPVTRGFERRDNCEMIRHLLVAADRYAVDRLKLLCQGILCKNLNVHNVATTLALADQHQCDKLKDACIEFMSCSKKMKGVVASKGYEDLQRMAPSVLADAVAQMSKLNKMSRGSVPQDESKSC

SEQ ID NO: 181801 - protein, 78 aa, Oryza sativa
  unsure (1)..(78): unsure at all Xaa locations
  Clone ID: PAT_MRT4530_79039C.1.pep
GEFIXPGLLFLYIAGWIGWVGRSYLIAISGEKKPAMREIIIDVELAVKLLPRGFIWPAHAYRELITGNLVVDDADIGY

SEQ ID NO: 181802 - protein, 197 aa, Oryza sativa
  Clone ID: PAT_MRT4530_7903C.1.pep
MDHVGNSGLAALEGGGAGNPPEPAPHLGHPANEGSTSTKRGARAARGGDSWRGGVRGGGAGGAARAGAAVGGADESGRHGAGGVVRPCLFLLLAQEAALRHLCVAAGGGAPPPHSVVVCLDWIIGVENCINQLALFTVRLLLLASIIIVIQDAARLNLQPARRCHRSSPRPLAAATAPAPIIPPVTAAAEGDKKRER

SEQ ID NO: 181803 - protein, 236 aa, Oryza sativa
  Clone ID: PAT_MRT4530_79040C.1.pep
MAALAAASTAFAAKPRLARAPSSPAARFSVSCSASGNNGGAGEMAQSLAASAKTFSAALALSSVLLSSAATSPPPAAADIAGLTPCKESKAFAKREKQSIKKLQSSLKKYAPDSAPALAINATIEKTKRRFENYGKFGLLCGADGLPHLIVSGDQRHWGEFITPGLLFLYIAGWIGWVGRSYLIAISGEKKPAMREIIIDVELAVKLLPRGFIWPVAAYRELITGNLVVDDADIGY

SEQ ID NO: 181804 - protein, 39 aa, Oryza sativa
  Clone ID: PAT_MRT4530_79041C.1.pep
MAIRWLVAGGGDGGRRSLLVGKPQDTGNNSVDVGLVDGK

SEQ ID NO: 181805 - protein, 142 aa, Oryza sativa
  Clone ID: PAT_MRT4530_79042C.1.pep
SEREERGETMPAFSRARGAVLRVLDGLKRRPPASGAADTMSPVRKIQMLEEELRPSGGEISRILQRARAHLERQEEKFDPSSQTPELFRNGAGWQLNTFFLCLFSSIIANYKYNKAQAHSCSGIPRHMQIQAARYALSFGID

SEQ ID NO: 181806 - protein, 140 aa, Oryza sativa
  Clone ID: PAT_MRT4530_79043C.1.pep
MSSFLHMFVGDDSNDVGDEMDVLDGEEQCLTVVSTVIKLVIGAEGYSHLGRPDTQWHLRDELLDGDGRDTERKNSHPNTTGIVTFAEAGARCGELDGGQPWVAALGEGDVDASHSKHNGMCGHAVVRAAEEISGHAGGAW

SEQ ID NO: 181807 - protein, 52 aa, Oryza sativa
  unsure (1)..(52): unsure at all Xaa locations
  Clone ID: PAT_MRT4530_79044C.1.pep
NGHTGVRGGRGTDMPPGGSASSVKGPCFLARXVEPPAGFIDARFGRNWLLML

SEQ ID NO: 181808 - protein, 605 aa, Oryza sativa
  Clone ID: PAT_MRT4530_79045C.1.pep
MADVLLPELRSPPPPPPPPPPTNDDRARAVDLPSPTPECDDRSPRRELGRSPEDHGVPLPPPPPLGSSRPERLASDRPEEGASAAAQPCGGRSESPTARFGFEHERGRERSMNTSRRAPDCLDSGCDAPYNGQSNTRRKGLMTYKQFTQKLEDDVSPGEAESRYQEYKTSYITSQKQDYFDHHKNEDRLKDMYHPTNLLSVIERRNELCKAAAKNLILDLRSGTLDLGPGMTAGTASKSGNDSDGIPADDEDYHNKRRRHHRGPLEETELVSVAPKAHPVSSHYRRIQTDIHQTLALVKKLDEEKGIVGNILTTGDHTKSNGDKSYAGSTGPLVIVRGLSTVKGLDGFELLDTLLTYLWHVHGIDYYGMSESTNAKGLRHVRADTKNANMDKSSAADWEKKLDYFWQERLTNGKDPLVALTAKDKIDASADKVLESYVTKVKDDNYGWTYGCGAKGCIKVFHAPDFVLKHLNLKHPDLVSKLTSRVQEDIYFQNYMNDPNAPGGTPVMQQQSPEQQGPTPSELTPGAFGGQGSFVEMPTPPVLIPVPGAGPLGPFVPAPPEVVMQMMRPVMPMYPPRPPNPRRLRSYKDLDAPDDEVTLVDYRSL

SEQ ID NO: 181809 - protein, 55 aa, Oryza sativa
  Clone ID: PAT_MRT4530_79046C.1.pep
LSSFCGRLLEETEDELSEWIKTSSAESGNVSRALCEDISKHCQSTSATIEIDDEL

SEQ ID NO: 181810 - protein, 270 aa, Oryza sativa
  Clone ID: PAT_MRT4530_79047C.1.pep
MFRNQYDTDVTTWSPAGRLFQVEYAMEAVKQGSACVGLRSRTHAVLAAANKAASELSSHQRKVFRVADHAGVALAGLTADGRVLSRFLRSECINHAFVYDAPLPVSRLALRLADKAQVCTQRSWKRPYGVGLLVAGLDESGAHLYYNCPSGNYFEYQAFAIGSRSQAAKTFLERRFEGYNDYTPEQLIKDALSAIKETLQGEKLTSSNCTVAIVGRKDDGTVEPFEMIDVKRIQEIIDSMEAAEEAPAAEAESSSMQEEDKGTDAAPMDI

SEQ ID NO: 181811 - protein, 450 aa, Oryza sativa
  Clone ID: PAT_MRT4530_79048C.1.pep
MLAPTPFISSTDPTPAARTPAVTAVAPAPTKRVAMANALNGIANAAPPLPRRNHATPAATCAALAPAHHGHLSASSPPPPSSISAAARAVADDGGGAEEGGGIFPVVVSTWPFREAVRAAWEVVSASGGAGCSAVDAVVAGCSACEVLRCDGTVGPGGSPDENGETTLDALIMDGTTMEIGAVAAMRYVKDGIRAAKLVMDHTEHTLLVGEKATSFAISMGLVGPADLSSPESIGKWTIWRQNHCQPNFWKNVVPAGSCGPYNAIDVPSGESKASAKRVLERTQGDICQGLFEPNNLLEPMNSRLKIVNRHNHDTISMAVIDKMGRIAAGTSTNGATFKIPGRVGDGPIPGSSAYADDEVGACGATGDGDIMMRFLPCYQVVESMRRGMEPRDAAMDAILRIARKYPDFVGAVFAINKKGVHAGACHGWTFQYSVRNSSMQDVEVITVSP

SEQ ID NO: 181812 - protein, 93 aa, Oryza sativa
  Clone ID: PAT_MRT4530_79049C.1.pep
MGAGGNNELTTMLTSAILHRDETTPRIEEATLTRTETDRIVEVIMTMTVENGEIGTTMVEVNDEITMIDDGGNHALQPPVETANKDADPGAAL

SEQ ID NO: 181813 - protein, 69 aa, Oryza sativa
  Clone ID: PAT_MRT4530_7904C.1.pep
GYGFNNLFSLFIGLYTTVLSLSFVKDRLDYMKLSATAYWLVTNLDKVSSPLPGLKELVMENGTFVRTLT

SEQ ID NO: 181814 - protein, 79 aa, Oryza sativa
  Clone ID: PAT_MRT4530_79050C.1.pep
VMTGKDKRLPQIITCLCLTERQAKANSKHHLFCLRKAVTSYASHSFKQILMNLLHHALGCCTKSSRQNMQTKLNIDTNC

SEQ ID NO: 181815 - protein, 261 aa, Oryza sativa
  Clone ID: PAT_MRT4530_79051C.1.pep
SQFSRRLTSSTSSAPAPCASGGTPRQRTSAASTTSSPALVRPAYSTPPPPPLAPTPTPTTPTWPPSTASPTTGPTPSRSRGPTSTAGGSAPPTAGSPPPTTMRRSTSSTPSPASRSATCRRSPPSSRCGGCSTTAAPSSLACTWCTPCPTTGCGTRTRSRCTGWIPRRGRRRRSTTSAAATPCSWDATARSASPWRIVQPGSCRTTSTTRTTRSSTRSTRQSARGTSAFTAWEMGAFIGSSLLRRGWIGRCPLGLYPALAA

SEQ ID NO: 181816 - protein, 223 aa, Oryza sativa
  unsure (1)..(223): unsure at all Xaa locations
  Clone ID: PAT_MRT4530_79052C.1.pep
HEYLMXSSQNPLSIGSTXIVKFHLSHRQLQKQARVSARPSVCLYSKPRNPNLXICIQFLLAISDCFYLVLACFFDLLAGIGLICTGKINNPRRGVSIAKAQRNIFYGCSQIVNVSPKSXLSELTERSGQTVALSAKRTSGFISXRWYQSFLAQRLVRLKFRVLVTFCTTVVAPLPPXSESVRCHGSIFVVFRSFCRLVLESHQGFARVCGLYVKRVDSAALVT

SEQ ID NO: 181817 - protein, 89 aa, Oryza sativa
  Clone ID: PAT_MRT4530_79053C.1.pep
MKAIHAALLILAIVLVASSSSPPGGVTAQLETCTEVINREYPTCDSGLCVANCQRQYRGGIGQCVGNKCKCDYSCAFLPPPPPPATARN

SEQ ID NO: 181818 - protein, 290 aa, Oryza sativa
  Clone ID: PAT_MRT4530_79054C.1.pep
MARAFRAASPLPLPSSSSRAAAASGGTGGGGGGNFPWLSRKRLGAKPPSPQRRGGQEREGGGDEAAGMGTTTRAARFSATSSAEPAEVQSSSSSRKRADALARLRAAFLAAITHRRRRRQLGSSLTGTIFGRRRGRVHVALQTDTRSPPVLLVEMAAYSTGALVREMSSGLVRLALECEKQPINPGEKRRALLEEPTWRAYCNGRKCGFAVRRECGADEWRVLGAVEPVSVGAGVLPDDAAAAAAAEEGDLMYMRARFERVVGSRDSEAFYMMNPDGSGGPELSIYLLRV

SEQ ID NO: 181819 - protein, 372 aa, Oryza sativa
  Clone ID: PAT_MRT4530_79055C.1.pep
MAYDIEDCIDLFVHHLGSLTGKAGVIKKMAWRIKGLQLSHRISGRIQELKARVMDESDRYRRYDTMNISSMSSEAHLHRDASGSRTRSVDPRLSALYTEAERLVGIDGPKDKIIKWLMDTQGGISQRLRTMAIVGCGGLGKTTLANQVYLEVKNQFDCSAFVTVSQNPDVKHVLAKFLSDVSGAIGGALADEHHLINKLREYLQDKRSNEENFVTMVGASDLTSTPTGKIRRLSFHKNSEGSVTMPTYLLRSHVRSLTTFLHAGQVPPLLGFYGSMAKLEYLHILISAFQVKSWDGSFDFGIQHLYCLTKERERGRSPELRRPDTRRSPAAAASGPAVGKATRRGVSCRCPGGQEHLATEVARAREPLVSEV

SEQ ID NO: 181820 - protein, 859 aa, Oryza sativa
  Clone ID: PAT_MRT4530_79056C.1.pep
MAYDIEDCIDLFVHHLGSLTGKAGVIKKMAWRIKGLQLSHRISGRIQELKARVMDESDRYRRYDTMNISSMSSEAHLHRDASGSRTRSVDPRLSALYTEAERLVGIDGPKDKIIKWLMDTQGGISQRLRTMAIVGCGGLGKTTLANQVYLEVKNQFDCSAFVTVSQNPDVKHVLAKFLSDVSGAIGGALADEHHLINKLREYLQDKRYFLVIDDIWDAQTWRIIECALVKNSQGSRIVTTTRINEIAKSCCCSYGDQVYEMKALCATDSKRLFFRRIFNSDERCPPQLREAANNILRKCGGLPLAIISISSLLATKPKSLDQWDKVKSRINYTQENSPDIETMAWVLSLSYFDLPHHLKTCLMYLSIFPEDYVIKKERLIGRWIAEGFIHAKQGESLYEIGENYFNELINRSLLQPVDIEDDGQVHACRVHDTILDFVVSRSNEENFVTMVGASDLTSTPTGKIRRLSFHKNSEGSVTMPTYLLRSHVRSLTTFLHAGQVPPLLGFYGLRVLDLENCSGLKNHDLKSIGRLIQLRYLNIKGTDISDLPCQIRELQYLETLDIRSTHVKELPSAIVQLQRLAHLLVDCHVKLPDGIGNMQALEELTGFSVFMYPSTFLQEIGKISSLRVLRVVWNYVDFQGNAETYRENLAISLTKLGTCYLESLSLDIHGHDEEDDFSLHLWTLAPCRLRKLYIGRWHPISRIPNWTESLANLQYLHIYVKRINQEDLRMLGSIPSLLTLYLFSDEAPKEKLTISSQGFQSLTFFKIHCYHMGLVFEAGSMAKLEYLHILISAFQVKSWDGSFDFGIQHLYCLTKVYAYINCYGLTAEEAEAAVNAIMISVDTIPNCPKLQIDRRYAPL

SEQ ID NO: 181821 - protein, 88 aa, Oryza sativa
  Clone ID: PAT_MRT4530_79057C.1.pep
AAVPRRRVLPAARHHVMVMVVVVVMVTIHPRPRLAAVMQPDESASRSRSGSSRSPPPLLHSQQQLGSIDLGMHEHETRRGVRGSGRPS

SEQ ID NO: 181822 - protein, 318 aa, Oryza sativa
  Clone ID: PAT_MRT4530_79058C.1.pep
MAMQTGFATSKVLILVGAGLTSSIVLRNGRLSDVLAELQELMKGVNQGEGSSAYDIALLQSQIRNLAQEVRDLTISRPITILSGNSDSGGSLSSYILPAAAVGAMGYCYMWWKGLSLSDVMFVTKRNMTKAVESMSKQLDQVSSALAATKRHLSQRLENLDGKMDEQVEVSKIIRNEVNDVKDDLSQIGFDIAAIQQMVAGLEGKIELLDNKQDATNAGVWYLCQIAGGLKDGINAKFFQEANEKLKLTELAQSERKAVKGLESVLESRKEQKAIDSKQNTTAIIDAEKPVKTVDGPVKSGAVHRCSRISFRKEGLAL

SEQ ID NO: 181823 - protein, 430 aa, Oryza sativa
  Clone ID: PAT_MRT4530_79059C.1.pep
MDARRRPAATAAAAAAAPADAQPRARPAAAVAAAEAADAELVLRAPNLRVVAAAMVAFLAPFSYLAFVHYPLDAALRRSILICGAMSFGGFVVVLRLVPVAARYLLRRGMWGKDINKRGLPMGEIRVPEALGIVVGIVYLVIAILFQHFNFTADSMWLVEYNAALASVCFMVLLGFIDDVLDVPWRVKLLLPTIAALPLLMAYAGGTSVSIPKPLTSYVGVAVLELGSLYKLFMLLLAVFCTNSINIHAGLNGLEVGQTVIISAAVLIHNVMRIGSSTDIEAQQAHAFSIYLVLPFLTTSLALLAFNWYPSSVFVGDTYTYFSGMALAVVGILGHFSETLLLFFLPEVLNFLCSVPQLFKFVPCPRHRLPRFDPHTGLLTGTKDGNLVNIFLRIFGRCTERTLCIRLLIFQALSCLFCFWLRYMITGWYK

SEQ ID NO: 181824 - protein, 92 aa, Oryza sativa
  Clone ID: PAT_MRT4530_7905C.1.pep
MPKVVEVRPTGARARRDGRPNNSGVDEVEGYVTVPREGTAAPADGRAWRKGLPEEMPTRRKEKPARATAFRRKSGDAVAWLGKRTALRCRER

SEQ ID NO: 181825 - protein, 175 aa, Oryza sativa
  Clone ID: PAT_MRT4530_79060C.1.pep
LTISRPITILSGNSDSGGSLSSYILPAAAVGAMGYCYMWWKGLSLSDVMFVTKRNMTKAVESMSKQLDQVSSALAATKRHLSQRLENLDGKMDEQVEVSKIIRNEVNDVKDDLSQIGFDIAAIQQMVAGLEGKIELLDNKQDATNAGVWYLCQIAGGLKDGINAKVFQEANEKLK

SEQ ID NO: 181826 - protein, 157 aa, Oryza sativa
  Clone ID: PAT_MRT4530_79061C.1.pep
LQVQVLFYIFFNRTKQSGRQCTSRERAGYDRFALITKRGLPSEMRFCYTCAPRRFSQAHRPFSRAFRRQLSRWYFVWSRLPFVPFCSPEQIQAPKMCTTQIWIGIKKPKLPEWRTNICILIVYYLHCLSFRLSQLCELEFFISFLWNGEHRRIITAQ

SEQ ID NO: 181827 - protein, 47 aa, Oryza sativa
  Clone ID: PAT_MRT4530_79062C.1.pep
SKHHYHIKGKAISHTIHTHLKKGLYHPCMILHPCFAFACPGKTCRYW

SEQ ID NO: 181828 - protein, 58 aa, Oryza sativa
  Clone ID: PAT_MRT4530_79063C.1.pep
MQKRIPLSQSPKRMGATASIPSALDHLSISIADRSSELLLATWQLLHVTGPEGNTACC

SEQ ID NO: 181829 - protein, 122 aa, Oryza sativa
  unsure (1)..(122): unsure at all Xaa locations
  Clone ID: PAT_MRT4530_79064C.1.pep
DLIRRAKIFHYGSISLITEPCRXAHVAAMRAAKSAGILCSYDPNVRLPLWPSEDAARAGILSIWKEADFIKVSDDEVAFLTQGDANDEKNVLSPSRRSSSARQPTRAPRFRRRSPPLGASEF

SEQ ID NO: 181830 - protein, 598 aa, Oryza sativa
  Clone ID: PAT_MRT4530_79065C.1.pep
MPPPWPPAAPPPACARSLADLLVALSAARALPKGQQLHGHLLKAGHLPATASSHAPIAHHLLTFYARCALPGDSLCAFLDLPAPPSPAAWSSLISSFSQNGLPAAAFDAFRRMLAAGVPATDRNIPSAAKAVAAAEDSSRPPLAPHALHGLSAKTPFAGDVFVGSSVLDMYAKCGHLADARRLFDEMPKRNVVSWSALICGYADAGMHSAAMEIFRLALEEAVPVNDFTVSCILRVCAAATLFELGAQVHARSIKTALNASPFVGSSLVSLYSKCGLVECAYQVFGEAPERNLGIWNAGLNASAQHGHTTAAFQRFMDMQNAGFRPNSITFLSLITACSHAGLVDEGKRYFSLMKEYRIEPQAEHYAAMVDLLGRVGRISEALGLIESMPMEPPEYVWGALLMACRMFKDADAAAIAAKRLFETGSRSSGAHMLLSSTYAAAGRHMDAALARKAMRDAGVRKETGLSWLEAAGEVHTFVSNCRRHPRSNEIYNVLEKVGEKMEAAGYVADTSAVVKDVDKDEKQATMRYHSERLAIGLGLLIVPEGVPIRVMKNLRVCDDCHNAVKYLSKCTGRIVILRDNRRFHRFEDGVCSCGDFW

SEQ ID NO: 181831 - protein, 147 aa, Oryza sativa
  Clone ID: PAT_MRT4530_79067C.1.pep
MAATLGGDAATTRGRRDSWRGAHVSSSGGAKSGSGSATSTSPLGLAMAPSPLSPSTVAKTTATQHDLGVRFSGAISRRCDTVSAVGGANSGDNWSKARRRACGSSRERDGWAWHSCVAMAQITPGPRAGSRSSRLDHGCIAPGGVAS

SEQ ID NO: 181832 - protein, 115 aa, Oryza sativa
  Clone ID: PAT_MRT4530_79069C.1.pep
PAGTPQSPPTSSPIPLAFLSLSCVEPPESSSSAAMSGRGKGGKGLGKGGAKRHRRVLRDNIQGITKPAIRRLARRGGVKRISGLIYEETRRKTVTAMDVVYALKRQGRTLYGFGG

SEQ ID NO: 181833 - protein, 1379 aa, Oryza sativa
  Clone ID: PAT_MRT4530_7906C.1.pep
MPRYKPEYLFGVEGFVQELRTMSFVIGFGTAPFYAQIPHDRHEEKCRVKVTLNSNSEDIPSVMFEAGGRNYIHACQEVARIAIGELRDRYSDQLADTEYRYHPRQPQGSDRGSYLETEGIENDATTRHLVEMLWAMDETRAESVLAAQDREDQNRGKICKLEGKVDRLEKELAALKGEAPPLKARVRLTARKRALFVPRYQLAPKVRVVEKEVTPALADPPVIIISDDEEEESKRNHSKIEWVATQDDEDEPNEPSIDLRCSEELECHMVNTRSNGNGPNNPNNNNNEGNPTLAQVLAQQTQLMNMMMQQLQNQQNQGNNHAPPQNKLAEFLRVRPPTFSSTTNPVEAGDWLHAIEKKLDLLQCTDQEMVSFASHQLHGPASEWWDHFRLNRNIAEPITWLEFTAAFRKTHIPSGVVSLKKKEFRSLTQGSRSVTEYLHEFNRLARYAPEDVRNDEERQEKFLEGLNDELSYPLMTRDYPDFQKLVDKAIRQEDKYNRMEQKKRRIAQFKTQQGNNQRPRLTLGPQSMPQGDPGHYADKCPKPRRVKVVPAQSNSIAPAPKARVNHVAAAEAQDAPDVILGTFLVNSVPATVLFDSGATHSFLSMSFAGNHGMEIEDLRRHLMVSTPSNQALSLKRSPSVRIEIQGVSFLANLILLESKDLDVILGMDWLARHKGVIDCANRKVTLTSNDGRVVTVHALSSESLRSRLNQITLEEIPVVREYPDVFPDDLPGMPPKRDIEFRIDLVSGTTPIHKRPYRMAANELAEVKRQVDDLLQKGYIRPSSSPWGAPLKGATVFSKIDLRSGYHQLRIKQEDIPKTAFTTRYGLFECTVMSFGLTNAPAFFMNLMNKVFMEYLDKFVVVFIDDILIYSRTKEEHEEHLRLALEKLREHQLFAKFSKCEFWLSEVKFLGHVISAGGVAVDPSNVEFVTNWKQPKTVSEIRSFLGLAGCVLMQDGKVVAYASRQLRPHEKNYPTHDLELAAVVHALKIWRHYLFGTCTEVYTDHKSLKYIFTQPDLNMRQRRWLELIKDYDMGIHYHPGKANVVADALSRKGYCNVTEGRQLPLQLCKEFERLNLGIVSRGFVAALEAKPTLIDQVREAQINDPDIQEIKKNMRRGKAISFLEDEQRTVWLGKRICIPDNKDLKDAILKEAHDTLYSIHPGSTKMYQDLKERFWWASMKREIAEYVAVCDVCQRVKAEHQKPAGLLQPLKIPEWKWEEIGMDFITGLPRTSSDHDSIWVIVDRLTKVAHFIPVKTTYSGSRLAELYMARIVCLHGVPKKIVSDRGSQFTSNFWKKLQEEMGSKLNFSTAYHPQTDGQTERVNQILEDMLRACALDFGGSWDKNLPYAEFSYNNSYQASLQMAPYEALYGRKSFKKDCE

SEQ ID NO: 181834 - protein, 56 aa, Oryza sativa
  Clone ID: PAT_MRT4530_79071C.1.pep
KFQHHGPVTMTDMLSTTFVLPNPDGTYQTLPRKVINKPTDCIIWSSRLGDLSRKHR

SEQ ID NO: 181835 - protein, 50 aa, Oryza sativa
  unsure (1)..(50): unsure at all Xaa locations
  Clone ID: PAT_MRT4530_79073C.1.pep
CFTFKKKSMNRKLLLQLQHSTEFCLFFSPPLQIRSMMQLIKDXTRKLLGS

SEQ ID NO: 181836 - protein, 43 aa, Oryza sativa
  Clone ID: PAT_MRT4530_79074C.1.pep
MGQSILFEKRDGGPAKWHVRVKVIPSCVSNIVGWVALLRAVPS

SEQ ID NO: 181837 - protein, 36 aa, Oryza sativa
  Clone ID: PAT_MRT4530_79075C.1.pep
SSATDHDKAERIMDDMEAYTITCIDSYTIPYYNMIW

SEQ ID NO: 181838 - protein, 117 aa, Oryza sativa
  Clone ID: PAT_MRT4530_79076C.1.pep
ADKHAASTLSTNFNLCSYQTIKSCVLLLLTRRICSSILITRSDLIHVTVHAPFDSSSSSSCRNQQQAKLSMAPNGEASSAVVAAVAPFLATFIGNHHLGHGGDGHGHKEMELLATTT

SEQ ID NO: 181839 - protein, 183 aa, Oryza sativa
  Clone ID: PAT_MRT4530_79078C.1.pep
MAPNGEASSAVVAAVAPFLATFIGNHHLGHGGDGHGHKEMELLATTTGGGGGGGGESIPAEEQQQVVEEAECECCGMSEECTAAYAGAVRRRFSGRWVCGLCAEAVAEEARKKKGGEREAALAAHMGVCRRFNGFGRTHPALFQADAMRHILRKLSAAAAPGSPKPTVYQTYICMPKYDRNYN

SEQ ID NO: 181840 - protein, 1733 aa, Oryza sativa
  unsure (1)..(1733): unsure at all Xaa locations
  Clone ID: PAT_MRT4530_7907C.1.pep
ILNNKFQYKIPTFPESPILQEKNLKSSKASKVTAGLEWYIPGLEIELCSRXGCSEWLGLCNRMPRYKPKYLFGTEGFVQELRTMSFLIGFGTAPLYAQIPHDRDEEKCRVKVTLNSNHEDIPSVMFEAGGGSYIHACQEVARIAIGKLRESYNDRLADTEYRYHPRQPQGSDRGSYLEPAGIENNATTRHLVEMLWAMDETRADIVIAAQDREDRNRGKICKLEDKVDRLEKEPAALKGEAPXARKRALFVPRYQLAPKMVLTRSNGNGPNPNNNNNNGENPTLAPVLAQQAQLMMNLMMQQLQNQQNQGNNHAPPQNKLAEFLRVRPPTFSSTTNPVEAGDWXHAIEKKLDLLQCTDQEKVSFASHQLHGPASEWWDHFRLNRTTAEPITWLEFTAAFRKTHIPSGVVSLKKKEFRSLTQGSRTVTEYLHEFNRLARYAPEDVRTDEERQEKFLEGLNDELSYPLMTGDYHDFQKLVDKAIRQEDKYNRMEQKKRRIAHFKAXQGSSQRLRLALGPQSVPQGGSSSIVRPQRQFFNNNAGNNNRNQAPRPVAAPTQNQPAKREQGSKPGVCFNCGDPGHYADKCPKPRRTKVVPAKNNSSAPATKARVNHVAAAEAQGDPDVILGTFLVNSVPATVLFDSGATHSFLSMSFAGNHGMEVEDLRRPLMVSTPSNQALSSQRSPSVRIEIQGVPFLANLILLESKDLDVILGMDWLARYKGVIDCANRKVTLTSNDGQVVTVHALPSETLRSSLNQITLEEIPIVREYPDVFLDDLPGMPPKRDIEFRIDLVPGTTPIHKRPYRMAANELAEVKRQVDDLLQKGYIRPSSSPWGAPVIFVDKKDHTQRMCVDYRALNDVTIKNKYPLPRIDDLSDQLKGATVFSKIDLRSGYHQLRIKEEDIPKTAFTTRYGLFECTVMSFGLTNAPAFFMNLMNKVFMEYLDKFVVVFIDDILIYSRTKEEHEEHLRLALEKLREHQLYAKFSKCEFXLSEVKFLGHVISAGGVAVDPSNVESVTNXKQPKTVSEIRSFLGLAGYYMRFIENFSKIAKPMTRLLQKDVKYKWSEECEQSFQELKSRLISAPILILLDPKKGFQVYCDASKLGLGCVLMQDGKVVAYASRQLRPHKKNYPTHDLELAAVVHALKIWRHYLFGTRTEVYTDHKSLKYIFTQPDLNMRQRRWLELIKDYDLGIHYHPGKANVVADALSRKGYCNATEGXQLPLELCKEFERLNLGIVSRGFVAALEAKPTLIDQVREAQINDPDIHEIKKNMRRGKAIGFLEDEQGTVWLGERICVPDNKDLKDAILKEAHDTLYSIHPGSTKMYQDLKERFWWASMKREIAEYVTVCDVCQRVKAEHQKLAGLLQPLKIPEXKWEEIGMDFITGLPRTSSGHDSIXVIVDRLTKVAHFIPVRTTYSGSSLAELYMARIVCLHGVPKKIVSDRGSQFTSKFWKKLQEEMGSKLNFSTAYHPRTDEQTERINQILEDMLRACALDFGGSWDKNLLYAEFSYNNSYQASLQMPPYEALYGRKCRTPLLWDQTGERQVFGTDILREAEEKVKIIQERLRVAQSRHKSYADNRRRDLSFEEGDHVYLRVSPLRGVHRFHTKGKFAPRFVGPYKIVSRRGEVAYQLELPQSLAGVHNVFHVSQLKKCLRVPTEEANPEQIEFQEDLTYVEKPICILETDERRTRNRVIHFCMVQWSNHSEEEATWEREDELKSAHPHLFTSSSESRGRDSV

SEQ ID NO: 181841 - protein, 253 aa, Oryza sativa
  Clone ID: PAT_MRT4530_79081C.1.pep
MMGRGCGVEWFVWHVRLDPGLVKLVKIGSLLLFSLPPLPPKSRIPSTREIRARLAATVTTTTTPTAANGMGLWDSLLNWLRSLFFKQEMELSLVGLQNAGKTSLVNAVATGGYSEDMIPTVGFNMRKVTKGNVTIKLWDLGGQRRFRTMWERYCRGVSAILYVVDAADRDSIPIAKSELHDLLTKQSLAGIPLLVLGNKIDKSEAVSKQALVDQLGLELIKDREVCCYMISCKDSVNIDVVIDWLIKHSRTAK

SEQ ID NO: 181842 - protein, 66 aa, Oryza sativa
  Clone ID: PAT_MRT4530_79082C.1.pep
MGPWAMGSSLITRCGVWKGDPVGPTDLGVASRSKPWGGADRIDPKMKEMDEHYLISVEEKRRWKTC

SEQ ID NO: 181843 - protein, 124 aa, Oryza sativa
  Clone ID: PAT_MRT4530_79085C.1.pep
VPVNAGKEAEGKNVIKQADNALVEKSNVHFVDTETYVQYIVKLDNKFDSNLMKKILSVIEVFELCKKKEQTYQKITTNMLEQMQGREKCCMTLGSWEEYNVDLDMETDDEEDGDNDSDGGNNEN

SEQ ID NO: 181844 - protein, 32 aa, Oryza sativa
  Clone ID: PAT_MRT4530_79086C.1.pep
MAIPPALARRESEHDGAASSNIPAVHCSLAFA

SEQ ID NO: 181845 - protein, 160 aa, Oryza sativa
  Clone ID: PAT_MRT4530_79087C.1.pep
DIDMVSGLYAQELPAMVRSGQIPQRALDDAVRRVLEAKQRLGLFEDPYRYSNADREKSSLLTPSTRALAREAAQKSMVLLKNDGALLPLHKDLAKLLVVGALADDKLSTLGPWSGDGRAEESISILQGIKQAVSPATRVVYLPGESPDDADLSGIDKAQQ

SEQ ID NO: 181846 - protein, 83 aa, Oryza sativa
  unsure (1)..(83): unsure at all Xaa locations
  Clone ID: PAT_MRT4530_79088C.1.pep
EGSAPKMAPLPLPRLPRPPPPSMMMASPPAPPXPWPLLVICPTQAPGWPRPAASSCSHSRPPRPGRVPLAPSPPPPASSPSPP

SEQ ID NO: 181847 - protein, 116 aa, Oryza sativa
  unsure (1)..(116): unsure at all Xaa locations
  Clone ID: PAT_MRT4530_79089C.1.pep
MQYLQGLRSRMAEEYKETGARPFYTGTGEKAQESTGEALISSGESETFLQKGIQEQGGGQGLDTISEIQERHHPPKEIERGLVDLXHQGSPHMGGLVEGQGPHLNHIERHVGRANF

SEQ ID NO: 181848 - protein, 206 aa, Oryza sativa
  unsure (1)..(206): unsure at all Xaa locations
  Clone ID: PAT_MRT4530_7908C.1.pep
MVLKDRFARCPGRTXVLTTNLTHPGKGERDGVRMGPATAYAAFGFTXAREGTARCLARSGGKTXVWCTWLEGVMRRVLSRPLSVMSCSGGWLGLLQRGIALDSGWLILINYYNCFTAFNYCLXMLALYKXSALAILWLYPASYPLFRYDLLSTVGSTQSCSIFPKSPEFEXCVRWWLFRGVGFVRAVEDACGVVFPLQSKSRLSAR

SEQ ID NO: 181849 - protein, 82 aa, Oryza sativa
  Clone ID: PAT_MRT4530_79090C.1.pep
KSLNKHCSRLYCRTHWKLTKWMGGTHTNRQFCYDNCKYILVISLYEDDRCTFGRDKLTSLVIVSGVPLQCISIDYSCAELDG

SEQ ID NO: 181850 - protein, 226 aa, Oryza sativa
  unsure (1)..(226): unsure at all Xaa locations
  Clone ID: PAT_MRT4530_79091C.1.pep
TAXEGAKRARGXLVAKXPIEQVPLLQEEIISICRSMGKAVIVATNMLESMIVHPTPTRAEVSDIAIAVREGSDAIMLSGETAHGKFPLKAVKVMHTVALRTEATIPGGQMPPNIGQVFKNHMSEMFAYHATMMSNTLGTSTVVFTRSGFMAILLSHYRPSGTIFAFTDQKRIQQRLALYQGVCPIYMEFSEDAEETLTRALDLLQKQGMVKSGEEVALRQSGRQPI

SEQ ID NO: 181851 - protein, 51 aa, Oryza sativa
  Clone ID: PAT_MRT4530_79092C.1.pep
VSMCCTKSFLTRGSSEAVSTETLLGAEDGSETERLEKSSIAFFTGLSLIST

SEQ ID NO: 181852 - protein, 66 aa, Oryza sativa
  Clone ID: PAT_MRT4530_79093C.1.pep
RRARKLLKAGFILEVLHLEWLANPVMVRKANGKWRMCVDLTDLNKACPKDHFPLPNSVQLSLSLRA

SEQ ID NO: 181853 - protein, 366 aa, Oryza sativa
  Clone ID: PAT_MRT4530_79094C.1.pep
RSEVVAVVVSKGEADVFYGRLLEAVRARAWEVVAAVAAAPAGGSSAAQGAPAEEDLAIRMPVVGVSGILRMEQEAWESAGQNRQAAFQDLNALMSKAKEMMELAEKMRQKLLTNSSAQSNSNDEEMGSKQDMQDWLLSVGIVSPVTKETAGALYHQQLSRQLADYIRTPLEKAGGMMALVDVYCLYNRARGTELISPEDLLQACSLWEKFDVPVMLRKFDSGVKVIQTKTHSDDEVFARISSLAQKEDALQKGISPSDAAFTLGIAPALAKEHLLNAESIGIRWDVSPDGLRFYINLFNEIDPQNMYINLAPSGQSGLLVCGNPAMAYQCHNYQWAYAVRKPYTSSLSSPQASVTQQRCRQPKTEV

SEQ ID NO: 181854 - protein, 591 aa, Oryza sativa
  Clone ID: PAT_MRT4530_79095C.1.pep
MEEAAEDRRLQVREEGGDQEPLLLLPQDANLYTGDGSVDIKGRPALKHATGNWRACFFILGDECCERLAYYGIAKNLVTYLKTNLHQGNLEAARNVTTWQGTCYLTPLIGALLADSYWGKYWTIAAFSAIYFIGLVALTLSASVPALQPPKCSGSICPEASLLQYGVFFSGLYMIALGTGGIKPCVSSFGADQFDDSDPADRVKKGSFFNWFYFCINIGAFVSGTVIVWIQDNSGWGIGFAIPTIFMALAIASFFVASNMYRFQKPGGSPLTRVCQVVVAAFRKWHTEVPHDTSLLYEVDGQTSAIEGSRKLEHTSELEFFDKAAIISSDDAKSDSFTNPWRLCTVTQVEELKILIRMFPIWATTIIFNAVYAHNSSMFIEQGMVLDKRVGSFIVPPASLSTFDVISVIIWIPFYGRVLVPIARKFTGREKGFSELQRIGIGLALSILAMLSAALVELRRLGIARSEGLIHEDVAVPMSILWQIPQYFLVGAAEVFAAIGQVEFFYNEAPDAMRSLCSAFALVTVSLGSYLSSIILTLVSYFTTQGGDPGWIPDNLNEGHLDRFFSLIAGINFVNLLVFTGCAMRYRYKKA

SEQ ID NO: 181855 - protein, 81 aa, Oryza sativa
  unsure (1)..(81): unsure at all Xaa locations
  Clone ID: PAT_MRT4530_79096C.1.pep
ALTGSHHPXGGEQXTLXCKAKTRQGGNPXTSSAESRGRAGGRRPXLTTTSEESPXTSSQVRGGISSVVQALPKTPGKCLPK

SEQ ID NO: 181856 - protein, 207 aa, Oryza sativa
  Clone ID: PAT_MRT4530_79097C.1.pep
MAARVEARGFIFGPPIALAIGAKFIPLRKPNKLPGEVMSKEYELEYGADCLEMHVGAVQPGERALVVDDLVATGGTLCAAIVLLERAGAEVVECACVIELPELKATESVASHTCLTLPKIGCLKLKGKYEYHQSPNGSLNVAFSALIVHNVTVTSSREMSRVFRLAPQGGGLDDPGSGFTLSVQGFISEGRERLNGKPLYVLVESHS

SEQ ID NO: 181857 - protein, 125 aa, Oryza sativa
  Clone ID: PAT_MRT4530_79098C.1.pep
KIGNFSPGPREEKVSKFLKPRKFFSWGLEASVEKKPFCFFPEKFFFGDYFGPLGCGHDFPVGWVRQRLVFKNPFPLCKKIVFKFLKKPRAVNPLCFFVPKIVLFFFFPARFFFKNFFCPCPPNFF

SEQ ID NO: 181858 - protein, 368 aa, Oryza sativa
  Clone ID: PAT_MRT4530_79099C.1.pep
MDPFVTALFQSKKKEKKRKENKRTPTRAAIAVAVTTGKSLATLHRSSVDARRTASSSSSLSTPHRDLASLLLPFPLLPSRSLHAPPRSLPPTPTSSPAGRRARPPAAMISSSKLKSVDFYRKIPRDLTEASLSGAGLSIVAALAMVFLFGMELSNYLAVNTSTSVIVDRSSDGEFLRIDFNLSFPALSCEFASVDVSDVLGTNRLNITKTVRKYSIDRNLVPTGSEFHPGPIPTVSKHGDDVEENHDDGSVPLSSRNFDSYSHQYPVLVVNFYAPWCYWSNRLKPSWEKTAKIMRERYDPEMDGRIILAKVDCTEEIDLCRRHHIQGYPSIRIFRKGSDLKENQGHHDHESYYGDRDTESLVAAMETY

SEQ ID NO: 181859 - protein, 395 aa, Oryza sativa
  unsure (1)..(395): unsure at all Xaa locations
  Clone ID: PAT_MRT4530_7909C.1.pep
MLNLNQIQPQVQLEAVQALTPQVSMPPASRRTHDDVPPVDPKEASNICFTCDEQVHYARERPQQKRKTPMGTEDEVRKMIITSTEWPPPGMTRRQRRNTFRGAPQLTEHLLANGGRVSDSADSDQVSSDDEDEMERKACSRCGEIGHVASSCATICVHCEEGHPPDRXCQFSFLPTKKMANQPASSNGEKHQGNTNPRQDYSFSLTPVSGQRNXNEKRKCRVREDICCFNCQGMGHFADKCPKPRNIAAGMSVHATPCNQKLAPQRIVIHASRSSPIARVATAPIPMNALPQGVNAQFQPQPPADKTEVSICVVPLEVPIQQLRNQVQDEEPECKKVIVCYNCSEEGHYSKNCPQPRQNRPPHFRQFTGSNHANHQVVSGANAVPVKPSASQKQP

SEQ ID NO: 181860 - protein, 528 aa, Oryza sativa
  Clone ID: PAT_MRT4530_790C.1.pep
MADDSASPSPSSASPLQHHREALKSSVRNTAASRRREQAIAIGKERREALIRAKRVCRAPISGSDEAEMEEGDMVVDEEKACLEAKTAHAVEELKSALSIQGKGVQKKKIEALRDLRRLLSQPEVPLVDTAIKAGAVPLLVQYLSFGSSDEQLLEAAWCLTNIAAGEPEETKSLLPALPLLIAHLGEKSSTLVAEQCAWAIGNVAGEGAELRSTLLAQGALRPLTRLMFSNKGSTARTAAWAMSNLIKGPDPKAANELITIDGVLNAIIASLEKEDEELATEVAWVVVYLSALSDRGISLIVRSSVPQLLIGRLFSSENLQLLIPVLRGLGNLIAADDYMVDSVLTVGNNIIDQALSGLIKCLKSDNRVLRKESSWALSNIAAGSFEHKKLIFASEATPVLIRLVTSAQFDIRREAAYTLGNLCVVPTGNCELPKIIVEHLVAIVDGGALPGFIHLVRSADVDTAGLGLQFLELVMRGYPNKQGPKLVEMEDGIEAMERFQFHENEQMRNMANGLVDEYFGEDYGLDE

SEQ ID NO: 181861 - protein, 496 aa, Oryza sativa
  Clone ID: PAT_MRT4530_79100C.1.pep
MISSSKLKSVDFYRKIPRDLTEASLSGAGLSIVAALAMVFLFGMELSNYLAVNTSTSVIVDRSSDGEFLRIDFNLSRCSRSGSVIYSFPALSCEFASVDVSDVLGTNRLNITKTVRKYSIDRNLVPTGSEFHPGPIPTVSKHGDDVEENHDDGSVPLSSRNFDSYSHQYPVLVVNFYAPWCYWSNRLKPSWEKTAKIMRERYDPEMDGRIILAKVDCTEEIDLCRRHHIQGYPSIRIFRKGSDLKENQGHHDHESYYGDRDTESLVAAMETYVANIPKDAHVLALEDKSNKTVDPAKRPAPLTSGCRIEGFVRVKKVPGSVVISARSGSHSFDPSQINVSHYVTQFSFGKRLSAKMFNELKRLTPYVGGHHDRLAGQSYIVKHGDVNANVTIEHYLQIVKTELVTLRSSKELKLVEEYEYTAHSSLVHSFYVPVVKFHFEPSPMQVLVTELPKSFSHFITNVCAIIGGVFTVAGILDSIFHNTLRLVKKVELGKNI

SEQ ID NO: 181862 - protein, 144 aa, Oryza sativa
  unsure (1)..(144): unsure at all Xaa locations
  Clone ID: PAT_MRT4530_79101C.1.pep
LPGRRPEAAVAAGGDGGGLQRRGEAAQPRRATEEGSAARPLPPRSGRRGXGERGGRRLPARPSQIWPEGAAGSAAAAAGGGGGGRHRRGGKVARLPATAVRTAAAAPPPSLPDLSFSLVVFPIGRITDSPRKAAYVARLSTMCS

SEQ ID NO: 181863 - protein, 48 aa, Oryza sativa
  Clone ID: PAT_MRT4530_79102C.1.pep
MAATTAQRATTTDDCRPWWKDCSSAAKRCGLWHCYCLIPVDHMIPPTL

SEQ ID NO: 181864 - protein, 95 aa, Oryza sativa
  Clone ID: PAT_MRT4530_79103C.1.pep
MAVVTGRDGRAIVASGHGGGSGERMEAPDLANDVAINGRRFGGMEVKVMTVMGRWPSRTPLPHVSPPIRGYAAGPSISVKRDTFAIGREGPTVHT

SEQ ID NO: 181865 - protein, 330 aa, Oryza sativa
  Clone ID: PAT_MRT4530_79104C.1.pep
MRWLCRVAPGDKHGTFGRRGNENDGLPLRFMLGRKKTTRGSRLSMLFSSLFSTESSATRDSLLSGRHLPHNGASAAAPSSRRWRPLHGGGTLLSGNATLMVSPRMRLISGTLITMVVATYPQHGALPLALRPHKVRVARSNCHKLEVSEIEAIRWICDDFEAQFLNIDLGSKQSTRLDESSRARCFFSHELPIDADSQSGCDESPHRTVFVLPVGESDIYVRFPTSIRHHMDGSYNYYDKPEVVGAVSASQFVQFAGSFDRVAMHPKLCDFDRRTDNFRSTQTDNFDRTVLFISIGEKQRRHTERPQEAKNKDQGLCSSSGPREHQNLEH

SEQ ID NO: 181866 - protein, 49 aa, Oryza sativa
  Clone ID: PAT_MRT4530_79105C.1.pep
SRIHSFSPFPPSLQRFPANSFLGNAFLCGFPLQPCPGTAPSPSPSPTSP

SEQ ID NO: 181867 - protein, 637 aa, Oryza sativa
  Clone ID: PAT_MRT4530_79106C.1.pep
MQDHILTAFLVVSLLFACIPPAKSADLNSDKQALLAFAASLPHGRKLNWSSAAPVCTSWVGVTCTPDNSRVQTLRLPAVGLFGPLPSDTLGKLDALEVLSLRSNRITVDLPPEVGSIPSLHSLYLQHNNLSGIIPTSLTSTLTFLDLSYNTFDGEIPLRVQNLTQLTALLLQNNSLSGPIPDLQLPKLRHLNLSNNNLSGPIPPSLQRFPANSFLGNAFLCGFPLQPCPGTAPSPSPSPTSPSPGKAKKGFWKRIRTGVIIALAAAGGVLLLILIVLLLICIFKRKKSTEPTTASSSKGKTVAGGRGENPKEEYSSGVQEAERNKLVFFEGCSYNFDLEDLLRASAEVLGKGSYGTTYKAVLEDGTTVVVKRLKEVVVGKKDFEQQMEIVGRVGQHQNVVPLRAYYYSKDEKLLVYDYIPSGSLAVVLHGNKATGKAPLDWETRVKISLGVARGIAHLHAEGGGKFIHGNLKSSNILLSQNLDGCVSEFGLAQLMTIPPAPARLVGYRAPEVLETKKPTQKSDVYSFGVLVLEMLTGKAPLRSPGREDSIEHLPRWVQSVVREEWTAEVFDVDLLRHPNIEDEMVQMLQVAMACVAAPPDQRPKMDEVIRRIVEIRNSYSGSRTPPEEKQKDESAAP

SEQ ID NO: 181868 - protein, 58 aa, Oryza sativa
  Clone ID: PAT_MRT4530_79107C.1.pep
YQVVQAPAVLPGWALLQPQGLTHQPVQHLLLAPACSSSFFELAFLFGHLGVYVSFVLR

SEQ ID NO: 181869 - protein, 770 aa, Oryza sativa
  unsure (1)..(770): unsure at all Xaa locations
  Clone ID: PAT_MRT4530_79108C.1.pep
MTEPLHTSSNGGAERGPNAAFESEKTLQTTTRLQRFDSLHMEAGKIPGGQSHTAKVGWATTLHLAFQSIGVVYGDMGTSPLYVFSSTFTNGIKDTNDILGVMSLIIYTVVLLPLIKYCFIVLRANDNGDGGTFALYSLISRYARISLIPNQQAEDAMVSHYKLESPSNRVKRAHWIKEKMENSPNFKIILFLVTILATSMVIGDGVLTPCISVLSAVGGIKESAKSLTQGQIAGIAIAILIVLFLVQRFGTDKVGYSFGPIILTWFIFIAGTGVYNLFKHDTGVLKAFNPKYIVDYFERNGKQGWISLGGVILCITGTEAMFADLGHFNVRAIQIGFSVVLLPSVLLAYIGQAAYLRIYPEHVADTFYKSIPVAAAIIASQAMISGAFAIIAQSQILGCFPRVRVIHTSTKFHGQVYIPEINYVLMVLCVAVTAIFQTTDKIGNAYGIAVVFVMFITTLLVTLVMVMIWKTSLLWIALFPVIFGGAELIYLSSAFYKFTQGGYLPLVFXSAILMFIMATWHYVHVHRYKYELRNKVSNNYVAELAVKQNLARLPGIGFLYSELVQGIPPILPHLVEKVPSIHSVLVIISIKYLPISKIETKERFLFRYVEPKEYRVFRCVVRYGYNKXEIDPADYVRVDIKNXKQINHQESVYIQSSHSLKAQSKKEMGDETDPPFEVQAQMSYRNTSDQYMTEPRXDSXQNIVSSQRDGVMHSPTNXETNVVAEPKAIYRKIIIFDYVYNFIRKNFRQPEKITCVPHNRLLRVGMTYEI

SEQ ID NO: 181870 - protein, 64 aa, Oryza sativa
  Clone ID: PAT_MRT4530_79109C.1.pep
GATKIFSFISFAGSTYYSFITSYRQRTSFLDKSRPLFKLSLSLSAKERGIKGLNNLAQKLLTRM

SEQ ID NO: 181871 - protein, 75 aa, Oryza sativa
  Clone ID: PAT_MRT4530_7910C.1.pep
ELVFGQGNIMGFVGFSLPKVMANTCGARLWHYVAHKATRGGALLAPGDFKWAANYTMALGALISTAKPFPHSIQY

SEQ ID NO: 181872 - protein, 92 aa, Oryza sativa
  Clone ID: PAT_MRT4530_79110C.1.pep
MILSCFYKVFLAWLPLNPTHSFSSFSAFVFYCTMFDALPSCRSAFSSIGFTNRFFRTTRSHEQSIQCIVHPGATQDISGYRPMDRHGSMELS

SEQ ID NO: 181873 - protein, 139 aa, Oryza sativa
  Clone ID: PAT_MRT4530_79111C.1.pep
GKPLKIFLGQTSWGFKQFYGGPERSPFGGFFNFFFIPFGALDREPFFPPGGGGFPRENPKNCSGGFWAKGKGGKIPLGGKKNRKSPFKLKKGGWGVPAQPPLFPPFPRFWPPLGIDGLGGGLNPAGARGGKGGVPFLGG

SEQ ID NO: 181874 - protein, 480 aa, Oryza sativa
  unsure (1)..(480): unsure at all Xaa locations
  Clone ID: PAT_MRT4530_79112C.1.pep
MDTVVGSSSKPCGPLTDYRIPDYILRPDAQRVLLDHAPPCPVLVFINSGSGGQLGSSLIKTYRELLGETRVLDGSDEAPHTGFRRLNVNLKTPRRGGDILAVQIRRTLATIVAAANGKASLLLGVVCDHKISNFPAIATFPLATGSNLPFSFGWXKXNSCTDRESVKSFLGLVRHAKEMKIDSWHIMLRMRATKEGPCDPIAPLELPHSLHAFHRVSSSDSLNMEGYHTFRGGFWNYFSMGMDAEISYGFHSERKKNPEKFKNQLTNQILNYSNIAQLASVKIMKRAGSHWQELNIHHSIRSIVCLNLPSFSGGLNPWGTPGTRKVEERELTAPFVDDRLIEVVGFRDAWHGLVLLAPNGHGTRLAQAQRIRFEFHKGAAEHTFMRIDGEPWKQPLPKDDDTVVVEISHLGQVTMLANEPCKSKSVHDDQSSHAQHSGHGNNDDDKDSMEDEDEWEDGRRKFGAADTFKIPDEVDIAHLS

SEQ ID NO: 181875 - protein, 41 aa, Oryza sativa
  Clone ID: PAT_MRT4530_79113C.1.pep
MDLVSLRHDEGCNGHVGLGMTTVINKMGEDEDGMAAIATIM

SEQ ID NO: 181876 - protein, 72 aa, Oryza sativa
  Clone ID: PAT_MRT4530_79114C.1.pep
STADRKNTNVDGAGADDRRNSSSNCLYRSSKLSFLPFSCARVHHTNMHEQGVNLHRIFKVHVEIRIQIGLLP

SEQ ID NO: 181877 - protein, 155 aa, Oryza sativa
  Clone ID: PAT_MRT4530_79115C.1.pep
FIFASNFVPLWLNAQHSGLEQFVDEAKSVRVMRSLQKSGLLQPAGIATSLSNTGQQWDFPNGWAPLQHLIVEGLLRSGSGEARELAEDIATRWVRTNYDAYKATGASHEKYDVVTCGKSGGGGEYKPQTGFGWSNGVILSFLDEFGWPQDKKIDC

SEQ ID NO: 181878 - protein, 84 aa, Oryza sativa
  Clone ID: PAT_MRT4530_79116C.1.pep
FILGLFAIIKNRTPPLTFFLGFSSGIGPGTNTSPHLGPWTGSGTGTSPFLVAPFFNPGTQINSGTGRGSPPGPGGGKPIRRAGA

SEQ ID NO: 181879 - protein, 336 aa, Oryza sativa
  unsure (1)..(336): unsure at all Xaa locations
  Clone ID: PAT_MRT4530_79117C.1.pep
MGPTCRRLGSRWGRRMRVAALGFGGVGLGLVHRVDGEEVGPRAAARLVVDREHGRENGGRGRPDRRDRVKPTWLPRWQAGGRRRLCPRWTADXATFTGARRDLNGKRKHTGRRDGTRGSDSTARMRRRRSDGGGLRRRPSAAEKEGNRRWSTRVRLEAAGASPGLXGELIPGVGWDGGVPSEAGDERRLPGTGGNRDETMPGGGGAWGFVYARSGGLPSYRASQKRERASEKGERRETLPSRDGPCDGRPTARGELSGLGPGKGKERVPVVPRHVSSHTPASPARATAEGGEVGERQRWSGGNGAVEVGQGNEEEREGLELGFIGGGDVGLGRKPT

SEQ ID NO: 181880 - protein, 1008 aa, Oryza sativa
  Clone ID: PAT_MRT4530_79118C.1.pep
MAGCMVPPCSIASRIWGACTVGWVIGGVRAGGYAAMKCTSIDRGFVYEVLLAIGRVPEVGWEAMMVVVTPRDAGRPTARTESAQVADGACQWPAPVYEATKLPSSGKDKIYQFLVYDTGSTKAALLGEATLNLSEYADAFKPWIVTLPLSGSPGAQLHVTIQRVVGGGGGGGGGCGDDASENGGDVSPVVARTPPRKTLQSQLSRCEDEEAEKARAAAAAADAMSPMQDGLVINKPPGMRFSARRNMRGPVDHLHNSNSFDAISVSGSDGSSGRFTPKNNASMHSTFLQEGTNTLSPLRNTLTSSGDWSGSSAPDASTDGSTSNSGEAGLREAEDDVEKLRSEIATLTRKLDVSDMELQTLRKQIVKESRRGQDLSKEVGSLRDERDALRRECEALRGMKKTIHDANGSGKRLSSGEDPWSQIEELKQELGHEKNLNGDLHLQLQKMQESNSELLLAVKDLDEMLEQKNKEISLLHEETLEDPQEAEYELALSNVHNAGHKIDISETSSVQEKEDELMLDALAKTTDGIATSELQNKIVELSNEIELYKKDREDLEMQMEQLALDYEILKQENHDISSRLEQTQLREQLRMQYECSAHLSIISDLEANVESLENELQEQSKRLEADIQEVMRAKVEQEQRAIKAEESLRKARWNNATTAERLQEEFKMLSSQVSSAFSANEQLLMQARKEAAELQLQKGQLEELLQKAQEDLGSIQEQHRVKVQQLLTLVDFKSKETDRLVMELKSKSDEFQNQKRCNEAKLSVLSEEIDQLKAKIENLSNERDNLFEENEQKDKELAANCQKDMFLQDRDAEIALLNKELASIKDQVQTYLEEINTLKSSKNEKEEMIEKLQSEIRSLKFEYDNLKILMSTNDSEKHNLASQVLKLRRALESREDVKQNGVKSDEDNHHATSKRIKHDDGTTGSCNVLPSTNRHNANGDCNGHDRRDAAHDQSVKELEILKERNTALEEELKELHGRYSEISLKFAEVEGERQQLVMTVRALKNSLR

SEQ ID NO: 181881 - protein, 60 aa, Oryza sativa
  Clone ID: PAT_MRT4530_79119C.1.pep
KLKIEPLQPKGELSLAARLLCLLCCLVSLEMDQSSATNTSTAFASSVHISVQKKENSLIT

SEQ ID NO: 181882 - protein, 281 aa, Oryza sativa
  unsure (1)..(281): unsure at all Xaa locations
  Clone ID: PAT_MRT4530_7911C.1.pep
RHRRRRRLGRRTLAGERRREDENGKHQDEAGGTANSPATKTTAEDQRTATATRKKRRSSSGRRRRXRSGGLRRRRRGGRGRRRDGEHDGGLPERRRRLERRRRTAGVAAAAAKLGLTALARFRRREAKARVAAGREELGETFKGARRRRRRATAXAMRKEGSGKTNPRRTRIPRFPNRFSRXFQRRKGRGDPGECFPSINSAGNGKGRPDLEGNGGGGSAAVRXVSARGRRRXLTGGTHLSATERARXRGRLRTGPDWAEXERERGSGFGPTFSPKPKEDF

SEQ ID NO: 181883 - protein, 228 aa, Oryza sativa
  unsure (1)..(228): unsure at all Xaa locations
  Clone ID: PAT_MRT4530_79120C.1.pep
APCSPIKPAESSASAAAAAAMLRTNSDSFHVAHKVPGGDTPYVRAKRVQLVDKDPEKAIALFWAAINAGDRVDSALKDRAIVMKQQNRAEEAIEAIKSLRSRCSDQAQESLDNILLDLYKRCGRLDDQISLLKHKLQLIHQGHAFNGKRTKTARSQGRKFQVTXEHEATRLLGNLGWALMQKENYTEAEGAYRRALLIGPDNNKMCNLGICLMKQGRVLEAKDVLKQV

SEQ ID NO: 181884 - protein, 152 aa, Oryza sativa
  Clone ID: PAT_MRT4530_79121C.1.pep
EIRRTEYERSSPRFYFSNLVALFYTSRREPMTLHAQDRQRSSRQTSSDYSFPKSPTALKPIGVLCMLYYILLSFLRKGGRLLIWYHHSIRAYILCHFLQDTVSPFCDLHSCTPLLTFSLGIFESWDSCPLTRCPSIVEGTSHGLEFGLAHGP

SEQ ID NO: 181885 - protein, 512 aa, Oryza sativa
  Clone ID: PAT_MRT4530_79122C.1.pep
MEKLKSELWMTAVATCMSLLLYLTILRRRHASGGRSLALPPGPTPLPLIGNLLCLGGIFHQTLAKLARVHGPVMTLKLGLTTAVVVSSAEAAREAYTKHDQRLAARPVPDAFRANGFSERSIVFSPSSDPQWKNLRGIHATHIFSPRALAALRGIRERKVRDIVGYIRTVAGEEMCVREVVHNGVLNLISTSFFSMDMADVRSESARGLRGLIEDIIATVAGPNVSDFFPFLRQLDLQGLRRQTGSHLGIVFGLLDDIIDRRMAETRDHPDKQRHGDFLDALISLASAGKIPRYHITYLLFDVFAAGADTMTTTVEWAMAELLRNPRVMAKVRAEVTDALGGRESFDEGDAASLTYLQCVFKEAMRLHPVGSILVPHLAVQDGVEIGGYAVPKGTTVIFNAWAIMRDPAAWESPDQFLPERFLHKEESSSPPLELRGKDYEYIPFGSGRRLCPGLPLAERAVPFILASLLHAFEWRLPDGMSPDDMDMTEKFATANVLATPLKAVPVASHTS

SEQ ID NO: 181886 - protein, 92 aa, Oryza sativa
  Clone ID: PAT_MRT4530_79123C.1.pep
LGGGGGELPDWCNTTSLTVSPGSVGAAVAGASGSRSTACCWPAEKQRESVEARLAGEEAGSRQRLERSGGGSGAAAARVVSERRDGGLQPGD

SEQ ID NO: 181887 - protein, 112 aa, Oryza sativa
  Clone ID: PAT_MRT4530_79124C.1.pep
GIDKNGYLSFFAAMRRDSVTVHPQRRQLLQLRPRRAAQPVQPQLRAHHPLPRLIDHTIAPPPPPPPPPPPLPVPAPAMMIRFVSLTTTTMCTHMHMRASVLSMDRSITRLIK

SEQ ID NO: 181888 - protein, 180 aa, Oryza sativa
  Clone ID: PAT_MRT4530_79125C.1.pep
MAASRRTTHDMAMHGGTKLSGSLAAAQWRLVRQGYGGDEVKKWLNVGTECCLRKAITDVHAFAMDIVRARRQSSSVQDRDDVLSRFVASDEHNDEVLRDIVLSFLIAGRETTSSGLSWFFWLLSSQPDVMACITNEVRALIDTARIIAKHASISFSFMLNKALKMYHWCSAALHIGDTSS

SEQ ID NO: 181889 - protein, 36 aa, Oryza sativa
  Clone ID: PAT_MRT4530_79126C.1.pep
SRMCSQVVDGQDHYFLSNWQHGVEIMRLECKYGAVG

SEQ ID NO: 181890 - protein, 65 aa, Oryza sativa
  Clone ID: PAT_MRT4530_79127C.1.pep
FPLAQNKGELQFMARFLVKIFLHKPNLTHTLFPNGVNSNPRKFQIFSPTHNNRGIKTYFFTLQRH

SEQ ID NO: 181891 - protein, 79 aa, Oryza sativa
  unsure (1)..(79): unsure at all Xaa locations
  Clone ID: PAT_MRT4530_79128C.1.pep
MATRRALSSLVRAASRLRGASPAPRPRGPLHRPSPSGYLFNRAAAYATAAAAKEAAPPAPATGKGTGGGKXTDEXTGXG

SEQ ID NO: 181892 - protein, 765 aa, Oryza sativa
  Clone ID: PAT_MRT4530_79129C.1.pep
LSFKSLATEDPSGAMSSWSSNETMFGFCHWKGVTCSSHAHPGRVTALRMRDLGLVGAISPQLSNLTYLQALDLSNNRLQGEIPHDLGSCVALRAINLSVNSLSGQIPWSIGNLPKLAVLNVRNNKISGNVPASLGNLTALTMLSIADNYVNGRIPPWIGNMTNLTDLNVAGNVFHGYVPSNIAGLTNLLALSLLGNKLQGVFPPELFNITSLEIMYIGLNMLSGFLPMDIGPKLPNLVFLSTIYNQFEGPIPDSLSNISKLEYLQLHGNKFQGRIPPNIWSSGTITRLNLGNNILEAKTPNDRDFLTSLTNCSELVTLDLQFNRLSGFIPNTLVNLSQELIWIGLGGNQIFGTIPAGIGRFRKLTVLELAECPSSLAHNSHSKHQVQLILIICVVGGFTIFACLVTFYFIKDQRTIPKDIDHEEHITSLLIKKYPRISYVELYAATDSLSSENLIGRGSFGYVYKGNLTSGVNSATVAMKVLDLRQKGQTQGFFAECDALRRIQHRKLVKVVTVCDSLDYNGNEFKAIVLEFISNRSLDTWLKTGNKVGTLSLIQRLNIILDVAQALEYLHNHIEPPIVHCDIKPSNILLDEDMVAHVSDFGLAKIMSVDASRQSLGESISNGVRGSIGYLAPEYGMGAEISARGGVYSYGVLVLQMLTGKEPTDAIYDGTTSLPKYVEMTYPDKLSPIVDAAIIANSGGGQETINMFIVPVAKIGLACCRDNASQRMNFGEIVKELVPLNKLCQDYFLTQGASSGNTSDIGITL

SEQ ID NO: 181893 - protein, 387 aa, Oryza sativa
  Clone ID: PAT_MRT4530_7912C.1.pep
MGDNLMDKVNALGERLKVSGAEVSRKMSAGVSNMSFKMKEFFQGQNMADKIVDEATLETMDAPDWATNLEICDMVNTGNVNSIELIRAIKRRIMLKNPRVQYLALVLLETVVKNCEKAFSEIAAERVLDEMVKLIDDPQTVVNNRNKALMLIEAWGESGDELRYLPVYEETYKSLRSRGIRFPGRDDESLAPIFTPPRSAPSAEPYSAAAQEGYQEIPDESFAPVHVVPAVQVNEAFEVARNSVELLSTVLSSSPQKEALKDDLTTTLVQQCQQCQRTIQRIIETAGDNEAQLFEALSVHDELEKVLSKYKELKEPVVAEPEAEPAMIPVTVEPENSPRTKDGTVGKRAGSGADELLQDLDDMIFGKKGGTSSQQDRKEQKDDFISF

SEQ ID NO: 181894 - protein, 149 aa, Oryza sativa
  Clone ID: PAT_MRT4530_79130C.1.pep
MAKEPRMVLYLYAQCNWKEKIAATLCNLVGDGLGILTSWDMSWLLLVLLGLCNAGSIQFSLRHANHKHAPYMKLMSGYRLQKGPWMCCSAVDLVPRREMHNMVVASSHLLLHIRIKGVKHTLKQNVDPFHGSALIFCMWFWLCKPSLIT

SEQ ID NO: 181895 - protein, 150 aa, Oryza sativa
  Clone ID: PAT_MRT4530_79131C.1.pep
MGAGTTTTTTTELTAARHPAANVVSGGSSGCLPSSWPSLSGAGGTGRRRGSAVVRSLQLVVRDVSPAAGWCGHRAWRRLLRRLAQETRCICSSSSPSGAASSRPITFGYDAASYAKNFDDGRRPAAHYAALAPAPAAGAANAAAHEPAGR

SEQ ID NO: 181896 - protein, 96 aa, Oryza sativa
  unsure (1)..(96): unsure at all Xaa locations
  Clone ID: PAT_MRT4530_79132C.1.pep
GRLFXKGPGNQXKGLGPVMXFSRETKKHXVPNXXAFELTPPXXQFPTLXFKQGPMFXPKQQKLLHHXVQIKSIXNFFXXXXXXKXKKKKKKKKKKK

SEQ ID NO: 181897 - protein, 92 aa, Oryza sativa
  Clone ID: PAT_MRT4530_79133C.1.pep
MSSDGIVEPTRAPLIPGMAAVKAAALEAGALGCTISGAGPTAVAVIDGEEKGEEVGRRMVEAFANAGNLKATATVAQLDRVGARVISTSTLE

SEQ ID NO: 181898 - protein, 48 aa, Oryza sativa
  Clone ID: PAT_MRT4530_79134C.1.pep
MAIEVAIDVAAATALTTIYHLHATSRLDICTSTPAQCTIMANTEELSK

SEQ ID NO: 181899 - protein, 931 aa, Oryza sativa
  unsure (1)..(931): unsure at all Xaa locations
  Clone ID: PAT_MRT4530_79135C.1.pep
MATAVSKSAAKPHPRSPTTAQPPNNGSAAGAAAGGGGGGVGMGPAGATPSKNAAMAELKSRVLGALAKLSDRDTHHIAVEDLDRIIRSLPSPDAVPMLVHALASDSPGLASPARRESLRLLATLCAAHPDAAAPYLQKVMAHLARRLKDTNSDSSVRDACRDAAGQLSEVYLRPLAASAAAEAGNATVTLFVKPLFEAMGEQSKAVQGGAAACLAKTVEGAGPGPGVVGMFGKIGPRVCKLLGGQGVQAKGALLTIIGSLSQVGAISPQNMPQTLQSIRDCLENSDWATRKAAADTLCVLATYSGRLIGDGTAPTIAALEACRFDKVKPVRDSMADAVQLWKKMAGDDSNDGKNKESADNEGKMDSPNNNDKVKGSSMAEKAAVLLKKRPTLTDRELNPEFFQKLETRITDELAVEVVVPRKTLQSHLQSEEEPEDADGDPVGPANSNGSADDEANLTQLRSSSNFQNIRDRWAGQRGSRNKDAKVRASDVEDRNESSAKDSASAAMNVPGEGPSLNNKTNWLAIQRQLSHLDRQQTSLMNMLQDFMGGSHDSMVTLENRVRGLERVVEEMARDISLSSGRRGGGPMLGFDSSPGRSSMKYNGFHEYSNSKFGRDRDGRVGFAERYFSGDGMSSGVRSSEPWDSYAYSGSRSGMNARRGLDSVSSDNRVPRNERSNDQAGPRRGWDKGQGPFRFGEGPSARSAWRASKDEATLEAIRVAGEDNGTSRAAARVAIRELDGETLNDDNQGDERGPIWESWTRAMDAIHVGDMDSAYAEVLSTGDAELLVKLMEQTGPVVDQLSHVGDMDAPYAEVLSTGDAELLVKSLSXLEQVFTDILMKLTNEVLHAVGQFLVEESFYDIALSWLQQLTDLVMDNGSGYLGIPLDAKNDLLLGLHEATAIELPDDWEGATPVQIMKQLASSWRIDLQQLIS

SEQ ID NO: 181900 - protein, 422 aa, Oryza sativa
  Clone ID: PAT_MRT4530_79136C.1.pep
TRDPWRSMSYVLRDVVVVLGLAAAAARVDSWLVWPLYWAAQGTMFWALFVLGHDCGHGSFSSNAKLNSVVGHILHSSILVPYHGWRISHRTHHQNHGHVEKDESWQPLSERLYNSLDYMTKKLRFTMPFPMLAFPLYLFARSPGKKGSHFNPSSDLFQPNEKKDVITSTASWLAMVGILAGLTFVMGPLKMLKLYAVPYVIFVMWLDFVTYLHHHGHEDKLPWYRGKEWSYLRGGLTTLDRDYGWINNVHHDIGTHVIHHLFPQIPHYHLVEATEAAKPVLGKYYKEPEKSAPLPFHLLVGHWAMGILLSLSVKLPPLSSRFEAYHPHSDEDADMKYDVDRMIKPLMNAFVWCMHMRDTSIVGIDGADNRTLQHVRSSGDGAESVIPLIHALLAYFIHLALFRMQQPDTLLVIDDASLSIID

SEQ ID NO: 181901 - protein, 90 aa, Oryza sativa
  Clone ID: PAT_MRT4530_79137C.1.pep
MGCCGSSTVDAEEHLDYSGGNVTLVTDQKNWDNTMEEVAEHGKTVVLKFSAIWCTPCRNAAPLFAELSLKYPDIGFVSVDVDEMPELVTQ

SEQ ID NO: 181902 - protein, 68 aa, Oryza sativa
  Clone ID: PAT_MRT4530_79138C.1.pep
MKTYPRLLRCGHHRLVPTTAQFTTLVKVTCDGPKPSSLTASRMVSDQWSLVSPVTFDGWPAITGDTHL

SEQ ID NO: 181903 - protein, 628 aa, Oryza sativa
  unsure (1)..(628): unsure at all Xaa locations
  Clone ID: PAT_MRT4530_79139C.1.pep
TSHHLLRVLLATALPLLFLSHADAGELGVCYGRDADNLMDPQSVVSLLRANGITMVRIFDADPAVLRALANTGIKVMVALPNTDLGSAGWDPSYAQRWVESSVVPYYPATLINGVAVGNEVXRSXRLNLTQQLVPAMRNVHAALPRLGPAVPMGVSTPITFSSVEVSFPPSAGAFRDDIAQSVMSPMIDFLQQTDSYFMVNLYPFFAYADPSTGISLEYATFRPNAGVFDPVSGVTYYSLFDAELDAVYYAINKVSGSNERASLAQAGGRVPIRVSESGHPSGGRIRSGVTEANADGDSVATKANAQAYNNGLAKRVLFGASNMEDVSAYIFALFNENKKGGPSIESNFGLFYPDGTKVYDVDFHGGGTCPTKESWCVANAAIGNARLQGALDWACSNGADCSAIQQGKVCYEPNTMVAHASYAFNDYYQRNGKASSACNFAGAAYIVYKPSPSICDPNPSWCVANAEVGDMRLQAALDYACSSCADCSAIQPGGRCFDPNTKVAHATYAFNDYYQTAGRASGSCDFGGAASIVNQAPNGSMKLTNNGDNCATGKGGIRNGEGEGLSGVYDLTGHTAARYECIAVLVFGIALQVIGQLVVRETCRASCINESANANPLRPPGPSTNSH

SEQ ID NO: 181904 - protein, 314 aa, Oryza sativa
  Clone ID: PAT_MRT4530_7913C.1.pep
KKFYKKKNPKSPPSLPSAGPAHLSSPISLSPLPAAHSAPPRARAADGRARPPPSLMGGAHPSSPSSRRSRRPARAKRRRRRQIRRIPPSPRAIKWGKSLLVIPSPFHPIFPSLSCVQTGGFAPANLAGAIDGGRPPAPVSFPSGRSLPLPTLFKPSPHLLRPFPPLAALHPRRIRARDVAHSLRRRRRAPVRRRRRPGPPPTLAPPPSASPHPRQSRAPLRFGRRPPERRVPVDPSRAAASLRSVRLLRRRRRPGVSRGPPPPFPLPFLLSAAAPPRRWSPAVTIRARGCRLPPTVPAWPPSGAPSGCRVGPGR

SEQ ID NO: 181905 - protein, 153 aa, Oryza sativa
  Clone ID: PAT_MRT4530_79140C.1.pep
IEFFAIAFSEAQGPLEKGPQKKKLPGGAFDPLGFFKGPVQFWGVQLQEIKNGRLAQLAFLGFWVPQLGVPGPGPLEKLAHPLLGPWANNIGGIFIPRTLFPLAWPEPVGGFRGTLKVWVVFFCGGTVCDWFIIGGGWAPNGWPAGKFWLALLC

SEQ ID NO: 181906 - protein, 87 aa, Oryza sativa
  unsure (1)..(87): unsure at all Xaa locations
  Clone ID: PAT_MRT4530_79141C.1.pep
APGIDTTKEDAADAQEALSWLSTEALDIMMNWMDRALQGVNAAKKTLIWLXSMTRLDLAIDMLILAFILXRQLGFIVGRCPECIDRL

SEQ ID NO: 181907 - protein, 71 aa, Oryza sativa
  Clone ID: PAT_MRT4530_79142C.1.pep
SCTRACLARPTCVHRSPSRRLPRSSIGRTPTGCTRPTSCRGRLRTRTLAMSRGHALLKPATLAISMQIRWT

SEQ ID NO: 181908 - protein, 57 aa, Oryza sativa
  Clone ID: PAT_MRT4530_79143C.1.pep
LCFSINGDKLGSSCSQCKSICPHKILGKICFSLFIRAFLSVIDLVSLFYLRQVVQWL

SEQ ID NO: 181909 - protein, 222 aa, Oryza sativa
  Clone ID: PAT_MRT4530_79144C.1.pep
MTHFYQLTCVGNKRHTDGYVEGVTRFLEFAFANSSKGNSILCPCKNCGNSYWTERTTVREHLICDGFMQLYRTWLFHGKESTFMHDDGDHRVELEKSNEEDDISGFLQDLACGLDEMGDLEENNEGQRNVDIGDFYKLVDDAGQELCPGCKDFSKLRFIVRLLHIKFLGGWSDKSFDLHLDLLKYAFPARTSLPKNYHEAKKLVKCLGLGYVSIHACEHDCI

SEQ ID NO: 181910 - protein, 48 aa, Oryza sativa
  Clone ID: PAT_MRT4530_79145C.1.pep
NNIWRIPASQRIGLFIGFRGSMDLILRKFHGPGSAKIIQLWNCQSLLW

SEQ ID NO: 181911 - protein, 42 aa, Oryza sativa
  Clone ID: PAT_MRT4530_79146C.1.pep
QRFCILVFVSSTGQRGSALCSMMHARAKRVPASGPELGPHSN

SEQ ID NO: 181912 - protein, 143 aa, Oryza sativa
  unsure (1)..(143): unsure at all Xaa locations
  Clone ID: PAT_MRT4530_79147C.1.pep
IIPINNRNEICXTLFPEGVLYAHNDYNSAXKHPQIGVPNLQEIRLLQSFXAPVQHCRETFSWKHYYCDLIIDGIDYLRNYLNLTSDSVPATLQNPARPPDRPFASAPPGDRPRGPPRSEGDRARSXDREAYRGGPRGHPGVLV

SEQ ID NO: 181913 - protein, 38 aa, Oryza sativa
  Clone ID: PAT_MRT4530_79148C.1.pep
LELPQIIFFKGGGVVKNLFLKESVGYGHKFERGSMPII

SEQ ID NO: 181914 - protein, 563 aa, Oryza sativa
  Clone ID: PAT_MRT4530_79149C.1.pep
MAAAAARDDDLGNDDLDDDRSNPRRQSGGRTAGPIRQGLHGDIGLQMTAAMAGDDANDGGHGWRRWLSTAAVAAVLLSLGDGGDDDKATEGIRGSSAGMYTDKRSVSEDTHLYPSTKPTIKPARPQPQMHPLTAAAKHAITIPPPPPPAAAASYTSSPSSGTSDPSVLDLSSAEIDDDGDGDDDRAEQQEIKNSKELVMGRAPCCDKASVKKGPWSPEEDAKLKAYIEENGTGGNWIALPQKIGLKRCGKSCRLRWLNYLRPNIKHGDFTEEEEHIICSLYISIGSRWSIIAAQLPGRTDNDIKNYWNTKLKKKLLGKRAPSRRARANQDHCGLAGSAAAAMCGGVGTAAAAAPPHQALSSSALERIQLHMRLQGLYNSAFGCTTTSSNGGGVGVAPPQWPKLEALLPSRPLPAVQPTDAVVATVQHPHHLVVGGHTLATAAAAAATTSEAFQAAEHLDPAAATGSNYMPGVAGVEMTSSSSMAGGGGFVAGYGLHDELYDFLFKCESIGGAQGGIIPSSLPELQCPDGSAIIGADEKFSTWTSSSCDYGSGGAGDYVLGYDQ

SEQ ID NO: 181915 - protein, 189 aa, Oryza sativa
  Clone ID: PAT_MRT4530_7914C.1.pep
DGATAIGRRTAARGSGLEGAAARRRRLAARGDGDRAARGSRRRRHDARDSGGARRSDGDGSAAATRRRAAAAAMGRRDGMAASDARRHGRGARGGGTGLGMTRQAAAAMATARRHWRGAAGAARGSGRQRGRVRARGPRRTPGEGTARRGGSAPSTTTQSSSWLSSSSCAAATERGGSAPSTTTPSSSV

SEQ ID NO: 181916 - protein, 675 aa, Oryza sativa
  Clone ID: PAT_MRT4530_79150C.1.pep
LGDPATRPEEDTIFIPTSYAIDEELREWNETAAVSWAARAPPSTGPQDVEQAFLDEFKLCRGDVAVSLHHPQAFLIKFQHRRHCEEAIAKGYVKRRGIEIHFIKWRSLQSALGVALMFRVWLCLDGVPMHAWAADIAERLIGHTCALEQIETDLVHPMESGNTRSIDLWAWTANPSTIPKRMWLGFTNRAKDQQLAPLLVAENPPEYWQRGVRHPVLFHLEEIHDYTAAIIDLEAQGSFQPTKRRLPLWTLEVLDGEQAPGRVFEDFPHHLQPPRSVHDRLGDHDREDELRGSRRPERGERGNRGDDGAHHGGRARVRDRSRRGCAACIEQDQDEEEDGRGDDDRDAPADHDDRARGGRRGRRGHNNDHPRANQNWRSRDRDDDDRDERGRDFGRGRGEQRAIDQDYRRERTRSPRQCDRGGHSRHGGRRHHAGATDVDNVTDPVHPEPHLAEISLPSRQQELHTEEIPASPPTLTGDQLLRLTLVADKAMTAPPPTATEDLAIRSFTGTEAWFGSTAWKPVPVARVFGRIREALPATPAVDTLTTCQQIEEALMRLELAVAAARTPGDDTLLPQPMSPAPLAASPPRRLEDLASDAAADKILPALLPGALLPQEMTPMPATPPPSALEPGSLPERASSPCAIAGLFTSPPPAIIASPPRLTLLCLRPVVLCHTL

SEQ ID NO: 181917 - protein, 77 aa, Oryza sativa
  unsure (1)..(77): unsure at all Xaa locations
  Clone ID: PAT_MRT4530_79151C.1.pep
SNXHAVXIHPXVSXITXHWXXXLQPRXWEKXXVTQXXRLEHIXFXQLALXXKXXQPIPXPKXAPLXGEWQIVSXNIX

SEQ ID NO: 181918 - protein, 90 aa, Oryza sativa
  Clone ID: PAT_MRT4530_79152C.1.pep
PENSFTQEPIMSMILPSCETAPYRCSWSAFRDRSLITGCNQRVSESVGRPWILFVGCRLVYSDLVFYVLDGLVSLATKAAKQMAFLKYCR

SEQ ID NO: 181919 - protein, 103 aa, Oryza sativa
  Clone ID: PAT_MRT4530_79153C.1.pep
MPTAEPTLGSSLPLSSIDNNDKIVAVCIFVDFIQVFPSVSAEAVEDQAASVVHHYPVVSRIMKPIIREPEIDSTSEGVWFIEAEANYTSYVDSVLTADGTVEI

SEQ ID NO: 181920 - protein, 145 aa, Oryza sativa
  Clone ID: PAT_MRT4530_79154C.1.pep
RARQPAGSAASSSSSSPPAPPPPPPSPPRARPTSASGTSPRGTAAARRDDGDAAPSPPRPAMAARGTPLMLRSAGRRTSRTSSSGIRRGTRSPPPPPPPSPSRPSSSSPTAPSPAPASPPLAPPLPSPARGVSPPPPLPPRRRFV

SEQ ID NO: 181921 - protein, 190 aa, Oryza sativa
  Clone ID: PAT_MRT4530_79155C.1.pep
MAPFEALYGRKCRTPLNWTKTGEGQLIGPQIAHDAEAHVRIIREKLKTTQNRQKNYNNNQRRDLSFEVGDFVYLKVMPLKGVQRFQMKGKLAPRYIGPYRIVQRRGEVSYQLQLPAELTGIHPVFHVSQLKKCLRKPTEQVPLDDIALQTDITYEEEPEKILEVTERRLRNRGIEFCKVQWKNHSEDEAT

SEQ ID NO: 181922 - protein, 585 aa, Oryza sativa
  Clone ID: PAT_MRT4530_79156C.1.pep
MGQAHIVSLSPCSIVLLSLLTVGGGGGVELGYEGGGGGGVELLRGLWLRHRHGAAARAAAWSGCERGGCGGSVELLRGRQRYQGCGGSRQRKPLRAVTDEESSNGGGACCPAQKGGPRRSHTRPQASSPPPNSMSPSSSSSTGELDFMEKIELLEAAGETDLELRLAGGFCVSLIDINRIRMNKLVKVGSRPRQIAWGMSRICCEQSPGTSSKRYERYQRQPQNVDLPELLPKKKKKPFPVPIKKMLQASRQDKRLARMRIEKPLEPPKNGLLVPELIPVAYEVLDNWKVLIRGLSQLLNVGTVYGCRKCPQVHVGPVGHQIQDCYGTGSQRRNSHHSWVRGSVNDVLIPIESYHQFDPFGWRVKHETRFDYDRIPAIVELCIQAGVELPQYPSRRRTAPVRMIGKKVIDRGGFVDGPKPHRSEDCISLLAELDTFSNQQGQSSTPSNVEELAEKTLKAYLNVQRGVARLMRKYTVKTCGYCSEVHVGPWGHNVKLCGAFKHQWRDGKHGWQDAVVDDVIPPNYVWHVRDPTGPPLRSSLRSFYGKAPAVVELCVQAGAEIPEEYRPMMRADVVIPDSEEARLAA

SEQ ID NO: 181923 - protein, 269 aa, Oryza sativa
  unsure (1)..(269): unsure at all Xaa locations
  Clone ID: PAT_MRT4530_79157C.1.pep
MICLRAAFPLTSSFSXPLRRLALKPSSSRAAAAAAMSSXPTAIAAPVEHIVLIKVRPEAAASGAAAAMVSSLQALSRVVPGLSYIHVGPVLRLRSPAAEALGPTHVLHSRYATKPDLAAYAAHPAHVAAVQGHVLPNALDSTAIDWVNAALAPSPVTPGSAVRLSLAKLKEGVEAHQLVEKLAAATAAAXGEAKGARVSFGENFSPARAKGYQFGMVAVFDSVEELDAVEGDGKVQEAKAAVRPLLDEVLVLDFVVGPAAVEAPAPANL

SEQ ID NO: 181924 - protein, 225 aa, Oryza sativa
  Clone ID: PAT_MRT4530_79158C.1.pep
MGRGKVELKRIENKISRQVTFAKRRNGLLKKAYELSVLCDAEVALIIFSTRGRLFEFSTSSCMYKTLERYRSCNYNLNSCEASAALETELSNYQEYLKLKTRVEFLQTTQRNLLGEDLVPLSLKELEQLENQIEISLMNIRSSKNQQLLDQVFELKRKEQQLQDANKDLKRKIQETSGENMLHISCQDVGPSGHASEANQEFLHHAICDPSLHIGYQAYMDHLNQ

SEQ ID NO: 181925 - protein, 113 aa, Oryza sativa
  Clone ID: PAT_MRT4530_79159C.1.pep
ANKRNDGSVKRRIHPPIRAEDLALQFPAKHRGDEAGCVWRVPSRCHPARDPSNRHAFCSASAPPIVRVAACPWVPSRSPPLPREGEKKAADSRAVPACSRGRPVRHPLLQIKP

SEQ ID NO: 181926 - protein, 331 aa, Oryza sativa
  Clone ID: PAT_MRT4530_7915C.1.pep
MGRGRSRKPRNFATFRLCPRPGAADASDRVFFRVDNNPYYVPGFADDDVLGGAAAAAVGEGDDDAPSSSASGETGPLPDHVRREILELGLPDDGYDYLAHLREIRPSISSTGGGGASAAFLPVRRHARAHFGPPVDVKAYDASRVRIGSSGKETTTATAAAVEVEVTRIENAIDPDVARLLEESGEPALAGSESESESEDDDLEEDFVLVANQDDDDFVLVEIENQFEEEEENIAAADDSEEDGLKNEPVLSKNRRKVMTQPCQYCSSVHEKDDDAVLQQWHCTLMLISEVVIAVFRLSDADVVCAAFSPAAAPFIHGRWGNGDNLTICHF

SEQ ID NO: 181927 - protein, 112 aa, Oryza sativa
  Clone ID: PAT_MRT4530_79160C.1.pep
LACFLIANKGFIGVLANELSGRCIGLQGLHTIGSYRIILLLYYIIISRLSLFTSSVRFYIKHMADSSKSYHYRLDQIDWHVRTSSTFGPALELSRSLRPLWIFRQKPRASSI

SEQ ID NO: 181928 - protein, 264 aa, Oryza sativa
  unsure (1)..(264): unsure at all Xaa locations
  Clone ID: PAT_MRT4530_79161C.1.pep
TRPLGEAQVFDVSEEAPDKVLHRLNVNLEKLKMDGDILAVQIWRTLRIIVAGGDGTASWLLGVVSDLKLSHPPPIATVPLGTGNNLPFSFGWGKKNPCTDQESVKSFLGLVRHAKEMKIDSWHIMLRMRATKEGPCDPIAPLELPHSLHAFHRVSSSDSLNMEGYHTFRGGFWNYFSMGMDAEISYGFHSERKKNPEKFKNQLTNQGTYAKVGLXTGWXCASLSHPSSRNIAQLASVKIMKRAGSHWQELXIHHSIRSIVCLTC

SEQ ID NO: 181929 - protein, 133 aa, Oryza sativa
  unsure (1)..(133): unsure at all Xaa locations
  Clone ID: PAT_MRT4530_79162C.1.pep
RRLLLLDTPGNIHSSFPRCSYPITPRCLRHPPSTPVISASHDFFGLTGLEEDHAAHLFIHVRDALEVEAVEAVPGDALVDLFADGSMLPXLQEADTWMQIDVMVVAGGRVMVNCGLRQAMRGGGRGGAGRRGH

SEQ ID NO: 181930 - protein, 237 aa, Oryza sativa
  unsure (1)..(237): unsure at all Xaa locations
  Clone ID: PAT_MRT4530_79163C.1.pep
KNHGLPAKHGAYVVDIRSPYNHIRVSDVSRASHPLTSXRLLLLDTPGNIHSXSLDAATPSHLDVFATLPPLPSYGRRTSSLVVLGFGAANSPXFLDLLVHDWEIDRTVISASHDFFGLTGLEEDHAAHLFIHVRDALEVEAVEAVPGDALVDLFADGSMLPXLQEADTWMQIDVMVVAGGRVMVNXVGCGKPCAEAEEEGRDGEAIMEQLLSSSQNVLKYKKFWLDETHPNTKNIIL

SEQ ID NO: 181931 - protein, 513 aa, Oryza sativa
  Clone ID: PAT_MRT4530_79164C.1.pep
MKLVEDATPPAAGAVLLAGAQSRHAIFRDELVRRAIYAAEAAHRGQMRASGDPYLQHCVETAALLAELGAGPAVVAAGLLHDTVDDAGLGYGSLSVQFGAGVADLVKGVSNLSHLSKLARRNDTASRVDEADKLRTVFLAMEDARAVLIKLADRLHNMRTLDSLPKVKQQCFAQETLEIFAPLANQLGILNWKEQLENLCFKYLYPELYEELSSNLLEFYNQDMIAAAIRRLEQALQVRGLCYHTISGRNKSMYSIYSKMARKKLDMDEIYDIHGVRVILDNKADCFTTLEIVHHLWPRIPGKFKDYINSPKPNGYQSLHTVVLSEETLPLEIQIRTRDMHLQAEFGIAAHWRYKEAVRNCCSSVPEMVEWVRWVVTWQCETLHIDHPSSLTHGAPPRAICSCSSQSDDCPFSYSKRCDHSGPILVILLENEKMSVQEFPQNSTVLDLLKRTSSYDMQLRLRLNCHVVHNLNQELKMGDVVELIPLAQCNPGAGGYAREFHQMYDHRLTVSQS

SEQ ID NO: 181932 - protein, 529 aa, Oryza sativa
  Clone ID: PAT_MRT4530_79165C.1.pep
MQFCHDSYLHTFMQQSTEWMRDRADKLKEDVCTLFTPTKDILRRMYLVDEIVHLGIDHLFEKEIETALKDIHETEFTSSNLHEVALRFRLLRERGFWVSPDIFNKFKGDDGNFLNEFAEDPRSLLSLYNAAHLFIHGEPELEEAISFARNHLESMSSHSVLKAPLADQVKRHLRLPLPRTHKRVEMLHYMFEYDQENEHNPVLLELAKLDFNLLQQVHLKELKEISRWWKDVLAYMGLDHIRDRVIECYTWSYAVYHEKDLALARMIFAKLVALTSVLDDTYDVHAYTSIEECRMLNVAIQGWDDSAALLVPEYLRKFYEIILRTFREFEDQIPRNQRYLAAFSKAEFQKLTSNYLEAAEWYHRNHKPSFNDQVALGTATTGTRSLAAGLMLGMGDAATTKQAFQWAVTSTDAIISCGKIGRLMNDISGFKLGSQNKADMACAVEAYIEEHKVTADVAIARINEVLEDEWKTTNQARVDHRAVLPVVQRMINITLGIQLFYGNDCDAFTFGKQLQEVLEDLYVKPMSLL

SEQ ID NO: 181933 - protein, 70 aa, Oryza sativa
  unsure (1)..(70): unsure at all Xaa locations
  Clone ID: PAT_MRT4530_79166C.1.pep
VGXFPIXHFLGFLMHKVQEGPIKNRKKNFFFSKHPILKWKRTYSLNSLILLPLKPSILSFKVLTLYHIKT

SEQ ID NO: 181934 - protein, 537 aa, Oryza sativa
  Clone ID: PAT_MRT4530_79167C.1.pep
MALATNSAAVSGGAAAAASSAPQPRLAATFLPMRRRTVSAVHAADPAKSNGPVQAAAKASSPSTVAAPEKKPVGLGKWTVDSWKAKKALQLPEYPSQEELDSVLKTIETFPPVVFAGEARHLEERLADAAMGRAFVLQGGDCAESFKEFNANNIRDTFRILLQMGAVLMFGGQMPVVKVGRMAGQFAKPRSDSFEERDGVKLPSYRGDNINGDTFDEKSRVPDPQRMIRAYAQSVATLNLLRAFATGGYAAMQRVTQWNLDFMDHSEQGDRYRELAHRVDEALGFMTAAGLTVDHPIMTTTDFWTSHECLLLPYEQSLTREDSTSGLFYDCSAHMLWVGERTRQLDGAHVEFLRGVANPLGIKVSDKMNPRDLVKLIEILNPSNKPGRITIITRMGAENMRVKLPHLIRAVRNSGQIVTWITDPMHGNTIKAPCGLKTRPFDSILAEVRAFFDVHDQEGSHPGGIHLEMTGQNVTECIGGSRTVTFDDLSDRYHTHCDPRLNASQSLELAFIIAERLRRRRMRSGVNSNLPLPPLAF

SEQ ID NO: 181935 - protein, 630 aa, Oryza sativa
  unsure (1)..(630): unsure at all Xaa locations
  Clone ID: PAT_MRT4530_79168C.1.pep
HVNYIGTFFLLVQQMARRLDSKKEAHVMLKLDISMAFDSVDXSFLLEVLCHLGFGRRWCNLLCLLLSTSSTRVLVNGEPGKEIAHCRGLRQGDPLSAMLFILVMDVLNSVAVHADHGNLLEPLAVPQTAHRVSLYADDVVMFLRPTSGDLSLIKQILEFFGQIFGLRTNMTKSSCTPIHCLEDDLEVIYNELFCEVNNFPCSYLGLPLTIRKXKTDLLPSVDKVADNLPSWKASLMNKAGRLITVRVVLSAIPIYAMMALDLPKWVVKAIDKRCHGFLWKGRXNTNGGNCLISWXVCQPLSYGGLGILNLEKMEWALRMRWXWLQKTDFARPWAGLSIHVPQNVHSLFNVAIKIVVGNGENTMFWSDRWLQGKTVAELAPNLFALISKMXADIVARALENKRWVADIHGGLSVQVLYEHLTIWSLVDEVVLLQDVQDQHVWXGMYTCKSTYEAYFLGSIKFAPWKRIWKSWAPLCCKFFLWLAVNNRCWTADRLAKHGLQHPAACPLCDKXEESIQHILISCVFSRQVWTVLFLKLGISGIVPQPSTDRXFLRWWSQSTKYRPKDVWKGLNSLVILVAWEIWKHRNDCFQXTSPNVETVLRVVENEGNLWCLAGASALQKFLSGSANLGT

SEQ ID NO: 181936 - protein, 650 aa, Oryza sativa
  unsure (1)..(650): unsure at all Xaa locations
  Clone ID: PAT_MRT4530_79169C.1.pep
MANRLAPLLPGMVSVNQSAFVKRRSIHDNFLLVQQMARRLYSKKEAHVMLKLDISKAFDSVDWSFLLEVLCHLGFGRRWCNLLCLLLSTSSTRVLVNGEPGKDIALCRGLRQGDPLSPLLFILVMDVLNSVVVHADHGNLLEPLAVPQTAHRVSLYADDVVMFLRPTSGDLSLIKQILEVFGQISGLRTNMTKSSCTPIHCLEDDLEVISNELSCEVKNFPCSYLGLPLTVRKPTKTDLLPLVDKVADNLPGWKASLMNKAGRLITVRVVLLAIPIYAMISLDLPKWVVKAIDKRRRGFLWKGRENTNGGNCLISWDRVCRPLSYGGLGILNLEKMGWALRMRWLWLQKTDFARPWASLSIHVPQNVHSLFNVAVKTVVGNGENTMFWSDRWLQGKTVAELAPNLFASISKRARKQCTVAQALENRRWVADIHGGLSVQVLYEYLTIWSLVDXVVLLQDVQDQHVWKLTADGMYTCKSTYETYFLGSIKFAPCKCIWKSWAPLRYKFFLWLAVNNRCWTADRLAKRGLQHPAAYPLCDQSEXSIQHILISCVFSRXVWTALFLKLGISGIVPQXQPSFFEXWSQSTKYRPKDVRKGLNSLIILVAWEIWKHCNNYVFNGTSPNVVTILQVVENEGNLWCLAGGVCPPKVS

SEQ ID NO: 181937 - protein, 421 aa, Oryza sativa
  Clone ID: PAT_MRT4530_7916C.1.pep
MLCGVEILCSVVAVVARVLGRALMTICSPKFSTAGLIGSPTTAWGGGGAKKKVHMESEKQQLPPPPSPPALVLPAFKRNCTDQEQRAPATSTKAARGRPPRLVIPAAAPVAVARGGVDPFGGRETDVATETEVKGEGFCLASRRGVRHAMEDGYGVITRHKIEGGSQLAFYGVYDGHGGRAAVDFVADKLGKNVVTAAAAATTMSRHQAAGSSSPSQQRREEEDDVTAAIRAAYLTTDSEFLSQGVRGGACAATALVKDGELYVSNVGDCRAVLGSRGGVATALTSDHTPGREDERLRIESTGGYVSCGGSGVWRVQDSLAVSRAFGDAGVKQWVTCEPETARVSLAADGDCRFLVLASDGLWCKVSNQEAVDAVAAAAAAAAGVAGSTDPCKELAAMARSRGSRDDITVMVVDLQPFLPV

SEQ ID NO: 181938 - protein, 413 aa, Oryza sativa
  Clone ID: PAT_MRT4530_79170C.1.pep
MMMKGKGGAVDRRSSARWRMLLLCAFCFGLGMLFTDRFWTAPDTSNHIMSQRRRQDRELQLISEDCNTKRKHGEDKDIMGEVTKTHEAIQLLDKSISTLQMELAAKRSTLELLRAGGSPVTSETSQPRKKAFVVIGVNTAFSSRKRRDSVRETWMPQGAKLQQLEDQKGIVIRFTIGHSATSNSILDKAIDSEDAQHRDFLRLDHVEGYHELSAKTKIFFSTAVGIWDADFYVKVDDDVHVNLGMLATTLARHKSKPRTYIGCMKSGPVLADKNVKYHEPEYWKFGEEGNKYFRHATGQIYAISKDLATYISINQPILHKFANEDVSLGSWFIGLEVNHIDERNMCCGTPPDCEWKGQAGNVCVASFDWSCSGICKSVERIKEVHARCGHLTCGPCVSEQWRIGMAIGRDGHG

SEQ ID NO: 181939 - protein, 649 aa, Oryza sativa
  Clone ID: PAT_MRT4530_79171C.1.pep
MVLGVKVWRTCGLRIMPDMEHQSEGRFFAWHIQIEVDHMLSERLMQFIDVDLHGVKAREKFVSVRKGTRAEVVTGLEEDLHNAKSAFERCRFNLGYELLSQMEPFIHQVLTYAQQSKEMAINEQDKLAKRIQEYRTQEEIANLRMASNVDTSTSGDGIHVVGLQSYKKIEALMQSTANGEVQIIKQGYLFKRSENSREWKRRFFVLDSHGTLFYYGNKGQSQGAASQQTAGEGTGVFSRFRFLNQKAPTQGDNALSCHKIDLRTSTIKIDAEENDLRFCFRVISPMKAYTLQAESGADQKDWIEKVTGVIASLLNLPFPRQVSYGNLEAEHHGSANSVDSLSLEENKSPEGHDDIFNHLRNIPGNDSCAECRSPDPDWASLNLGILICIECSGAHRNLGVHISKVRSLRLDVKVWEPVIMDLFHELGNDYTNSIWEAMLPKEDQGINEFNDAILFIEKPKPTDAFSIKERYIQTKYVDKLLIAKDTNQITIDILEAVRTNDVRAAYRILVLADVSPNMIYDELNNDVHHDPSVTDGKLFDPASCDVKDDSGKPEGCLQGCSLLHIACQYGHSIMAELLLLFGADINKQDFHGRTPLHHCVRRKNDALTKHLLKRGARTTIKDGGGLTALERRMELGAITDEDLFILFVR

SEQ ID NO: 181940 - protein, 136 aa, Oryza sativa
  Clone ID: PAT_MRT4530_79172C.1.pep
CVNGGNLWCSSIFMVIVGPPFRCCGLICGSFEVWGPPLVWGIRPLFHYKFLRSKLSPLGVFDPRSVFSSQGFFFWGQSCRFMPCFLGCFNRACGAFLFNPKGIKLSLFFLKKKKKKKKNKKKKKTTKKKRAAHKRI

SEQ ID NO: 181941 - protein, 480 aa, Oryza sativa
  unsure (1)..(480): unsure at all Xaa locations
  Clone ID: PAT_MRT4530_79173C.1.pep
MAAFTKLEDSPMFRKQVNSMEQLSDELKQRCSNLHKGCKRFMGSLDEGYAGDLTFADALEAFGAGQDDPVSVAIGGPVMSKFTTAFRELGTYKELLRSQVDHMLSERLMQFIDVDLHGVKDCRQRLDRATVGYDQAREKFVSVRKGTRAEVVTGLEEDLHNAKSAFERCRFNLVHALSNIEAKKKYEFLESISAVMDAHLRYFKQGYELLSQMEPFIHQVLTYAQQSKEMAINEQDKLAKRIQEYRTQEEIANLRMASNVDTSTSGDGIHVVGLQSYKKIEALMQSTANGEIIKQGYLFKRSENSREWKRRFFVLDSHGTLFYYGNKGQSGSKERHHXQTAGEGTGVFSRFRFLNQKAPTQGDNALSCHKIDLRTSTIKIDAEENDLRFCFRVISPMKAYTLQAESGADQKDWIEKVTGVIASLLNLPFPRQSQVSYGNLEAEHHGSANSVASPRNALTQFNRGFEDRLLRWQRSDLLQT

SEQ ID NO: 181942 - protein, 119 aa, Oryza sativa
  unsure (1)..(119): unsure at all Xaa locations
  Clone ID: PAT_MRT4530_79174C.1.pep
NKFSLISCSILCPSIQVQALEAELRRASEDNKKLSXMLRAVVAKYSELQVQVNNMMSTAATAAVNSGNHXSHRXEAGSVSPSRKRIRSVDSLXTPPSTASHPLRSSPPPQPRPTPPLTR

SEQ ID NO: 181943 - protein, 112 aa, Oryza sativa
  Clone ID: PAT_MRT4530_79175C.1.pep
GEGELGRESRRGDGEELNDFWLGVSGVFKMLNPFAGGPLNRSTCKNLFSQSSHSCHFRREPFSYKRPTHLEKKLSSEKLVFLYQLTAVDKLIGLVLDTCMRHSYATYIFAGY

SEQ ID NO: 181944 - protein, 335 aa, Oryza sativa
  Clone ID: PAT_MRT4530_79176C.1.pep
MPIPEKDGVEDNQEDDTFSRLQLLAQQRHAMEKFWRMSQEQIEESAGNEELILPISRVKNIIHAKEGGMMLSADTPAFVTKLCELFVQELILRAWVCANSHNREIILGTDIAEAITTTESYHFLANVVHGHQALGSNIPEIGVSAWKRHKLDEMTSLCHPPQAVQVTDLANHPPNIPVCPPIGQSGTQHTTSTHVLMMQGESIHKASKEKSPLKEVMVPTNKVGMTNSSYGVPNGGGATSSKVVIDSPKGETAQVFSSQHACPSLEDNYVIPIPAGHGDSFRTLDEANIPQLHQEQKNFISQDAIVGENIPLNESLEKSKHKDEDLLFPDKDLPE

SEQ ID NO: 181945 - protein, 48 aa, Oryza sativa
  Clone ID: PAT_MRT4530_79177C.1.pep
ARGCLSDPKKADLLVTPLLLCLFVLFCGYHLLIRSFKSKIEVLILKVR

SEQ ID NO: 181946 - protein, 247 aa, Oryza sativa
  Clone ID: PAT_MRT4530_79178C.1.pep
MRRSLSPAWRRSPWKSQRRRSTTPRARRRRASSPSCTDPAPAPAPSSDEEEEVIDDNGEVVKRKKKKGLKEKIKEKLPGHKDHAGEHAPPPAATGFPAPAPPASVVTAAPTPAPAPVVTHGDHHHDTAVPVEKIEGDHAKTEATLPRAPEEEKKGFLDKIKEKLPGGHKKPEDATAVPPPAASPAAPATTPAPAHPPPATEEVSSPDGKEKKGILGKIMEKLPGYHKGSGEEDKTAAAATGEHKSSA

SEQ ID NO: 181947 - protein, 37 aa, Oryza sativa
  Clone ID: PAT_MRT4530_79179C.1.pep
YLLATRNGPNGAWLRLHDHESMIVVVRRGAHAESPES

SEQ ID NO: 181948 - protein, 45 aa, Oryza sativa
  unsure (1)..(45): unsure at all Xaa locations
  Clone ID: PAT_MRT4530_7917C.1.pep
PRGGTLSGLMGLXKDGSIFNLLTTSRAGEVSAERVLPFYTDDLSM

SEQ ID NO: 181949 - protein, 75 aa, Oryza sativa
  Clone ID: PAT_MRT4530_79180C.1.pep
LSQLYRVWSLLRRVRSIMRWDLSLIRRVAVAATTVAGVGVVVAEVGVGLKLLGAVNEKGTSETDSQHEQSLGHHD

SEQ ID NO: 181950 - protein, 90 aa, Oryza sativa
  Clone ID: PAT_MRT4530_79181C.1.pep
RSISYHIVWSHRSVTCYLLASLVSASIRNGIVNVASTLRAASTLHLRLHRIWEEGGEPPLAPPLAQPPPEAAAATASNCRRHGSSSRNLS

SEQ ID NO: 181951 - protein, 44 aa, Oryza sativa
  Clone ID: PAT_MRT4530_79182C.1.pep
MASWGLRFWKVVSALSPPEVLSNFQGNALAPVLGTATKLNYALF

SEQ ID NO: 181952 - protein, 34 aa, Oryza sativa
  Clone ID: PAT_MRT4530_79183C.1.pep
SALQRTGCVVICTKMPVRCSLGPLLVVFVTAVTS

SEQ ID NO: 181953 - protein, 389 aa, Oryza sativa
  Clone ID: PAT_MRT4530_79185C.1.pep
MELELVYLYPVTLVPAVVGRFSILASPLLKEFEEHNLQFTSIIPLFFFYSYISKFLSDLQGQPLPLVKLYARALHRFTSCSSSKSRASLRIYMDTAVVVVLSYLSLLKINLSYIWLAVFPTLTLAFIAALFNEELRGDRRAAVAEEDDAGGGKITRSSSRRCFAVSQFLLFLGSTLGALALMAARLSQLAGAAPGLAPASELLRRATLVVMLVTAHAAAAELLGEATIALLCLPELAPALFWFTLHLDGESSPAATIDGIKSHRNVLSVLAAAAVASVAYLAAAMGERGLSVSTITMVSCGVSGLLVRCAVVVLGQWPGQAETAGSTAASLMEVVLVLKFWGNTLLAVAAMLLLLALLTAFRLCLQEPMFATVAKCFSDYIDKVPQMIV

SEQ ID NO: 181954 - protein, 279 aa, Oryza sativa
  Clone ID: PAT_MRT4530_79186C.1.pep
MDLKDSLSKFKQQQERCQSSLASIAASTSKPKHRAQPVNAPSAPARPLQPIKFSNDTERLQHINSVRKSPIGAQIKLVIELLYKTRQAFTAEQINETTYVDIHGNKSVFDSLRNNPKVHYDGRRFSYKSKHDLKGKDQLLVLVRKYPEGLAVVEVKDAYPTVMEDLQALKAAGEVWLLSNMDSQEDIVYPNDPKAKIKVDDDLKQLFREMELPRDMVDIEKELQKNGIKPMTNTAKRRAAAQINGVQPKAKPKKKQREITRRTKLTNAHLPELFQNLNT

SEQ ID NO: 181955 - protein, 265 aa, Oryza sativa
  Clone ID: PAT_MRT4530_79188C.1.pep
RQHHAERKTRPDHRLARTIVSVSPVTLYLSHHFDYGGGGDSKDATAGERRRPPAVVCSALLVLAAALLLPAHHAMAEDVVSSRDNTARAPSSSPSAATATAPAPSPYTDTAMAPAPSSSNDTAVEPVAPPPLPFIIVEGVVYCKTCKSRGYSSDMDASPLPGATAQLVCYGKKVVNVTGTVTDANGYFLVMFYDLRNFNPRTCKVFLGSSPTSLCDKPVYPPNKWIGLSLLKETRTVPPVGLQAIYCPTSVLFYGPANAGQCPSG

SEQ ID NO: 181956 - protein, 57 aa, Oryza sativa
  Clone ID: PAT_MRT4530_79189C.1.pep
MGSRDGFSDNLWLCRRFYNYSITRERLDNYSITRERLDNYSITRKQLVEFDKDYGMK

SEQ ID NO: 181957 - protein, 78 aa, Oryza sativa
  Clone ID: PAT_MRT4530_7918C.1.pep
FYFFFYSKLRVLFPFPCGGVVGSTIGWESSFLGGHTHILSIGVHPATSNRWSIALQSAGSKIRVTKIFPLPDMDTTIT

SEQ ID NO: 181958 - protein, 220 aa, Oryza sativa
  Clone ID: PAT_MRT4530_79190C.1.pep
MPMHCRQAAVADEMEARSHRIRIDQLVVVARARFPISHGAARTITCPAACVSRPVNLYRGKSCCLPYLDRPRHLTYSCRGKTSIDRSIDQPTLFTTPSTHPPGTAHATKRLDDLSHPIAAAVVKTYYVQMRRMHAHCVVTSCMQAAPRWMDRWSTLLRWALIVMSLLLTFCRPGPLSRLVSSPARRYNDDARNRCISTTRYNAAMPGFSTTSRAREADDN

SEQ ID NO: 181959 - protein, 78 aa, Oryza sativa
  Clone ID: PAT_MRT4530_79191C.1.pep
NPRGSMWHPPVCPIRFKKVSLPPKPSPYHCLLLTGRTNTDHIAPLPYPCIIRTRGVPLLEDSKVCRNYGYLWDPHGLK

SEQ ID NO: 181960 - protein, 82 aa, Oryza sativa
  Clone ID: PAT_MRT4530_79192C.1.pep
MAGGGQQPSTERKETSSAFGGGCCGGGFQMPLHYPRYKKADYEAMPEWRVDCLLREYGLPVDGGVEEKRRFAMGAFLWPDQY

SEQ ID NO: 181961 - protein, 894 aa, Oryza sativa
  Clone ID: PAT_MRT4530_79193C.1.pep
MTASVVSSVLQRLGDLVIQEATFLSDVPRQVSSMKAELSQMQCFLNVVDAKCLEGNSMMKNLASNIQDVAYRVEEVIDNAHFIFRRRKTSVSKYTHIFGDSIDLREGGKNIQVIRKEISEIFERYNRYNAVNSSTSTEAQPIFREDEDFYAQRLVPPGLDQGMDIVGFDHEIAQIKSYLLDQNNMNLTVISIVGQAGAGKSTLAKLAYSSVITEGYFHKYGWVSISPKYSALEVLRDLVRQIRGTGKISERKSMHLNFYGETEVSKLIFDFLKEERYLIVLDDIWTTDTWDKIKSVFPDKGNGSRIILTTRDMEVGQHPKTKVQIHTPDLLDEDKSWELFQKKAFPHDVQFTELEVVGKKLSKKCNGLPLALVVLGCFLSRNHNIHTWEKMVASVDWEIMKKEGDVGRILALSYHNMSNNLKACFLYTASFPEDYPITVHVLKKMWIAEGFVPNIRGYTQEEVAYRYVEELAQRCMIQIEERSKNIGWIKKIKVHDVLREWGIGQARKEGFLKVCSSGTDVETYYADEQRCYRVAFHGYFDNEVGKSVLNLRSVLAFNPDGKRLFSFNGLHLLRVLHFCSSLKTCTLPEEINKLVHLRYLGLEGSTVFMFPSYMKGLRNLQILEASTATVKALPSSLWSIAALKHVHVYQVLHWKAQEIRTKRSLQTLYVFSIMQCDALTWKRTIRSLQKMSQHVSWCLGIASTKRVKEKETQEHEEYNLDIRVDALESKVDGLELSGCFKERHVLNDVLPHHNLFPNFLLQLKISCPNILNDDPMPILERLPRLEVLEIVNSSYTGKRITCSSEGFLALRSLVLMDIGLEEWNLQQGSMAFLAVLTLKCTMLRSISNVLHQLDDLVELRLICMPQLSVDDHEPARGRGCRVMISVDEEQTSDT

SEQ ID NO: 181962 - protein, 105 aa, Oryza sativa
  Clone ID: PAT_MRT4530_79194C.1.pep
DRPHENAQKKGKRGWGPRGAGDSPLGGNPHYFGGGGHPGNRGPAPEGGTGSRGGGGFTDGGEKGKTGHPGEKGPPGKNRTPPGGEPKMGTRGGPKEGRGAPIRGG

SEQ ID NO: 181963 - protein, 57 aa, Oryza sativa
  Clone ID: PAT_MRT4530_79195C.1.pep
SCGVAFSSLHRASTFSWSDSPRSAPSFGESGPFGTTPALGKLELGAGAVPNGAYFFI

SEQ ID NO: 181964 - protein, 85 aa, Oryza sativa
  Clone ID: PAT_MRT4530_79196C.1.pep
FFSLKSPFLKRKNFCPLFYKKNAHPREKGVFFFSPKMFFFFKRETGKHFFSLNTFSLKNFYKGPTFFFPQKGKNFFYFEKTDLKN

SEQ ID NO: 181965 - protein, 484 aa, Oryza sativa
  Clone ID: PAT_MRT4530_79197C.1.pep
MAMAAAVHRFLGVFPAPSTPTPPPRQLSPRPHHIPPSLVRCCSSSPVCAATVAVAQPQEFVVVTFYKFVSIDDPRAEVSRHLHFLQGRDIHGRIYMNEQGINAQCFHQHGVLRYLPCLLSLYDNLTETGDMYSGPHKDAVAYADWLRKDHRFRDLLVQTSPSLCGHAFPRLKLRYKPSLVQLEGGCSHLPLVDPSMRATPLTPSEWRERLEARKCLDVSSSEAAGDSSGRRLLLLDVRNDYEWDIGHFQGAQRPNVDCFRSTSFGLSESEQEMDSSDPLNGIDKENTDILMYCTGGIRCDVYSTILRKKGFRNLYTLKGGVSNYLKEEGSAGWVGNLFVFDGRLSLPPATYKPGAGDDDDEEEEEGRNRSSSELGRCYACGSEVVELRHRNCANIDCNRLYLCCGRCVEELRGCCGTRLHGDHFIPSVNPPFQLLKIAKEALCMDVPRLTDTIGNKGMKTVWKFCVFVSQPSLADEMVYERFAG

SEQ ID NO: 181966 - protein, 627 aa, Oryza sativa
  Clone ID: PAT_MRT4530_79198C.1.pep
MPPAYTAAEPVSHHHHLVVVDPSTVYSPPLPALPPPPPQQPQSALVLSGGKEDLGALAMLEDSVKRLKSPKASPGAMLPKPQADAALALLAEWFLESSGGVSLSAVANPKLRSFLRHVGLPELQRTDLAGARLDARFAEARADATARVRDALFFQLAADGWREQVVTLCVNLPNGTSVFHRGVPVPAPAPSDYAEEVLLDAVASVSASGSSNDLHHCAGIVADRFKSKALRDLENKHHWMVNLSCQIHGFTRLVRDFARELPLFRSAAAKSAKLAAYFNAKPTVRSLLHKHQIQELGHASLLRVAHVPFNSSGSDYRAAFEMLEDVLTSARPLQLAVLEESYKLVCIDDSAAREMADMLQDGSFWSEVEAVHLLVKLIMDMVKEMETDRPLVGQCLPLWEDLRGKVRDWCDKFNTDEGAALNVVEKRFRKNYHPAWSAAFILDPLYLIKDASGRYLPPFKFLTPDQEKDVDMLITRMVSREEAHIAVMELMKWRTEGLDPLYAQAVQVRQPDPSTGKMKVANKQSSRLVWETCLSELKSLGKVAVRLIFLHATARGFRCSPSMLRWLSAPGSLAGGIDRAHRLVFVAANSKLERRDFSSDEDKDAELLTEGDDDVLNEPGSLERSSV

SEQ ID NO: 181967 - protein, 68 aa, Oryza sativa
  unsure (1)..(68): unsure at all Xaa locations
  Clone ID: PAT_MRT4530_79199C.1.pep
YRTTTIVDMXVYIDHRWVRANQMXYGIKTGRRDRLDXISILTFKPKPCHVRQISSGNLQINRQHYYYP

SEQ ID NO: 181968 - protein, 156 aa, Oryza sativa
  Clone ID: PAT_MRT4530_7919C.1.pep
KSVDAMLPMVKKEGNMVGKAMRDAWRRTSKFSISQRDFARKRKYLCRPMPPYGTLEYRTVTCSMIKVPNPHTVVTHSKDSIASASLLATSPLFLQDDDDDDGENVIGDLVSAEDGSCRCKAHSVQPLRHCVLYIKYLWFPVSSACGVSREDKYAVQ

SEQ ID NO: 181969 - protein, 389 aa, Oryza sativa
  Clone ID: PAT_MRT4530_791C.1.pep
MAARSPYFVPESEGIRAGESPAAALRRILASPGAHQAPCCFDALGARLIQRAGFPICFMGGFCVSAARLGLPDAGLISYGEMVDQGRLITEAVSLPVIGDGDNGYGNAMSIKRTVKGYINAGFAGIMLEDQVAPKACGHTEGRKVISREDAIMHIKAAVDARKESGSDIVIIARSDSRQAISIDEALWRVQAFADAGADVLFIDALASIEEMKAFCAVSPKVPKMANMLEGGGKTPILSPAELQEIGFSLVVYPLSLIGVSMLAMEDALIAIKSTGAPRPGSLPSFQEIKDTLGFNRYYKEEKQYATVQQAQPLSTNIVLRLKITEKSGTQKINEGIPAGILEKISKAIPGLAGVNLTEILQGADQSQKGKLLLDREDATGDRIQVSIE

SEQ ID NO: 181970 - protein, 290 aa, Oryza sativa
  unsure (1)..(290): unsure at all Xaa locations
  Clone ID: PAT_MRT4530_79200C.1.pep
MRREGEKKGGVFSAISGKDGEEADGKLTDGRERRRRRWFDDEKDGKPAGRAAGLRGGWCSRRRTRLDGAALRQPSGGAWRRTLRRGERAGEEMEACGDGRTGWRRGVLGRGGAAGDEEATTLHFQEHGTKWIDRGARGLGFYRKMVLGWRSKAVRRFRGRREMADGADALGGGSGGGAARCRCGVSGSASEHKRPRSGGGAPLPGREKEKGAVERRARPFRFWEERGREHELCLAALDARGVGRRAREDDAGDDCKKDGDCLEASTDTXVVVGAGDDRGWRCVTPRNSRI

SEQ ID NO: 181971 - protein, 307 aa, Oryza sativa
  Clone ID: PAT_MRT4530_79201C.1.pep
MTHRRCFEALDRTLRYLLSEEEPANAIRPFGGKVVVLGGDFRQILPVIQKGSKTTIIDASITNSILWPHITLLSLKTNMRLLRNDLMQIDKDELDRFAKWVLDISNGTVPTTVKNNESEPSWVQIPDDLLIKTDGKEKEYFSCDTICNSCEHIQDYDLLYPTEFLNSINVNNFPNHRLVLKKGVTVMLLRNLNQSMGLCNGTRLLVDVLGQWVLQCTVLTGSKIGETVFIPRIALNTTSSKWPFILQRRQFPIRVCYAMTINKSQGQTLSHVGVYLKKPVFTHGQLYVAVSRATSRKGLKILIEDDD

SEQ ID NO: 181972 - protein, 2331 aa, Oryza sativa
  Clone ID: PAT_MRT4530_79202C.1.pep
MEGQRRLGDEEGRCWRQMSGGGGCGLVMRKSTGGGVGSARGRPPATAVAEGRRRRRLGSGGGGSCRGAAEATTPLSAHRLRCSGLTNSVELKPLVLFKFTTPQICHRSHRPARGSVPASLSIAKSIVHFVSTQDRLRLCRSASSDTLVDRQGRSAILFHWYGSSDGNDMSLVGVTMKLSNEDGAKARRRPPDSMPSLGVSSIGVSSVSLLNAVASHCQLPLVSYLWEMGSDGVLLAGVELVLVSGEHSGQRGCRFFWCVAFEPYETAHEPAAREAVRFLQSIYGFVVHDYNFRYMMSSRFVSPQSARRVQRAQESRERRHFAIGQADIVFPAVVRGYLKTPVLGVTEQPSAAQTTEEPLASGTESVIGVEQPTPAIAPQPNVPIVSRKRTLLDVPSKVASVNRERRRVKRTAGENPSFVRGVLNVHDSLFAAALHPDRSYYGGPSHECPYCGVVFWYQERVKKSSTLSKRKIVYNLCCKGGKIELPELRIPPPFLAKLLRYDGDARSKRFLRQIRSYNTLFSFTSLGADVDKSINTGSAPCVFKINGVVHHRIGSLLPRRGAPLKFAQLYIYDTDNETKNRLNMFERERSDDSGPDKDIVDNLGAMLDDNNELVKAFRYAKERLDGYGDEEITLRLMGCNVKDEVQYNLPSSGEIAAIVVGDCSKKTYTYDVLVKSTDNRLRQVSALHPSYMALQYPLLFPYGERGYHLGIKYTDFPSLLPTARCYVTMLEYYRYRMHYRLNKPNPYTCCGRLSDSLVVDAYSTVESSRLQFIADHQPDLRTECVQGIDVAIDHGLSTGDSVGQKYVLPTSFTGGKRYMVQNYQDAMAICHVLGAPDLFVTFTCNSKWQEIYDALIYEPGQVPSDRSDMIVRVFNMKVNEFIADIREGNTFGPVLAVLYTVEFQKRGLPHIHCIVWLAAQNADFSAAVVDGFISAELPDVFADPLGYALVEEFMIHGPCGVDNKTCPCMKKVKGACSYADVRTFNGVTYSTFKEVCEARGLLDSDNEWHLLFDEAILSANSYQHRQLFVTIVMFCSVTNLLALLLKNLADVFAKSGGSIADYDLPQTNNVPDHVVGNRILDEELNVDCDALASHANALIPKLNRVASLLLPRGRTAHSRFKIPIEISETSICSIRRGTMLADVIQKTSLIIWDEAPMTHRRCFEALDRTLRYLLSEEEPANAIRPFGGKVVVLGGDFRQILPVIQKGSKTTIIDASITNSILWPHITLLSLKTNMRLLRNDLMQIDKDELDRFAKWVLDISNGTVPTTVKNNESEPSWVQIPDDLLIKTDGEKIPALINEVFPDLLNNHRNPEYLSCRAIVCPNNATVDDINSYVVNMIPGKEKEYFSCDTICKSCEHIQDYDLLYPTEFLNSINVNNFPNHRLVLKKGVTVMLLRNLNQSMGLCNGTRLLVDVLGQWVLQCTVLTGSKIGETVFIPRIALNTTSSKWPFILQRRQFPIRVCYAMTINKSQGQTLSHVGVYLKKPVFTHGQLYVAVSRATSRKGLKILIEDDDGNCSSETRNVVYHEILQAIEMDHCIISKLEPGLGNPRICVRLSRMWNFNDPKDDTSLLHVALVLVDETEGSIAAQIFPLDDKLFKPLLSEGKIYYLTHYIVRNCSRSYKPVSNSLAIAFTRWTVVEEYVNAPTSFPFYTYSLKSFNQLSALLDSKDSFTDTIGVIIEVSSITFVRSRTRDGDSLKRNVFIRMQTMPLFVFRFGETALLSFLQKWSVFSRGQSEQQIVIFVGTLVKGFKREIYLSGNSACKWYINIKCDEVRSLRDSLATQKEPVRWLDLPWADAVRSAAEIKSIIEIKDLNPFVHKMQEDCKAIWKNISLWRWRLPSNCASITKRIIGKSVENLLDQHPADEAYIPKQITDLLEKQFTWNVSMTDTTISIGSISFQVNNIIGNGSQPPLLLQSPSSSQAVSSVPLLTMSPSASEGMSIAQQSLTATTSLGFNSPPVTPMQGKAVDQECSSKTPTGIPVRSEDEDDDNATLATLKCPSPATKHSASKAPRKRLDLDITFHLYATYFCFVSVFVSFMHKPATYVRYFHVDLAMSYGTNRPLRGTKFSKLKPLSQLLADIIYHNAVVVTVLGAGTPTKTKVVAMVSTISKLEPGDIALLPFKHRMYLALFMDKDEQEQAAERLIEQKTYTFQTTRLAFDPFKPNMHSVKNPLRQRVIIALEGIPPETWNDEATPELLDNSCMVEEIYEQYHIQDVSIFRLAAWTTDVNLIPKIMDWNIETKGPQHTSKVDWDREAATATVLVHIEKLFDYSDDGSGSDTDGEMLRHYEETNSRPGSYHHEFSVDTKSSGLKSRAFRSSIHICTTTPSTSRA

SEQ ID NO: 181973 - protein, 92 aa, Oryza sativa
  Clone ID: PAT_MRT4530_79203C.1.pep
MSADTPRCLDVNPDAPFTCGNYHRSSGCPHAPAIRTAHQPISLIGNCFCFLFHGHRHIPTSPHLIIDYCVKVAREQWAHGESSVDNIMGVAT

SEQ ID NO: 181974 - protein, 36 aa, Oryza sativa
  Clone ID: PAT_MRT4530_79204C.1.pep
HTFAHSFRRIKHVHADSWLQALAKNAALEGLIDLIP

SEQ ID NO: 181975 - protein, 277 aa, Oryza sativa
  Clone ID: PAT_MRT4530_79205C.1.pep
MEVDETNDTDEIIVDVFDEISRRLGFAYSDFGNYGGCVGDEIRCLAPLLGGPFYTADHLDPQVRLGDIGSYLNKSSSDAASLKNLYTEGALPPNQTMVREQGDLLADVVTQRVRDVLISPASTADELPTPLRDKPAADKAAVINDNRDEILILYLTQDTGSLSPHPKRRIIKKAADKTVSAISTQSGDEVATSAIPAAASPRAGAAPVIAESAPSAAVPVAAPPPPTPMGPLTWSQKMTESRRCRREILADRMSRVLGYVGTRVYVVHQADKRQGLY

SEQ ID NO: 181976 - protein, 93 aa, Oryza sativa
  Clone ID: PAT_MRT4530_79206C.1.pep
YISSFIHQFGKHSLSTFYTGNYAKQWRIHKQKWCGSFPQCVSVCLCVCAEAQLNTVPLVIKREEGRSKNITVRVVPISPVWANSSWSLIISGR

SEQ ID NO: 181977 - protein, 218 aa, Oryza sativa
  unsure (1)..(218): unsure at all Xaa locations
  Clone ID: PAT_MRT4530_79207C.1.pep
MALGTGPAHAVYFFTFPLTHHLAVDLSDPVSLACALAGVEAVCPSSTWSPPRPTRDGSSFLSLHCLAVESTRRSIAARRREARQKEDEAAGGEAEGLGDGGDGSGVGEVEEEIGDGGGKQEEVVVVSGEVGDNRVEXRVEHGGGEEEEEEQRVEHGGEAAGGEAEGLGDSGDESGGGRRGQRRAGAGERRGRAGSRRRPPLDLPPWRCLQRPFEHSLW

SEQ ID NO: 181978 - protein, 52 aa, Oryza sativa
  Clone ID: PAT_MRT4530_79208C.1.pep
SGRPTRSWTRGRTLDAMMATTDLWRTSSCHMAGSRMICSKEGPILHCVHYRL

SEQ ID NO: 181979 - protein, 117 aa, Oryza sativa
  Clone ID: PAT_MRT4530_79209C.1.pep
MAGLHVYQTDPEVWKTCLLLGGHRFVWTGAVALHGRWISDDYTFVPSQGEASASLKEKVAEEVTAVSSVPAAAGGSGIKRIPWAWASGTARYRQKFSCSEDPSFSSCRTFLLRGIME

SEQ ID NO: 181980 - protein, 331 aa, Oryza sativa
  Clone ID: PAT_MRT4530_7920C.1.pep
MHITHTTRGHEASPENLSIYSSQNHQPGQHTATCFTLLQINMGLVHALLPFAAAAALLLLAAPPPATADDPGLAVYWGRHKEEGSLREACDTGRYTTVIITFYNAFGHGRYSLDISGHPLAAVGADIKHCQSRGITVLLSIGGQGGAYSLPTNASAADVADNLWNAYLGGHRAGVARPFGDDAAVDGIDFFIDQGGADHYDDLARRLDGYNKYYRGRVGVLLTATTRCSYPDHRLEKALATGVFARIHVRMFGDEQCTMSPRYSWEKWAAAFPGSKVYIGLVASPEQDSAWMFQKDLYYEMLQFVRSLPNYGGLAIYDRYFDKKANYTGEG

SEQ ID NO: 181981 - protein, 257 aa, Oryza sativa
  Clone ID: PAT_MRT4530_79210C.1.pep
MAIDHASPFSLKNRGDMGGRGYEEEEVENQRWPPWLKPLLSTSFFVQCRIHADAHKSECNMYCLDCMNGALCSLCLSHHRDHHAIQIRRSSYHDVIRVSEIQKVLDITGVQTYIINSARVVFLNERPQPRPGKGVTNTCEVCERSLLDSFRFCSLGCKIVGTSGGYRPRKKHGGCGGGGGGGDGGKKKKKRAALKDARYESEDSCTSTSGGSSDKSSVVQSFTPLTPPPTSASYRTGNKRRKGVPHRSPFGSLIVEF

SEQ ID NO: 181982 - protein, 84 aa, Oryza sativa
  Clone ID: PAT_MRT4530_79211C.1.pep
SSCCCPRINDVLIADVVSLRRRCVSLIWLAEKSLCLLDHAPPGAPVLPRLWTCGGGDASSFVQVRGWGCSKIRTSPRIRQQRVD

SEQ ID NO: 181983 - protein, 116 aa, Oryza sativa
  Clone ID: PAT_MRT4530_79212C.1.pep
MALNHLYFLILYIHPSQRDGSMEDFLPLSGKHSTPPRGQGNWFEQDANQHPELKQTWGSKELPKKKTQGKGPIFLWSPTPPCHHHVLRIFFHPVLFAQASTIPPTAFDPRISPGCA

SEQ ID NO: 181984 - protein, 685 aa, Oryza sativa
  Clone ID: PAT_MRT4530_79213C.1.pep
MSFLPLILFFFLGLNLASITNGDDNHQFVYNGFTSANNLSLDGVAMVTPDGLVELTNDGIRVKGHAFYPSPLHFRETPNGTVQSFSVSFVFGIVPTFSDLNSGHGITFVIAPSKNFSDAIAAQYFGLFNSETNGNDRGHIFAIELDTVKNTEFGDMNDNHVGIDINNLTSLQSYPAGYYEESGRFKNLTLASMEAIQVWVDYDREATRINVTMAPLAMAKPVRPLLSATYNLSGLLMERSYIGFSSSTGATSARHYLLGWSFSMNGGTALAIDIAKLPKLPRVGPKSDPSNLLQIILPVATAAFLVAVGATVFLLVRRRMRYTELREDWEIDFGPHRFAYKDLFHATEGFQNKNLLGTGGAGRVYKGMLLGSKQEIAVKKIPQNSKESMKQFVAEIVSIGCLDHRNLVHLLGYSRRKGELILVYEYMSNGSLEKYLYGQDGRCTLDWGQRFHIIKGIASGLLYLHEEWEKVVIHRDVKPSNILLDNKMNAKIGDFGLSRLHDHGANPQTTHVVGTIGYLAPEIALTGKVTPLADVFSFGILALEITCGQKPMKQNAQGIQQTLVGWVLECWKKGSVVDAVDANLQADYDNAEAGGLKETRFESQGGGGECEAAAAARRGGGGGRGGGGGSEHGEASGGGSSRCSRRRRGGGGGRGEQRQGAAAARRGGGPRKMGRGEARRSASQP

SEQ ID NO: 181985 - protein, 163 aa, Oryza sativa
  Clone ID: PAT_MRT4530_79214C.1.pep
QSVPQPVSMRLGGEGHRVTLVHRPALDQQWQRLQTLSDQNYQQRQKAIAYLMTPGIFERGRDGVSTCRPYPWEWKLTHNQGSFISMPTDRAVAISPRIRDRQRNPGHSIPAPQVFAAPPGTVYYLNQPQGLFADQDNAPKHLQQTRKVGYSHLLWVNLQEVNR

SEQ ID NO: 181986 - protein, 52 aa, Oryza sativa
  Clone ID: PAT_MRT4530_79215C.1.pep
GPVQVGLSTDPRERPTKQGRNKDGDQFREKRDELKNKQNMGGGGIKGKTEAA

SEQ ID NO: 181987 - protein, 80 aa, Oryza sativa
  Clone ID: PAT_MRT4530_79216C.1.pep
SHEVAVHIWHMLIAKLAGSLWLPVCLRNNGECLPYHEKMQHSSDSLSPRKRIQGVFLRAAVDSPRRTVQQISPMTEGEAT

SEQ ID NO: 181988 - protein, 213 aa, Oryza sativa
  Clone ID: PAT_MRT4530_79217C.1.pep
MTIAGIGTAAATGLRLPWLQHEQQQHHLAQQSRLDKLRPEGAAGLRPAGRPAAMYDHAEATAGHGSCAFPEMLNFPSQRPTGPSATELLASQMNANYRFGFRQAAGGVAGLAGGEGASRLSTKHRTGGVEVVAARFQVKRRWSRRARAGDGRRRGGSRAVPGRVARGSAREGWRRAAPRWRPRGPWSSVRVDMAQRDNHVDTRRVLHIGANLP

SEQ ID NO: 181989 - protein, 166 aa, Oryza sativa
  Clone ID: PAT_MRT4530_79218C.1.pep
LQSNIAILLISLCMYISQRKQTRMSKQSSHMFPCNPEALPIHPANVMEILKPRRKSKSQLPSSNRSADSRRVVHHAYKDRGGWFVRVILNQRSSSGACVVGVRERMSSTGALIVEVCHGKTLSGCSKSRTCSRRSWRKKCRSSHPCLRFVGCLKDEEICLSVLPRA

SEQ ID NO: 181990 - protein, 302 aa, Oryza sativa
  Clone ID: PAT_MRT4530_79219C.1.pep
MGARRRQLAIRFLVVMSSAKTKQHEQQQHHLAQQSRLDKLRPEGAAGLRPAGRPAAMYDHAEAPAGHGSCAFSEMLNFPSPRPTGPSATELLASQMNANYRFGFRQAAGGVAGLAGGEGASRLSTKHRTSGVEVAAARFQVKRRGGRRARAGDGWRLGGGRAVPGRAARGSAREGWRRAASRWRPRGRRSSGACGRRARAGDGQRRGTRRSPPPPPFPRCAGACPRSRTGPSALAAPFVLATTRRRSSSPPPPPPASFLTGGGWASASFLPGRREEVRRRRPRTPPVPVPSPSSHPRAAVHH

SEQ ID NO: 181991 - protein, 86 aa, Oryza sativa
  Clone ID: PAT_MRT4530_7921C.1.pep
LQSYDHPAVPGGTSQPLCCHPRSYQCWVRSLAVSGHTVRYLLAVCPLSTGFKGYQSLCSGTAASNTYTGQVLPKPLCPPKAINVAN

SEQ ID NO: 181992 - protein, 156 aa, Oryza sativa
  Clone ID: PAT_MRT4530_79220C.1.pep
MQQINWFKFEVRMDTIYDVGPTPTSPDTWSTRLEQPNQRKIAATISLSITWAGNHLQIRPRFPLAGDGEEASCRRRRGDRMGAVVTAVIAIAAVVLGWITIEMACKPCLDSGRRAMDRALDPNYDPDEPTAAGAAANEPLLADLSAASAAALAKTI

SEQ ID NO: 181993 - protein, 428 aa, Oryza sativa
  Clone ID: PAT_MRT4530_79221C.1.pep
MKNTQLDHDRHSMEEYSISDIELSSEISGQYQDPSQQIGQWYGIPSPNQDEHHGHTGHHIRHFLQLGWDYLHLTYKQEAANLGSSQNGHFPYRWRRASQYHEAGIEFRRRAYSESNRHSLLDIKLRDAVLEIPFLLVDESTSFLFRNFVALEQTCPKVGNDVTAYVIFMAKLMNMPDDVALLARKGIIAHHLRTDRDVSQLFTKLTKGVVFDFYGNYYLMPLSLALEAHYQNRLHRWIAWLKHNHLSNPWLAVAGLAGVIVLFCTVAQTVLTVLSYVDPRRWLGASFSATAPGQRVGRSGDDAGRSGDGAGRSGDGARRSSSRATGSSPGQFPFPTIAGAAPLSRPPRQLSLLPPLLVGAEAVDDGGAAAARRRAERQWNGGGAELRISVALSSLMSSGDSGLSMRDWWLDASIPFRISYQKSFDALC

SEQ ID NO: 181994 - protein, 123 aa, Oryza sativa
  Clone ID: PAT_MRT4530_79222C.1.pep
MREERATEIRSSAPPPFHCRSARRLAAAAPPSSTASAPTRRGGSRESCRGGRERGAAPAMVGKGNCPGLDPVALLLLRLAPSPLRPAPSPLRPASSPLRPTLCPGAVAEKDAPSHRLPDPPRR

SEQ ID NO: 181995 - protein, 202 aa, Oryza sativa
  unsure (1)..(202): unsure at all Xaa locations
  Clone ID: PAT_MRT4530_79223C.1.pep
LDSQVITGFIISCDRSDRRSPRSDRPTLCRFRFRVVYLDIRVYFMIMTSRWILYSSSICVYRVSTVXRRSTGGQTGGIRXSDQRRQQARQAASAVRPEIQHRSDRRHPLGQTGRSISVRPTSVDFEEIGVGRGGKEAAASREGGGRXGRRARAAAGGQGRSAARSPLLRACEKQEAHGPFSKPPPPTRQPSHWRRVRLQCRR

SEQ ID NO: 181996 - protein, 672 aa, Oryza sativa
  Clone ID: PAT_MRT4530_79224C.1.pep
MTEMEDGISDVEIEELGNSMKDKLKKYMSLDTVHADGSEFCLIPRIHEHIRMIDRDSYEPLILSIGPYHNGSSALSFMERKKWNCLDYILKLSCQKGLKDYLTIINRLEKRARSCYSGDIKMNKRKFLQTLLLDGCFVLVSLSQYNEFLWPDSLRYIPSPSNDKTFEGALSFGDHQKVTGRNESQQVNKGKQSAMKNTQLDHDRHSMEEYSISDIELSSEISGQYQDPSQQIGQWYGMFVPHDLLLLENQISLFVIQGIHEIVVSKLASKLTTTTALRRSIVQCIEQFVPCYPKAIRESNRPKDFDHLLHLCHMYVRPSPNQDEHHGHTGHHIRHFLQLGWDYLHLTYKQEAANLGSSQNGHFPYRWRRASQYHEAGIEFRRRAYSESNRHSLLDIKLRDAVLEIPFLLVDESTSFLFRNFVALEQTCPKVGNDVTAYVIFMAKLMNMPDDVALLARKGIIAHHLRTDRDVSQLFTKLTKGVVFDFYGNYYLMPLSLALEAHYQNRLHRWIAWLKHNHLSNPWLAVAGLAGVIVLFCTVAQTVLTVLSYVDPRKHECTFKSATTLQCDHVIYDASVPILGVSLFYRCFINLFSSFLIPQGAFDKEGYPELLHFHAFNLVNPFGAYSQRTFQTGLLHSSTMGLNILICPLITGAMQVLISHISNRAYYDMLGN

SEQ ID NO: 181997 - protein, 161 aa, Oryza sativa
  unsure (1)..(161): unsure at all Xaa locations
  Clone ID: PAT_MRT4530_79225C.1.pep
MMPRPSTHCQSAQPAAPTSSALWGSSPPTGGGTGGQERESYLLPATGTRSDDGALVPVHGAPLLRPHCLLHRPHHPLPPLLSLPHQPPPRPSPLPPPHPPCIXPLFPSSPPLPSTTGIPAPARSLFCHRRDPAPAPTPSPLRSPESEWCHRRRSLLSLLGH

SEQ ID NO: 181998 - protein, 71 aa, Oryza sativa
  Clone ID: PAT_MRT4530_79226C.1.pep
ARFMWSYEHGIVCICTFWSRSPASSPTLVPSATSSWLLKTASFQTCTCKPCLTAFICLSIPLIPSRRIFTT

SEQ ID NO: 181999 - protein, 134 aa, Oryza sativa
  unsure (1)..(134): unsure at all Xaa locations
  Clone ID: PAT_MRT4530_79227C.1.pep
MGWPVITASARSDRHRLGLTDYGSVGSVSAIPSSIISASRRPKATLAGRGDGGGGEKSSLARPVLWXVQEGAVLLPQPRPPALRPQRPAPNGGPRPALRVGDEEVPRALGPASAGVRPAPGTPPSPRAPPPPAA

SEQ ID NO: 182000 - protein, 80 aa, Oryza sativa
  Clone ID: PAT_MRT4530_79228C.1.pep
KISYISVLPQGLLNHSSATNETGPAMSQLNQTCLCEAAFLISRIMVETCPISGRSFGSGIEQDRPILIHGMIQFSITSVD

SEQ ID NO: 182001 - protein, 365 aa, Oryza sativa
  Clone ID: PAT_MRT4530_79229C.1.pep
MAGARPPWPVVLAAAVVLAVAAPVQAAPQVPCYFVFGDSLVDNGNNNDIVSLARANYPPYGIDFAGGAATGRFSNGLTTVDVISKLLGFEDFIPPFAGASSDQLLTGVNFASAAAGIREETGQQLGARISFSGQVQNYQSAVQQLVSILGDEDTAAAHLSQCIFTVGMGSNDYLNNYFMPAFYNTGSQYTPEQYADDLAARYAQLLRAMYSNGARKVALVGVGQVGCSPNELAQQSANGVTCVERINSAIRIFNQKLVGLVDQFNTLPGAHFTYINIYGIFDDILGAPGSHGLKVTNQGCCGVGRNNGQVTCLPFQTPCANRHEYAFWDAFHPTEAANVLVGQRTYSARLQSDVHPVDLRTLASL

SEQ ID NO: 182002 - protein, 264 aa, Oryza sativa
  Clone ID: PAT_MRT4530_7922C.1.pep
MPKQTCLCSCAIDVIRVNDIQTFVGPITYNGYSFKVNGNVNRAQPKSNRCIKCKLACNCTKTHKHKNESRNIHLESCRTKPKPKVKISNSCTKSVARCKDTGRRLLAAGYLASGTGQRPQQERQKCTLTSGRVSRASGSGGEGMDNSAEVAWPQFHGRESHNDGGGMSVDLRLRARAERMLTTATKVAGDPTAAEWDLLRRRTEKKRLRRGCGGSNPERGGCVAAVIRSEEEERRPQRMELATADGRIRRRRKGTSDTVQRSEE

SEQ ID NO: 182003 - protein, 60 aa, Oryza sativa
  Clone ID: PAT_MRT4530_79230C.1.pep
HSIRRHRLDGGRIPASGCRVWRLLHRYVCQARQVPLYWLIRVSGAGPWMSLLSVQAWWAV

SEQ ID NO: 182004 - protein, 93 aa, Oryza sativa
  Clone ID: PAT_MRT4530_79231C.1.pep
PRVRPRVHKKLGAPNVGPPMSKVFPGSRKRDFKRAAANLPAFFNVDIPNGGGGVCYWLAKFGSKLGYCNQLGMYLVWLLKKKVFSFCLEANVW

SEQ ID NO: 182005 - protein, 129 aa, Oryza sativa
  Clone ID: PAT_MRT4530_79232C.1.pep
PHSSTFALFLRGPSYLSKGENLPGSPSENFLAAHSERPNQDRGPPPAFQFFTATWGRVTHSRFKGLGFSFRWFPNQVQHQHLVRPLRLPPQAVAGLIFRGFQQFSTRPGRQAAKHSDHWKPFSLEERTA

SEQ ID NO: 182006 - protein, 258 aa, Oryza sativa
  unsure (1)..(258): unsure at all Xaa locations
  Clone ID: PAT_MRT4530_79233C.1.pep
MDGAHAMSELEPLSTSSVCVPSSSQLAGFWPTSGTAGSTRIDCRLQPPENSLSMYHKGADTPNPIRGCRLQPRSTRIHARVAHTVPHAKPSFLFSLYVXTATQRCGSRRESHGWSKARRQTGNRGSGVRGLPHRERPRRLPPLLPMGGSGGGGGGSGGGGGSGGGGQERIRRQSVVVASVTAAASLLPSVAVVASGGSGGSGGGGEWIRRRWRRLRAIQRQSATAAGGYGGGRGQIRSPFFSPEFVSFSWNRTLGSSS

SEQ ID NO: 182007 - protein, 168 aa, Oryza sativa
  unsure (1)..(168): unsure at all Xaa locations
  Clone ID: PAT_MRT4530_79234C.1.pep
SPCVTLSFFLSQPSFLFSLXKTATQRCGSRRESHGWSKARRKTGDRGSGGRGLPHREQPRRLPPLLPMGGSGXGGGGGRXRIRRQSVVVASVTAAASLLPSVAVVALGGSGGSGGSGEWIRRRWRQPKAIRQQSVVVASVMAVGGSRGGGRAEGXIRSPFFSPDFVLF

SEQ ID NO: 182008 - protein, 137 aa, Oryza sativa
  unsure (1)..(137): unsure at all Xaa locations
  Clone ID: PAT_MRT4530_79235C.1.pep
RQLEXLEHLRRPLERTAPTNAGRRQQSHRPATAFPVPLTRTPTTRLKHTQDLVQYTAHFAGTATDLEEGVVELAEAGXGPHIVHAHHPALLLLLLLMRRPHRVPPPPPAADHEAARGPRWLIPDRSSVAALALTPGA

SEQ ID NO: 182009 - protein, 138 aa, Oryza sativa
  unsure (1)..(138): unsure at all Xaa locations
  Clone ID: PAT_MRT4530_79236C.1.pep
MADYPSRHRGENMDGFMAELGCMTIVVGFPXDPEYTKLRPLSGKLPHXRIRELHDHDLRSTAYRYNPRRGSSADASTFKSVSEENDTTFGRMCSGRKSLDKMHADLHKASKVLNDKKLVKIASLEDEISHLKKENAML

SEQ ID NO: 182010 - protein, 558 aa, Oryza sativa
  Clone ID: PAT_MRT4530_79237C.1.pep
MADEIKRRREEDDDMMLFVFPAMYMLCGMTNSEKIPRHISRLSGKERLQEILEGHVMDCKVAFRMEPHVFKTIANYLREEKLLKDSRGLRIEEKLGIFMFMLAHNASFQDLQYEFKHSGSTLHRHIKSIFKIIPALTYRFLKLPHADQTHWKIRTNPRFFPYFKNCIGAIDGTHIPITIDGEKAAPYRNRKGTLSQNVIVACDFDLNFTFISCGWEGSATDARVLRSAMNSGFQVPNVMMFGRLSPKASLLQQQQRHLQKKASPKSCSIQKKKVSPKAQQSRASWNPGPEKALVDLLHEHNNPHYRCQNGWTSEAWNKVVKEFRDRHPYVTMNKQQIQDKEKELKRDYRLLKEARKQSGASWDNQRCMIVADDAVWANIITSNEKVRKFSKNKSFPLFESLGELYDGQTAEGNMNFTSIEPFQHATLTQVNEYLERSDSFPDVNWVADDDETTEVQDEDNAVEHENQGSHITITSRANGEKNMRKRQSEEEEAKKREEASKVDDCSIRNCITVVESMEELSNEEKVKSFGVFKDAQNREIFMSAGPMTRLIWLRTMLV

SEQ ID NO: 182011 - protein, 688 aa, Oryza sativa
  Clone ID: PAT_MRT4530_79238C.1.pep
MADEIKRRREEDDDMMLFVFPAMYMLCVAFRMEPHVFKTIANYLREEKLLKDSRGLRIEEKLGIFMFMLAHNASFQDLQYEFKHSGSTLHRHIKSIFKIILALTYRFLKLPHADQTHWKIRTNPRFFPYFKNCIGAIDGTHIPITIDGEKAAHYRNRKGTLSQNVMVACDFDLNFTFISCGWEGSATDARVLRSAMNSGFQVPNGKFFLVDGGYANTPQFITSYRGVRYHLKEFGRGHRRPRDYKELFNHRHAILRNHVERALGVLKKRFPILKVGTFHRIKNQVRIPAAAAVFHNMIRLLNGDEGWLDNQPDNIEPTNFVDLPEGDSEYRNDVPSLSNQMISGNNIRDMIAKKMWEDYVLMMFGRLSPIASLLQQQQRHLQKKASPKSCSIQKKKVSPKAQQSRASWNPGLEKAIVDLLHEHNNPHYRCQNGWTSEAWNKVVKEFRDRHPYVTMNKQQIQDKEKELKRDYRLLKEARKQSGASWDNQRCMIVADDAVWANVITSNEKVRKFSKNKSFPLFESLGELYDGQTAEGNMNFTSIEPFQHATLTQVNEYLERSDSFPDVNWVADDDETTEVQDEDNAVEHENQGSHITITSRANGEKNMRKRQSEEEEAKKREEEAKKREEASKADDCSIRNCITVVESMEELSNEEKVKSFGVFKDAQNREIFMSAGPMTRLIWLRTMLV

SEQ ID NO: 182012 - protein, 104 aa, Oryza sativa
  unsure (1)..(104): unsure at all Xaa locations
  Clone ID: PAT_MRT4530_79239C.1.pep
LDPVLSLAASGGRGLPHRERPRQLPPLLPMGGSGGGGGGGGGGGQGRIRRQSVVVASVTATASLLPSVAVVASGGSGGSGGSGGSXKWIPRQWRPPRAIRRQSA

SEQ ID NO: 182013 - protein, 130 aa, Oryza sativa
  unsure (1)..(130): unsure at all Xaa locations
  Clone ID: PAT_MRT4530_7923C.1.pep
FFFFFRCTPTPALFISERNPSLTASGAQLNLQATTSTTXPHTQPNHTTGSTAQANTTFFLHPSTTSTRHTSINHTHSISQQFIHPTSPKVPIVPXPRFHQATWSLSLXVIIVNPHHMWSPHHLSSFVXHF

SEQ ID NO: 182014 - protein, 59 aa, Oryza sativa
  Clone ID: PAT_MRT4530_79240C.1.pep
QKLHADALLLIMFSFLILPSPSGIHTHMYMYSAHTYFRTLYSSPSQLIDQLYNLMEFNL

SEQ ID NO: 182015 - protein, 111 aa, Oryza sativa
  Clone ID: PAT_MRT4530_79241C.1.pep
MATATEEVAAAAAAAGKAPPPPPPAVVEEVKEAVEAPKPEEAPKAEEGEEKKAEGEKEKEKANNERKPRARKPRSAVPHHPPYFEMIIMCFVQLHMHLWPPLPSPPVVFVP

SEQ ID NO: 182016 - protein, 78 aa, Oryza sativa
  Clone ID: PAT_MRT4530_79242C.1.pep
KTATQRCGSRRESHGWSKARRQTGNRGSGVRGLPHRERPRRLPTLLPMGGSGGGGCGSRGGGCSGGCGQERIRRQSVV

SEQ ID NO: 182017 - protein, 88 aa, Oryza sativa
  unsure (1)..(88): unsure at all Xaa locations
  Clone ID: PAT_MRT4530_79243C.1.pep
MASTSTDSAAARLPPRQSAARQTFSSRVGSSHRXRRRAIAPDPFEHHAGIQPGRSPPFAISKATALPWQGSSTARGVRWPEDGGAAAH

SEQ ID NO: 182018 - protein, 971 aa, Oryza sativa
  Clone ID: PAT_MRT4530_79244C.1.pep
MMNRVFTVCEIDNKRFSFRRGRDQERVGGSPTPAIDPAVAVRVALHPRLLEVEVEVEVEVDLFPVMEQHISSRCRSPSRPRTPTISIQLQPPPVSIPSSAAAGLHPASAAAGLHPASAVAAALLPALHPSQSPALAISPSSLRIHRLRERARSRATAPDTKKQERHRRVGLAKVKLKELILLKQQQRHPQKKASPKSCSIQKKKASPKAQQSRASWNPGLEKALVDLLHEHNNPHYRCQNGWTSEAWNKVVKEFRDRHPYVAMNKQQIQDKEKELKRDYRLLKEARKQSGASWDNQRCMIVADDAVWANIITSNEKVRKFSKNKSFPLFESLGELYDGQTAEGNMNFTSIEPFQHATLTQVNEYLERSDSFPDVNWVADDDETTEVQDEDNAVEHENQGSHITITSRANGEKNVKKTKSTERERVEKTPKRNKRNDVVDMMGSYLEMRKRQSEEEEAKKREEEAKKREEASKVDDCSIRNCITVVESMEELSNEEKVKSFGVFKDAQNREIFMSAGPMTRLIWLRTMLCYAAGGGVSRTMCSPPSRSRAYAASGGTGGGHYRSRCLRSCSCDEHSRRRRHLYLVLDDWKEGYSLHKLDLSHVSGDGGEHEHNPINPRRLPAPLLRLGFRTLGSSPRVGALGSKIVFIALRDDRAVGMPYVEKVEEVATGNRVYLMLPDQSERSPPPPPPESGSPDLAVAMRYLEKVEQVYDDEVETADDDGDDDEYMDAEKKKHVVVAYSERLTERWSWGSTSSPPPPPFGGGRRRITGYALHPDGRTIFVSVAKRTPDHDDVGDRPDEEVTFSYDTERAEWARRGGWLLPFDGQAHYDAELDAWVGAIGSRAGPRLVACDVVPAAAAGDRRPAPPPPRWTFCEQPLTFLGAESHQSLGDPKLLPMGGGAFCVVVESAPRGADSVGDGDKLLLRVAVFRDKYGKNGELFMTTAAGGRGSCQTHTYVRSRYLVDFHAPAFWM

SEQ ID NO: 182019 - protein, 254 aa, Oryza sativa
  unsure (1)..(254): unsure at all Xaa locations
  Clone ID: PAT_MRT4530_79245C.1.pep
MDRAHAMSELEPLSTSSVCVPSSSQLAGFWPTSGTAGSTRIDCXKSADTPNPIRGCRLQPRSTRIHAKVAHTVPHAKPSFLFSLXCKTATQRCGSRRESHGWERPEAGGRGGNRXLLPLPHASRRLPCGGRGLPHREQPRRLPPLLPMGGSGGGGSGGGGGGQGRIRRQSVVVASVTATASLLPSVAVVASGGSGGSGGXGEWIRRRWRQPRAIRRQSAMAAGGSGGGRGWIRSPFFSPEFVSFSWNQTLGSSS

SEQ ID NO: 182020 - protein, 33 aa, Oryza sativa
  Clone ID: PAT_MRT4530_79246C.1.pep
KLLNHPFIKKFGDKDLDLGILVETLDPPMNKSG

SEQ ID NO: 182021 - protein, 58 aa, Oryza sativa
  Clone ID: PAT_MRT4530_79247C.1.pep
MLCKATNSMNMIAIHPIYGSSLLVLLAPGEVQDLVVVVLGVKLFVLLSGMITSNVQVK

SEQ ID NO: 182022 - protein, 101 aa, Oryza sativa
  unsure (1)..(101): unsure at all Xaa locations
  Clone ID: PAT_MRT4530_79248C.1.pep
SFRAMPTILLFLLVEGTKTVGPSKIPALTRRRPSVFVFSRKKLVKLPGPSMEVVKKGGSMAFANXIGTKLNLFGITLGFNLKIAPKVLIKFRKEGKTALAG

SEQ ID NO: 182023 - protein, 60 aa, Oryza sativa
  Clone ID: PAT_MRT4530_79249C.1.pep
ARLLSSPCRPLARTASSAKHGSASTGSLAPPPTTPPQPLFLHAGASHDHQNIASRARRGE

SEQ ID NO: 182024 - protein, 122 aa, Oryza sativa
  Clone ID: PAT_MRT4530_7924C.1.pep
MASTGGRSMALSLLLFAVTLSLLEMYRGRFASSELMTIAGGFVSSLLFLFLLTFIGNYQEANGVKTGWGAVVVAELTALIVAGTVHRVCITTCFLFSAGFLYEVDKLSGMILAKSESKARRH

SEQ ID NO: 182025 - protein, 288 aa, Oryza sativa
  Clone ID: PAT_MRT4530_79250C.1.pep
SYKQLALAVEIWLQRASFPSLRRYHEVPIRRLIAGIPPRPTYPRRHRGRASNTRLPPSRTPRQTSNPHPVVNSGASRRRIQRQPPPRRIHPAVARTRCLIQPSAGASTHPRRRQAHQNRRLHPAASTVASSRNTRASLPAVVVSVVPASSDALYTWTLKKDGSRHTYLEDPRRRPGLPCPRSPPFGGCMVNGELDPETPRTDARSRSTGRRRLGWRERVKTEDCLSPSRFWSPRSRRNAATTIAELPTNGQCNHLRARRCSIETSELTVARAVNEPSSSELTYLSSSS

SEQ ID NO: 182026 - protein, 116 aa, Oryza sativa
  Clone ID: PAT_MRT4530_79251C.1.pep
LHGPGLISRKSKPPAGGCVDFDLKIDEDSRVGAWIEVKKANPRLVRWALTLSETPEDDLGWGLSLRRGTEGSPERLQLEGFLNVHLGKATLQPGLMFNIDGRRCAPALVFQSSWFL

SEQ ID NO: 182027 - protein, 193 aa, Oryza sativa
  Clone ID: PAT_MRT4530_79252C.1.pep
MDELGVDSVPAPKRAREVAAKEEHATANGSGGEAGRYSGEEQWPGRGLEAREPARARIQRASGREAERPARRLTSRCRGRNRQRLTANEHGGRGCRSSGGAVETGRQLGIWEVAKWSEGREEAPFYRSGRESRPQEGADWRRLQWRRKEGRSERGTVGQRRKTTGGWAGRRGGPGAEGGRQCRWAGDERRDGP

SEQ ID NO: 182028 - protein, 58 aa, Oryza sativa
  Clone ID: PAT_MRT4530_79253C.1.pep
MRLMLCSATLSVPDVGGVGVADTHRKDQSGFEVGLNGSENGLARNLLVMNTGTSGQDE

SEQ ID NO: 182029 - protein, 486 aa, Oryza sativa
  Clone ID: PAT_MRT4530_79254C.1.pep
MGSNSRLHAVLIPYPAQGHVTPLLHLAKVLHSRGFHVTFVNSEYNHHRLLRSRGTGALAGLDDFRFETIPDGLPPPSESDNDDVTQDIPTVCTSFLTHGPAAFGALLARLNSEPGTPPVSCVIPDGVMSFAQRVASDMGILAPAFWTTSACGFMGYLHYAELIDRGYVPLKDESYLTNGYLDTVLDWVPGMPGIRLRDMPSFIRTTDRDEFMLNFDSGEAQNARHAQGLILNTFDAVEHDVVDALRRIFPRVYTVGPLLTFAGAAAARRPEVGAIGGNLWKEDASCLRWLDAQQPGSVVYVNFGSITVMSPAHLAEFAWGLARCGRPFLWVIRPDLVASEKAMLPEEFVSETKERGIFLSWCPQEQVLEHPATGLFLTHSGWNSTLESISAGVPMICWPFFAEQMTNCRYACTKWDIGLEIDTDVKREEVARLVQEAMDGEKSKDMRAKAMAWKEKAVAATEEGGTSSAGIDRLVEFLLARGDHAS

SEQ ID NO: 182030 - protein, 63 aa, Oryza sativa
  unsure (1)..(63): unsure at all Xaa locations
  Clone ID: PAT_MRT4530_79255C.1.pep
KTHXAXXIFMXYPINEPGHTLXKKLLXMKXXKYXIXQCIISHGXRXRYSADTLXWXEXVXDHT

SEQ ID NO: 182031 - protein, 182 aa, Oryza sativa
  Clone ID: PAT_MRT4530_79256C.1.pep
MPSSSSPAAAAAGEGSGRKKAAGRRLAGVMLLLRLASLCFAVAAAAFAATDGAALRAAPFRFLLAANAIVAVYSAFEVAAAAWEVAGGATLLPEAMQLWFDFGHDQGFGYMALAAAAAAAREAATCGSHGGGTACVQGDIAVGLGFAGFAAVAAAAAASGYRLACFLATGSRSPASPSSSPY

SEQ ID NO: 182032 - protein, 65 aa, Oryza sativa
  Clone ID: PAT_MRT4530_79257C.1.pep
MGIISLATTGPQYKCVHADSRGIWNLTAAAAIDRRCCCGFAGSGVRTDRRFGPETTSWVHALLPL

SEQ ID NO: 182033 - protein, 185 aa, Oryza sativa
  Clone ID: PAT_MRT4530_79258C.1.pep
MAACRSACEAFGEEEYCCSGAYATPVTCRRPTAYSTIFKSACPRAYSYAYNDGMSTFTCNAAAYTITFCLPPTRSNTSGVTPLISSPANGQNGGGEHLGVGGSGRRAGGRQASMVAGGGWRLWAETSQQRQPLLLPVPWAPSPTYHGRRRIELEPPSPLLRQARGAIAVPCSSSSTSARSFASLP

SEQ ID NO: 182034 - protein, 175 aa, Oryza sativa
  Clone ID: PAT_MRT4530_79259C.1.pep
MATAAQVAAQRGGSKAAARRHDDGGAWGRGRGRGGKMKGMCGDGDGRAARRDTGLGATTTAMRRRCGAAAARGARRRRDGRAARGRGARGGDATATGRRRGDGTGDSGDGGARREAMRRTRGDGTATATAHAAARGARRRGSDGDGARRHGAQGDDATGDSGDVMAARRVRQRRG

SEQ ID NO: 182035 - protein, 77 aa, Oryza sativa
  Clone ID: PAT_MRT4530_7925C.1.pep
LYEDQPEIKARELRREKGAGGLPIIDTSGTKARGNSNSRDGQYLRTAPNIYKDYRTTTAKDSPTAAQQHPSGATTKA

SEQ ID NO: 182036 - protein, 134 aa, Oryza sativa
  Clone ID: PAT_MRT4530_79260C.1.pep
MDSPATPTEFSPLLSLVPRNESCYTKEDDDANSPVQRTTTNDDKRRPATRSDGSSARVNNDDGAPAVFGGCEGAAGVPLLRAHPTAATDGNSDGYRGGATWLDGRRQRRRLGQRGGGATGDEGAWDLGQTEEDD

SEQ ID NO: 182037 - protein, 79 aa, Oryza sativa
  Clone ID: PAT_MRT4530_79261C.1.pep
LSSPSTTTSLLRSCRNPWRRLWSKNCARRRVAPGPRRLRRRVQGEDRLPKEDDFALTSSPSRGPRKPFRPIRPAIARRP

SEQ ID NO: 182038 - protein, 86 aa, Oryza sativa
  Clone ID: PAT_MRT4530_79262C.1.pep
MANAGLRAYREVLRLVRRLPADARPYYAKYARENFVNYRDLSADDDLAALLRRAYAHSSWVLSKYSIDADAAAGRLKEVCGAEGGA

SEQ ID NO: 182039 - protein, 76 aa, Oryza sativa
  Clone ID: PAT_MRT4530_79263C.1.pep
SSLQLLMCSILPPSLSISTFTSYLFLGCPFFDSCSPWHPLCFFGPTSASVKKWVSERCGIASRLYTIALSKGRYGG

SEQ ID NO: 182040 - protein, 49 aa, Oryza sativa
  Clone ID: PAT_MRT4530_79264C.1.pep
MEPKGLQQVGGGHGSTAAASGGATGAAPAHGLLVDGVLVGLLATIALVG

SEQ ID NO: 182041 - protein, 155 aa, Oryza sativa
  Clone ID: PAT_MRT4530_79265C.1.pep
MPSTIRRCRPSPAGRGHIAAQSPIPIFPSRCLAISRSPRPFLQIRAKSCSPSSAPPLGSRSYAVSLQPSTAREDRPGAEVGRRGAHRRLARPSLPRAPTSRFRADCRYSSGLAEPKQEASTKVMKVMKASYEGTFLQQELLKSGKSIRGFGSGNR

SEQ ID NO: 182042 - protein, 577 aa, Oryza sativa
  Clone ID: PAT_MRT4530_79266C.1.pep
MGTRLLALAPWLLLLLLQLAGASHVVHRSLEAEQAPSSVPASIVSPLLRTGYHFQPPMNWINDPNGPLYYKGWYHLFYQYNPKGAVWGNIVWAHSVSQDLINWIALEPAIKPDIPSDQYGCWSGSATILPDGTPAILYTGIDRPNINYQVQNIAFPKNASDPLLREWVKPAYNPVATPEPGMNATQFRDPTTAWYADGHWRMLVGGLKGARLGLAYLYRSRDFKTWVRAKHPLHSALTGMWECPDFFPLQAPGLQAGLDTSVPSSKYVLKNSLDLTRYDYYTVGIYNKVTERYVPDNPAGDYHRLRYDYGNFYASKTFFDPVKHRRILLGWANESDSVTYDKAKGWAGIHAIPRKVWLDPSGKQLLQWPIEELETLRGKSVSVFDKVVKPGEHFQVTGLGTYQADVEVSLEVSGLEKAEALDPAFGDDAERLCGAKGADVRGGVVFGLWVLASAGLEEKTAVFFRVFKPAGHGAKPVVLMCTDPTKSSLSPDLYKPTFAGFVDTDISSGKISLRSLIDRSVVESFGAGGKTCILSRVYPSMAIGDKAHLYVFNNGEADIKISHLKAWEMKKPLMNGA

SEQ ID NO: 182043 - protein, 1997 aa, Oryza sativa
  Clone ID: PAT_MRT4530_79267C.1.pep
MATGVGSGRLARRRGSTSDGENRFVVGCSRKPTKDAVWLAAVGVETGDYSRWRRGAGQWQRALVTCIGLKELLPGYGRLLQVTESSFGEMTALVVGEEDIPATRLRGGCTLVNRAGSGWIWPDAFRHRAGWRPIMGQWNPNPRRRADMKFGRITPVVKFWYKEGIKSKISLGSQISSAGFNLGFGHLALVLKVMAAAEGGGDQGTINAIVAHPKPSGASSLPPGSRLESELQVVLVRNQSVDGIHDQATGSRVLPSSGNHDGGLASNNLSSQGPTVFTEGEVVDEEEDAVEIEIEENEVQKAGQWTILARFYSLKFPNQSALFEDMRRAWRLRAEMSYKSLKDNLFIVSFNAEGDYNFVLQGGPWLHRGDALLVAEFNGLLNPSMVNLDTVPIWVRIYDLPLVMMNRARGELYGSKMGKVREVDVQEDGCNKHDFFRIRVDLPVNRPLRRMLAIKIKVQGKEEIRRFHLRYERVPHFCFFCGFIGHSDKECEKRLTNENEPLVFSAELRCSPLKPFERKVGKVKAVHSQGVQRKLSFRGPGSVSSSSAGIRQDAKRYEDQPTRVDAFDGFDIREGKGEDSIDSQLADLTNMLHVSEVSSLGQKKGKDLVSKETSSIPSMEMIPAIRDLNVHQVSFGDGSTEEFGSPTKRKALPTTKSSHIVQQAVLEYGQRGAEETASSTRAMKRLKKGVEANTSVEDMEATSPGAAEEPQWHVTFVYGEPRVENRHRMWSLLRTIHQSSSLPWAVIGDFNETMWQFEHFSRTPRGEPQMQDFRDVLQDCELHDLGFKGVPHTYDNKREGWRNVKVRLDRVVADDKWRDIYSTAQVVHLVSPCSDHCPILLNLVVKDPHQLRQKCLHYEIVWEREPEATQVIEEAWVVVGEKADLGDINKALAKVMTALRSWSRAKVKNVGRELEKARKKLAELIESNADRTVIRNATDHMNELLYREEMLWLQRSRVNWLKDGDRNTKFFHSRAVWRAKKNKISKLRDANGTVHSSTMKLESMATEYFQDVYTADTNLNPETVTRLIQEKVTDIMNEKLCEDFTEDEISQAIFQIGPLKSPGPDGFPARFYQRNWGTIKADIIGAVRRFFQTGLMPKGVNDTAIVLIPKKEQPVDLRDFRPISLCNVVYKVVSKCLVNRLRPILDDLVSVEQSAFVQGRMITDNALLAFECFHAMQKNKKANHAACAYKLDLSKAYDRVDWRFLEMAMNKLGFARRWVNWIMKCVTSVRYMVKFNGTLLQSFAPTRGLRQGDPLSPFLLLFVADGLSLLLKEKVAQNSLTPFKVYRAAPGISHLLFADDTLLLFKAHQREAEVVKEVLSSYAMGTGQLINPAKCSILMGGASTPAVSEAISEILQVERDRFEDRYLGFPTPEGRMHKGRFQSLQAKIWKRVIQWGENHLSTGGKEVLIKAVIQAIPVYVMGIFKLPESVIDDLTKLTKNFWWDSVNGQRKTHWKAWDSLTKPKSLGGLGFRDYRLFNQALLARQAWRLITYPDSLCARVLKAKYFPHGSLIDTSFGSNSSPAWRSIEYGLDLLKKGIIWRVGNGNSIRIWRDPWLPRDHSRRPITGKANCRLKWVSDLITEDGSWDVPKIHQYFHNLDAEVILNICISSRSEEDFIAWHPDKNGMFSVRSAYRLAAQLVNIEESSSSGTNNINKAWEMIWKCKVPQKVKIFAWRVASNCLATMVNKKKRKLEQSDMCQICDRENEDDAHALCRCIQASQLWSCMHKSGSVSVDIKASVLGRFWLFDCLEKIPEYEQAMFLMTLWRNWYVRNELIHGKSAPPTETSQRFIQSYVDLLFQIRQAPQADLVKGKHVVRTVPLKGGPKYRVLNNHQPCWERPKDGWMKLNVDGSFDASSGKGGLGMILRNSAGDIIFTSCKPLERCNNPLESELRACVEGLKLAIHWTLLPIQVETDCASVVQLLQGTGRDFSVLANIIHEARHLLVGERVISIKKICRSQNCISHHLANTARADFLAGFWLGESCNLISHLLSENFMSE

SEQ ID NO: 182044 - protein, 76 aa, Oryza sativa
  Clone ID: PAT_MRT4530_79268C.1.pep
PNLLYQKKEKKEKKKTGESAVAIKVPYFLSHTLAKITILWGDLYLLHWSWFDHCGHENPIGAPKSFSFHAFPLKAG

SEQ ID NO: 182045 - protein, 189 aa, Oryza sativa
  Clone ID: PAT_MRT4530_7926C.1.pep
MVMSSDEANLPRYISSSDSVTANSSSDSAIDLPPVLAICNHTPPHTAGSTMVKTQETKIKNKKPHVTHTPTEHEAASPWIGGPWGDLRGAGGVKGSRVLRLTKVMNLPRDAMRPRDLPAEVKARLQTRPTLGGRWSGQTEWRRAWRGPMKGPLSDRWGECGLDESIGNVRVAQVELMRAIWEVGLVLVK

SEQ ID NO: 182046 - protein, 497 aa, Oryza sativa
  unsure (1)..(497): unsure at all Xaa locations
  Clone ID: PAT_MRT4530_79270C.1.pep
MEAVAEAVAAAVAAGVEPFPAVDKCDASGREAHAVAADLEGTLLRSRSAFPYYALVAFECGGVPRLALLLLLAPLAAALRAAVSEAAAXRVLVFAATAGARVREIESAARAVLPXPFLVDCLGADAVAGTELATWRGRATGLVDDRRGGVLVGRRKAQALLDMFAGGDVPDVGLGDRRSDYPFMSLCKEGYIVPRSPAVEAVPMDKLPRPVIFHDGRLARRPTPLAALLAVLWFPVGFALACVRIAAGALLPMPWVYYAFWALGVRVVVRGAPPPRAERAAGRRGVLFACSHRTLLDPIFLSAALGRPVAAVTYSLSRLSEFLSPIRTVRLTRDRAADAAMIGELLDEGDLAICPEGTTCREPFLLRFSALFAELTDEVVPVAMESRMGMFHGTTARGWKGMDPFYFFMNPSPAYVVTFLGKLPPEHTCGAGGRSSHEVANYIQRLIAATLSYECTSLTRKDKYRALAGNDGVVDNATGKLPSPATATANNSKDKAC

SEQ ID NO: 182047 - protein, 530 aa, Oryza sativa
  Clone ID: PAT_MRT4530_79271C.1.pep
MEAVAEAVAAAVAAGVEPFPAVDKCDASGREAHAVAADLEGTLLRSRSAFPYYALVAFECGGVPRLALLLLLAPLAAALRAAVSEAAAVRVLVFAATAGARVREIESAARAVLPRFYAADVHPGAWRVFAACARRRVVLTATPRVMAEPFLVDCLGADAVAGTELATWRGRATGLVDDRRGGVLVGRRKAQALLDMFAGGDVPDVGLGDRRSDYPFMSLCKEGYIVPRSPAVEAVPMDKLPRPVIFHDGRLARRPTPLAALLAVLWFPVGFALACVRIAAGALLPMPWVYYAFWALGVRVVVRGAPPPRAERAAGRRGVLFACSHRTLLDPIFLSAALGRPVAAVTYSLSRLSEFLSPIRTVRLTRDRAADAAMIGELLDEGDLAICPEGTTCREPFLLRFSALFAELTDEVVPVAMESRMGMFHGTTARGWKGMDPFYFFMNPSPAYVVTFLGKLPPEHTCGAGGRSSHEVANYIQRLIAATLSYECTSLTRKDKYRALAGNDGVVDNATGKLPSPATATANNSKDKAC

SEQ ID NO: 182048 - protein, 96 aa, Oryza sativa
  Clone ID: PAT_MRT4530_79272C.1.pep
RPGRGCGRGSSIVEPAPFVLRAAIAIVAGREHGASVVLVVVGLGARDVAVVADLSLLDLVIVVDVWAAAAVTTLHGALAGITTLHGANILGFFLLL

SEQ ID NO: 182049 - protein, 118 aa, Oryza sativa
  Clone ID: PAT_MRT4530_79273C.1.pep
CRRGHEKMDEEEIHIAVGKNFRKEKANILWAAARFPRATIVLVHVHWPSKWMPFMGGKVLYKFADEKEKEMHRAKETDAMVKMLSQYKNLCGSRKARAHYLSHDDVLAGVVNLIKKLK

SEQ ID NO: 182050 - protein, 292 aa, Oryza sativa
  unsure (1)..(292): unsure at all Xaa locations
  Clone ID: PAT_MRT4530_79274C.1.pep
NVSLVGAYCVGLWFGLFCCIMWVASLMYXCIVLWWLYNXCXVSALLFFVVVVFVGWPMVYLLYCCILCGLALLVLXWACVVCFYMGVLFYIILAXVVAXILCSIVNLVVYMXCGVIYYVFXXVRXXSLCLFLIMLCYAIXCLXYRXDGYLFVFXCDXFDCVSGGLYCRIWVAFCVGFLLFFSFLVVGSFLILFWMVXCXMFILMCFXYDXELVSYIVYVCXYVCYSILLIXLAXXYXIGCINLFLVVLGVXWXFVIXXVXVLGYRNMYIMSXSLSCXLVSYILYIYIYIYIY

SEQ ID NO: 182051 - protein, 44 aa, Oryza sativa
  unsure (1)..(44): unsure at all Xaa locations
  Clone ID: PAT_MRT4530_79275C.1.pep
PRPPSVRPASVSPXLYLLLVILNLIQFSFSLNCIFPWVIFSFFN

SEQ ID NO: 182052 - protein, 57 aa, Oryza sativa
  Clone ID: PAT_MRT4530_79276C.1.pep
PNGNVQFSAPRGVSPPFWPPPSFNSPFLGACSPPMGQKQVVNLEDPAAPLKSMVSPS

SEQ ID NO: 182053 - protein, 116 aa, Oryza sativa
  Clone ID: PAT_MRT4530_79277C.1.pep
PRVRPRVRGRVGHHGFLPVINQERRLLPDSWRPWRRRELPHRAVHSRAGAEAQGGPRPCQAVEQRPRHHLRGRRGRLVLRRRRQRRHVCGGDRRAGCVPHGRSGPRAVRHAGSERR

SEQ ID NO: 182054 - protein, 65 aa, Oryza sativa
  Clone ID: PAT_MRT4530_79278C.1.pep
MVESTAADGKKVWGREVDYGGDGRGSTAAAGWQYLEFAPSAGSVEFASERAVCHPHRGYFGTRVI

SEQ ID NO: 182055 - protein, 74 aa, Oryza sativa
  Clone ID: PAT_MRT4530_79279C.1.pep
KTMFLCQASVPPPRKRSSSFALVSPKISIFPGLCNVSPATFEHCHLGGLISWVNLTLFDKLNWGLKVPGANCLN

SEQ ID NO: 182056 - protein, 92 aa, Oryza sativa
  Clone ID: PAT_MRT4530_7927C.1.pep
PPPPPVTVVVITARAANAVDSTGSGAISASRARTAGDEVCSRADAVLGLTLTGGPSRAHANNNLLRSLVPAFPSPTRPCCIYRNNQPVSYLL

SEQ ID NO: 182057 - protein, 651 aa, Oryza sativa
  Clone ID: PAT_MRT4530_79280C.1.pep
MSSSTIRKALGAVKDQTSIGLAKVTSNIAPELDVLIVKATSHDDEPAEERHIREILHLTSGSRAHVAAAVAGCSRRLSRTRDYVVALKSLMLVHRLLADGDPSFHRELLHATRRGTRLLNLSDFRDEAHSGSWDHSAFVRTYALYLDQRLEFFLHERKQGSGSNASSSANGPSPRDRWGSPDPYGRRSPSYSSPPGNGNGYGYGGYDDYRERNGNNNTDDKKPPTPVRDMKPERVLARMHHLQQLLDRFLACRPTGGAKHSRMVLVALYQIVRESFQLYADICEVLAVLLDRFFDMEYAECVKAFEAYASAAKQIDELCAFYGWCKETGVARSSEYPEVQRVTDKLLETLEEFMRDRAKRPKSPPREPEPEPVKEEEPEPDMNEIKALPAPEDYKEPEPEKVEEEVKPEPPPQPQGDLVDLREETVTADEQGNRLALALFQGPPAAGGSNGSWEAFPSNGGNEVTSAWQNPAAEPGKADWELALVETASNLSKQKATMTGGMDPLLLNGMYDQGAVRQHVNAQVTTGSASSVALPPAGQKTQVLALPAPDGSMQNVGGDPFAASLSFPPPSYVQMAEMEKKQQFLTQEQMMWQQYQRDGMQGQSSLAKLDRAYNNGFAPNPAMPYGMPAAYNTNPMPMAYTANTGYYYPTY

SEQ ID NO: 182058 - protein, 215 aa, Oryza sativa
  Clone ID: PAT_MRT4530_79281C.1.pep
MAIKDRFTGNPGRLTVPTTSGNGTVSISYSEKGRTVLYHMGFDVSKFYLVTKMILGTNTYPLRDHHTNVPQYPQNTVYGYPPSTVTRQGGELGAQGFAKMTSSYSDNYICTNFGSGDPTRTPLSSLVRDIDKLRECMMVRSSGSDDMDACRLERHLAGGWRHVVPKQERVRKNMFKVQPDTVTRMLVWFRPLSPLHRTNLNRRRTKIVSTRGWNS

SEQ ID NO: 182059 - protein, 42 aa, Oryza sativa
  Clone ID: PAT_MRT4530_79282C.1.pep
LREVVMVVRTDEAHHRDVNHYASDIHYQGHALREVAAPLGYH

SEQ ID NO: 182060 - protein, 50 aa, Oryza sativa
  Clone ID: PAT_MRT4530_79283C.1.pep
KKPFFDGNQTTHQGFSVVTFKKLGWKQLLFLNIPNLGKDQIFFQTFFWGA

SEQ ID NO: 182061 - protein, 482 aa, Oryza sativa
  Clone ID: PAT_MRT4530_79284C.1.pep
MLPHATAHQPTPSPRPRLLPVAAAALLLASSYLALTRLPAAAPLAALVAPATARVDGDRDRDSCAGFYRGGSSGRRAASASVEEFGAVGDGVTSNTAAFRRAVAALEARAGGGGARLEVPPGRWVTGSFNLTSRFTLFLHHGAIILGSQDPEEWPLIAPLPSYGRGRERLGPRHISLIHGEGLDDVVITGNNGTIDGQGRIWWDLWWNRTLNHTRGHLIELVDSTNIMISNITLRNSPFWTVHPVYCRNVVIRNLTVLAPLNAPNTDGIDPDSSSEVCIEDCYIESGDDLVAVKSGWDQYGISVGKPSSNIIIQRVSGTTPTCSGVGFGSEMSGGISNVIIRDLHVWNSAQAVRIKTDVGRGGYITNITIENVRMEKVKVPIRFSRGADDHSDDKYDRSALPKISDVRIRDVVGVDLQRAPMLEAVHGAVYEGICFRNVSLTVIKRQDRWHCESVYGEAHDVLPAPCEEFRRNGSSSWCGHS

SEQ ID NO: 182062 - protein, 57 aa, Oryza sativa
  Clone ID: PAT_MRT4530_79286C.1.pep
WRTSSGRAQARGGDRATAGDRVPICGRFFVDALTTTISASISIPPAAAYTGFTTAGR

SEQ ID NO: 182063 - protein, 93 aa, Oryza sativa
  unsure (1)..(93): unsure at all Xaa locations
  Clone ID: PAT_MRT4530_79287C.1.pep
MAVHVVLLAVPAAAAAGGGFLQAFLQYSFLVWPFNLVLPLARHLPRVCVALRGXAEFLAGEMRMFLSGRRRASGGRGRSSSPTPWLPSSGSPT

SEQ ID NO: 182064 - protein, 38 aa, Oryza sativa
  Clone ID: PAT_MRT4530_79288C.1.pep
MCHCTGSSEKVEVLSFTLSNIPLANLHPRTKTPTEAQT

SEQ ID NO: 182065 - protein, 110 aa, Oryza sativa
  Clone ID: PAT_MRT4530_79289C.1.pep
MAVHVVLLAVPAAAAAGGGFLQAFLQYSFLVWPFNLVLPLARHLPRVCVALRGAAEFLAGEMRMFLSGRRRVQLPQLSGYGRSSSLSPGERRSREELVAYTMVALVGISY

SEQ ID NO: 182066 - protein, 105 aa, Oryza sativa
  unsure (1)..(105): unsure at all Xaa locations
  Clone ID: PAT_MRT4530_7928C.1.pep
AGGASGAARQWLVRRLEAAGARRRAAAGGKAGSSPREVETGRRRGARRGGGGGGSAXFREESGGSGGGGGGDQVHAPARRGGAREARRRGVEPAAMAVAAGRMEV

SEQ ID NO: 182067 - protein, 63 aa, Oryza sativa
  Clone ID: PAT_MRT4530_79290C.1.pep
FPMVLTLVECYTFVLQVAPDDLSYTHILHFLVNSTSIFAQVHQGSRHPLPITHLNLVIIIGGG

SEQ ID NO: 182068 - protein, 227 aa, Oryza sativa
  unsure (1)..(227): unsure at all Xaa locations
  Clone ID: PAT_MRT4530_79291C.1.pep
MACRSAVCSPSALAPPRHRLLSLGCARTAAPSGGLPLRLRLRLRLRSSPAPRGHGADLVVRAAAAEGAVELQAKVTSKCFFDVEVGGEPAGRIVIGLFGEVVPKTVDNFRALCTGDKGYGYKGCSFHRIIKDFMIQGGDFQNNNGTGGRSIYGECFDDENFTLKHTGPGVLSMANAGPDTNGSQFFICTVKFSHFKELNQVLNRYKSLKQXVKNLESQETSRSDIPK

SEQ ID NO: 182069 - protein, 43 aa, Oryza sativa
  Clone ID: PAT_MRT4530_79292C.1.pep
GVICTLNVCKKADKHLLYSDKFGLNCDANARTFETPSVLISDY

SEQ ID NO: 182070 - protein, 215 aa, Oryza sativa
  Clone ID: PAT_MRT4530_79293C.1.pep
MVLGIGEATHCKLALLDATKRVVEVGGDLTIDYDKTRRRLAYPWHTSWRSTRRTWWLLSAMPVTARGLHAPIISRYASKVRVLEIYISLMLIVGLVDKTYPMILDWDWRGIPNKEEEVEFYKDYSDRIHICIPSSTWIRGTTGGRGYPSHHVGVKDRPMAIGRTTVVAFETHRGGKILLTLGEAFSIRNHSEEFKGDRGSHDGFLLQLKKKVIWL

SEQ ID NO: 182071 - protein, 69 aa, Oryza sativa
  Clone ID: PAT_MRT4530_79294C.1.pep
PRVRPLVRTLSRYISCSRKLAGLKHQAAREDRPRYGHRTFRQPYDQLLREEAVPRGRRAHQIVTHTEGP

SEQ ID NO: 182072 - protein, 128 aa, Oryza sativa
  Clone ID: PAT_MRT4530_79295C.1.pep
RSWRGDDARDVAGVHLVSASTAAARSWEATRRFRCALLPPAPRFEPRDAPCGRAHGTAPRNPQTAQRSAARRKLPARTPTRPRPHPRPPTRQTATPREARHAAPRHVRRRRRPDGSTCPPSRSTRRAL

SEQ ID NO: 182073 - protein, 386 aa, Oryza sativa
  unsure (1)..(386): unsure at all Xaa locations
  Clone ID: PAT_MRT4530_79296C.1.pep
MAMWRSCLHMPHLNYLPKALCFPGRRRRWARGEGGGRRLTGGGGGGDDGDGGARRRRTARRLRGDGAAASKVAARRHDNGGAAARRQRRVEKGKREKRREWSGVEKGGLGRGLYRGEGKKERGRRGRGETTAARRRGARGGXARGARRRDGARRGSGNGTRAATGRRWRRRQRWRAARGGMRWAAXTRRHGATATMGRRGSGTARGGDGTRTRRRDGDGDRAAVVARGARRDATATAXRGDEMVTATGGDGDGGAAAGDDGDGARQLATMATARGDGGDKERGKGEELGRRRPPPRRTDLAPAAVASPRAAPPSALCHPRADREAAGRRLSTHRAGLRAPPRGRRLTGRKRPPPCRPAWPPRPAASRRPGTLAAPLQCREEKERNR

SEQ ID NO: 182074 - protein, 61 aa, Oryza sativa
  unsure (1)..(61): unsure at all Xaa locations
  Clone ID: PAT_MRT4530_79297C.1.pep
HPSYFTVVYXNLNLTNLPFIHNIQSIHHTSHANFNYLYNYTAISHLSLTSIISSPIILLYH

SEQ ID NO: 182075 - protein, 115 aa, Oryza sativa
  Clone ID: PAT_MRT4530_79298C.1.pep
MWLILIALCDSLLLVILTGPTRKSLTLGLVDRPVSHAFWATVAFPRRQLTCPVARNVTLAALNSSVKASHLHARTQQEFEQAQLNKAQCNKNSCTRLVRAVKNAQNSRAARARLV

SEQ ID NO: 182076 - protein, 98 aa, Oryza sativa
  Clone ID: PAT_MRT4530_79299C.1.pep
FFYFGVFFLKHKPSFFFFFFLEKYTRRAQIGVPLGKQAISVEGHESVVTDYILKLLLQILGLEICADTMVGDPTSRGTSGGQNKRVTNGMCNPQSTKT

SEQ ID NO: 182077 - protein, 164 aa, Oryza sativa
  Clone ID: PAT_MRT4530_7929C.1.pep
MQPSTSAPRSPSLATPAPAVVAAVTVDVFAPWWRRRALTPPATDDATGNTAAVAGNVAAAGTARFLETLIERADCRLVNDIVFVQECPFIEKLCATELVLAFKYGAALMNIDKVFHLFMLRAYDALPAFLKHNEFIIDYYRSEWPIKQALLSALVVHNETIFQT

SEQ ID NO: 182078 - protein, 58 aa, Oryza sativa
  Clone ID: PAT_MRT4530_792C.1.pep
VIRTLLIGGINNNGSKREIKRPGSLNKVHICRLHFGFFKFIGLQNFCSLADDHLDIKD

SEQ ID NO: 182079 - protein, 96 aa, Oryza sativa
  Clone ID: PAT_MRT4530_79300C.1.pep
MVKSLRRSKQSLRFGSMSIACAAVCTSGTEANAAGKTSGPVSIVSPINRRDLCKKESPSTEIQFDPEKSNCHHFQPSLNLKISKPDTAIGSNAGGL

SEQ ID NO: 182080 - protein, 107 aa, Oryza sativa
  Clone ID: PAT_MRT4530_79301C.1.pep
PSPPGDKDGGGELRPCSPVRVGPKETPPPQFRRCSVFGAAKYCFRAVQALDWKRAPKGQGGPLGRGAPPPGEAQWLAPPPKYPPKPNGPPVLPWAGGNPSQWQKKKI

SEQ ID NO: 182081 - protein, 47 aa, Oryza sativa
  Clone ID: PAT_MRT4530_79302C.1.pep
QLQLVSKTINLKGFLQDRWPDVATTGTILRLRGLWPTCWTHSYGAPN

SEQ ID NO: 182082 - protein, 156 aa, Oryza sativa
  Clone ID: PAT_MRT4530_79303C.1.pep
SPPALLPMAVSGLEIFRFSEGWRWWQFDFSGSNCISVDGDSFLQRSLLLMGETNFPDLAWLGGGGPGSDGDGAAGFPGGVGLCPACAHCCPCDGHGAKAEGLLASSAMTRQIPVLPQAKESSLDDGSPEALHHLADDNRVPAPALLSSALPFRYCS

SEQ ID NO: 182083 - protein, 58 aa, Oryza sativa
  Clone ID: PAT_MRT4530_79304C.1.pep
MAALPHVRRQAASCRCAISAPSAILSTASATAAVGRRQASARARSTAPSPPGLHGEQR

SEQ ID NO: 182084 - protein, 84 aa, Oryza sativa
  Clone ID: PAT_MRT4530_79305C.1.pep
MARSLNSRLEEKKVWPCSVITTLSRGEPKGRDLVERWPQGEIERRALAGRGRAEEEGASERGVGARGRNGCATALRRGWFALLG

SEQ ID NO: 182085 - protein, 88 aa, Oryza sativa
  unsure (1)..(88): unsure at all Xaa locations
  Clone ID: PAT_MRT4530_79306C.1.pep
CVQQCCQQMRLMAQQYHCQAICTMMQAIMQKEQVDXACVDEPQAQAQGPGGLSICPPMCGVYPRYCSTPCKVATGHCGSLVECTIIYI

SEQ ID NO: 182086 - protein, 96 aa, Oryza sativa
  Clone ID: PAT_MRT4530_79307C.1.pep
NPLASGRPWHRPAAVRGRRIWRCTAPGPGIGQYQTWPAADRNELVREHPVDDHMVLIGDWRPKDHGAMAKMLDAGKSFGRPTGSGINDKSGKADAD

SEQ ID NO: 182087 - protein, 117 aa, Oryza sativa
  Clone ID: PAT_MRT4530_79308C.1.pep
HNTKIGHPITPSKVATAVGACLACSTARVQWANIKILHSGQRPNLPWIASMPEFKDCSKEFWRWIGLQKFLVNFQQEISSSHRIMTFDFQRREPSLAVHEAYKPIICKLDYVMPACL

SEQ ID NO: 182088 - protein, 78 aa, Oryza sativa
  Clone ID: PAT_MRT4530_79309C.1.pep
MLNRSYEDSMLLHFLHDQVSESLIQLLPVKESSAYSVLGCSASATEKWTCGLVFLWVMGVALQLLERLASLSVLVQSA

SEQ ID NO: 182089 - protein, 301 aa, Oryza sativa
  Clone ID: PAT_MRT4530_7930C.1.pep
MGASWLLLHGAALMILMAAAAAGETTATASVVVGAAKCAGCGRKNMDAETAFKGLKVAIKCKNGSSEEYESKAVGELDGAGAFAVPLAADLRGADCVAQLHSAATDAPCPGQEPSKIEPLSSEGETGTFVAVAGKTHLPSSTSSSPECSSVAICFPCHRRHRMFHRKPMPEYQPPPSPVYGTPAPGCSCSPPSTPPGYGQPAPECPPADPGYGQPAPECPPPPTPAPECGQPAPEYPPSTPAYGTPAPECPPSTPEYGTPATACPPPTAPGYGSPSPFWPPVSPAYGTPSPTPIYRPPGSH

SEQ ID NO: 182090 - protein, 196 aa, Oryza sativa
  unsure (1)..(196): unsure at all Xaa locations
  Clone ID: PAT_MRT4530_79310C.1.pep
LKDKLSAESGQQLGSLKDQRLVFDGEELEDNQLIADISKKGAAVIHLFIRRPAKVQTQQGDKETVVTVVTPQDNDNLQTDALNLAKPAKGKPAPVEPIIANGKVKLSPAVMEMIYSTISGIENGYLPVMSTEGSGGVYFMKDSSGESNVAVFKPIDEEPMAKDNPRGLPLSTDGEGLKRGTRVGEXALKEVAAYNL

SEQ ID NO: 182091 - protein, 137 aa, Oryza sativa
  Clone ID: PAT_MRT4530_79311C.1.pep
LRASRAHSLSLFIADSRSIDRSIDQQAIVNRSQQLPISYSIQYSHSDRSKVYRVREIDISASEIGELTGDHGRRLQAAAPLLEKKGSTGTGVDDGYCIEGCPGCVVDRRKAASYGIPYGSFLFVWIVTLCTVHRLDF

SEQ ID NO: 182092 - protein, 91 aa, Oryza sativa
  Clone ID: PAT_MRT4530_79312C.1.pep
TKNGRKKKKRDNREGCAYFRYKGQTQSNMVRQIFSGGVAFKEPSFTSRVSDGKTFFLGQLKWTTLPDVQKLKDGKSPGVPNLLTLAKNPLL

SEQ ID NO: 182093 - protein, 84 aa, Oryza sativa
  Clone ID: PAT_MRT4530_79313C.1.pep
GNGNNNHNRYHDGNGVVHSPPLGLKHAGSTVTGLESADQASSVRLSAVLVVKAILAEALRCFNFFPKTLTKDTAEGTTPTLGCQ

SEQ ID NO: 182094 - protein, 408 aa, Oryza sativa
  Clone ID: PAT_MRT4530_79314C.1.pep
MAYTSSSLHLHKHLLLPKTNPSSSYSRPPPPSFVAAAAKINGVNGHSSKKSPNGKAQINGDGKKGANGSGRKKAAAQHINGNDRIHLSVSTGGAGGQDGFGLRVAFQGAPGAYSEFAAKTALPGCDTVPCRAFADALAAVDGGAVDRAILPVESTMEGTALRNYDLLLRHDLVVVQEINLFVHYCLLAMPGVRAAEVRRVISHPMALAHCGRALARLGVDREPVEDTAGAVEMLRSNRMLDTAAIASPRAADLYGLDVLAHGLQDESWNVTRFLLLSKPPSPVTLPMDADAKTSMVVAHRGGSMMVVLKVLSAFSSRNINLTKLEVINNNDGGGGGGGAAAGHPVMILDTSARGAPTLRAFPHVLYVDCEGASHDPRVLDAIKEIERFAVFVRVLGCYAADSNVYDLQ

SEQ ID NO: 182095 - protein, 44 aa, Oryza sativa
  Clone ID: PAT_MRT4530_79315C.1.pep
PDHYPKQIKSKVVTIFNISLLIFLVKYSLRFLIEDAVTFSLVPE

SEQ ID NO: 182096 - protein, 297 aa, Oryza sativa
  unsure (1)..(297): unsure at all Xaa locations
  Clone ID: PAT_MRT4530_79316C.1.pep
ETSSRGRPCCGTSASAPAPSSGRAPGAPASTLCTRCAPWPSARSTVVTTGSPSPTTPSCRSCATCRTSAASTSNTTSRRSPTRATASAMSSPTTTSGTMSPRRYLGTRRSSCRWFFLTAASSSWSAXCSARSAPTATRPAACRGRRPSAGSTSYFTWPCRSTPRTSSWTCWCSRTRYPSPPSSCLPPRAASSSSCAPSKSSCSAASTTSCRSERAPPPATPSRSSTCYTSFTGRACRRASTASCRRHGSFSRSRRSRSGCSRAPWSSAGRRCGSGARRRAAATSTCGSGAGRRAPWR

SEQ ID NO: 182097 - protein, 150 aa, Oryza sativa
  unsure (1)..(150): unsure at all Xaa locations
  Clone ID: PAT_MRT4530_79317C.1.pep
PAGCAYXSGRLISKKSSAQAEPSLFQARRRLRTLAPQLEYTPGEAGKASEAGDEADTSNDVPISDTQVLTRREKRQKATATHQLANMSASDRTALMHLSSSEQRSLITTNHKFAEKIKKEENKSQRRLDRKGNKNLYAYWNTETPVYQCG

SEQ ID NO: 182098 - protein, 150 aa, Oryza sativa
  unsure (1)..(150): unsure at all Xaa locations
  Clone ID: PAT_MRT4530_79318C.1.pep
RTITSLLSLLSLNAAATDQMDAVRQNILPYHVQATILLQKQALRLYNAFARXHLSIAPCPYLQSAAFQARNSHVLQQLRLAAQQCHYQYINVVQTIAQHLHLQQFGDLYIDRNMGQAQALKAFNLPSTYGIYPMCYSAPVSITTLGGVLY

SEQ ID NO: 182099 - protein, 757 aa, Oryza sativa
  Clone ID: PAT_MRT4530_79319C.1.pep
MEQNLGNVTATNDMWKSHRGTVIRIEALALLAIALSFFLIALCSFRRRSNHWFVQKGVLATNVLSLSLSTYSIGLMQSSSVKSEVYPIWAVSMLTLFGCIDSITTYGHDYMGQLWKILYQLCLYSGYVLLISISAISSDVGYIAMGILSAITFIKGFHRSLALMLPSLQRDMIKMIAEVMAGEVISYSTKTDYLDQLNCPDLIGYHYVVHWPLDKSKAKFLPQSSPDDIITIDKILQCNEVHFLSDVCLSFSLSHLLQRRFYRFRCAESKHLVARKFLFEGLLMSRDAAIDYKRVFNVIEVELSFLYDIFFTSNAFLHYYESKSTTIWGLASVMGICFVGVAAAIHGRMSTHTRSPDGTIIVDTTAVDLIITLVILLSLALLQFLHLLHCWSSNWARVAFACDYIKKGKRLSRWMRLRRWILKRIDCDNSYLWQNKLGQYSLIESISTRECKLFSTLGGFLYQIYSRLLGILGLQYIEQVFREMWGIKIGDSVELHDDVKAAIVDFLISSNCKLQNWPSSLNDDGWSGTSFLFLPDHVVTIMRFHIATCYCELVMHKEGFSVQDEDVEEIVKKNHGVATTLSKYCAYLMVSAPRLLHRHEIGTKSVYSQVAQAARISLYGAKDKLDAMRRLGKDDEPSEGARIFQEGVAFGKQLETMPKRWEVLANFWIKALVYAAPSDNVEEHIEHLAKGGEFITHLWALLSHAGILKWRGGSTNYDESPYKLSESTNDDSESEDEYDGPATDTDSTDVGGGSFED

SEQ ID NO: 182100 - protein, 67 aa, Oryza sativa
  Clone ID: PAT_MRT4530_7931C.1.pep
MPMPTSSSRGGRSAVSTEQDLVEALDGAHVDTDEGHLGGGVELGAAGEEEPPPPSLHLFVTLVVLVC

SEQ ID NO: 182101 - protein, 502 aa, Oryza sativa
  Clone ID: PAT_MRT4530_79320C.1.pep
MDITVAGGAGDGGERRTWVVEVERTLHDAPDAAAEASRWRPHCIYRVPACIKDLKPKAYQPQVVSLGPFHHGDPGLAPMEEHKRRALRHLLRRAARPLADFVAAVEAVADRLEAAYLDLGGGWRGGGGDGGEARERFLEMMIVDGCFLLEVMRAAAAVSPATPAPAAAGKPHAAAEEDYAENDPVFSRHGVLYMVPYIRRDMLMLENQLPLLVLERLLFVETERANVVHSRVSNEDHINRMVLRFLSPSARTPALGTPLGHHPLDALRRSMLHGEYQSPRWGHGAGARAHHRDIIRPAAYADDGGGDIIRSAVELYEAGIRFRRARTDSLHDVRFRHGVLAMPPVAVDDSTEYMLLNMMAFERLHPGAGNDVTAYVFFMDSIIDSAKDVALLSSKGIIQNAVGSDKAVAKLFNSISKDVVLEPESALDGVQRQVNAYCRQPWNMWRANLIHTYFRSPWAFMSLAAAMFLLVMTIMQTVYTVMSFYQQAEGGGGGGSAAPSPM

SEQ ID NO: 182102 - protein, 1403 aa, Oryza sativa
  Clone ID: PAT_MRT4530_79321C.1.pep
MSAPTPRVSRSREPHQRRISRSPPHRRGRRRPGEDRELIPVQCVVKEVGGSANYPLLTKTNYGDWALMMKVMLQARGLWDAVEHGDADFQADRMAMEAILRAMPPEMLASLAVKPSAKEAWDAIKTMRVGVDRVRKSKAQMLQKQYDAMEFKDGETVEEFSLRLNGLVTNLATLGVHLEEGKVVEKFLNSVPDHLSQIALSIETLLDLDELTLEEVTGRLRNAEEKLPAKSSAAGGKLFLTEEQWTARWKEKQAAESSSGKAKSGGGNRRRRGGKKKAEAAAHDGDRAGRDTQEGREPNRDKCRNCGRTGHWAKDCRQPKRPAEAYQALADEDDDEPALLMAHVVDAAPVSASSSSAPPASSPPSQPDKTIELVEPKVFAHLLTEKQTDGGVWHLDTGATNHMTGIREVFAELDLSVRGSVRFGDGSVVGIEGRGKIIFECRNQEHRALTGVYYIPKLNANLISLGQLDENGCDVRIYHGVCTIRDPAAQLLARVQRTRNRLYLIKLTIGQPVCLAAKAQECAWLWHARYGHLHFDALRRLASRDMVRGMPDIDHVEQLCDSCVISKQRRTPFPRRSMFRAEDRLELVHGDLCGPISPATPGGKTHFLLLDDASRYMWITLLGCKSEAADAIKRFQARAEAESKQKLRILRTDNGGEFTSVEFATYCAEQGVSRHFSAPYSPQQNGVVERRNQTILGMARSLLKAKNMPARYWGEAVTTAVFLLNRAPTKSLANMTPYEAWHGKKPAVGYLRTFGCLAYVKDVRPHLPKLSDRSKPMVLIGYADGAKAYKVFDPVSGRVQVSRDVIFDEGAGWDWDAAGAAAVPGGGGCSDFTVEYLTTGTSPSASTSAPSSASSGASAMGDLLGDALTPGFATRDPEEGELHLLAAEEPASFTEAEQRQEWRRAMLDEIASIEENNTWRLVDLPSGHRAIGLKWVFKLKKDAEGRVAKHKARLIAKGYVQQPGIDFEEVFTPVARLESVRLLLAQAAQAGWTVHHMDVKSAFLNGELAEEVYVKQPPGFVKEGREHQVLRLDKALYGLRQAPRAWNSKLEATLLSLGFRRNDCEHAVYVRGNTSARLLVGVYVDDLIITGTKEDEIVRFKGEMKALFKMSDLGLLSFYLGIEVEQVAGSIRLSQAAYARRILERAGMLGCNPSATPMEQRLKLSKTSAAASVNPTWYRGIVGCLRYLVHTRPDIAFSVGYVSRFMEAPTTEHEAAVKRILRYIAGTTEFGCHYHQSSSPVQLVGYSDADMAGDPDTRKSTTGVVFFLGTSPVSWQSVKQKVVALSSCEAEYIAATTAACQGVWLSQLLGEINQEEPDAFKLLIDNKSAIALSKNPVFHERSKHIATRYHYIRERVEDGSVHVEFVGTEGQIADILTKALGRTRFQELRSRIGVADVKFRCKT

SEQ ID NO: 182103 - protein, 1454 aa, Oryza sativa
  Clone ID: PAT_MRT4530_79322C.1.pep
MSAPTPRVSRSREPHQRRISRSPPHRRGRRRPGEDRELIPVQRVVKEVGGSANYPLLTKTNYGDWALMMKVMLQARGLWDAVEHGDADFQADRMAMEAILRAVPPEMLASLAVKPSAKEAWDAIKTMRVGVDRVRKSKAQMLQKQYDAMEFKDGETVEEFSLRLNGLVTNLATLGVHLEEGKVVEKSLNSVPDHLSQIALSIETLLDLDELTLEEVTGRLRNAEEKLPAKSSAAGGKLFLTEEQWTARWKEKQAAESSSGKAKSGGGNRRRRGGKKKAEAAARDGDRAGRDTQEGREPNRDKCRNCGRTGHWAKDCRQPKRPAEAHQALADEDDDEPALLMAHVVDAAPVSASSSSAPPASSPPSQPDKTIELVEPKVFAHLLTEKQTDGGVWHLDTGATNHMTGIREVFAELDLSVRGSVRFGDGSVVGIEGRGKIIFECRNQEHRALTGVYYIPKLNANLISLGQLDENGCDVRIYHGVCTIRDPAAQLLARVRRTRNRLYLIKLTIGQPVCLAAKAQECAWLWHARYGHLHFDALRRLASRHMVRGMPDIDHVEQLCDSCVISKQRRTPFPRRSMFRAEDRLELVHGDLCGPISPATPGGKTHFLLLVDDASRYMWITLLGRKSEAADAIKRFQARAEAESKQKLRILRTDNGGEFTSVEFATYCAEQGVSRHFSAPYSPQQNGVVERRNQTILGMARSLLKAKNMPARYWGEAVTTAVFLLNRAPTKSLANMTPYEAWHGKKPAVGYLRTFGCLAYVKDVRPHLPKLSDRSKPMVLIGYADGAKAYEVFDPVSGRVQVSRDVIFDEGAGWDWDAAGAAAVPGGGGCSDFTVEYLTTATSPSPSTSAPSSASSGASASRAVTPSSASTPATLASASTPATPTFVSPPPGVDENLDAEQDDCPLRYRSMGDLLGDARSPGFATRDPEKGELHLLAAEEPASFTEAEQRQEWRRAMLDEIASIEENNTWRLVDLPSGHRAIGLKWVFKLKKDAEGRVAKHKARLVAKGYVQQPGIDFEEVFALVARLESVRLLLAQAAQAGWTVHHMDVKSAFLNGELAEEVYVKQPPGFVEEGREHQVLRLDKALYGLRQAPRAWNSKLDATLLSLGFRQNDCEHAVYVRGNTSARLLVGVYVDDLIITGTKEDEIVRFKGEMKALFKMSDLGLLSFYLGIEVEQVAGSIRLSQAAYARRILERAGMLGCNPSATPMEQRLKLSKTSAAAPVNPNWYRGIVGCLRYLVHTRPDIAFSVGYVSRFMEAPTTEHEAAVKRILRYIAGTTEFGCHYHQSSSPVQLVGYSDADMAGDPDTRKSTTGVVFFLGTSPVSWQSVKQKVVALSSCEAEYIAATTAACQGVWLSQLLGEVNQEEPDAFKLLIDNKSAIALSKNPVFHERSKHIATRYHYIRERVGDGSVHVEFVRTEGQIADILTKALGRTRFQELRSRIGVADVKFRCKT

SEQ ID NO: 182104 - protein, 70 aa, Oryza sativa
  Clone ID: PAT_MRT4530_79323C.1.pep
PPRFFVFFFFQNLGEKQNQTVVVFPRPPQNGSHPPGQMPPMYCFPPRQLCFFVFTQTRCGGLKKTRSFPS

SEQ ID NO: 182105 - protein, 508 aa, Oryza sativa
  unsure (1)..(508): unsure at all Xaa locations
  Clone ID: PAT_MRT4530_79324C.1.pep
MAAGPQPQGGVSGLFRGPRSSPRLSRVRATATVDPGDIPLEKFQAKYSXRVLPYXSVDWFWSILCWNHFGVVNGVLDYLAKDLGISENAVLQGWVVSTTLAGATAGSFTGGALADKFGRTRTFILDAIPLAVGAFLSATAHDVRTMIIGRLLAGIGIGISSALVPLYISEVLEHAQQLSYLRLRLQISPTEIRGALGSVNQLFICIGILAALVAGLPLAGNPAWWRTMFGISIVPSILLALGMAVSPESPRWLFQQGKLSQAETAIKKLYGREKVAEVMYDLKAASQGSSEPDAGWLDLFSKRYWKVVSVGAAMFLFQQLAGINAVVYYSTSVFRSAGIASDVAASALVGAANVFGTMIASSLMDKQGRKSLLITSFSGMAASMLLLSLSFTWKALAPYSGPLAVAGTVLYVLSFALGAGPVPALLLPEIFASRIRAKAVALSLGMHWVSNFFIGLYFLSVVNKFGISTVYLGFASVCALAVVYIAGNVVETKGRSLEEIERALSSAS

SEQ ID NO: 182106 - protein, 112 aa, Oryza sativa
  unsure (1)..(112): unsure at all Xaa locations
  Clone ID: PAT_MRT4530_79325C.1.pep
VNRTFGISLKIYQETNDRAKKRSCKPAIRRNFIPKTIYNKTIPKIAAKKRKSRCNLPPELPQLCSRELCGQAVAGAPVRRCSPAAAMRETRRLXLSTARGRRRHVGGDSGNG

SEQ ID NO: 182107 - protein, 89 aa, Oryza sativa
  Clone ID: PAT_MRT4530_79326C.1.pep
MMYREKSNLITVGARAPRLDHGRALVVVAAGPLLREPGVVRVLALVGHGMGGVRFGGIVASRAQAAGESASRRDRGIFGPLARGLSWSD

SEQ ID NO: 182108 - protein, 533 aa, Oryza sativa
  unsure (1)..(533): unsure at all Xaa locations
  Clone ID: PAT_MRT4530_79327C.1.pep
SSRFDEFLARVSRIKAAAAARVSRRATWPRRRREGDAVSAGFAELERQQQLLASCTRLYKQLEEHFASLERGLAARSDSLRHKRRAAEXRASAAMDSLRRREASIDGSVSRALDHLDDLASASSVPSDAAAAAEGVAESLRAMCARMDSAGFFGFVVARRKEVDALRAEMPPALKCCVDPAKFVMDAVAHVFPVDRREAKNPTDLAWACVLILEAAVPALADPDPEIGAARLLVPRAARERARGMARECRQWKEAAERKGGVEWTKPPDAHAFLQHVATFAVAEREDRGIYRRIVVSFSWRRQMPRLALTLGLEEDMADIIEELIAKGQQLDAVNFAYEAGLQEKFPPVPLLKSYLADSKKTSCTVSDNSSTSSGQSGSNANKKEQSVLRAVIKCIEDRKLEAEFPLEDLQRQLEELEKAKTEKKKATSSASSGGSSGPATKRIRASNGGPMPPAKAGRLTNNACVSSTPAATTFVRSPSHTSYAMASPYPYDRPVGHGLYCNQSPPAIREPYVYPAKEVTNFAPGLPYSPLP

SEQ ID NO: 182109 - protein, 134 aa, Oryza sativa
  Clone ID: PAT_MRT4530_79328C.1.pep
MDTKGGVSHEMARATVQAHSFSERKKGSRRKHTCAAARVPYVFSGSAGKARAKASCRMPIKLNQASVRTSMHIDLPAPRGQDTRKDTRSTLHAFDQPGNDARRDERLRTARDEAPTYAARRRVSLPRPPALDQP

SEQ ID NO: 182110 - protein, 81 aa, Oryza sativa
  Clone ID: PAT_MRT4530_79329C.1.pep
KNNPLVQEVGAAASAPGADPFFKGPRRDFFRLIGWLRVPNNSREVVPPRRRRGLDLFVCLPLCFFSLFALIPLSVLAMNVV

SEQ ID NO: 182111 - protein, 51 aa, Oryza sativa
  Clone ID: PAT_MRT4530_7932C.1.pep
LTNVPRIDKKVGKIPPKCLRPNTQSLVDFATKDEEGVPRFGLIIKQSVVAR

SEQ ID NO: 182112 - protein, 93 aa, Oryza sativa
  Clone ID: PAT_MRT4530_79330C.1.pep
RKTVTAETHDLTWKTPLMRKVKKPRSPVSNNLTISRVLGYTPMAAYKRIKSLRNPSKGHIYRPKPPAWAFAPVSQKPGQYLEVNLEQLQQTSA

SEQ ID NO: 182113 - protein, 956 aa, Oryza sativa
  unsure (1)..(956): unsure at all Xaa locations
  Clone ID: PAT_MRT4530_79331C.1.pep
MGVSRPPSTPASKIERTPMSTPTPGGSTRVKEEKIFVTVRVRPLSKKELALKDQVAWECDDNQTILYKGPPQDRAAPTSYTFDKVFGPASQTEVVYEEGAKDVAMSALTGINATIFAYGQTSSGKTFTMRGVTESAVNDIYRHIENTPERDFIIKISAMEIYNEIVKDLLRPESTNLRLLDDPEKGTIVEKLEEEIAKDSQHLRHLISICEEQRQVGETALNDTSSRSHQIIRLTVESRLREVSGCVKSFVANLNFVDLAGSERAAQTHAVGARLKEGCHINRSLLTLTTVIRKLSSDKRSGHIPYRDSKLTRILQLSLGGNARTAIICTMSPAQTHVEQSRNTXLFFATCAKEVTNNAKVNMVVSDKQLVKHLQMEVARLEAELRTPDRASSSEIIIMERDRKIRQQVEKEMEELKKQRDNAQSKLEELQKKMGDNQPGWNPFDSPQRTRKCLTYSGSLQPSNKMKIRSSIRQSATAPFMLKHEIRKLEQLQQQLEVEANRAIEVLHKEVECHKHGNQDAAETIAKLQAEIRGMQSVRSDRDVDMITDEGNGSDLKEEISRLHMQDNDIAKLEAKLENVQRSIDRLVMSLPNVGTQCNETTPKSNRAKKKKRMLLPLGVSNINRPNLIRAPCSPLSSSRPLEPEVENRAPEGDTVSHEGSERATPTKSEDTGDVSSRDETPRYRRSSSVNMKKMQKMFQNAAEENVRNIRAYVTELKERVAKLQYQKQLLVCQVLELESNEGKTNDMEEDSEENAGSLQDGPDSWDRLFKEQMQHIIQLWDLCHVSIIHRTQFYLLFRGDRADQIYIEVEVRRLTWLQQHFAEVGDASPAAGDDSTISLASSIKALRNEREFLARRMGSRLTEEERERLFIKWQVPLEAKQRKLQLVNRLWTDPNDQAHIDESADIVARLVGFCEGGNISKEMFELNFAVPASRKPWLMGWQPISNMIREKTQLW

SEQ ID NO: 182114 - protein, 49 aa, Oryza sativa
  Clone ID: PAT_MRT4530_79332C.1.pep
MDTQGGVVSLEVIVSRKPIMRRLSCLFGSLKLTSNCEPTPSRFAEVRAC

SEQ ID NO: 182115 - protein, 172 aa, Oryza sativa
  Clone ID: PAT_MRT4530_79333C.1.pep
MQLNLKARTRRNKVKVKGWRCAKIPPSPHVHQGGSTQPQYAPQFNQFEPIQQHTQGVPQQRPWADMIADVMREQFGLKPKDTGNLYMHPYPEWFERVAFPARYKVPDFSKFSGQDNVSTYEHVTRFLAQCGEASAVDALRVRLFPLSLFGSAFTWFSFLPYNSVNSWADLEK

SEQ ID NO: 182116 - protein, 162 aa, Oryza sativa
  Clone ID: PAT_MRT4530_79334C.1.pep
GFSDALRTILKEEGWLALYRGIGPGLLLVTHGAIQFTAYEELRKALIFAKSRQTRTDNRSCDDSLNSIDYAALGAGSKVTAILLTYPYQVIRARLQQRPGSDGTPKYKDSWHVVKETARHEGVRGFYRGITSNLLKNLPAASLTFVVYENVIKLFKAAKEKT

SEQ ID NO: 182117 - protein, 84 aa, Oryza sativa
  Clone ID: PAT_MRT4530_79335C.1.pep
MSRRSYGIAPLSPGSLLGGGGWGPHAHAPSSRGRGRGRVAAVAAGGWSRGHEQGVAEALASSTARLLPSGRAKVPGHNARRDKG

SEQ ID NO: 182118 - protein, 340 aa, Oryza sativa
  unsure (1)..(340): unsure at all Xaa locations
  Clone ID: PAT_MRT4530_79336C.1.pep
MPPGASPAASAEAWTWENAAAGAAAGFATVATLHPLDVVRTRFQVSGGRGCYDLPPYRNTAHAVYTIARSEGLRGLYAGFYPAVLGSTVSWGLYFFFYNRAKQRYLQGKDDQLRPVHHLVSAAEAXVCLFTNPIWLVKTRLQLQTPSHHTSRYSGFSDALRTILKEEGWLALYRGIGPGLLLVTHGAIQFTAYEELRKALIFAKSRQTRTDNRSCDDSLNSIDYAALGAGSKVTAILLTYPYQAYSFTLLILINSPVYPDFLLNLTAESHRILQQRPGSDGTPKYKDSWHVVKETARHEGVRGFYRGITSNLLKNLPAASLTFVVYENVIKLFKAAKEKT

SEQ ID NO: 182119 - protein, 173 aa, Oryza sativa
  Clone ID: PAT_MRT4530_79337C.1.pep
MVPGHHDVLRSFLGVKMIYGIKGTPGKVPFSTTTGCCRHPTTVGCPRLHRHHISLEKADLSSPCLGSGVGKGAAAKVALGINGAGKGAARSGSGASSSLPIGGGGQEEGWWLADPPPPSLRIGVRKGVAVAALGVSNVSSRHQRRGGGGGGSGSGTSSSLPTGGGGKEEGWQQ

SEQ ID NO: 182120 - protein, 1014 aa, Oryza sativa
  Clone ID: PAT_MRT4530_79338C.1.pep
MAAGYGEQPLPLVQEATARIFSGGADASRTTVRLAHFLLPRAGASHPPALPPLPPSDFGPVLDDGLKVEFKGWAPESPKLWRRWVAKLRPRHEPLWRKVGILDAVLATTCRVRRDEGALLQLAAFWCGETNTFVFPWGEATVTLEDVAVLGGLPLLGRPVRAPPQDALRGDVDALEAVRRALYLSKNKNSRPDRTAWARHFLERPPGKVKVGGGGGDEACGRLEHGAFLAMWLSLFVLPAAPFDVVRTEVLPLAARLARGRGVALAPAALASIYSDLSALKRYINLEKRYQAFVVWAPLQIVQLWLWKRFPELRPPETTGTNQPDGHGIPTESQWQNALKVLDPVYVHAVFMSPKKFEWRPYGSSSFALRPEMGSHRVHGQDIAESAELLSFILCLRACELVGMRCIEHYRPHRVARQLSFDQDIPGTLPRVNSNWVAAWETYKMEPKKFVFIVPKYKPAVTIDYVQWWKPYLLGCAAAVVKARKMKELPLLLSPRKRKIDVPPDVSPKRVGNGAKEKAVELSFEAPIGSVSTINELSCVSATKIVQGKSFQQGNKEPPDLVVAHDRENRSSLHSEVLQNLLVEDATNTGSNEALCAVTIADMHSTEVSFDVPVALVSIVDELPCVSASIEEQGKPCQQDKEEAHNLSVTHDRENRSSLHSEVLQNLVVEDATNTGSNEALGAITVADMHSAEVSFDVPVDLVSIVDELPCVSATKEEQGNDCQQDKEEARDLSVTHDKENRSSVVYVHSTPVVAANTGNNKAFGLSPIIDVQSAPEDVVVISDDDNEDEVGGMHQKPPQLETAPSSLEGQNAESQIISASSNPQDSRVMKDVRVQSNCDHETDNVRSNIVLRKESFEVLAVDTVQPGFNLLDTPTGETQTCAVTGQIDKGYMVEKEILAGVEGIKNVNEDVSPSFQEINSPVEDCMVANRRMGSGNNYSSGLAHVNTQLINRVVCTRTLYYLRPFWLSKHGQNKDASDTTTDEGTFQPRREVGTPQMIEEAFAARQAQKLSCK

SEQ ID NO: 182121 - protein, 207 aa, Oryza sativa
  unsure (1)..(207): unsure at all Xaa locations
  Clone ID: PAT_MRT4530_79339C.1.pep
ATSSSPAARGAPRIAFSGRRASERAMARGSTSVEVRRDGVAVITVSNPPVIFLSLDVIASLQRDYGEALRRSDVKAIVLTGAKGRFSGGFDINAFDKKPKNEKPGYLSIDFLTDIVEDAPKPSVAAIDGVALGGGLELVMVCHARVSTSSAQLGLPELQLGIIPGLGGTQRLPRLXGLPKALEMLLMSKPLKGVGAHKFGLVDAVVS

SEQ ID NO: 182122 - protein, 312 aa, Oryza sativa
  Clone ID: PAT_MRT4530_7933C.1.pep
MPTLLHDKHATPANGYLPLPSPQQQRFCGRLQQNQNNYPARKSNKPNKNKRNTLEDDIGGGGEDDDDALEALFKQLEEDLKNDDLSVEDDDDGISEEDMARFEQELAEAIGDIADADESGEGSSLGSEAYGNDEKTDEIKRPELKNWQLKRLARALKIGRRKTSIKNLAGELGLDRTLVIELLRNPPPKLLFMSDSLPDEDPSKPEIKEIEPSPVVDNADVTETKPQTELPVHVMCAEWSSQKRLKKVQLETLERVYSRTKRPTNTMISSIVQVTSLPRKTIVKWFEDRREQDGVPDHRVAFKRSLSETIAS

SEQ ID NO: 182123 - protein, 95 aa, Oryza sativa
  Clone ID: PAT_MRT4530_79340C.1.pep
GGGFPCGKGCLSRGKKGAFQLKKFLRIIGQGDNYFNGPKGAIFKVERKVPRVFFFGPPGQKPHEKWVFPKKNAPKKPFKKMFFLKNQKNGLGKHF

SEQ ID NO: 182124 - protein, 74 aa, Oryza sativa
  Clone ID: PAT_MRT4530_79341C.1.pep
MACFPVSPLVLGPHAFPMMGGVDHILLCAIAQPHRVLSALLPFVVAATTVVATLGNPAPWRYEATQELGGAVLG

SEQ ID NO: 182125 - protein, 59 aa, Oryza sativa
  Clone ID: PAT_MRT4530_79342C.1.pep
MALTGEEAAEQDAEAPPGGAQFHNIMMLWFPFEWSSAGLAFDGATSKHKVVRLFKKLSG

SEQ ID NO: 182126 - protein, 153 aa, Oryza sativa
  Clone ID: PAT_MRT4530_79343C.1.pep
MVDAAAASGDACGRVTEWETGLPAPGEMTPVSHQLVPPALAAAFGIDLAAVGVLLPSPSVDSPVSHLFFPVDEDDDEDEEGEGEGGNDDAPAAAAAGGGGGRCGKKARMVWTPELHHRFVEAVAHLGEKGAVPKAIVRLMNVDGLTRENVASH

SEQ ID NO: 182127 - protein, 121 aa, Oryza sativa
  unsure (1)..(121): unsure at all Xaa locations
  Clone ID: PAT_MRT4530_79344C.1.pep
LLLQPPPEPRSSPSAAAAAHXHRCPRRIRGLPQPPPETWSSHPPRPAVAGVDVVPSRRRSRXPQPPPEPWSSPSAAAARIAHSPHTRTHGHAVLSSTTMSSPHLPSLTLFLPEVQNTHTSA

SEQ ID NO: 182128 - protein, 400 aa, Oryza sativa
  Clone ID: PAT_MRT4530_79345C.1.pep
MTRAVTLDYGGKVQTRDYGGKAQTETLRPGPLRPANIIRAKFPTYKNGLNGIVVKLADGPEMPSLKETVTKETADMLDHRQRLSVRELAMKFEKGLNTATLLSNEVKWRQVALLERDILLKNLKTVLESLRGRVTGKTKAELEDSISMVDILAVQLSKREAELLQQKAEVTELAKSLKLASEDAKKIVDEERASAHTEIESARSSVQRVQQALQEHEKMSRTTGKQDMEELKKEVREARRIKMLHYPSKAMDLENEIKILRKTFVERSTDCVNLLKELELHKRPEGNDIPLFDLEGLQCLGSILRIVSQSSTTMDFSNISIQWFRVHPKESNKEIISGATRSVYAPEPHDVGRYLEAEINYGGEIAIAKTAGPIDPDAGLVDYVETLVRKRETEFNVVVL

SEQ ID NO: 182129 - protein, 52 aa, Oryza sativa
  Clone ID: PAT_MRT4530_79346C.1.pep
NMGLTLRPFFFEKKFPEPLSRKIGVDSRVGVKIYVFREGGEKKKKIFNLWKG

SEQ ID NO: 182130 - protein, 90 aa, Oryza sativa
  Clone ID: PAT_MRT4530_79347C.1.pep
ALNHFYFLNLFIHSSQRDGSMEVFLPSSGKQSTHTRGQGKGYKQDPNQHPKLKQTRGSMQIPKKKHRGKATFFFWPQLLRGTTTFCGFFF

SEQ ID NO: 182131 - protein, 252 aa, Oryza sativa
  Clone ID: PAT_MRT4530_79348C.1.pep
MATFLGSSPAFLARPVAAKPHLSCAQSPRPPSAQPPPEQQPPTPTPTQQQSMQAQPQARPRRAPAAAASGADSTDWVATSLTRRFGIGAGLAWVGFLAFGVVSEQLKTRFEVAQQLANTKDVEQEQEVVLPNGIRYYEMRVGGGDVPRPGDLVVIDLKGRVTGGEAFVDTFGDGKRPLALVMGSRPYTRGMCEGVEYVLRSMRAGGKRRVVVPPALGFGDDGADFGDAAAQVPPGATLEYVVEVDKVSIAPA

SEQ ID NO: 182132 - protein, 105 aa, Oryza sativa
  unsure (1)..(105): unsure at all Xaa locations
  Clone ID: PAT_MRT4530_79349C.1.pep
MQLNPIARTRRNKTKTKKTLSLCGNYLEAHQLNPMSYTXSYCWNRLYHLTSPTQAEPISVVADPDSSRSLLCFCNNPHLRFRFDPIFISDTDITKFANLLGYCVC

SEQ ID NO: 182133 - protein, 361 aa, Oryza sativa
  Clone ID: PAT_MRT4530_7934C.1.pep
MAAMVGAPLAVAAAAAAPGARVFLARPLLRRSPRGVACALRRRPSKYKNKIQNEEVVVEDDIGGGGEDDDDALEALFKQLEEDLKNDDLSVEDDDDGISEEDMARFEQELAEAIGDIADADESGEGSSLGSEAYGNDEKTDEIKRPELKNWQLKRLARALKIGRRKTSIKNLAGELGLDRTLVIELLRNPPPKLLFMSDSLPDEDPSKPEIKEIEPSPVVDNADVTETKPQTELPVHVMCAEWSSQKRLKKVQLETLERVYSRTKRPTNTMISSIVQVTSLPRKTIVKWFEDRREQDGVTFSTLLDQTHALPYFNRNRVAIFNMEKFRSSSEGNYVETGEGGSIWGPARLQHRDSERGVVV

SEQ ID NO: 182134 - protein, 100 aa, Oryza sativa
  Clone ID: PAT_MRT4530_79350C.1.pep
REEILQWQPGFRCFTVTLHTLPARRRVDSHLERKRRTIIRYGAVLSVQEEWVLLLTLASDILQSCERHHSLHPSRITELAPLNHMVEKPLSQLDGKAFLG

SEQ ID NO: 182135 - protein, 610 aa, Oryza sativa
  Clone ID: PAT_MRT4530_79351C.1.pep
MSSAAGDHLILGPPVAGLPVGNASSSAEAGSTSTAGHVAGAEVVEHLQSGAFGNPCLSFFALVDRDTPPQHLRDLLAAAWEHDALTALKLVFNLRGVRDNGKGDREGFYTAALWMHQYHPRTLAGNLSAFAEFGYIKDFPELLYRIIHGADARKVQPQPQPQPQPDHLLADAVNLETEDVVGEAPVKGSPSKKFLCGQNLRSDLEHHKSGKLSKIGLTAKCCPSPDSSFDQSTLLCEAIARGLFPRESDASYANMKEKHYIFLVRRRLRREVLVPLRKDLELPEIYMSKNQWSDLPYERVASEAMRIYEHLFKKHDEGRFTAFLKDHKDSREAAKHKAKKAAPQPPLLQDIITSLGLASHASNIKRREDAAQQWRTLVDHLRGKGSLCNCMAVCDVNKGGLVKSEGQKLLKICVGLGFLISELSSPPWTNSVHAFASNYFPLVLPVGSYREKLNFIRQMPCEERFNLKKVFEGIITRAVTSGVTPDNMVKTIFIFTDKFFEKASVRPVELIEHEDFNPLSSRPWHEEYRRVCEEFKRVGFQDVVPQIVLWNLKGPRSAGLTATKDGVMTLSGYSDELMRLFLENNGVVEPEDEMLDAIAGDEYQKLQVID

SEQ ID NO: 182136 - protein, 61 aa, Oryza sativa
  Clone ID: PAT_MRT4530_79352C.1.pep
EGKDVVAKAKTGSGKTFAYLLPMLHELLKLSAEGRIRKSAPNVFILVPTRELSQQVASIPV

SEQ ID NO: 182137 - protein, 69 aa, Oryza sativa
  Clone ID: PAT_MRT4530_79353C.1.pep
TPSRPKKEALVNPPMAFHPAMLHSKPNFWSVRLKWYKWVLFFGMKAMLVRINRFCASNCQLVFQYPVKK

SEQ ID NO: 182138 - protein, 328 aa, Oryza sativa
  Clone ID: PAT_MRT4530_79354C.1.pep
MKPLIEEAVTAFCGVSVPKSMAIADLGCSSGPNALTLISSTVDAIHRYCMECAQPPPEMCLFLNDLPSNDFNSVAKSLAEFKHSQDVSSHHVVVANMVPGSFYERLFTSDSVHFFCSSISLQWLSKAPEELAKRKIPMYDSDERLRLLNHEIVADAYARQFRKDFTLFLSLRARELVLGGRLIFSLIGRCSSNPASVSTQVWKVVSVALNDMASRGVISKEKFDTFHIPIYAPMENELNGIIEDEGSFQINKAMAHDTFLATGGVLASPNTIAAMVRAVFEPAIVQHFGFSAGIMDDFASVVERLSTTSAVEAEFPLACLCFSLTRAR

SEQ ID NO: 182139 - protein, 113 aa, Oryza sativa
  Clone ID: PAT_MRT4530_79355C.1.pep
RTNPSYRCGHSAVRHILPLSRRILRGCLPAVRTNVPAIVTTVVRRPFVRPCLSSSNKTACIPPTNSHPPIVSHGPPAYCQQDTSRRLRRPHSDVLLLSTSAVRQPSDRQPASA

SEQ ID NO: 182140 - protein, 224 aa, Oryza sativa
  Clone ID: PAT_MRT4530_79356C.1.pep
MAAPVTVYGPMISPAVARVAACLLEKDVPFQVEPVDMSKGEHKSPSFLKLQPFGQVPAFKDSLTTVFESRAICRYICDQYADSGNKTLMGRKEDGAVGRAAIEKWIEAEGQSFNPPSLAMAFQLAFAPFMGRATDMAVVEQNEAKLVKVLDVYEQWLGENQYFAGDEFSLADLVHMPNTDLLVRKTNKAGLFTERKNLARWWDEVSARPSWKKVVELQNVPRPS

SEQ ID NO: 182141 - protein, 257 aa, Oryza sativa
  unsure (1)..(257): unsure at all Xaa locations
  Clone ID: PAT_MRT4530_79357C.1.pep
MENLLXEDVLVNILHRLAPRCLAISRCVCKPWRTIIDARCLLRVDLLPHLVGGIFINFHDLILSEFISRPSIGPTISGNFNYLPHNSIVRDHCNGLLLLDGYADYPATRQYYVVNPATRQWVQLPPCPSSHPGMYSESTEYLVFDPGLSSQFENITVCEAIEEQKFEWDSDNDNVIDINNRSNLTGYVTILGFHPYKEVVFLSHTLTRGLAYHLNTRKVQDMGNIRPKYYGTDMGIQPFIEGSFPYTPWLGEFPEDN

SEQ ID NO: 182142 - protein, 500 aa, Oryza sativa
  unsure (1)..(500): unsure at all Xaa locations
  Clone ID: PAT_MRT4530_79358C.1.pep
MDMDTSHHYPWLNFSLAHHCEMEEEERGAAAELAAIAGAAPPPKLEDFLGGGCNGGSSGGACPPVQTTAPTAAELYESELKFLAAGFQLSGAAGAAPPVPALLPAAALEQTDETKQLALPPQAAVAPPPEQKKAVDSFGQRTSIYRGVTRHRWTGRYEAHLWDNSCRREGQSRKGRQGGYDKEEKAARAYDLAALKYWGPSTTTNFPVAEYEKELEEMKHMTRQEFVASLRRKSSGFSRGASIYRGVTSLASHVWPLARKSQVKNIYFDQDLIVACFLLSGTEEEAAEAYXDIRGDQVPVRLNAVTNFEIGRYNVESIISSNLPIGSMAGNRSTKAGLELAPSSSADAIAATEANHTGVAPPSTLAFTALPMKYDQADYLSYLALQHHQQGNLQGLGFGLYSSGVNLDFANANGNGAMSNCYTNVSLHEQQQQHQHQHQQEQQQDQQDDQSQSSNNSCGSIPFATPIAFSGSYESSMTAAGTFGYYPNVAAFQTPIFGME

SEQ ID NO: 182143 - protein, 158 aa, Oryza sativa
  unsure (1)..(158): unsure at all Xaa locations
  Clone ID: PAT_MRT4530_79359C.1.pep
MKGGKSTGAAKPXSKVVCEYNRXEKPAEKGKNIKAAKDPNKPKRAPXGFFHFMQEFRKELKENNPKNTTVAAAGKEAXDRSKSLTEADNAPYVAKANKLKAEYNKDIAAYNKVYSTAKNAPDKEEEEDDEEESDKSKSHVXNDEEDDQGSEEDEDYDY

SEQ ID NO: 182144 - protein, 560 aa, Oryza sativa
  Clone ID: PAT_MRT4530_7935C.1.pep
MVAQAATAAATTTAAATTAAVPMTNFQLFGSMVPVPVASMATATAPAAVAAADNGGHGSSSASQNASGSGEGQGGSMSLSLQLRPLGSTPTAAVAVSVPPMAAAPMMAGPAAAAPAPAPPLATMAVAQNASLAAVASALAAHRRNQATHRSAALHGHLRRCAEALAASRPADADAELASIARMASSDGDAVQRVAAAFAEAMARVVIRPWRGVSAALFPSDAGAAGDALTAWEAEFARQSFLNLCPLLHLAAVAVNEIILETTRNDKFIHIVDLGGIHHAHWVELLQGLATRRAAVRPCLRLTIVHEHKHFLGQAAQVLAAESDRHGVPLDLHIVESSVEALKLDALGVRSDHAVVIVSTLQLHRLVGAGILSTTAPPSPAAAAAASMITSPLPPANMSSKVDRLLRGFHLLSPRAIILTENEANHFVPSFTDRFASALPYYEQLFAAMEEAGAATVERKAAERYLLREEIKDVIACDHDGPRWARHETLGRWVVRMGAAGFALAPAITVVTAAGRVRAVAARLPGGGDERRYGVTEGGGWLILNREEKPMFCVSAWRRQ

SEQ ID NO: 182145 - protein, 77 aa, Oryza sativa
  Clone ID: PAT_MRT4530_79360C.1.pep
SNKFFRLQSFADRIVGTGDVTNQNTVITWKFLSNVCGLEIGGNLLASDGLPHQAITIRISYRFQLLRVGRTYRNIRN

SEQ ID NO: 182146 - protein, 204 aa, Oryza sativa
  Clone ID: PAT_MRT4530_79361C.1.pep
WVHVQYQRQAPAAPRSWRLGERPTVRRKEDVVAEALTEGVASTVPEKTMMSLRKGRRRLGGGRRLQKEGAARRLGPWLRRKGAEREGCRRYVTQWTLAIELNGTLTFQICCSPAYVLAWLLLDGAWLGFAVACVVGTACPIVYTSFLVNLATCVKPQLAVDGDDDAEAAARCWAATGPPPALLPRYSSPKKVHEKPPVLLELFL

SEQ ID NO: 182147 - protein, 672 aa, Oryza sativa
  Clone ID: PAT_MRT4530_79362C.1.pep
MDTPPPPPPPPPPTPTQSSPPVNWDALDALVLDFARSDRLLLPPASPSPPSSPSSSSTTTATSSSSSAPSPSSSYRSRLLIRRARTALEEGDVDAALALLRAHAPAALLDHRLLFHLHKQRFVELVRRGTEADREAALDCLRTALAPCALDAYPEAYEEFKHILLVLIYDKDDQSSPVANEWSIKKRFELAGLLSSILRTHLQAYDPILSMTLRYLIRNPFQSLLFSMSSKQFPTCLSSHPLQVDAVQPFSWHLLPFYEPKPITLWYKNELCRMKLDLPLLDKLIHEYCIYRGIVEGGSHVLPGLQSNNQSNDVNFVDKQEDSTETRIDFEMTNNQNGNCSTSDTSHHDSWSRRLRRVRSSASGQRRRKRWRGRVDDLDYGCETPLDANKHAILCSALDMDEDDMIVKPDLMADTGLPDSRCNQDQKYEVILEMRDLTRKGMASKVVEEINNMDPDFFLKNPILLFQLKQVEFLKLVASGDHGAALKVASTHLGPLAASNQALLKPLKETLVTLIQPCEDVLTKSVSLPVLASSLQIAMSRRLGIEEPQLMKIIRTTLHTHSEWFKLQMCKDRFEHFLKIDSLKEVDPSAGSHNMSKVLTDECANGSSQITTCSSGKVLDEGSSPQESSEVTCDENAILKVMEFLALPRADAIQLLMQYGGNAEEVIQQIFS

SEQ ID NO: 182148 - protein, 123 aa, Oryza sativa
  Clone ID: PAT_MRT4530_79363C.1.pep
GDGLRRRIRRRRPREGQIRRRREELGAQWRAAGTATDDAGGSGSGGSGGAVHGRAGSAALRWSSVLGGGSRGGGGNDGLERRRSRLVAAVVSGGCRRRRREWKRRLRRALADPQCRPLHRELL

SEQ ID NO: 182149 - protein, 68 aa, Oryza sativa
  Clone ID: PAT_MRT4530_79364C.1.pep
HEERERELVSSFFFFFFLITEAVNAFHHKHQTKFHTARMFSCEIRIREIAGNASQKSKKRRRKAAKST

SEQ ID NO: 182150 - protein, 135 aa, Oryza sativa
  unsure (1)..(135): unsure at all Xaa locations
  Clone ID: PAT_MRT4530_79365C.1.pep
AKSTCQWQSSXRRGSPKNAXFDRLQALEPIRSVRSQAGTTEFFDVXNELFQCTGVSXVVRRVFEPXGLLLPHYTXNGAXLIYIXIQGRSITXGPTFPSCPXTFXQQFQQSGQAQLXESQSQSHKXKDEHQKIHRF

SEQ ID NO: 182151 - protein, 56 aa, Oryza sativa
  Clone ID: PAT_MRT4530_79366C.1.pep
TWLQASTGSSDPQMLGTPCHRCWARTLKVAFSVGRRAYPRIPTSTSPIEQVVAAAG

SEQ ID NO: 182152 - protein, 270 aa, Oryza sativa
  Clone ID: PAT_MRT4530_79367C.1.pep
MAMFALATESARAAAAEDRRGADGIRRAEGSGGWRRRRDGHVARARCGAGEPDAGNLKAKCWKIIYNENMLVRKRKSWVAVSRAKGWRYVDLEVEAKTTMTSSVGGPHVRRTSGEEEGGTSVGRVKSRDNGKRKNWDSLRPLLKKFASNGHTEHLPFKVVSGIIRQLRQVARQSGCCGRSTWSHQSHSVGRFWRATVSRVAEKEQEGGDIISIRTAVMLSTSLNSCLVSSFSSLPSSTGGGGGVQGFGGMTLDEGEHILVQGLCVELDLT

SEQ ID NO: 182153 - protein, 48 aa, Oryza sativa
  Clone ID: PAT_MRT4530_79368C.1.pep
RSHGHETKKWSLPLNEICTYSTYNYKTSVIASTVFVNLIMQSLAHNLW

SEQ ID NO: 182154 - protein, 96 aa, Oryza sativa
  Clone ID: PAT_MRT4530_79369C.1.pep
EKKGPQKKKKREPKRNPQTKKPKGKSDTPRQKRKGKKRKGGAKAPRQRKRGQKKKKGGTARGKPDPQEENPRPEKRNRGPKKKTKKRAGRRKQIII

SEQ ID NO: 182155 - protein, 319 aa, Oryza sativa
  unsure (1)..(319): unsure at all Xaa locations
  Clone ID: PAT_MRT4530_7936C.1.pep
MVAGPPAPVSFLPGRPLPLPTLFKLSPRFSRPFPPLTTLPPRRIRARAVALSLLHRRRPPAGPPRSPGPSPAPASPPPASPHRRRPRPLPRRARRPPEHRRPRPPEPRRRLPPLRPPLSSSPSTRGEPGTAASFPPSLPLSRPPFRCAYGRCRRPXGAGAASRRRXRRGRLRARRAAAAWGPAVSRPRPRVRLTRGAHGAGRXSPGAPGPPWTHLGHIRTGLRASVAKYYRXFHMSSGTDEGYTSCGPVVEMSWHRAGVLLLGAQSCLPVPEVPAIGGVGSMYTSDQSKTYSNSRALGYGQAKQCTQVSGSRPRRNSWR

SEQ ID NO: 182156 - protein, 81 aa, Oryza sativa
  unsure (1)..(81): unsure at all Xaa locations
  Clone ID: PAT_MRT4530_79370C.1.pep
KVGAVLTHQTSLLGCVGSGLKVAAPVGPMVXQAQCDLGGPRLMGRAAHSDKLQRPRFWNPGTISMGHMVERPGNKFSRSHG

SEQ ID NO: 182157 - protein, 721 aa, Oryza sativa
  Clone ID: PAT_MRT4530_79371C.1.pep
MLSTDDFVHAGIITAAVFAVLLVALSTYGRRFRHPAIRFVMLGACTIFLPLTSSIISVLLRRSTESKCDGTAPAKGKSNPDIQNMWTLLLWIALIILIKGNADVASAGVAMSAAFPASGDVSIDGQRVRPPLELLAQYAWLAYLIYLCIPVAGWLGIVNKAIFIAFCVLGLAKMALKLAAFWSASFSFALGKNARLISGYMAQLVEDGGNHGGVPRYIVAGEKEEHVKENPKGYRIKGDALTNKKSDLVTLDRVWQMAAPDSDSLLATRPELRDLCLSYSLFKSLRRRLSGYPLADAGSPNALDFVLRGMGQGGGGGSAERFFRVLIDELWFASDFYYSPISLSSFSGWCAVLNHLFSALIVVGAVTVGWIYRTKQVVIFDGSQAFYYIVTVVLLLSVVFIEIWEIVADVCSNWTKMALLAHYIRHDSPWRRFRFVHSALDAVLRWFRPARRWRDKIGQNSVLEPRRFRKRNGFLAEKFYGRAGLMESVGVSLIVIEAMYRSFRNIYGLRTNELASRRNSESASRRQRRQGEFDTVTDKILAWHVATRLFEITHARTSPDNKIVACHLSYYCAYLVAAVPELLPDCPAWTQKRYKKVATDVRAVLGSHGIAGGSTASASDAQLSQLGDRDKVLRDGVAIVGRLVEEFAEGEGVDEELAWQFLANFWSEMVIYVAPSENVKGHVEAMGRGGEFVTLVWALLLHAGITTRPPAQAVLYRRETV

SEQ ID NO: 182158 - protein, 90 aa, Oryza sativa
  Clone ID: PAT_MRT4530_79372C.1.pep
LARYVSISKAACSFSWPELYSSYIYVSIYSIESLVKGSGVVACVVWCISLPSSNRVTPTKCIALDPVFNIRNTATIGSTHSPADNSAGML

SEQ ID NO: 182159 - protein, 96 aa, Oryza sativa
  Clone ID: PAT_MRT4530_79373C.1.pep
FFFFFFFFFFFFFFLTLGRTLGLYTENTGPEPAGGPTYPKMSRIKTSPNKGHSCPREKREPAHKTKQHTTRRQKMKSRGGQRKKLTHRKKVALTDR

SEQ ID NO: 182160 - protein, 48 aa, Oryza sativa
  Clone ID: PAT_MRT4530_79374C.1.pep
GQVPLHPKLPVLRKCSICFRLDVLLFLSIQSVVSSMHHKLSLVQGGVP

SEQ ID NO: 182161 - protein, 55 aa, Oryza sativa
  Clone ID: PAT_MRT4530_79375C.1.pep
SKQALKSYAVVFDAVYTPKETRLLREAAECGPLVVSGFEIVIDSSMGQFVHLKIQ

SEQ ID NO: 182162 - protein, 2027 aa, Oryza sativa
  Clone ID: PAT_MRT4530_79376C.1.pep
MEEDQSAIPVAEGAIKSIKLSLSTEDEIRTYSINDCPVTHPSQLGNPFLGLPLETGKCESCGASENGKCEGHFGYIELPVPIYHPCHVTELRQILNVVCLKCLRVKKGKVKQTEGKDNTSALSCYYCRRMSDRLALYSVLCLFSNMSSLKTVHRIKVMLYDGVLLELDLPALSLKEIKTADGAFRLELKMPPRKFMTEGSWNFLDKYGFHHGGTSHCRTLLPEEALNILKKIPEETKRKLAARGYIAQSGYVMKYLPVPPNCLYIPEFTDGQSIMSYDISISLLKKVLQKIEQIKKSRAGSPNFESHEVESCDLQLSIAQYIHLRGTTRGPQDNTKRFAISTDPSALSTKQWLEKMRTLFISKGSGFSSRSVLTGDPYIGVDVIGLPSEVAKRITFEEQVTDINLNRLQEIVDKGLCLTYRDGQATYAITVGSKGHTTLKVGQTISRRIVDGDVVFLNRPPSTHKHSLQAFRVYVHEDHTVKINPLICAPFAADFDGDCVHIYYPQSLAAKAEALELFSVEKQLTSSHSGKVNLQLVSDSLLALKHMSSRTMLSKEAANQLAMLVTCSLPDPAVIKSKPYWTISQIVQGALPKALTSQGDKHVVRDSTIIKLDLDKESVQTSFSDLVYSTLSVKGPGEALQFLNVLQPLLMELILLDGFSVSLQDFNVPKVLLEEAQKNIEKQSLILEQSRFAENQVVEMRVDNNLKDIKQQISDFVVKRSHLGLLIDPKSDSSVSKVVQQLGFVGLQLYREGKFYSRRLVEDCYYTFVNKHPAVREEHSPEAYGLVRSSYFHGLNPYEELVHAISTREAIVRSSRGLTEPGTLFKNLMALLRDVVICYDGTVRNVCSKSIIQLNYTEDDALDFPSAIGPGEPVGVLAATAISNPAYKAVLDASQSNNTSWERMKKFCKEKAAIAVQGCLRRITLEDCATDICIEDGNWAAPAGFQHPVPPPQCKILPVPIPIPAHGSVKFPPVPIPAPEHLKYNIHVVRYQKQIGLDGTSEAAPALVGHIHLDRAHLERINISTEDILQKCQEVSGKYGKKKGHLSNLFKNITFSTCDCLFTQKLVDGKLPKLPCLQFFVSDNMIVSESVERAVSVLADSLCGVLLNTIIKGDPRIQEAKIVWVGSDATSWVKNTQKASKGEPAVEIIVEEEEALHIGDAWRTTMDACIPVLNLIDIRRSIPYGIQQVRELLGISCAFDQVVQRLSTTVRMVAKDVLKDHLVLVANSMTFTGNLNGFNNAGYKATFRSLKVQVPFTESTLITPMKCFEKAAEKCHSDSLGCVVSSCSWGKHAASGTGSSFQILWNESQLKSNKEYGDGLYDYLALVRTDEEKARYTFFDDVDYLAEENEADVCLSPELDGTIGQPIFDDNLEEQDVQNNSSWDNGTTTNASWEQNGSAGNDSDKWGGWNDAAAGADTGVTKPANQGNSCWDVPATVEKSSSDWGGWGTEKAKEKEKISEEPAQHDAWSVQGPKRATDGGASWKKQSSTQNDGNSWKENKGRGSNGGSWEKDNAQKGSWGRGNDEAENNNDVQNKSWETVAADAHASTEKSWGNVTASPSDNAWSAAPVSQGNGSSDTKQSDSWDGWKSAGVDKAINKDKESLGNVPASPSFSAWNASPVSQGNERSDAKQSDSWDGWKSAGVDKAINKDKESLGNVPASPSFSAWNAAPVSQGNERLDAKQSDSWDGWKSAGVDDSVKDKESWGNVPASPSDSAWNAAPVSQGNESSDAKQSDSWDGWKSAGVDASTNKDKESWGNVPASPSDSAWNAAPVSQGDDVWNSAEANESRNKDWKSDGWGARGGNWRGQRNNPGRPPRKPDGRGLPRRPDERGPPRRHFDLTAEEEKILGEIEPTVLSIRKIFRESIDSIKLSPEDEKFIKENVLEHHPEKQSKVSGEIDHIMVDKHQVFQDSRCLFVVSSDGTRSDFSYLKCMENFVRKTYPEHGDSFCKKYFKRRRDQPPAADGGTAPGTPAGATQSTAVDTQEGTSQQTQPDIATAPAATQQETLQDTPAPPADDGLLGKGPSPSD

SEQ ID NO: 182163 - protein, 214 aa, Oryza sativa
  Clone ID: PAT_MRT4530_79377C.1.pep
MAAPPARARADYDYLIKLLLIGDSGVGKSCLLLRFSDGSFTTSFITTIGIDFKIRTVELDGKRIKLQIWDTAGQERFRTITTAYYRGAMGILLVYDVTDESSFNNIRNWIRNIEQHASDNVNKILVGNKADMDESKRAVPTSKGQALADEYGIKFFETSAKTNLNVEQVFFSIARDIKQRLSETDSKPEDRTIKIKSEGEAEAAAAQKSACCGS

SEQ ID NO: 182164 - protein, 215 aa, Oryza sativa
  Clone ID: PAT_MRT4530_79378C.1.pep
MAAPPARARADYDYLIKLLLIGDSGVGKSCLLLRFSDGSFTTSFITTIGIDFKIRTIELDGKRIKLQIWDTAGQERFRTITTAYYRGAMGILLVYDVTDESSFNNIRNWIRNIEQHASDNVNKILVGNKADMDESKRAVPTSKGQALADEYGIKFFETSAKTNLNVEQVFFSIARDIKQRLAETDSKTEDRTIKINKPEGDAEATTLQKSACCGS

SEQ ID NO: 182165 - protein, 286 aa, Oryza sativa
  unsure (1)..(286): unsure at all Xaa locations
  Clone ID: PAT_MRT4530_79379C.1.pep
MAGGEHGVNGQHEETRAMEEGSRDHQARCENSEQDGGSKSSSNNHPMFSVQFAQKVIAEILGTFFLIFAGCAAVAVNKRTGGTVTFPGICITWGLAVMVMVYSVGHISGAHLNPAVTLAFATCGRFPWRRVPAYAAAQVAGSAAASAALRALFGGAPEHFFGTAPAGSDVQSLAMEFIITFYLMFVVSGVATDNRAIGELAGLAVGATVLVNVLFAGYTSXASMNPARTIGPAIILGRYTGIWVYIAGPVFGAVAGAWAYNLIRFTDKPLREISMTASFIRSTRRN

SEQ ID NO: 182166 - protein, 36 aa, Oryza sativa
  Clone ID: PAT_MRT4530_7937C.1.pep
HFHSSNTHCLRRFSKLIHWRWLSGLTLRFEFALPCR

SEQ ID NO: 182167 - protein, 215 aa, Oryza sativa
  Clone ID: PAT_MRT4530_79380C.1.pep
MRYRLLLLLLLWVGCLLPHPDSEIISFAKRTAKDLKLPANFVPQMLHSIQGQLTEFRSYEGEEMQIREKIVPLKIDLRINNTVIRDQFLWDIGNLDSDPEEFARTLCDDLNITDPEVGPAIAVSIREQLYEIASQSVSAMREAARVSKKGRRAPEFASNSKAMNNSLDLFKYFGSKGSVVRKRKEWYLYEPVVDVITNEEVGVTDATEEINSRCD

SEQ ID NO: 182168 - protein, 41 aa, Oryza sativa
  Clone ID: PAT_MRT4530_79381C.1.pep
MAVCSVVVLGFPGAGSFVSSFYLIFTTSYEDDICGALSYSE

SEQ ID NO: 182169 - protein, 323 aa, Oryza sativa
  Clone ID: PAT_MRT4530_79382C.1.pep
STPASFTGSCPSPPCRNSNVPLGYVRARSTSGGRTVCSCGRGGFRNASTTRVLRSGSQPKAPAPPPSAELTPPATTLNHDSPLPPPLSASSPAEPPAAIPPPNSRSPSVQGGSFTSYETTVTDVMNVNAMGSPIAAPGDILAIPLPDHGLIVANGTYALTAGNCVQCSCGPGNLNLYCTPASLTGSCPSMQCSNSNVLLGCNVSSCSYGGFVNGTITTLLSTGLQSRCPGPHQFPELTEPPTTVNHDSTFLPPLSAPGPAEAGGAIPPPNSGSPSVQGGSFTLPKVSTANGPAGSVSEAPWMNKPHQILSSFILCLLLLYSQM

SEQ ID NO: 182170 - protein, 146 aa, Oryza sativa
  Clone ID: PAT_MRT4530_79383C.1.pep
MAVVRVAAMDGDGDGCLRRRFAAISDAASSPSSFVSDRRVAHAALVERGAALADRLERRLPLPRVVTREMVALAHSRASLSDCLINATTGHPFIFEGTFFPSLVARINFGTPTTDPVRYPDDRVWESNMARMPNFLVDVALATAQT

SEQ ID NO: 182171 - protein, 122 aa, Oryza sativa
  Clone ID: PAT_MRT4530_79384C.1.pep
LFYYWYLTNDGMEHLRNYLNLPSEIVPATLKKSARPPGRPFGSGPPGDRPRGPPRFEGDRPRFGDRDGYRGGPRGAPGDFGGEKGGAPAEFQPSFRSSGGRPGFGRGGGGGFGAGPTSSSME

SEQ ID NO: 182172 - protein, 127 aa, Oryza sativa
  unsure (1)..(127): unsure at all Xaa locations
  Clone ID: PAT_MRT4530_79385C.1.pep
KTGAPEKGGPRTPRGLSPPPPFWPRRGAPPGGGWGGPPQKNRPLRCPGPPWPPGGPXGPKGGGPPGVNPXAGGPPKRGASPGPSKNWGLCXPCPPGGPPPRGKPPGGPPGSFSPTGPGHGGVPKSRG

SEQ ID NO: 182173 - protein, 34 aa, Oryza sativa
  Clone ID: PAT_MRT4530_79386C.1.pep
NMVFLFNHIEIHIAAPERDTYKIYACIIMLCRCD

SEQ ID NO: 182174 - protein, 59 aa, Oryza sativa
  unsure (1)..(59): unsure at all Xaa locations
  Clone ID: PAT_MRT4530_79387C.1.pep
XTNLLSLINLSLANVYCSTILSNHDVIKLKKFDSQFTCKLCNWFFYSSTFNAIYMCLNI

SEQ ID NO: 182175 - protein, 127 aa, Oryza sativa
  unsure (1)..(127): unsure at all Xaa locations
  Clone ID: PAT_MRT4530_79388C.1.pep
LYIETDFIQRQEQKARYTDTRXSMKAAHMAETYQTYDHDSKHPHKKRKHSRCEIAGELTPHGCNVTTEHTQNSSLAKEHXTTSYTEAMPGTTYSXLSTTKTLTTEASSTPSXTRNGVNIPVKSTPTN

SEQ ID NO: 182176 - protein, 71 aa, Oryza sativa
  Clone ID: PAT_MRT4530_79389C.1.pep
MAIEPDKIEICFDTRGSEAGITAKVVFCCDSYSCVAIVQEMAMLGVHQLVKPTMAVCLDGSVTIFVKTSVN

SEQ ID NO: 182177 - protein, 370 aa, Oryza sativa
  unsure (1)..(370): unsure at all Xaa locations
  Clone ID: PAT_MRT4530_7938C.1.pep
MNRVPTSWGFVYSRVNNRERGARGPGPRGWEPRGSLTVHGGPGAPGLTPAGAVGPTRQPQPRARAADGWAPRGNRAARPKVATSTRPAGGGARAPMVAAGDHWRGGAAAERGEGXGERRRRSTAHPGATAAAEEAAGAEGGGGAARVDGVGGAPVVGERNGGVDEVGKDAAKLKEAAPRWEAVRGDDGGGPELGGDGGERERRRELESGEEEGRREAETDGRSAGRVXIGQGRERAAERGRKPARRSRAPSMAPVGLGEGFPNESKGEREGKLGGKGEGITGSDSPHLNARGDGGXGGFDGGGGAXAQAERRERREVGDDGWAPPVSEGGGRARPSAARALGEAEWAAGRRRERGREMGRAGPRGGGGGF

SEQ ID NO: 182178 - protein, 799 aa, Oryza sativa
  unsure (1)..(799): unsure at all Xaa locations
  Clone ID: PAT_MRT4530_79390C.1.pep
MDLEKSTSTTASLKKLQDDSALPGRGTMXREAGGIEPEPILGRMVVVEDYISCGFLPPPSEFLLPVLNFYVLSLLHLNPNSIAFLSIFSHLCEAYIGVEPFLYLFRFYYELRWMEPNRVSGCVGFXLRDRLKSRYIPFQCPSSRSKWRARWFYLQIENSDLVLVVPEDQPEKIPEWTAKPALTPSLQSFIDIIDDLRKXGLSGYEVTADFVGRRIQPLQARAHLAFDYSGPEDTTRVSPRGLDSDTVGRRVSQAMISAPSAVGDIPVPLCDKDLAERTAAINAAALLKESVAKEASDAAATTTSGSNVPKRGRKFSSVLGTRWKATNSADLNASPLPQRRQRLVTIGEKMAWAKVAQGGTDAASSASPAATSTGAVVATKDQEAAPSSPVVSLVPTRSLSTDALTWGELQAEVERILXAGARSVGREIEEARAAALSANQRAEQLARDLAEAHEDLLKMRELVAGNEMQRRRLEHRMSELEGSMIDIRGSLQXSFTSLHQLAGECGVTTTIPTHPDEFSLTSSLAELATAMEEIPSKHAARIGEETSNGIYTGTCHVLACMRLAHPDLDLKRALDRGAVDDACKATMEEVGDLGENVDIEDVQQRGQPDLPVIVPALTLEPFVPREEISQSPSAEANMAMTRANFENTLADRDRRIQYWKTKLEVAELEKTMVEVKKDXAVEALRGXRVCKELRVPRGDPEESAAGYISWLNRACAQLEGIGKRIDEALKQECRRASRYAGGHVLACIRDHRPQLHLEFLREGFSRSQRTPAEIDGLAQSMVPLAEKVFVSYRKISKGS

SEQ ID NO: 182179 - protein, 132 aa, Oryza sativa
  unsure (1)..(132): unsure at all Xaa locations
  Clone ID: PAT_MRT4530_79391C.1.pep
AARRCRGDQVRRLKYNSTVEIVXQNPTAFPSENHPIHLHGFNFFVLAQGLGNFTPGNVSGYNLVDPVSRNTLAVPTGGWAVIRFVANNPGMWFFHCHLDAHVPMGLGMVFAVDNGTTPDSFLPPPPADLPKC

SEQ ID NO: 182180 - protein, 111 aa, Oryza sativa
  Clone ID: PAT_MRT4530_79392C.1.pep
QAMISAPSAVGDIPVPLCDKDLAERTAAINALPLTDFIGPLVDHQAAALLKESVAKEASDAAATTTSGSNVPKRGRKFSSVLGTRPFHLAQDLNASPLPQRRQRLVTIGEK

SEQ ID NO: 182181 - protein, 86 aa, Oryza sativa
  Clone ID: PAT_MRT4530_79393C.1.pep
NGSELAMVKEEKRERKFMVEFLALYLLWRKGENVNNSTRLGLCTYLQPLIFFSCFLARSCCFLCKPAKAYSENESFAKKLRRRIIW

SEQ ID NO: 182182 - protein, 92 aa, Oryza sativa
  Clone ID: PAT_MRT4530_79394C.1.pep
SGSTQAFRDPVGGIGIGWAGWRGPGFQYLEGLVGLSLAFYWDREILKDLVEKDLGPNILDHDLDLEDDQKRQKPPFKENAKKRVKRGKKALG

SEQ ID NO: 182183 - protein, 83 aa, Oryza sativa
  unsure (1)..(83): unsure at all Xaa locations
  Clone ID: PAT_MRT4530_79395C.1.pep
MSFVISLTPLTIXDAIIGNNLISSWFGMVHSWFGDRTVQPGWLFRMDGPIQQGMLYSVGLILFNYYLTVLLNSEMFAKCCFCK

SEQ ID NO: 182184 - protein, 20 aa, Oryza sativa
  Clone ID: PAT_MRT4530_79396C.1.pep
RIISQLPFHTSNNSTFLIQP

SEQ ID NO: 182185 - protein, 83 aa, Oryza sativa
  unsure (1)..(83): unsure at all Xaa locations
  Clone ID: PAT_MRT4530_79397C.1.pep
MSFVISLTPLIIVKDAXTGNNLISSWFGMVHSWFGDRTVQPGWLFRMVGPIQQGMLYSVGLILFNYLTVLLNSQMFAKCCFCK

SEQ ID NO: 182186 - protein, 93 aa, Oryza sativa
  Clone ID: PAT_MRT4530_79398C.1.pep
MQPLSPPSPTTLPDPGWVGRQLDLGGGNAAADLPPPPLHAAVAAAQLRPAAVRPTPPATGLLPPPFVWTWEGGEASRARGAPLHSVVIPAPRL

SEQ ID NO: 182187 - protein, 84 aa, Oryza sativa
  Clone ID: PAT_MRT4530_79399C.1.pep
MSFVISLTPLIIIKDAITGNNLISSWFGMVHSWFGDRTVQPGWLFRMVGPIQQGMLYSVGLILLNYYLTVLSNSQMFAKCCFCK

SEQ ID NO: 182188 - protein, 150 aa, Oryza sativa
  unsure (1)..(150): unsure at all Xaa locations
  Clone ID: PAT_MRT4530_7939C.1.pep
ASSFCDDXRQPCFSALKKIQALFKKLEHGVYSLARVPDGAMNRYPXYHIPWEWMQDTGIVSQIKLQSVKLAMKYLRRVSSELEAIKDGPDEEELMLQGVRFAFRVHQFAGGFDGDTMRAFQELKEKASTFQSQRECQNQHLQQHKLAGRS

SEQ ID NO: 182189 - protein, 42 aa, Oryza sativa
  Clone ID: PAT_MRT4530_793C.1.pep
IQAVNSFTLVRILFCLSDTAFAYESQDCLLMVIHGLIPNCER

SEQ ID NO: 182190 - protein, 66 aa, Oryza sativa
  Clone ID: PAT_MRT4530_79400C.1.pep
AVLCLYSILHDYPQTLRNCDSEIIWDGYIVQLLECVYVHFILAWKSLSKSLLPTLGDRFTMFLKIC

SEQ ID NO: 182191 - protein, 241 aa, Oryza sativa
  Clone ID: PAT_MRT4530_79401C.1.pep
MGWWRGGDLEVISYRRGPKFPKFLRRSSYRRRRRTSWQWTQWCRVRASLSCEDRPDIARTFAALQLHARRAEITTLFGHAWSVLLIIADEQQRNVRRRPGLVHAIFFAGCMIGSSIFILDGRCIETGASRFYYDSSRKRLRPARQRRREEEKERMKKMINASSNHAEETSTKRPQLPPPELPTRAMHSCLRPPVSACRCVCLAAALPDASHEEDGLDVVFVLLLVGGDEDHAPDAAADRAW

SEQ ID NO: 182192 - protein, 49 aa, Oryza sativa
  Clone ID: PAT_MRT4530_79402C.1.pep
MELEGSGSSGTTIGRGGSATPGPQPSLTANVVMTAVTDYGKDDDGALGS

SEQ ID NO: 182193 - protein, 66 aa, Oryza sativa
  Clone ID: PAT_MRT4530_79403C.1.pep
MACCGPRSPLPLLRPSCDGLLRCVVVLPCPSRAAGWLLGRAAIRPRHRRINRRLCLRVRRAHHLRR

SEQ ID NO: 182194 - protein, 196 aa, Oryza sativa
  Clone ID: PAT_MRT4530_79404C.1.pep
MPPEPPASPPPPKKMSPPGAGAGAGSKKKQQQQADAAELARVFELFDRNGDGRITREELEDSLGKLGIPVPADELAAVIARIDANGDGCVDVEEFGELYRSIMAGGDDSKDGRAKEEEEEEDGDMREAFRVFDANGDGYITVDELGAVLASLGLKQGRTAEECRRMIGQVDRDGDGRVDFHEFLQMMRGGGFAALG

SEQ ID NO: 182195 - protein, 824 aa, Oryza sativa
  Clone ID: PAT_MRT4530_79405C.1.pep
MVYGDYLRRRIAPLQRRARGAWEYTGSEDYMRTHQGVKWDWVPEDFKMVIQRVLNLSSVEASLIPQGVLPLCSDPDRANILTIMQAVGASEERAPRGHDGAGGSRRGEQSTPGGGRASGPRDGGPGGSRPADARGKRKQEDTPSPFPPRGGGAVRASSRRPEGAVPTSQPEGERKKKRLRKMGGPNHAGETSSPPQGGRLADLLAGSSQRPLRPYSFPHLPRQVFTHPFLFVFWFFFCLSEIPSRPLRHSKSGRSEAGETATAEARRREADRREAADRLREAEVAAQEAVRVRQAEEAAREEARLRPAEESVRETEAARQAPDPTPPKATTTSEATHDEAAGAPLGPDPSGDAQDEPASGDAPESGTSIGGPSRAAPTPRRLSPPPSAAPLSTKPLLQAFAAANTTVLDGLSAQMEVLQAERAEVDAAWARVEEGRRSVEAMVEAGRKAHRRHASELEARRRDLAEIAREVEEERETALIATTVFNAARDDLRLQYGSRAAELEKKLDASRQREEDLEARATVLEERARALDMKEKELVGREAAVAIREATLAAHEAACAEEESALRLREDELTERERALEEAEAAAQRREEQARLNLEGARAERAALDQRAAELEARVKELDARACSGGAAAGDGDLAARLAATEHTIADLQGALDSSAGEVEALRLAGEVGPGMLRDAVSRLDRAGRQAGLWGGRTAKYAANQGGLAQRLSEMAGTLQRLPEELEETIKSSSRDLARGAVELVLASYQARDPDFSPWAALDEFPPGTEDGARAQVWDAADHIVHSFEGTAPRLAFALDSDEEGGDGGADESDDEACGPGASK

SEQ ID NO: 182196 - protein, 74 aa, Oryza sativa
  Clone ID: PAT_MRT4530_79406C.1.pep
PIVVCILFPQFSLIFAITLHHLLQISFDYSFFSGDSFLMYIMVNRETHARAIPPQLLPKDQRIAFQKLSQHCCS

SEQ ID NO: 182197 - protein, 1623 aa, Oryza sativa
  unsure (1)..(1623): unsure at all Xaa locations
  Clone ID: PAT_MRT4530_79407C.1.pep
MGFVSGIDDFAFPLGQAFRFGSLNFITNDFGKISLLDSDSNQSGRDQVPVPFGIPNSAYSKIISPESASNHLDEIQSARPRPDQDDGSYPSILMKLPDDLAAVFTAKTSPTRRSRRAPASAPIQSRSREVGVILQPLGTVSTEELDGYLSSPGVSSRPTEILDYDDFGYHYDHGDLDNFDDSYEDNYTPLFFGVFMADNETEEQRQAREADQDRARQEAERRRLEEERQRQERERLQREQQDHEQIAKEAEDRRQRALESGRRARELIGQQDVDGTAVFHTPQQNAVAAITLLDTLLKEDALNQADHVVNILNQMKTMIAASVPANSASTRTPTGSRVPHLRSHDYHQPSLSIIGTGSSRRSRGHDERSVHSPPERHRERRVERPRSPLHQRPVDLRDMINQRRAARGHRHSPNLYDDDVDGVAAFTNDLRRVDWPAGFKPTGIEKYDGTTNPESWLTVYGLAIHAAGGDSKAMANYLPVALADSARSWLHGLPLGMIGSWAELRDHFIANFQGTFERPGTQFDLYNISDITDDVIIAAFTKGIRHEDLVGKFGRKPPRSVKQMFEKANDRAPLESQXKDTPTAGESGSNNHKDRKXEIAIKFDRSDHPDRVIHPGRYPLVLDPVVRNVKLRQTLIDGGSALNILFAKTLDYMQIPRTELKPSNAPFHGVIPGLSATPLSQITLPVTFGTRENFLTENVCFEVVDFETAYHAILGRPALAKFMVVPHYTYMMMKMPGPRGVISLRSDIKQAVTCDKESCEMAQTHETTLTREEIRLAATTASEGEVPATKLTKTEERDAKTKKIPLDPSDPDKTTDRKDAIKEELTKLLATGFIKEVLHLDWLANPVLVRKKTGQWHMCVDYTDLNKSCPKDPFGLPRIDQVVDSTAGCELLSFLDYYSGYHQIRLKESDCLKTSFITPFGAYCYITMPFGLKNAGATYQRMIQRCFSTQIGRNVEAYVDDVVVKTKQKDDLIADLEETFTSIRAFKMKLNPEKCIFGVPSGKLLRFMVSQRGIQANPEKXNAILNMKPPSSQKDVQKLIGCMAALSXWGLKAQKAFEDFKKLLTTPPVLASPHPQEPLLLYVSATSQVVSTVLVVEREEEGHIQKVQRPIYFVSEVLADSKTRYPQVQKLLYGVLITVRKLSHYFQSNSVTVVTSFPLGDILHNREANGRIAKWALELMSLDISFKPRTSIKSQALADFLAEWTECQEDMPEEKMEYWTMHFDGSKRLTGTGAGVVLISPTGERLSYVLWIHFSASHNVAEYEALLHGLRIAISLGIRRLIVRGDSQLVVNQVMKEWSCLDDNMTAYRQEVCRLENKFDGLELTHVLRYNNEAADRLANFGSKREAAPSDVFVEHLYEPTMPRKETVEAMDTQGVSMIEADWREPFIKFLSKQELPQDKNEAERISRRSRLYIIHETELYKKSPSGILQRCVSLEEGRQLLKDIHSGICGNHAATRTIVGKAYRQGFFWPIAVSDADKIVRTCEGCQFFARQTHLPAQELQTIPLSWPFAVWGLDMVGPFKRAVGGYTHLFVAIDKFSKWIEAKPVITITADKARDFFINIVHRFGVPHRIITDNGTQFTGGAFKDFCEDFGIKICYASVAHPMSNGQVERANGMILQGIKA

SEQ ID NO: 182198 - protein, 124 aa, Oryza sativa
  Clone ID: PAT_MRT4530_79408C.1.pep
LTRPPTRPPTSRRLLWSLRDWNPEKSEKCRSILEIVMLTLQYLQMSYMILIFQRSTAAAFRRYRRSSPLRHLQKCQYLQGACLHLVVSEAKEESKELVKTNCPDATNSSWMLSSVGRSVYIYRN

SEQ ID NO: 182199 - protein, 808 aa, Oryza sativa
  Clone ID: PAT_MRT4530_79409C.1.pep
MARGSALLDGSVLPPSRIVSEKQAGLPRRFMPESATGREIVMLGEGRPAPDYPGRSVFFLPFAMAGLVPPFSSFFMDVLEFYDLQMAHLTPNAVMTLGIFAHLCEMFIGVRPSLRLFRWFFTVQSVSPPSVVGGCYFLPRGPKSDWFYTPLADEARLRLPSQPPAQASSWRAPVDLGDGYDAVLDRLAGLRSQGLTRAMVYGDYLRRRIAPLQRRARGAWEYTGSEDYMRTHQGVRWDWAPEDFKILVQRVLNLNSVEASLIPHGILPLCSDPDRASILTIMTAVGASEEQAPKGHDDAGGSRRGDQSTPGGGRASGPRVGGSGSSRPTDSRGKRKLGGTPPPSPPRGGGAVRASSRRPEGAAPASQPEGERKKKRLRKMGETEPSRGNLISPPRWSFNRPPRSDISSRSSHHPKSGQSEAEDPAAAEARRRESDRREAADRLREAEEAAREAARARQAEDTAREEAARARQAEEAAREEAARVRQAEAMAASEAVRDEAAGASLGSTPSGDAQDQTGPGAARDEAAGASLGPTPSGDAQDQTGPGVARDKAGASIGGPSRAASSPRQPFPTPSVAPLSAEPLLQALAAANTAVLDGLNAQVEALQAERAELDAAWARVEEGRHSVEAMVEAGRKAHRRHVSDLEARKAALAEIAREVEEERGAALIATTVMNEAQDSLRLQHGNWEAELKKKLDAAQGVLDAAAAREQRATETEAALRRREEALEARAMALEERACVAEKDLADHEAAVASRETTLAAHESACAEEESALRLREDALTERERALGKAEAEAQRLADSLSLREAALTE

SEQ ID NO: 182200 - protein, 44 aa, Oryza sativa
  Clone ID: PAT_MRT4530_7940C.1.pep
RVGKRVGLTLFRCLCRQLFSPLHLNSETHERFFDHKTASRVEIA

SEQ ID NO: 182201 - protein, 113 aa, Oryza sativa
  Clone ID: PAT_MRT4530_79410C.1.pep
MARNSPAESSSGGAASGLHMHGFFGRIGEDDDVMLVTKQLSRTRSEAAGTATQSCGYTMTTAQPRSRAPMARSAFPEIVENERRDGFFSMAGSKKKERAAGSLLPRFLSIGVE

SEQ ID NO: 182202 - protein, 1044 aa, Oryza sativa
  unsure (1)..(1044): unsure at all Xaa locations
  Clone ID: PAT_MRT4530_79411C.1.pep
MVMDRTSWLWRREPSDKSPGGAENTVSVSSHSEHYSDDQEVLRPVSNNASPHLGQSPGMPSRVRDDGTQEIGVTKPSNEKLALGFKLNDSSPRHGQSSEPQSSSNVRDEDVKENLKSLNDKLAAAFLTINAKEELVRQHAKVTEEAVLGWEQAESEVAALKKLLEASAQKNGSLEVQVSHLAEKNASLEVQVSRLDEALKECVRQLHLAQEDQAEKVHDVVTKSQELESENSKLQNRITELKKQLETTKLEASNMSIDHDLQEKFQAIKKENMDLKSKLLVQSKDLKILSLERDLSNQAAETASKQHLENVKKIARLEAECRRLHHLTRKATLINDSRPLANNTCVESLTDSQSDSAERMDDVDNELRNSDSWASALVAEXDQFKNGNADEKNLVNNPVVIDLMDDFLEMERLAALPESDRTSSTFDMETDSDKAVTRNSSSKLETEELRNQVADLHAQVEKIESEKKELEMALMEARNQLDISCNALVAAKNRLVEMQMELDLANDSKHDALRDFEGLNSEKKALEFQLESKSVRVEELLQVVASLEENTDKKELESQLELLSAEAKELRLTVTSLLEKIEAERSLSVQHQAEAVAACNAKESLEEQLYSANTEVERLHVIVKELEDEVEKEKMRQEELVAELEMKMETAVEAIKESLEAQLCAANTEVERLNSIVQALENDIEKEKALHKELTAQLEVKFEEEKARSVQTVKESMEAQLCSSNTEVLKLRDIVKALENEVEKEKALHEDLSAQLEAKIEAERTFSVEAIKESFQSELQSVNSEVVELRGMVTALEHEVVKEKTFSAELQMQLEALEAIKRVLESEIESAHQDNRKLNDKVKSFEAKLKKQVSSAVDFTAKEEAMQSERRAMKQQLEAAKMEVGKLTNKVSLLQGEVLQERLLSEEFEQEYHKLEARLSRDSRDAKLWRLANSNGGLKAKQEKELANAAGKLAECQKTIASLGRQLKSLTDIDNTIVEPERLEPREIREMPLDFRNSDADFAVFADELYDFDLPKWSNTEYYTTRKQENKQCKCVKFLVTIMC

SEQ ID NO: 182203 - protein, 957 aa, Oryza sativa
  Clone ID: PAT_MRT4530_79412C.1.pep
MARGSAPLDGSMLPPSRIVSERQAGLPRRFMPESATGREVVALGEGRPAPHYPGRSVFFLSFAMAGLVPPFSSFFMDVLELYDLQMAHLTPNAVMTLAIFAHLCEMFIGVRPSLRLFRWFFTVQPVSPPSVVGGCYFQPRGPVLNRYIPCVLRKKWDDWKSDWFYTPLADEARLRLPNQPPAQASSWRAPVDLGDGYDAVLDRLAGLRSQGLTGTMVYGDYLHRRIAPLQRRARGAWEYTGSEDYMRTHQGVKWDWVPEDFKMVIQRVLNLSSVEASLIPQGVLPLCSDPERANILTIMQAVGASGERAPRGHDGAGGSRRGEQSTPRGGRASGPRDGGPGGSRPADARGKRKQEDTPSPSPPRGGGAIPSRPSRHSKSGRSEVEETATAEARRREADRREAADRLREAEEAAQEAVRARQAEEAAWEEARLRRAEESVRETEAARTRRAACQAPDPTPPEATTTSEATHDEAAGAPLGPDPSGDVRDEPASGDAPEFGTSIGGPSRAAPTPRRLSPLPSAAPLSAEPLLQALAAANTMVLDGLSAQMEVLQAERAEVDAAWARVEEGRRSVEAMVEAGRKAHRRHASELEARRRDLAEIAREVEEERETALIATAVFNAAQDDLCLQYGSRAAELEKKLDASRQREEALEARATVLEERARALDTKERELAGREAAVAIREATLAAHEAACAEEESALRLREDELTEWERALEEAEAAAQRREEQARLNLEGARAERAALDQRAAEFEARVKELDARARSGGAAAGDGDLAARLAAAEHTIAELQGALDSSAGEVEALRLAGEVGPGMLRDAVSRLDRAGRQAGLWGGRTAKYAANQGGLAQRLSEMAGTLQRLPEELEETIKSSSRDLAGGAVELVLASYQARDPDFSPWAALDEFPLGTEDGARAQVRDAADHIVHSFEGTAPRLAFALDSDEEGGDGGADVSDDEAGDPGASA

SEQ ID NO: 182204 - protein, 829 aa, Oryza sativa
  Clone ID: PAT_MRT4530_79413C.1.pep
MVYGDYFRRRIAPLQRRARGAWKYTKSEDYMRTHQGVKWDWVPEDFKMVIQRVLNLSSVEASLIPQGVLPLCSDPERANILIIMQAVGASGEQAPRGHDGAGGSRRGEQSTPGGGHASGPRDGGPGGSRPADARGKRKQEGTSSPSPPQGGGAVRASSRRPEGTAPTSQPEGERKKKRLRKMGGTEPCRGNLISPPRWSFSLPPRSEIPSRPHPPPPRHSKSGRSEAGETATAEARRREADQREAADRLREAEEAAQEAVRARQAEEAAREEARLRRAEESVREAEAAHARQAACQAPDPTPPEATTTSEATHDEAAGAPLGPDPSGDAQDEPASGDIPESGTSIGGPSRAAPSPRRLSPMPSATPPSAEPLLQALAAANTTVLDGLSAQMEVLQAERAELDAAWARVEKGRRSVEAMVEAGRKAHRRHTSELEARRRDLAEVAREVEEERETALIATAVFNAARDDLCLQYGSRAAELEKKLDAARGVLDAAVARERRAAEIKAASRQREEALEARATVLEERARAKERDLADREAAVAIREATLAAHEAACAEEESALRLREDALTKRERALEEAEAAAQRLADSLSLREATREEQARRNLEGARAERAALDQRAAELEAQAKELDARARSGGAAAGDSDLVARLAAAEHTIAKLQGALDSSAGEVEALRLAGKGGPGMLRDAVSRLDRAGRQAGLWGGRTAKYAANQGGLAQRLSEMARTLQRLPEELEETIKSSSRDLARGAVELVLASYQARDPDFSPWAALDEFPPGTEKGARAQVRDAADHIVHSFEGTAPRLAFALDSDEEVGDGGADDSDDEACDPGASK

SEQ ID NO: 182205 - protein, 311 aa, Oryza sativa
  Clone ID: PAT_MRT4530_79414C.1.pep
MGIMATRKCGGVGTTSSGEWRPLPECEDSTRRLAVQDVGRDQIKQERIYGARAPCQGKDTGIYIGSGHPEAPGLLSETTGSRQLGPRGEWWAWWNPDFLKQRHAPDWLGLPINLFYLWRRGPLHNSPWSAPISPASPEVASSRMRKLQDYGVSGSQDEAGTETYKDYGELETQDKTGSEADLSVGLTRTKVNPIKVGPGPTKDERKTRIELHSRAMPMGCERNCIHVCSLFIRVNVLTPAMRRGVVRSRLSETNGLFQAQTDRLGGRPCAMVEPGPHLPIVDHLFFNRWATGSCGSYGIEQLGNMQQVTDN

SEQ ID NO: 182206 - protein, 1019 aa, Oryza sativa
  Clone ID: PAT_MRT4530_79415C.1.pep
MARGSAPLDGSVLPPSRIVSERQAGLPRRFMPESATRREIVTLGEGRPAPRYPGRSVFFLPFAMAGLVPPFSSFFMDVLEFYDLQMAHLTPNAVMTLAIFANLCEMFIGVRPSLRLFRWFFTVQPVSPPSVVGGCYFQPRGPVLNRYIPCVLRKKWDDWKSDWFYTPLADEARLRLPSQPPAQASNWRAPVDLGDGYDAVLDRLAGLRSQGLTGAMVYGDYLRRRIAPLKRRARGAWEYTGFEDCMRTHRGVKWDWVPEDFKVMIQRVLNLSSVEASLIPQGVLPLCSDPDRANILTIMMTVGASEERAPKGHDGASGSRKGDQSTLGGGRASGPRDEGSGGSRPADARGKRKQEGTSSPSPPRGGGAARVSSRRPEGATPTPQPEGERKKKRLHKMGGTEPSRGNLISPRRWSFNRPLRRRESDRREAADRLREAEEAAREAARARQAEEAAREEARLRQAEATTSSEATRETDRQEAADRLQEAEEAAQVAVRARQAEEAAQEEARLRQAEATTTSEAARDEAAGASLGPTPSGDAQDKPGPGDVPESGTSIGGPSRAASSPRRLFPTPSAAPLSAEPLLQALAVANTTVLDGLSAQMEALQAERAELDVAWARVEEGRRSVEAMVEVGRKAHRRHVSELEARRKVLGEIAKEDDLRLQYGSWEAELGKKLDAARGVLDAAAARERRAAETEVASRQREETLEARAMALEERSCVMVRDLADREAAVAIREVTLAAHEAVCAEEESALRLREDALIERERALEEAEAAAQRLAESASLREAALEEQARRNLEGARAERAALNQRAAELEAQARELDARARSGRAATGDSDLAARLAAAEHTIADLQGALNSSTGEVEALRLAGEIGPSMLRDAVSRLDRAGRQAGLWGGRTVKYAANQGGLAQRLSEMAGTLQRLPKELEGTVKSSSRDLARGAVELVLASYQARDPDFSPWTALDEFPPGTEDGARAQVRDAANHIVHSFEGSAPRLAFALNSDEEDDDGGVGDSGDEAGNPGASE

SEQ ID NO: 182207 - protein, 113 aa, Oryza sativa
  unsure (1)..(113): unsure at all Xaa locations
  Clone ID: PAT_MRT4530_79416C.1.pep
LPPNPPGGRRRRSRGRRCCRCVCWTLLAVLVLAVAVAGETQLDSAVVAQLLQQQXAGFVPLTVWARVPIRIKFGAIKLWKMTGKATCNLVVDNLVAGRRIRIRSNNYSFKLKV

SEQ ID NO: 182208 - protein, 1043 aa, Oryza sativa
  Clone ID: PAT_MRT4530_79417C.1.pep
MARGSAPLDGSVLPPSRIVSERQAGLPRRFMPESATGREIVSLGEGCPAPRYPGRSVFFLPFAMAGLVPPFSSFFMDVLEFYDLQMAHLTPNAVMTLAIFAHLCEMFIGVRPSLRLFRWFFTVQPVSPPSVVGGCYFQPRGPVLNRYILCVLRKKWDDWKSDWFYTPLADEARLQLPSQPPAQASNWRAPVDLGDGYDAVLDRLAGLRSQGLTGAMYTGSEDCMRTHQGVRWDWAPEDFKIVVQRVLNLSSVEASLIPQGVLPLCSDPDRASILAIMQAVGASEERAPRGHDGAGGSRRGEQSTPGGGRASGPRDGGPGSGRPADARGKRKQEGTPPPSPPQGGGAARASSRRPEGATPTSQPEGERKKKRPRKMGGTEPSRGNLISPPRWSFNRPPRSEIPSRPSRHSKSGQSEAEDPATTEARRRESVRREAADRLREAEEAAREAARARQTEEAAREEAGLRQAEVMTSSEATRETDRQEAADRLREAEEAAQVAVRARQAEEAAREEDRLRQAEATTTSEAARDEAAGASLGPTLSCDAQDKPGPGDIPESGTSIGGPSRAASSSRRLFPTPSVAPLSAEPLLQALAVANTTVLDGLSAQMEALQAERVELDAAWARVKEGRRSVEAMVEVGRKAHRRHVSELEARRKVLGEVAKEVEEERGAALIATTVMNEAQDTLRLQYGSWEAELGKKLDAARGVLDAAAARERRAAETEVASRRREEAIEARAMALEEHACAVERDLADREAAVAIREVTLAVHEAACAEEESALRLREDALTERERALDEAEAAAQRLADSLSLREAAQEEQARRNLEGARAERAALNQRAAELEAREKELDARARSGGAAAGESDLTARLAAAEHTIADLQGALDSSAGEVEALRLAGEVGPGMLRDAVSRLDRAGRQAGLWGGRTAKYAANQGGLAQRLSEIAGTLQRLPEELERTIKSSSRDLARGAVELVLESYQARDPDFSPWTALDEFPPGTEDGARAQVRDAADHIVHSFEGSAPRLAFALNSDEEDDDSGVGDSGDEAGDPGASE

SEQ ID NO: 182209 - protein, 915 aa, Oryza sativa
  unsure (1)..(915): unsure at all Xaa locations
  Clone ID: PAT_MRT4530_79418C.1.pep
MARGSAPLEGSVLPPSRIVSERQAGLPRRFMPESATGREVVALGEGRPAPHYPGRSVFFLSFVMAGLVPPFSSFFMDVLELYDLQMAHLTPNAVMTLAIFAHLCEMFIRVRPSLRLFRWFFTVQPVLPPSVVGGCYFQLRGPVLNRYIPCVLRKKWDDWKSDWFYTPLADEAHLRLPSQPPAQASSWRAPVDLGDGYDAVLDRLAGLRSQGLTGAMVFGDYLRRRIAPLQRRARGAWEYTGSEDYMRTHQGGRWDWAPEDFKMVVQRVLNLSSVEASLIPQGVLSLCSDPERANILTIMQAVGASGERAPRGHDGAGGSRRGEQSTPGGGRASGPRDGGPGGSRPADARGKRKQEDTPSPSPPRGGGAIPSRPPRHSMSGRSEAEETATAEARRREAVRREAADRLREAEEAAQEAVRVRQAEEATREEARLHRAGKSAREAEATRARQAACQAPDPTPPEATTTSEATHDEAAGAPLGPDPSGDVRDEPASGDAPESGTSIGGPSRTAPTPRRLSPLPSAAPLNTEPLLQALAAANTTVLQAERAELDAAWARVEEGRRSVEAMVEAGRKAYRRHASELEARRWELAEIAREVEEERETALIATAVLNEARDDLRLQYGSRVAELEKKLDAARGVLDAATARERRATENEAASRRREVALEARATALEERARARERDLADRETAIAIREATLAAHEAACAEEESALRLREDALTERERALEEAEAAAQRLADSLSLHEAAREEQARRNLEGARAERAALDQRAAELEARAKELDARARSGGAAAGDGDLAARLTAAEHTIADLQGALDSSAGEVEALRLAGXDRAGRQAGLWGERTAKYAANQGGXLAQRLSEMAGTLQRLPEELEETIKSSSRDLARGVVELVLASYQARDPDFSPWAALDEFPPGTEDDARA

SEQ ID NO: 182210 - protein, 110 aa, Oryza sativa
  unsure (1)..(110): unsure at all Xaa locations
  Clone ID: PAT_MRT4530_79419C.1.pep
KKYTEGPSTCHRDTKSSSNRKTRYAGSLNYIKPVTRGPXMVLTPVLVYVAAESAWDPSRQHREKRERXLGKRPPGRSGKRRPAPPTGRCRGGXNPDRGCRGRRICYVLLT

SEQ ID NO: 182211 - protein, 481 aa, Oryza sativa
  unsure (1)..(481): unsure at all Xaa locations
  Clone ID: PAT_MRT4530_7941C.1.pep
IVLAPSRDLLWSLALSPPSSSLSRAAGRLQPPLPPRRSVVRSRRRLLQHRSCLPFPGLPSVSRGDPRSCVPAVALPFPPRRPPPAASVSLPERRSTSPPPPSAPRHRPHPRHHLLLARISPEHRRPRRPLLPPRRRLLRQPPSAAPVHQPALPSPPPRHGDVAXTSSTPRIRPEAAAHRREPLHPPRRSCSAARPSSPVHRSATPPPSSASQPQRRPRPRLPSDRTPPVSVVAFTVHPRRLVVSRRRRRHRHRSGVFHAVLVSVLPLPAALVASSPAPVVAVVVLSSFPVVVAFVPPSSRPRPSSVFRXVAAAPSSSSSSAPRRQASCRPRLAFVQGSPPKSSPRRSSPXFPAASAAPVHRCRSHASSRGGKDPSPSLPRPRPFGVARARCAVVGPGTRVPVSVVVLVCWSPFVGHSPRLTHGVRFCRPVDRLCVPGLPRSFRLTCGAGSFACVLRVAFVVPEVPEAWFVVVAEGSEGRSL

SEQ ID NO: 182212 - protein, 61 aa, Oryza sativa
  Clone ID: PAT_MRT4530_79420C.1.pep
MDGDGSGTRDFMSQADSLSPAGGIGMAPLDVNSDDDGWPGMESYKGLLRSGTNTSSSKRDC

SEQ ID NO: 182213 - protein, 839 aa, Oryza sativa
  unsure (1)..(839): unsure at all Xaa locations
  Clone ID: PAT_MRT4530_79421C.1.pep
MARGSALLDGSVLPPSRIVSERQAELPRRFMPESATGREIVSLGEGCPAPRYPGRSVFFLPFAMAGLVLPFSSFFMDVLEFYDLQMAHLTPNAVMTLAIFAHLCEMFIGVRPSLRLFRWFFTVQPVSPPSVVGGCYFQPRGPVLNRYIPCVLRKKWDDWKSDWFYTPLADEARLRLPSQPPTQASNWRAPGLTGAMVFGDYLRRRIAPLQRRARGAWEYTGSEDCMRTHQGVRWDWAPEDFKIVVQRVLNLSSVEASLIPEGVLPLCSDPDRASILTIMQAVGASEERAPRGHDGAGGSRRGEQSTPGGGRASGPRDGGPGSGRPADARGKRKQEGTPPPSPPRGGEAARASNRRPEGATPTSQPEGERKKKRLRKMGGTEPSRGNLISPPRWSFNRPSRSEIPSRPSRHSKSGQSEAEDPVTTEARRRESDRREAADRLREAEEAAQVAVRARQAEEAAREEARLRQAEAATTSEAAHDEAAGGSLGPTPSGDAQDKPGPGDIPESGTSIGGPSRAASSPRRLFPTPSVAPLSAEPLLXGRRSVEAMVEVGRKAHRRHVSELEARRKVLGEIAKEVEEERGAALIATTVMNEAQNTLRLQYGSWEAELGKKLDAARGXLDAAAARERRAAETEVASRRREEALEARAMALEERACAVERDLADREAAVAIREVTLAVHEVACAEEESALRLREDALTERERALEEAEAAAQRLADSLSLREAAQEEQTRRNLESARAERAALNQRAAELEAQARELDARARSGGAATGDSDLAARLAAAEHTIADLQGALDSSTGEVEALRLAGEIRPSMLRDAVSRLDRAGRQAGLWGGRTVKYAAN

SEQ ID NO: 182214 - protein, 659 aa, Oryza sativa
  unsure (1)..(659): unsure at all Xaa locations
  Clone ID: PAT_MRT4530_79422C.1.pep
MARGSAPLDGSVLPPSRIVSERQAGLPRRFMPEYATGREIVSLGEGCLAPRYPGRSVFFLPFAMAGLVPPFSSFFMDVLEFYDLQMAHLTPNAVMTLAIFAHLCEMFIGVRPSLRLFRWFFTVQPVSPPSVVGGCYFQPRGPVLNRYIPCALRKKWDDWKSDCFYTPLADEARLRLPSQPPAQASNWRAPVDLGDGYDAVLDRLAGLRSQGLTGAMVFGDYLRRRIAPLQRRARGAWEYTGSEDCMRTHQGVRWDWAPEDFKILVQRVLNLSSVEASIIPQGVLPLCSAPDRASILTIMQAVGASEERAPRGHDGAGGSRRGEQSTPGGGRASGPRDGGPGSSRPADARGKRKQGGTPPPSPPRGGGVARASSRRPEGATPTSQPEGKRKKKRPRKMGGQNHPGETSFPLQGGRVIDPLAXEIPSRPSRHSKSGQSEAEDPATTEARRRESDRREAADRLREAEEAAQEAARARQTEETIREEAGLRQAETTTSSEATRETDRQEATDRLREAEEAAQVAVRARQAEEAAREEARLRQAKAATXPRQFATRARAHRLGPIPRATLRTSQALAVANTTVLDGLSAQVEALQAEQAEIDAAWARVEEGRRSVEAMVEVGRKAHRRHVSELEARRKVLEEIAKEVEEEQGAALISTTVMNEA

SEQ ID NO: 182215 - protein, 105 aa, Oryza sativa
  unsure (1)..(105): unsure at all Xaa locations
  Clone ID: PAT_MRT4530_79423C.1.pep
NPIVSRSPLPPHCAPRRRRPGAAARPPSSPWCGLPLSPPXPPPPHPPPSPRRGVSPLSVAAVIDRLPPSSPRPPKHHHHGPSLKSASVAXPIRAAARPPAPPPPQ

SEQ ID NO: 182216 - protein, 187 aa, Oryza sativa
  Clone ID: PAT_MRT4530_79424C.1.pep
MEVLSSPSSHRHLPLCCLSSPDPTSHGPDLESSVEGEAGDREGTPEGEAGGGEGTAEGGEPTPRLSSIRSSSLIRATAWRPEIHRRPTSTTATAADARRRRGGQRSIAARRSGHDTEARDPSSPRGGGEEWWSPRSLSARRLGGRLSEEEMRGAGGGVSRQPSHGSTPRLDPLHSALPFLFCLRIRA

SEQ ID NO: 182217 - protein, 713 aa, Oryza sativa
  Clone ID: PAT_MRT4530_79425C.1.pep
MSRFLPYMHFGPSNQLQAASHVMQPREIARLLLGFWSEWATQILVVLSLIQQFFPLFFSGIRRRQGRNKRRAVLWLAYKFANITATYALGRLSLSAAQRSHRLVPFWAPFLLLHLAGPDNITAYSLEDSKIAGRHALTLFVQGLGAVFVLVKHVGSSRTLLLPGAIMVTTVAVFKMFEKTWALWIANFKVILSSVEREDGEEEPRQLYRVYLEEDELPRGGFKGKEVDEEEFLMRRAHAVFLVCKSAMVDSSMYDPDRYFLRILAYLRENRVDLWTLMEMELSLMYDILYTKAAVIHTWTGYCIRIVSSLTVAASFLLFQLYGKEGQSSRADITITYVLLSSSLLMEMASLLSALWSTWTFSFLCATRWTSLRHAALCSKKWHCLRNMVLSFRRLACSTGIWSYLSLSRRWSGTLGQYNMLDACTARPPLLGKLVVRLVFSRLSKKLGFSRLAEMLGFGRLAEELSYNVVTADIPKGLKDMVIEYIKFMIKDRTVNTLGIFREQWGKVAIKRWLEDKQVDDEYKEYLEKRLGAELHEGIIVWHIATDIFIAQRKADDQDAVKEAVKALSNYMMFLLVKQPDMLPGLAQNKMYQWTKESLAKEWEEAGVPAYVSGLHPSQKLANMLHDKEVTQDLISNRLFFATQLAKRLLERDDTMKLVYGIWVDFLIYASNRCSRESHAKRLNNDGEFTTIVWLTAEHLYQLQIYDAQEKHH

SEQ ID NO: 182218 - protein, 499 aa, Oryza sativa
  Clone ID: PAT_MRT4530_79426C.1.pep
MATIAFSRFSICFCVLLLCHGSMAQIFSLGINPWQNPRQGGSRECRFDRLQAFEPLRKVRHEAGVTEYFDEKNEQFQCTGTLVIRRIIEPQGLLLPRYSNTPGLVYIIQGTGVLGLTFPGCPATYQKQFRHFGLEGGSQRQGKKLRDENQKIHQFRQGDVVALPSGIPHWFYNEGDTPVVALFVFDVNNNANQLEPRQKEFLLAGNNIEQQVSNPSINKHSGQNIFNGFNTKLLSEALGVNIEVTRRLQSQNDRRGDIIRVKNGLRLIKPTITQQQEQTQDQYQQIQYHREQRSTSKYNGLDENFCAIRARLNIENPNHADTYNPRAGRITNLNSQKFSILNLVQMSATRVNLYQNAILSPFWNINAHSLVYTIQGRARVQVVSNHGKAVFNGVLRPGQLLIIPQNYVVMKKAELEGFQFIAFKTNPNAMVNHIAGKNSVLRAMPVDVIANAYRISRQEARSLKNNRGEEIGAFTPRYQQQKIHQEYSNPNESETQEVI

SEQ ID NO: 182219 - protein, 76 aa, Oryza sativa
  unsure (1)..(76): unsure at all Xaa locations
  Clone ID: PAT_MRT4530_79427C.1.pep
KSKKSQTLARHPRHVLRPPPPPGPPAVVAPLDPAGGAPDPLAQPXPPTLPPAVPFPPPPAIVAPRIRLPRCPPLLP

SEQ ID NO: 182220 - protein, 125 aa, Oryza sativa
  Clone ID: PAT_MRT4530_79428C.1.pep
MLTPTAPPSTFLFLLLFLLAASNCSATSQVGGAGEEVEVARMVPVVEGGGGFSAMVLNETRRRLGSFQLCAPCTCCGGGGGGGGSRGGGCILSPCCYAINCNIPNRPFGFCSFTPKSCDCLGCNL

SEQ ID NO: 182221 - protein, 86 aa, Oryza sativa
  Clone ID: PAT_MRT4530_79429C.1.pep
NKTTGPEKPPPPLPNVRGFAPSQPGKKNPPTLAGFPGFPHQPGFVLKTHPPWGGPIRADFFVNPWSFGPPGYFPHRGGFSPPGGIN

SEQ ID NO: 182222 - protein, 332 aa, Oryza sativa
  unsure (1)..(332): unsure at all Xaa locations
  Clone ID: PAT_MRT4530_7942C.1.pep
PVSTPASGPCVXRVPEVVEFYHSLMRRDSKRDGGGGGGGAEACPGGGAAAARDMIGEIENRSAHLLAIKSDVERQGDFIRFLIKEVEGAAFVDIEDVVTFVKWLDVELSRLVDERAVLKHFEWPEQKADALREAAFGYRDLKKIEEEASSFCDDPRQPCSSALKKMQALFEKLEHGVYSLARVRDGAMNRYRGYHIPWEWMQDTGIVSQNTHKDAKNINTYKTYTRDNNKKNLGCNVHVCQGALIKLQSVKLAMKYLRRVSSELEAIKDGPDEEELMLQGVRFAFRVHQFAGGFDGDTMRAFQELKEKASTFQSQRECQNQHLQQHKLAGRS

SEQ ID NO: 182223 - protein, 231 aa, Oryza sativa
  Clone ID: PAT_MRT4530_79430C.1.pep
MQQAAVAFGQAAFLARPLRRPPHRLGWAEAGGVAAGRGRASLPRPRLSASLSIGAGGYGDEHAPLFPRQQAWDPYKILGVDHDASEEEIRSARNFLLKQYAGHEETEEAIEGAYEKIIMKSYSHRKKSKINLKSKIQKQVEESPSWFKAMLGFFEVPSAEIISRRLALFAFIAGWSIVTSAETGPTFQLALSLVSCIYFLNEKMKNLSRASMTGFGVFVGGWIVGSLLVPV

SEQ ID NO: 182224 - protein, 132 aa, Oryza sativa
  Clone ID: PAT_MRT4530_79431C.1.pep
CSKHTHAALPPHTPRTRCPTPPKTTHADAAEDDDDDAAEDDDDADADADAAEDDDDDAAEDDDDADADANAAEDDDDDGDGFKEEEDTHLRCGDRRYQAASIRCRRATVRQSRHPISSPVSNKRMHLHQAYH

SEQ ID NO: 182225 - protein, 84 aa, Oryza sativa
  Clone ID: PAT_MRT4530_79432C.1.pep
QSVISLLVLSMSPMWSSRWLLLLAQVNTSLLVKVIPSVRQRGPKRAFASTVAGHSPPPVSFSLVSRSVGRSSGGARSTAVTPSA

SEQ ID NO: 182226 - protein, 75 aa, Oryza sativa
  unsure (1)..(75): unsure at all Xaa locations
  Clone ID: PAT_MRT4530_79433C.1.pep
ADQYLSEAASLVTLISDSHEDWFHSTGKEHKQAGNLSCAGRLHSTTVCQELLTPIGDXATYSQLHCYTMFKQARL

SEQ ID NO: 182227 - protein, 154 aa, Oryza sativa
  Clone ID: PAT_MRT4530_79434C.1.pep
MTCLDASRRLQPICLDEGESLPSLTQLTHAVTIGGPERIWTAARALRTAEHWIRKARCGSTAAMTAGGCREGGEADRKQTTAAEYTPCRCRGHSAPLTAQAAHEVKSGEGGSTEGRSSEMGGQYAGKNHGDVLEVAGGGELNRGRQGKESWWGK

SEQ ID NO: 182228 - protein, 157 aa, Oryza sativa
  Clone ID: PAT_MRT4530_79435C.1.pep
SSKHKIRTICQPRSIEAMTCLDASRRLQPICLDEGESLPSLTQLTHAVTIGGPERIWTAARALRTAEHWIRKARCGSTAAMTAGGCRWRGDQETTADQATVMAPMPQMMSTRRPPIHMRLGGWKGRRRGRPEADHRRGVHSVPLPRPLRPVDCSSCA

SEQ ID NO: 182229 - protein, 110 aa, Oryza sativa
  unsure (1)..(110): unsure at all Xaa locations
  Clone ID: PAT_MRT4530_79436C.1.pep
MGEGGGVLGEAAYLEMAAQAVDVQGGGGEVAAKRSRRSAVVGDPGVVDPDVGEVGVGEVGEVDGRTAERTTDGEGGGGXGRGGGGEGGGEEDGGEVEAAVERRAADLDRE

SEQ ID NO: 182230 - protein, 513 aa, Oryza sativa
  Clone ID: PAT_MRT4530_79437C.1.pep
MTDNGFALLVWSLPAWEKWPPDGMQVPDMDCKNEQMIEDKDEVHAHLIMNGFMKKYTCWTKHGEQEAPDVAAEEVLDQDVENTAAAREGMFVPSPLGGETIDLDTQCLSTMLHDIEDAEDNDKDFEKFSTTKDGLNARQDLEDMGVRSELHPITTESGRVYLPPACYTLSKEEKIDLLTCLSGIKVPSGYSSRISRLISLQDLKLVGMKSHDCHVLITQLLPVAIRNILPPKVRHTIQRLCSFFHAIGQKIIDPEGLDELQAELVDLRNVKVDNEGFTTVNLANNAYKDEPFVLAKQVVQVFYIVDPCNKKLHVVREGKRRIVGLENIADEDDYNQHIRRPPLHRRLDLSTVLLTADLSTAASTSPPPSSPPPSPPPPRPLHRLLAATLSTAAVLSAAISALSTALSTAALTAGRPLRRPSIDFPDLPDPDLPDAGIHDAGIPDHRRPHRPLRRCLSAAALDDYGLHRRLQVCRFSKYAATLPHSSFFGAVNLSINRGSYMNFAAVDLSMNLS

SEQ ID NO: 182231 - protein, 1007 aa, Oryza sativa
  Clone ID: PAT_MRT4530_79438C.1.pep
MARGSALLDGSVLPPSRIASEKQAGLPRRFMPESATGREIVMLGEGRPAPDYPGRSVFFLPFAMAGLVPPFSSFFMDVLEFYDLQMAHLTPNAVMTLGIFAHLCEMFIGVRPSLRLFRWFFTVQSVSPPSVVGGCYFLPRGPVLNRYIPCVLRKKWDDWKSDWFYTPLADEAHLRLPSQPPAQASSWRAPVDLGDGYDAVLDRLAGLRSQGLTGAMVYGDYLRRRIAPLQRRARAAWEYTGPEDYMRTHQGVRWDWAPEDFKILVQRVLNLNSVEASLIPHGILPLCSDPDRASILTIMTAVGASEEQAPKGHDGAGGSRRGDRSTPGGGRASGPPVGGSGSNRPTDARGKRKLGGTPPPSPPRGGGAVRASSRRPEGAAPTSQPEGERKKKRLRKMGETEPSRGNLISPPRWSFNRPPRSDVPSRSSRHPKSGQSEAEDPAAAEERRRESDRREAADRLREAEEAAREAARARQAEDTAREEAARARQAEEAAREEAARARQAEEAAREEAARVRQAETMASSEAAHDKAAGASLGPTPSGDAQATASGAARDEAAGGSPGPTSPGDAQDQTGPGDIPEPSASSGGPSRVAFSPRRLFSSSSVAPLSAEPLLQALAAANTAVLDGFSAQVEALRAERAELEAAWARVEEGRRSVDVMVEVGRKAHRRHVSELEARKAALAEIAREVEEERGAALIATTMMIEAQDSLRLQHGNWEAELKKKLDAAQGVLDAAAAREQRATETEAALRRREEALEARAMALEERACVAEKAALTEQARRNSESVRAERAALEQRAADLEAREKDLDARACIGGAAAGESDLAARLADAEHIVADMQRALDSSAGEAEALRLAGEIGPGMLWDAVSRLDRAGRQAGLWKGQSMTHPTNLEGLAPHLTKMAWALQQLPEELEKTIKSSSRDLAQGAVELVLASYQARDPNFSPWVALEEFPPGTEDDARARVRDAADHIVHGFEGSAPRLAFAPNSDEEGDASGADDVEDEAGDPGASD

SEQ ID NO: 182232 - protein, 98 aa, Oryza sativa
  Clone ID: PAT_MRT4530_79439C.1.pep
MIPLVELADPRVSRIYGVAPDAETIGILTSAANQKGVEVVAKVYWGEPAKKLTEAAQGIPLHWLVVGNRGLGAVKRQAHPCISISLCMVGSDGEREHL

SEQ ID NO: 182233 - protein, 347 aa, Oryza sativa
  unsure (1)..(347): unsure at all Xaa locations
  Clone ID: PAT_MRT4530_7943C.1.pep
KGFIVSAGGGARELGPREWGPRGSLTVHGGPGAPGLTPAGARGPHASAAPEGAGGRWPGPTRQQLGEPEGGHVGAAGGRRRTRAPMVAGGGHRHGGAAAERGEGKGETRWRSTAHPRSTAMTKKAAGADEGGGAARVDGDGCAPTVGELDERVDGVDGGAAKPEESAPGREAVPASGEGRPKVVGDGGERGRRRELDSGEEKARQRXWNGRRRCGQGLNGVGRRRGRPAXGGIGAGGPAAINGAGEICASKSGHLNXREREGKMGGKGEGITGSGGISDGGGARRGRGGGSGGRKGMTGGPHPSVRVAGGPARQWRARGEGPNGPRGRGERGREMGRAGPGEGRRDF

SEQ ID NO: 182234 - protein, 696 aa, Oryza sativa
  Clone ID: PAT_MRT4530_79440C.1.pep
MVFGDYLHRRIAPLQRRARGAWEYTGPEDYMRTHQGRKWDWDPEDFRMVVQRVLNLSSVEASLIPQGVLPLCCDPERAKILTIIQSGRSEAEETATAEARRREADRREAADRLREAEEAAQEAVRVRQAEEVAREQARLRRAGESVRVAEAARARQAACQTPDSTPPEATTTSEATHDEAAGAPLGPDPSGDAWDEPGSGGAPESGTSIGGSSRAAPTPWGLSPRPSAAPLSAEPFLQALAAANSTVLDELSAQMEALQAERAELDAAWARVEEGRRSVEAMVEAGRKAHRRHASQLEARRRDLAEIAREVEEERETALIATAVLDEARSDLRLQYGSRAAELEEKLDAARGVLDAAAARERRAAENEAASRRREEALEARSTALKERARALDAKERDLADREAAVATREATLAAHEAACAEEESALRFREDALTERGRALEEAEAAAQRLADSLFLREAAREEQARRNLEGARAERAALDQRAAELEARAKELDGRARSGGAAAGHGDLVARLAAAEHTIAELQGALDSSAGEVEALRLASEVGPGMLRDAVSRLDRTGRQAGLWGGRHAKYAANQGGLAQRLSEITGALERLPEELEETIKSSSRDLARGAVELVLASYQARDPDFSPWAVLEEFPPGTEDSARAQVRDAADHIVHSFEGMAPRLAFALDSDEEGGDDGADDSDDEADAPGASE

SEQ ID NO: 182235 - protein, 953 aa, Oryza sativa
  Clone ID: PAT_MRT4530_79441C.1.pep
MARGSAPLDGSVLPPSRIVSERQAGLPRRFMPESATGREVVALGEGRPAPHYPGRSVFFLSFAMAGLVPPFSSFFMDVLELYDLQMAHLTPNAVMTLAIFAHLCEMFIGVCPSLRLFRWFFTVQPVSPPSVVGGCYFQPRGPVLNRYIPCVLRKKWDDWKSDWFYTPLADEARLRLPSQPPAQASSWRAPRRAQGAWEYTGSEDYMRTHQGVKWDWVPEDFKMVIQRVLNLSSVEAFLIPQGVLPLCSDPERANILTIMQAVGASGERAPRGHDGAGGSRRGEQSTPGGGRASGPRDGGPGGSRPADARGKRKQEDTPSPSPPRGGGAVRASSRRPEGAVPTSQPEGERKKKRLRKMGGTEPCRGNLISPPRWSFSRPPRSEIPSRPSRHSKSGRSEAEETATAEARRREADRREAADRLREAKEAAQEAVRARQAEEAVWEEARLRRAEESVRETEAARARRAACQAPDPTPPEATTTSEATHDEAAGAPLGPDPSGDVRDEPASGDAPEFGTSIGGPSRAAPTPRRLSPLPSAAPLSAEPLLQALAAANTTVLDGLSAQMEGRRSVEAMVEAGRKAHRRHASELEARRRDLAEIAREVEEERETALIATAMFNAARDDLCLQYGSRAAELEKKLDASRQREEALEARATVLEERARALDTKERELAGREAAVAIREATLAAHEAACAEEESALRLREDELTERERALEEAEAAAQRREEQARLNLEGARAERAALDQRAAEFEARAKELDARARSGGAAAGDGNLAARLAAAEHTIAELQGALDSSAGEVEALRLTGEVGPSMLRDAVSRLDRAGRQAGLWGGRTAKYAANQGGLAQRLSEMAGTLQRLPEELEETIKSSSRDLARGAVELVLASYQARDPDFSPWAALDEFSSGTEDGARAQVRDAADHIIHSFEGTAPRLAFALDSDEEGGDGGADDSDDEAGDPGALA

SEQ ID NO: 182236 - protein, 89 aa, Oryza sativa
  Clone ID: PAT_MRT4530_79442C.1.pep
PPTLSLLRLVDAAAMASRGSRTWARMFYPMPLPMDARRRLMLGCPATLPVNKNRAQSRRTRRMMLGCPATDLILSCDEHECHKHERERE

SEQ ID NO: 182237 - protein, 2008 aa, Oryza sativa
  unsure (1)..(2008): unsure at all Xaa locations
  Clone ID: PAT_MRT4530_79443C.1.pep
MGSVSAIDDFAFSPGQAFRFGSLNFITNDFGKISLLDSDSNQSGRDQVPVQFGIPNSGEAYSKIISSESASNYSDEIQFTPPWPYQDDESYPSILMKLPDDLVAVFTAKTSPTWRSRRAPVSAPIQSRSREVGVILQPLGTVSTEELDGYLSSPGVSSXPTEILDYDDFGYHYDHGDLDNFDDSYEDNYMPLFFGVFMADNETEEQRQAREAGQDRARQEAERXRLEKERQRQERERLQREQQDRERIAKEAEDRRQRALESGRRARELIGQQDVDGTAVFRTPQQNAVAAITLLDTLLKEDALNQADHVVNILNQTKASVPTNSASTRTPTGSRVPHFRSHDYHQPSLNITGTGSSRRSRGHDKRSVHSPPERHRERRAERPHSPPRQRPVDLRETINQHRAARGHRHSPNRYDDDVDGVAAFTNDLRRVDWPAGFKPTGIEKYDGTTNPESWLTVYGFAIRAAGGDSKAMANYLPVALADSARSWLHGLPCGTIRSWAELRDHFIANFQGTFERPGTQFDLYNIVQKSGESLRDYIRCFSEQRNKISDITDDVIIAAFTKGIRHEDLVGKFGRKPPRMVKQMFEKANEYAKAEDAITASKQSGTTWKPNKDTPTAGGSGSNNHKDRKRKPEELVATTSPSSRQRPRVNTFDKIMNSQCPHHPNSNHVAKDCSVYKQFAEQYVKNARKPADGDQGTSKKKDDEDNAPTGFQDHRKELNHIFGGPLAYESKRKQKLTEREINAVQPNTPQYLRWSETAIKFDRSDHPARVVYPGRYPLVLDLVVRNVKLRRTLIDGGSALNILFAKTLDDMQIPRTELKPSNAPFHGVIPGLSATPLGQITLPVSFGTRENFRTENVCFEVADFETAYHAILGRPALAKFMAVPHYTYMMMKMPGPRGVISLRSDIKQAVTCDKESCEMAQTHETTLAREEIRLAATTASEGEVPTTKLTKTEESDAKTKKIPLDPSDPDKTANNKDIFAWKPSDMPGIPREVIEHSLHVKEDAKPIKQRLRHFAQDRKDAIKEELTKLLAAGFINEVLHHDWLANPVLVRKKTGQWRMCVDYTDLNKSCPKDPFGLPRIDQVVDSTAGCELLSFLDCYSGYHQIRLKESDCLKTSFITPFGAYCYITMPFGLKNAGATYQRMIQRCFSTQIGRNVEAYVDDVVVKTKRKDDLIADLEETFTSIRAFKMKLNPEKCIFGVPSGKLLGFMVSQRGIQANPEKINAILNMKPPSSQKDVQKLTGCMAALSRFVSRLSERGMPFFKLLKKTDNFQWGPEAQKAFEDFKKLLTTPPVLASPHPQEPLLLYVSATSQVVSTVLVVEREEEGHIQKVQRPIYFVSEVLADSKTRYPQVQKLLYGVLITVRKLSHYFQSHSVTVVISFPLGDILHNREANGRIAKWALELMSLDISFKPRTSIKSQALADFLAEWTECQEDMPEEKMEYWTMHFDGSKRLTGTGAGVVLISPTGERLSYVLWIHFSASHNVAEYEALLHGLRIAISLGIRRLIVLGDSQLVVNQVMKEWSCLDDNMTAYRQEVRKLEDKFDGLELTHVLRHNNEAADRLANFGSKREAAPSDVFVEHLYEPTVPRKEAVEAMDTQGVSMLEADWREPLIKFLTKXELPQDKNEAERISRRSRLYIIHEAELYKKSPSGILQRCVSLEKGRQLLKDIHSGICGNHAAARTIVGKAYRHDADKIVRTCEGCQFFARQTHLPAQELQTIPLSWPFAVWGLDMVGPFKRAVGGYTHLFVAIDKFSKWIEAKPVIMIIADKARDFFINIVHRFGVPNRIITDNGTQFTGGAFKDFCEDFGIKIYYASMAHPMSNGQVERANGMILQGIKARVFDRLRPYAGKWVDQLSSVLWSLRTTPSRATGQSPFFLVYGAEAMLPSEVEFESLRFRNFNEEGYEEGRVDDINRLEEAREAALIQSTRYLQGLRRYHNRNVRSRAFLVGDLVLRKIQTTXDRHKLSPLWEGPFIIAEVTRPGSYRLKREDGTIINNSWNIEHLRRFYA

SEQ ID NO: 182238 - protein, 114 aa, Oryza sativa
  unsure (1)..(114): unsure at all Xaa locations
  Clone ID: PAT_MRT4530_79444C.1.pep
SRPSRHSKSGRSEAEETATAEARRREADRQEAADRLREAEEAAQEAVRVRQAEEAAREEARLRRAEESVREAEVARAXRRPLGLDPSSDVWDEPASRDAPGSGTSISGPSRVAP

SEQ ID NO: 182239 - protein, 1048 aa, Oryza sativa
  Clone ID: PAT_MRT4530_79445C.1.pep
MARGSALLDGSVLPPSRIVSERQAGLPRRFMPESATGREIVTLGEGRPAPVYPGRSVFFLPFAMAGLVPPFSSFFMDVLEFYDLQMAHLTPNAVMTLAIFAHLCEMFIGVRPSLRLFWWFFTVQSVSPPSVVGGCYFQPRRPVLNRYIPCVLRKKWDDWKSDWFYTPLADEARLRLPSQPPAQASSWRAPGLTGAMVYGDYLRRRIAPLQRRARGAWEYTGSEDYMRTHQGVRWDWAPEDFKIVVQRVLNLSSVEASLIPQGVLPLCSDPDRASILTIMQAVGASEERAPRGHDGAGGSRRGEQSTPRGGRASGPRDGGPGSSRPADARGKRKQEGTSSPSPPRGGGAARVSSRRPEGAAPTSQPEGERKKKRLRKMGETEPSRGNLISPPKWSFNRPPRSEIPSRLSRHSKSGQSEAEDPAAAEARRRESDRREAADRLREAEETAQEAARARQAEETAREEAALARQAEKAAREEAARARQAEEAAREEAEFRQDEAMATSEAARDEVAGASLGPTSSGDAQATTSGAAGDEAAGASLGPTPSGDAQDQPGPRDIPESGTSIGGPSRVASSPRRLFPTPSIAPLSAEPLLQALAAANTVVLDGLSAQVEALQAERAELDAAWACVKEGRPSVEAMVEVGRKAHRQHVSELEARKTVLAEIAKEVEEERGAALIATTVMNEAQDTLRLQYGSWEAELGKKLDAAQGVLDAAAAQEQRAAETEAASRRREETFEARAMALEECACVVERDLADREAAVTIREATLAAHESACAEEESALRLREDALTERERALEEAEAAAQRLADSLSLREAAQEEQARRNLECVRAEGAALIERAAELEVREKELDARARSGGAAAGENDLAARLAAAEHTITDLQGALDSSAGEVEALRLASEVGPGMLWDAVSRLDCAGRQVGLWRGRSVKYSANQGGLAQRLSKMAGALQRLPEELEKTIKSFSRDLAQGAVELILASYQARDPNFSPWMALDEFPPGTEDSARAQVRDAADHIVHSFEGSAPRLAFAPNSDEEGDAGGADDSDDEAVDPGASD

SEQ ID NO: 182240 - protein, 452 aa, Oryza sativa
  Clone ID: PAT_MRT4530_79446C.1.pep
MSSKSPHQSSESDDSSSSDYLEELILEEINDPMEAEIEDEIEAQLQAQMQAQQTGHSNRRGGYKRRYINRDYQDDHNRLFAKYYSDNPLYTDDQFRRRFRMRKHLFLHIVEALGIWSPYFRLRRDAFGKVGLSPLQKCTAAIRMLAYGTPADLMDETFGVAESTAMECMINFVQGVRHIFGQQYLRKPNEQDIQCLLQQGEAHGFPGMLGSLDCMHWEWQNCPVAWKGQFTRGDYGVPTIMLEAVASADLWFWHAFFGAAGSNNDINVLDQSPLFTAVLQGRAPSVQFTVNGTEYNMGYYLADNIYPEWAAFAKSITRPQSDKAKLYAQRQESARKDVERAFGVLQKRWAIIRHPARLWERDELADIMYACIILHNMIVEDKRDDYDIPDDNTYEQSQSSVQLAGLDHGPIHGFAEVLDADMNIRDRTTHRRLKSDLMEHIWQKYGGQQQQN

SEQ ID NO: 182241 - protein, 1025 aa, Oryza sativa
  unsure (1)..(1025): unsure at all Xaa locations
  Clone ID: PAT_MRT4530_79447C.1.pep
MARGSALLDGSVLPPSRIVNERHAGLPRRFMPESATGREIVMLGEGRPAPDYPGRSIFFLPFAMAGLAPPFSHFFMDVLEFYDLQMAHLTPNAVMTLAIFAHLCEMFIGVRPSLQLFRWFFTVQSVSPPSVVGGCYFQPRGPVLNRYIPCVLRKKWDDWKSDWFYTPLADEARLRLPSQPPAQVSSWRAPVDLGEEYDAVLDRLAGLRSQGLTGAMVFGDYLRRRIAPLQRRARSAWEYTGPEDYMRTHQGARWDWAPEDFKIVVQRVLNLSSAEASHLPQEILPLCIDPDRVSILSIMLGVGASEERAPKGNDGAGERRRGKQSAPGGGRASGPRVGGSGSSRPADAPGKRKLGGTPPPSPPRGGGAVRTSGRRPEGAAPTSQPEGERKKKRLRKMGETEPARGNLISPPRWSFNRPPRRDVPSHSSRHPKSGQFEAEDPAAAEERRRESDRREAAARLREAEEAAREAARVRQAEEAAREEAARARQAEEAAQEEAARARQAEAAAAAGASLGPTPSGGPQATSSEAARDEAAGASPGPTSPGDAQDQTGPGDIPELSVSSGGPSRVAFSPRRLFSSSSIAPXQVEALRAERAELEAAWARVEEGRRSVXAMVEVGRKAHRRHISELEARKAALAEIAREVEEEREAALVATTAMVEAQDTLRLQHASWEAELKSKLDAAQGVLDSAAARERRATEAEAASRRREEALEARAMALEEHAGAVERGLMDREAATALREATLAAHEAACAEEESALRLREDALAERERALEEAEATTRRLADSLSLREAAQEEQARRNLESVRAERTALEQRAANLEAREKELAAGARIGGAAAGESDLAARLAAAEHTVADMQRALDSSTGEVEALRLAGEIGPGMLWDAVSRMKRAGRQAGLWGGQTTVPPTNLEGLAPHLNRMAWVLERLPEELEKTIKASSRDLARGAVELVLASYQARDPNFSPWMALEEFPPGTEDEARARVGDAADHIVNGFEGSAPRLAFAPSSDEEGDTSSEDGGGDEAGDPGAYE

SEQ ID NO: 182242 - protein, 947 aa, Oryza sativa
  Clone ID: PAT_MRT4530_79448C.1.pep
MARGSALLDGSVLPPSRIVSERQAGLPRHFMPESATGREIVTLGEGRPAPDYPGRSVFFLPFAMAGLVPPFSSFFMDVLEFYDLQMAHLTPNAVMTLAIFAHLCEMFIGVRPSLRLFRWFFTVQSVSPPSVVGGCYFQPRGPVPNRYIPCALRKKWDDWKSDWFYTPLADEARLRLPSQPPAQASSWRAPVDLGDGYDAVLDRLAGLRSQGLTGAMVYGDYLRRRIAPLQRRARGAWEYTGSEDFMRTHQGVRWDWAPEDFKILVQRVLNLNSVEAALIPQGILPLCSDPDRASILTIMMAVGASEERAPKGHDGAGGSRWGEQSTPRGGRASGSRDRGPGSSRPADARGKRKQGGTPPPSPPRGGGAARTSSRRPEGAAPTSQPEGERKKKRPRKMGETEPSRGNLISPPKWSFNRPPRSEIPSRPSRHSKSGQPEAEDPAAAEARRRESDQREAADRLREAEEAVQEAARARQAEETAREGAARARQAEEAAREEAARAHQAEEAAREEAVRAHKAEEAAREEAVRAHKAEEAARRLFPTPSTALLSAEPLLQALAAANTTVLDGLSAQVEALQAERAELDAAWARVEEGRRSVEAMVEVGRKAHRRHVSELETPGGGDRSGVPAAEEALEARAMALEERACVVERDLADREAAVTIREATLAAHEAACAEEELALRLREDALTERERALEGAEAAAQQLADSLSLREAAQEEQARRNLEGARVERAALNQRAAELEARAKELDARVRSGGAAAGESDLAARLAAAEHTIADLQGALDSSAGEVEALRLAGEVGPGMLWDAVSRLDCAGRQVGLWRGRTVKYAANQGGLAQRLSKMAGALQRLPEELEKTIKSSSRDLAQGAVELVLASYQARDPNFSPWMALEEFPPGTEDRARAQVRDAADHIVDSFEGSAPRLAFAPNSDEEGNAGGADNSDDEAGDPGASD

SEQ ID NO: 182243 - protein, 135 aa, Oryza sativa
  Clone ID: PAT_MRT4530_79449C.1.pep
MEGVLTEGRRRRKAAGGARAEDGVAAPATSGAREEADEGGRDLAWRERASATGSSDEGNAGLPIDAAMPLEEDVRPEMVWSGGEWQPEAAAMMAVRVVWWSDGSSGGMEERRGCRGTGRRNEAVGDSCAEQRRRE

SEQ ID NO: 182244 - protein, 370 aa, Oryza sativa
  unsure (1)..(370): unsure at all Xaa locations
  Clone ID: PAT_MRT4530_7944C.1.pep
MNRVSTSWGFVYSRVNKPGERARGPGPREWGPRGSLTVHGGPGAPGXTPAGAVGPTRQPHPRAGAADGRAPRGSRXARPEAATLARPAGGGARAPMVAAGDHRHGGAAAERGEGXGERRRRSTRHPEXTAAMEEAAGAEGGGGVARVDGVGGAPAVGDRNGEVDEVGGDAAKPKEAAPRWEVVRGDDGGGPELGGDDGERERRRELDSGGERGRXVAETTVGSSGRVYIGLGVREGGRRRGKWARETRPPLMAPVRLGERFLNESEGEREGKMGRKGERIPGNNSPHFNARGDGGXGGIGGGGGGARXRARWRGRREEGDDGWAPPVSEGGGRARPSAARERGGPSGPRGGGERGREMGRAGPLEGRGDF

SEQ ID NO: 182245 - protein, 138 aa, Oryza sativa
  unsure (1)..(138): unsure at all Xaa locations
  Clone ID: PAT_MRT4530_79450C.1.pep
PNPASPRPKIQRPQRSGGESLTGVKPQPAFGKLKRPPGFAKRRKLLGRRPPGLAKPKKLPGRRPPGLARLXPGDAQDQTGPGDIPEPSASSGGPSRVAFSPXRLFSSSSVAPLSAEPLLQALAAANTAVLDGFNTPVR

SEQ ID NO: 182246 - protein, 872 aa, Oryza sativa
  Clone ID: PAT_MRT4530_79451C.1.pep
MARGSAPLEGSVLPLSRIVSERQAGLPRRFKPESATGREVVALGEGRPAPHYPGRSVFFLSFAMAGLVPPFSIFFMDILEFYDLQMAHLTPNAIMTLAIFAHLCEMFIGVHPSLRLFRWFFTAQPVSPPTVVGGCYFQPWGQVLNRYIPCVVRKKWDDWKSDWFYTPLADEARLRLPNQPPAQASSWRAAVDLGDGYDAVLDRLAGLRSQGLTGAMVFGDYLRRRITPLQRRARGAWEYTGPEDVMRTHQGRKWDWDPEDFRMVVQRRDPVAPPPPPPRPSKSGRSEAEETATAEARRREADRREAADRLREAEEAAQEAVRVRQAEVAAREEARLRRAGESVREAEAARARQAACQTLDPTPPEGTTTSEATHDEAAGTPLGPDPLGDTWDEPASRDAPESGTSIGGPSRAAPTPRRLSPLSSAAPLSAEPFLQALAATNSTVLDGLSAQMEALQAERAELDTAWARVEEGRRSVEAMVEAGRKAHHRQTTQLKARRRELAEIAREVEEERETALIATAVLDEARNDLRLQYGSRAAKLEEKLDAARGVLDVAAARERRAAEKEAASRQREEALEVRATALEERARALDAKERDLADREAAVATREATLAAHEAACAEEESALRLREDALTERERALEEAEAAAQRLADSLFLREAAREEQARRNLEGARAERAALDQRAAELEAQAKELDTRAHSGGAAAGHSDLAARLAAAEHTIAELQGALDSSAGEVEALRLASEVGPGMLRDAVSRLDRAGRQAGLWGGRHAKYAANQGGLAQRLSEMAGALQRLPEELEETIKDPDFSPWAALEEFPPGTEDGARARVRDAADYIVHSFEGTAPRLAFALDSDEEGGDDGADDSGDEADGPGAPE

SEQ ID NO: 182247 - protein, 86 aa, Oryza sativa
  Clone ID: PAT_MRT4530_79452C.1.pep
AQVVRRRATADWRAQEARPPAWAWLRQQQHLIAVNVYHTPILWHMGMRDCFELQIRALDRTSTMHSINGRQAAVRQRDGIQCAILP

SEQ ID NO: 182248 - protein, 36 aa, Oryza sativa
  Clone ID: PAT_MRT4530_79453C.1.pep
MEDFLNYNKIYDKYLIAHENPILKTVDYFPQRNTFY

SEQ ID NO: 182249 - protein, 504 aa, Oryza sativa
  Clone ID: PAT_MRT4530_79454C.1.pep
MPVIPEQAMEFLSRTWSPSSSDLFQILSPSEDEVIGDEDVEVHGDTVRFDGGRSQVFNQTWLNMGHMRAILRGYLMDSIPIAGSRRKRRDELRLHTAQAHAAVSVAQLAAAIAGVVSACELRSSSGGAGADRKLSTVLASAAALVATVCAEFAESAGADRSRVTSAVKAGLDSRSPAELLTLTATAATCLRGAAVLKLRADVSRGISSSTSNSMMMMSTNTASIQKGTILRVCLPCGRLRLRTVAVFPECGTVALRLGKKRLHGAFTTYQHYEVLAVSGGGEAVVDCRKFFPVALSTAAGTVQLLLDNQMHCKGNWTISLGVEVGAEDARRHGLAGGDIGPPSARRVEPPQSRDASSTPSSSSSSRMGWQLGPSEGHRPTLTPTPTGGDGGEPSSPSVVAAERAGKEEEEDGLVEPWWGGAAGLIAERVLANDVADYIRFRAVCRPWRLCSVDPRCSQSGAMDGRFLPRRWMMLDKAAPQAVGCFRFHHQNMTLLNLFVCFADE

SEQ ID NO: 182250 - protein, 77 aa, Oryza sativa
  unsure (1)..(77): unsure at all Xaa locations
  Clone ID: PAT_MRT4530_79455C.1.pep
MATRSDGTARRGVGMASATATVXARAGLEVVMATAVTRWRSSGAGLKGDGVAIERGCYSLPWHLQLQALYGFMGNCT

SEQ ID NO: 182251 - protein, 127 aa, Oryza sativa
  Clone ID: PAT_MRT4530_79456C.1.pep
MNGRGGGGGGGVGVVGAGGEEQMEMEEDGAGLRARVAAGRKERVVLMWGYLPGVSPQRSPLLGPVPVRLPAAAGADGWRDVCGGGCGFAMAISDSGKLLTWGSADDMGQSYVTAGKHEETPEAFHFL

SEQ ID NO: 182252 - protein, 398 aa, Oryza sativa
  Clone ID: PAT_MRT4530_79457C.1.pep
MPGATTAAIVDSRRGTQHSEGPATILAIGTANPENIMFQDNFADYYFGLTKSEHLTELKEKMKRICHKSGIEKRYIHLDAELISVHPEIIDKHLPSLETRVDIVATEVPKLAESAARKAIAEWGRPATDITHLIFSTYSGCRAPSADLQLASLLGLRPSVSRTILSLHGCSGGGRALQLAKEIAENNRGARVLIACSELTLICFSTPDESKIIGHGLFGDGAGAVIVGADPSVDGECPLFEMVAASQTMIPGTEHALGMQATSSGIDFHLSIQVPTLIKDNIHQCLLNAFRSVGNTDPNWNDLFWAVHPGGRAILDNIEDKLQLHPCKLAASRQVLSEYGNMSGATIAFVLDELRRRREKEQDIQQQPEWGVLLAFGPGVTIESIVLRNPLSRGLKEN

SEQ ID NO: 182253 - protein, 84 aa, Oryza sativa
  unsure (1)..(84): unsure at all Xaa locations
  Clone ID: PAT_MRT4530_79458C.1.pep
EVVRSGDLVSYTSDEGVRMLREXNSVRMSDSCPDCELNKYCTSSDVXIGVIAPLPPXSCPVILPSSTIVLTLFVGYALVLKPAA

SEQ ID NO: 182254 - protein, 87 aa, Oryza sativa
  Clone ID: PAT_MRT4530_79459C.1.pep
GHKLLETMARDQGYSSADIPPPLSPPPEPPTSPVIVLDDSQVSCVREETGDDRVNVIAEGMFGGYLTNSSANGATTFLPALDELDPF

SEQ ID NO: 182255 - protein, 134 aa, Oryza sativa
  Clone ID: PAT_MRT4530_7945C.1.pep
TRPVVTSRGARPRPRPRRGKEKTDKKKEKGNLGARGPFCSLTPQLCVVNRGALPSPSLLWLLSCRVGVTTNNQWPLLHHQEEKRKEKKNQREGRGVKKKKKKKRRRETGKSVFSLCLRACAFVSESSLDSRRRR

SEQ ID NO: 182256 - protein, 76 aa, Oryza sativa
  unsure (1)..(76): unsure at all Xaa locations
  Clone ID: PAT_MRT4530_79460C.1.pep
KSFKIPYQRNPSYLHYHLLKLYYLLPIVTQMTNLFGYSSGPSVIFKYIRNSDPVPTRPRTRGRTRGVLDREXAXAX

SEQ ID NO: 182257 - protein, 70 aa, Oryza sativa
  Clone ID: PAT_MRT4530_79461C.1.pep
PPGGSGVLGAGSISNIQIFSRGLFYFKNGLNPPGRLRLKVWEKKKNLWGGSGGPDPHWALFRAAGMDKIL

SEQ ID NO: 182258 - protein, 504 aa, Oryza sativa
  Clone ID: PAT_MRT4530_79462C.1.pep
MVDSLLYGLLDLRMAAPLLAAAVALYVLVEQLSYHRKKGSLPGPPLVVPFIGSATHMIRDPTGFWEMQAARARKSGVGFTADFLAGKFTIFIRDSELSNRVFANVRPDAFFVIGHPFGKKLFGDHNLIYLFGDDHKDLRRRMATNFTPRALSTYAAIQQRGIVSHLRRWLDRSAANGGKAEPIRVPCRDMNLETSQTVFAGPYLTEEARERFKSDYNLFNVGLLAFPVDLPGLAFRRARQAVARLVRMLRDCARESKARMRAGGEPECLVDYWMQETVREIDEAKAAGLPPPAHISDDEEIGGFLFDFLFAAQDASTSSLCWAVSALDSHPDVLARVRAEVASLWSPDSGEPITADKIAEMKYTKAVAREVVRHRPPATLMPHIALQNFQLTESYTIPKGTLVLPSMYESSFQGFHDPDAFDPERFFSEARREDVVYKRNFLAFGAGPHQCVGQRYALNHLVIFMALFVSLVDFRRERTEGCDVPVYMPTMVPRDGCVVYLKQR

SEQ ID NO: 182259 - protein, 755 aa, Oryza sativa
  Clone ID: PAT_MRT4530_79463C.1.pep
MAQHTAAAAGGDEEVAEAEAAAAAAAGSTLRHRHAGKGAEEHEAAGGGGGGRNGGADDPDATSVERVFADKAVPSWREQLTLRAFVVSALLAVMFSVIVMKLNLTTGIIPSLNVSAGLLGFFFVRLWTSAVERIGLLKQPFTRQENTVIQTCVVSAYGIAFSGKRLRRFRLYSDFYCTTFVGLGLLVAASVLCLVYEEFRKDVPCASDGYKLFLTPELSLFTVFYSKTAKKINFIGLFALVPLRKIMIVDYKLTYPSGTATAYLINGFHTPEGAKLAKKQVKTLGKYFLFSFFWGFFQWFYTAGDDCGFKNFPTLGLEAYNNRFFFDFSPTYVGVGMICPYIVNVSVLLGGILSWGVMWPLIAKKKGSWYPADISDNSLHGLQAYRVFISIALILGDGLYNFLKVLIRTIAGFISMVQNNSKGMLPVSDNGMSMSTAEEVSFDDERRTEIFLKDQIPKSVAYGGYVVVAALSIGTLPEIFPQLKWYYILVAYIVAPVLAFCNAYGSGLTDWSLASTYGKLAIFVFGAWAGLSHGGVLVGLAACGVMMSIVSTASDLMQDFKTGYLTLASPRSMFISQVIGTGMGCVIAPCVFWLFYKAFSNIGTSGTEYPAPYAIVYRNMAILGVDGFNSLPENCLTLCYIFFAAAIAINLIRDLAPHKVSRFIPLPMAMAIPFYIGSYFAIDMFLGSVILFVWEKLNKAKADAFGPAVASGLICGDGIWTLPQSILALAKVKPPICMKFLSRAANAKVDSFLAG

SEQ ID NO: 182260 - protein, 219 aa, Oryza sativa
  Clone ID: PAT_MRT4530_79464C.1.pep
MALARQCLSKRLAAGCALARPLHAASPVAAAAANSHGPLNFRALFSSAGADAAATTGGCAPAKGDGHSREVAVVDRSRRRWPWRDLRDFVPLRLVDGIGSALSQVAETLTRPLTGKVREDEERYRLRFEVPGLGKDDVRVYVDDGVLAIHGEKRDVVEEDRGRDGDGECWAAATYHAGLLLPEDAVAEGITAEVRDGVLHVTVPRSPERKRSVTEVKVR

SEQ ID NO: 182261 - protein, 482 aa, Oryza sativa
  Clone ID: PAT_MRT4530_79465C.1.pep
MEPTGAGAGVIQCWETLPEDLLVTVFCQLEIPDLLRSGAVCASWHAAYRTFRRLRLPSPKQPPCLLYSCDAYGPDAAGLYCPSTGATYRIPVSCGGGGGGFRNLTLIGSADGWVVAADEIGNLRLLNPLTGAHAELPPLSTMHHVEAAADEEDEGGGLAYDIVDRLYNRPSLVRVPAREVRDCMYFRAVLSCGPHAAAGGGDAAACVVLLLHMPRCELSYARPGDERWTWISPGAGTGLRWRNLYCDAAYCKDDGLFYVVRDDDSVHALDLTGPSPVARKVFDERTWSTSLPSRYLEDVHLPCAQPCRYLVNTPSGELLHVWRFRQWVSSYDSSSDDQDDSSNDSSSEDQDDDSYDSSSEDQDDSSSRDLYEDLITRDIQLYRTDFHGKKLDAMDSLDNHALFLGYNTSLCLPTEDFPGLKPNHAYITDDSLEFVNYFKRNKKEIGMWNIESQILEGFGGASSLEEPWLNWPAPIWIIPSLL

SEQ ID NO: 182262 - protein, 57 aa, Oryza sativa
  unsure (1)..(57): unsure at all Xaa locations
  Clone ID: PAT_MRT4530_79468C.1.pep
VLLIYRASSRVLHAVGGVRGVHLQPYLTRXLEGLLSDPKAGQYPARNVAPRVLSRTT

SEQ ID NO: 182263 - protein, 509 aa, Oryza sativa
  Clone ID: PAT_MRT4530_79469C.1.pep
MANSEYEYVKREFELDSLLPPSNWIVVRIDGCHFHRFSKIHTFEKPNDERALRLMNACATSMLEKFPDIVFAYGVSDEYSFVFREETEFYQRRESKILSLCVSYFTSVYVMKWKDFFPNKELKEPPYFDGRVVCYPNLKTIRDYLAWRQVDCHINNQYNTCFWSLVKSGKTEKEAQQALKGTFSKDKNELLSQQFQINYDDEPAIFRKGSCVYRDKVETMVKTDRCGNPIKRTRLVITNANVDIIGPEFWENHPYILREALRLMNASASLMMESFPDIVFGYGFSNEYSFVFQDKTELYQRQESLILSSCTSRFTLFYMMKWKDFFPNKDLVEPPHFEAELLCYPKQKILCDYLSSRQAECHTTNQYSTCFWMLVKSGKSENEAREILKGTLSKDKNELLFQQFHLNYNNEPAVFRKGSCTYRQKVEESADAEGRENTTRERVVYALSTLVEKWLASLHWPFISFISFMCKTCAPKMQFQLTELRIVMIYLYLAEWKIRLKQRRGTPVW

SEQ ID NO: 182264 - protein, 320 aa, Oryza sativa
  unsure (1)..(320): unsure at all Xaa locations
  Clone ID: PAT_MRT4530_7946C.1.pep
VALAHARVERGRERERATASFFPASPPFRGEXIPENASSPASSGVATTSPPPAASAASPVHRPTSPPPLPAPECRPLSRPGHGVARISPERRHLRAGLSFLLVGXVAPLHHHLHQHRSGVFHAVPSSAQPLLPAIIVSSSSPIVLVVDVPSVARLVVSRRRLRHRHRSGVFHVILVPVQPLPAVLVASSPVPVVVVVVVLSSFPVVVAFVPPSSRSRPSSAFVKRAAAAPSSSSSSAPRRQAPCRPRLAFVQGSPPKPSPRRSSPLCPSVSAAXPVRRCRSYASSRGGKDPSSRCPVLVLSVSPVPVVRLTTPVPVYRCR

SEQ ID NO: 182265 - protein, 368 aa, Oryza sativa
  unsure (1)..(368): unsure at all Xaa locations
  Clone ID: PAT_MRT4530_79470C.1.pep
YRNQYNTCXFWLVSVSLGKTVXEAQQALKGTFSKDKNELLSQQFQINYDDEPAIFRXGSCVYRDKVETMVKTDRCGNPIKRTPQVSANANVDIIGPEFWENHPYILREEKCRYENVKKFDINHRLPPCNWTVVRIDICKFEQFSLIHSFDKPNDEAALRLMNASASLMMESFPDIVFGYGFSNEYSFVFQDKTELYQRQESLILSSCTSRFTLFYMMKWKDFFPNKDLVEPPHFEAELLCYPKQKILCDYLSSRQAECHTTNQYSTCFWMLVKSGKSENEARXYLKGTLSKDKNELLFQQFHLKYNNEPAVFRKGSCTYRQKVEESADAEGRENTTRERWDVIVAHADMGTEFWRKHPYILRKLDLLG

SEQ ID NO: 182266 - protein, 1342 aa, Oryza sativa
  Clone ID: PAT_MRT4530_79471C.1.pep
MTIAGSSLKCAKSMYQPIDDSRWLGVESAEGSDAARVVPYDERGGRSERSALSSCSGHAASGRRRGALATVASSRDALYRKLPGESAPDPPPSRYSAIPVGVASSSSPTSAIGSVSGIDDFVFPPRQAFRFGSLDFGKISLLDSDSNQSGRGQISAPFGIPNSAEVYPKIISTELASNHSDEIQSTPTRPDQDDGSREVGVILQPLGTVSTEELDGYLSSPDVSSRPTEILEYDDFGYRYDYGNFNDFDDSYEDDYTPLFFGVFMADNETAKQRQAREAEEERTRKEAERRRLKEEQQRQDLLKEDALNQHVIKILNQTKTMIAASVPANSASTRTPTGSRVPPLRSQDYHQPSLSIADAGSSRRSRGHGERSVHSPPERHRERRVERPRSPHRRRPVDLCDTINQRRAARGYAPHHSPDRYDDDVDGVAAFTSDLRRVDWPAGFKPTGIEKYDGSTNPESWLTVYDLAIRTVGGNSKAMVPRGTIGSWAELREHFITNFQGTFERLGTQFELYNVIKKPGESLRDYIRRFSEQRNKISDITDDVIIAAFTKGICHEDLVGKFGRKPPRMVKQIFEKANEYAKAEDAITASKQSGTTWKPKKDTPTTGGVEVPITRIASRKQKLTEREINAVQPDMPQYLWWSETTIKFDRSDHPDRVVHPGRYPLVLDPMVRNVKLRRSLIDGGSALNILFAKTLDDMQIPRTELKPSNTPFHRVIPRLSATPLGQITLPVTFGTRENFRIENVCFEVADFETPYHAILGRPALAKFMAVPHYTYMMMKMPGPRGVISLRSDIKQAVTCDKESCEMAQTHEITLAREEVRLATSTASEGEVPATKMPKSGESDAKTKKIPLDPSDPTKTAVIDIFTWKPSDMPGIPREVIEHSLHVKEDAKPSKQRLCRFAQDRKDAIKEELTKLLAAGFIKEVLHLDWLANPVLVRKKTGQWRMCVDYIDLNKSCPKDPFGLPRIDQIGRNVEAYVDDVVVKTKQKDDLITDLKEIFASILTFRMKLNPEKCIFGVPSGKLLGFMVSHRGIQANPEKVNAILNMKPPSSQKDVQKQTGCMAALSRKLSHYFQGHSVTVVISFPLGDILHNHEANGRIAKWALELMSLDISFKPRTSIKSQALADFVAEWTECQEDMPEEKMEYWTMHFDGSKRLSGTGAGVVLLSPTGERLSYVLRIHFSASHNVAEYEALLHGLRIAISLGIRRLIVRGDSQLVVNQVMKEWSCLDDNMTAYRQEVRKLEDKFDGFELTHVLRHNNEAADRLANFCSKREAAPSDVFVEHLYEPTVPRKETIEATDTQDVSMIEADWREPLIRFLTKLELPQDKDEAERISRRSKLCYS

SEQ ID NO: 182267 - protein, 810 aa, Oryza sativa
  Clone ID: PAT_MRT4530_79472C.1.pep
MGSVSGIDDFVFPPGQAFRFGSLDFITNDFGKISLLDLDLNQSGRDQVSAPFGIPNSAKIESASNHSDEIPSTPTPPDRDDGAYPTRQNSASTPILPSSREVDVILQPLGTVSTDQLEGYFSSPGVDSRPTEVVEYDEFGYPYDNRDLDNFDESFEDNYTPFYFGVFMADNETEEQHQARETEAQRVQQEAEQRRLEEERQAQEQERLQHLIGQQDVEGTAVFRTPQQNAVAAITLLDTLLKEDALNQADHVVNILNQTKTMIAASVPVNSGSVRTPTGSQVPHLRSQDYHQPTLSIAGAGSNHRSRGHDERSVHSPPERHRERRVEWPRSPPRRRPIDLRDTMNQRRAARGHAHRHSPDRYDDDVDGIAAFTNDLRRVDWPASFKPTGIEKDDGTTNPESWLTVYGLAIRAAGGDSKAMANYLPVALADSARSWLPGLPRGTIGSWAELRDHFIANFQGTFERPGTQFDLYNLSQKSGESLRDYIRRFSEQRNKISDITDDVIIAAFTKGICHEDLVGKFGRKPPKTVKQMFEKANRYAKAEDAIIASKQSGPTWKPKKDAPTTGGGGSNNHKDHKRKPEELVATTTHSSRQRSRVNTFDKIMNSQCPHHPNSNHAAKDCFVYKQFAEQYAKNARKTSDGEQSTSKKKNDDDDAPTDRVVHPGRYPLVLDPVVRNVKLRRSLIDGGSALNILFAKTLDDMQIPRTELKPSNAPFHGVIPGLSATPLGQITLPITFGARENFRTENVYFEVADFETAYHAILGRPALVMFMAVPHYTYMMMKMPSPRGVISLRSDIKQAVTCDKESCEMA

SEQ ID NO: 182268 - protein, 169 aa, Oryza sativa
  Clone ID: PAT_MRT4530_79473C.1.pep
MMKPQHGGMAGHGGGRTRSPFLTSYALTLAFITFVSVLYFKDFSSTLHQPFLTRPPPHRRQIARPRAPSHHHGGGSSSGGGDVVPPFAVGAAAAAGCDVGVGEWVYDEAARPWYEEEECPYIQPQLTCQAHGRPDTAYQHWRWQPRGCSLPSFNATLMLEMLRGKRMMF

SEQ ID NO: 182269 - protein, 849 aa, Oryza sativa
  Clone ID: PAT_MRT4530_79474C.1.pep
MARGSAPLDGSVLPPSRIVSERQAGLPRRFMPESATGREVVALGEGRPAPHYPGRSVFFLSFAMAGLVPPFSIFFMDILEFYDLQMAHLTPNAIMTLAIFAHLCEMFIGVRPSLRLFRWFFTVQPVSPPTVVGGCYFQPRGQVLNRYIPCVLRKKWDDWKSDWFYTSLADEARLRLPSQPPAQASSWRAAVDLGDGYDAVLDRLAGLRSQGLTGAMVFGDYLRRRIAPLQRRARGAWEYTGPKDYMRTHQGRKWDWDPEDFRMVVQRVLNLSSVEASLIPQGVLPLCCDLERAKILAIMQVVGASGERAPRGHDGAGGSRRGEQSTPGGGRASGPRDRGPGGSPPADARGKRKQEGTPPPSPPRGGGAAEEAAREEARLRRAGESVREAEAARARQAACQTPDPTPPEATTTSEAAHDEAAGAPLGPDPSGDAWDELASGDAPESGTSIGGPSRAAPTPRRLSPLPSAAPLSAEPLLQALAAANSTVLDGLSAQMEALQAERAELDAAWARVEEGWRSVEAMVEAGRKAHRRHASQLEAHRRDLAKIARERPADREAAVATREATLAAHEAACAEEESALRLREDALTEWGRALEEAKAAAQRLADSLFLREAAREEQARRNLEGARAERAALDQRAAKLEARAKELDARAHSGGAAAGLGDLAARLAAAEHTIAELQGALDSSAGEVEALRMASEVGPGMLRDAVSRLDRAGRQAGLWGGRYAKYAANQGGLAQRLSEMAGALERLPEELEETIKSSSRDLARGAVELVLARYQARDPDFSPWAALEEFPPGTGDGARAQVRDAADHIVHSFEGTAPQLAFALDSDEEGGDDGADDSDDEAGDPGASE

SEQ ID NO: 182270 - protein, 58 aa, Oryza sativa
  Clone ID: PAT_MRT4530_79475C.1.pep
RILQGSSAAPDLQANTPWSQRCSPLPGEVYLERTGRQTLPAFCQREQSPTPECCLPTA

SEQ ID NO: 182271 - protein, 797 aa, Oryza sativa
  unsure (1)..(797): unsure at all Xaa locations
  Clone ID: PAT_MRT4530_79476C.1.pep
MPESATGRKVVALGEGRPTPDYPGRSVFFLSFAMAGLVPPFSNFFMDILEFYDLQMAHLTPNAIMTLAIFAHLCEMFIGVRPSLRLFRWFSTVQPVSPPTVVGGCYFQPRGQVLNRYIPCVLRKKWDDWKSDWFYTPLADEARLRLPSQPPAHASSWRAAVDLGDGYDAVLDRLAGLRSQGLTGAMVFGDYLRRRIAPLQRRARGAWEYTGPEDSMRXHQGRTWDWREADRREATDRLREAEEAAQEAVRVCQAEEAAREEARLRRAGESVREAEAAXRQAACQAPDPTPPEVTTTSEATHDEAAGAPLGPDPSGDAWDEPAPGDAPESGTSISGPSRAAPTPRRLSPLPSAAPPSAEPLLQALAATNTTVLDGLSAQMEVLQAERAELDAAWARVEEGRRSVEAMVEAGRKAHRRHASELEARRRDLAEIAREVEEERETVLIATAVLNEARDDLRLQYGSRAVELEKKLDAARGVLDAAAAREQRAAENKAASRQRKEALEARATALEESARALDARERGLADREAVVATREATLASHEVACAEKESALRFREDVLTERWRALKEAEAAAQRLADSLSLREAAREEQARRDLEGARAEGAVLDQRAAELEARAKELDARAHSGGAAAGHGDPAARLAAAEHTIAKLQGALDSSAGEVEALRLASEGGRCAKYAANQGGLAQRLSEMAGALRRLPEELEETIKSSSRDLARGAVELVLASYQARDPDFSPWAALEEFPPGTEDGARAQVRDAADHIVHSFEGTAPRLAFALDSDEEGGDGGADDSDDEAGDPGASE

SEQ ID NO: 182272 - protein, 49 aa, Oryza sativa
  Clone ID: PAT_MRT4530_79477C.1.pep
MGIRVEDLNPLPYCLARLAAAQAESPSPRMGCCLLGGEVSSNIVTQKRK

SEQ ID NO: 182273 - protein, 1013 aa, Oryza sativa
  unsure (1)..(1013): unsure at all Xaa locations
  Clone ID: PAT_MRT4530_79478C.1.pep
MGSVSGIDDFAFPPGQAFRFGSLNFITNDFGKISLLTRIRTXSGRDQVPAPFGIPNSAEAYSKIISPESASNHSDEIXSTPPRPDQDDGQXSPARRSRRAPASAPIRSRSREVGVILQPLGTVSTEELDGYLSSPGVSSRPTEILDYDDFGYHYDHDDFDNFDDSYEDNYTPLFFGVFVADNETEEQRRAREVDQERAWQETERRQLEEERQQQERERLQREQQDRERIAKEGEDRRQRALEFGRRARELIGQQDVDGTXANSASARTPTGSRVPHLRSQDYHQPSLSIDGARSSRRSRGHDERSVRSPPERYRERRVERPHSPHRRRPIDLRDTINQHRAARGHHSPDRYDDDVDGVAAFTSDLRRVDWPAGFKSTGIEKYDGTTNPESWLTVYAXAGGSGSNNHKDRKRKPEELVATTSPSSRQRSRVNTFDKIMNSQCPHHPNSNHVAKDCFVYKQFVEQYVKNARKPSDGDQGTSKKKDGEDDVPLGFQDHRKELIHIFGGPLAYESKRKQKLTEREINAVQPNTPQYLRWSEIAIKFDRSDHPDRVVHPGRYPLVLYPVVRNVKLQRTLIDGSSALNILFAKTLDDMQIPRTELKPSNAPFHGVILGLSATPLGQITLPVTFGTRENFRTENVCFEVADFETTYHAILGRPALAKFMAVPHYTYMMMKMPGPRGVISLRSDIKQAVTCDKESCEIAQTHEITLAREEIRLAATTASEGENNKDIFAWKPSDMPGIPREVIEHSLHVKEDAKPIKQRLRRFAQDRKDAIKEELAKLLAAGFIKEVLHPDWLANPVLVRKKTGQWRMCVDYTDLNKSCPKDPFGLPRIDQIGRIVEAYVDDVVVKTKQKYDLIADLEETFASIRAFRMKLNPEKCIFGVPSGKLLGFMVSQRGIQANPEKINAMLNMKPPSSQKDVQKLTDCMAALSRFVSRLGERGMPFFKLLKKTDNFQWGPEAQKAFEDFKKFLTTPVLASPHPQEPLLLYVSATSKVVSTVLVVKREEEGHVQKVQ

SEQ ID NO: 182274 - protein, 92 aa, Oryza sativa
  Clone ID: PAT_MRT4530_79479C.1.pep
PIGCSTASTARSVLVALHVEPSHRRSSPTPASSWYAPRLASKVALQLVMQALWASSSFLRLVAPVLERVLLHSHGRKKSTKTHGLLVVSLFM

SEQ ID NO: 182275 - protein, 138 aa, Oryza sativa
  unsure (1)..(138): unsure at all Xaa locations
  Clone ID: PAT_MRT4530_7947C.1.pep
RVTTCHIPPRYTDGKRDITFVYNQTEPQTKPYPLDMWKYGSALQQRPELNPYSTRGTTSKTQPXHLEPSLKPXLGILNRRSDDVTCLARFPKCRLQLPRRADLPKLQRLHDRRKRKGFYANKLHITAETKHKNGFLTS

SEQ ID NO: 182276 - protein, 990 aa, Oryza sativa
  Clone ID: PAT_MRT4530_79480C.1.pep
MARGSALLDGSVLPPSRIVSERQAGLSRRFMPESATGREIVTLGEGRPAPDYPGRSVFFLPFAMAGLVPPFSSFFMDVLEFYDLQMAHLTPNAVMTLAIFAHLCEMFIGKSDWFYTPLADEARLRLPSQPPAQASSWRAPVDLGDGYDAVLDRLAGLRSQGLTGAMVYGDYLRRRIAPLQRRARGAWEYTGSEDFTRTHQGVRWDWAPEDFKILVQRVLNLNSVEAALIPQGILPLCSDPDRASILTIMMAVGASEERAPKGHDGAGGSRRGEQSTPRGGRASGSRDRGPGSSRPADARGKRKQGGTPPPSPPRGGGAARASNRRPEGAAPTSQPEGERKKKRPRKMGETEPSRGNLISPPKWSFNRPPRSEIPSRPSRHSKSGQSEAEDPAAAEALRRESDRREAADRLREAEEAAQEAARARQAEETAREEAGFRQDEAMATSEAARDEAAGASLGPTPSGDTQATTSGAAGDEAAGASLGPTPSGDAQDQPGPGDIPESGTSIGGPSRVASSPRRLFPTPSIALLNAEPLLQALAAANTTVLDGLSAQVEVLQAERAELDAAWARVEEGRRSVEAMVEVGHKAHRRHVSELETRKKVLAEIAKEVEEERGAALIATTVMNEAQDTLRLQYGSWEAELGKKLDAAQGVLDAAAAREQRAAETEAASRRREEALEARAMALEERAYVVERDLADREAAVTIREATLVAYEAACAEEEFTLRLREDALTERERALEGAEAAAQQLAVNLSLREAAQEEQARRNLEGARAERAVLNQRAAELEARAKELDARARSGGAATGESDLAARLAAAERTIADLQGALDSSAGEVEALRLAGEVGPGMLWDAVSRLDCAGRQVGLWRGRTVKYAANQGGLAQRLSKMAGALQRLPEELEKTIKSSSRDLAQGAVELVLASYQARDPNFSPWMALDEFPPGTEDRARAQVRDAADHIVDSFEGSAPRLAFAPNSDEEGNAGGADDSDVEAGDPGASD

SEQ ID NO: 182277 - protein, 972 aa, Oryza sativa
  Clone ID: PAT_MRT4530_79481C.1.pep
MESLAQLELLCEKLYNSRDSAERAHAESTLKCFSENSDYISQCQYILDNASTPYALMLASSSLLNQVNDRSLSLQLRLDILNYVINYLAMRGPKLQTFVIKSLIQLVCRITKFGWFDDDKFRDIVKEAADFLSLASQDHYFIGLKILYHLVGEMNQANAMPLTLHRKIACSFKDQFLLQIFQISLTSLHQLKSEVPDDFRRDPLSLALRCLSFDFVGCPVDESSEEFGTVQLPASWRPLLQDPSTVQIFFDYYKVNDTCVSKEALECLVRLASVRRSIFVEDPSRTQFLSHLMSGTKEILQTGQGLADHGNYHEFCRLLGRFKVNFQLSELLSIEFYGEWIGLVAEFTTKSLLSWQWASNSVYYLLSLWSRLVTSVPYLKSDTPSMLDETVPKITEGFITSRINSVQASFANDSSDDTLDNVDVLQEQLESLPYLCRFQYQNSSIYIINIMEPLLQAYTERSRLPAPGDANELSVIEGQLTWLVHIIEAILKIRQTIGCSQESQELIDAELAARVLQLINVTDTGVHAQRYRVLSKQRLGRAILIFVQNFRRSYVGDQAMHSSKQLYARLSELLGLNDHLVLLNAIVGKIATNLKCYAEVAVNLEATADAAFWTDVVKYAFIGLMRDLRGIAMATNSRRTYGLLFDWLYPSRMPLLLKAISLCADEPEVTTPLLKFMCEFVLNKAQRLTFDSSSPNGILLFQEVSKLIVAYGSRILLLPNGTDIYGSKYKGIWISLAVLSRALCGNYVNFGVFELYGDRALADALDISLKMSLSVPLSDILAFKKLSKAFYGYIEVLFSSHITFVLNLDTNTFVHIVSTLESGLKGLDTGISTQCASAIDSLAAFYFNNITAADGPPSPAALNLARHIGEFPTLFPQILKTLFEIIIFEDAGNQWSLSRPILSLIMISEQMFSNLRAQILASQPVDQQQRLSQCFEKLMSDVARNLEPKNRDKFTKNLTTFRHDFRVKNIQA

SEQ ID NO: 182278 - protein, 63 aa, Oryza sativa
  Clone ID: PAT_MRT4530_79482C.1.pep
MAAGGDLVERGIAFASEKSPERKGDWICLSGENGGHGVRKGDLVQEELKAEIEFWNRAGIGYG

SEQ ID NO: 182279 - protein, 149 aa, Oryza sativa
  unsure (1)..(149): unsure at all Xaa locations
  Clone ID: PAT_MRT4530_79483C.1.pep
MFXDXVSNLDRVGRQAGLXXXRCAKYAANKGGLAQRLSEMAGPLXRLXEELEETIXSSSRDLARGAVELVLASYKARDPDFSPWAALXEFPPGTQDGARAQVRNAADHIVPSFEGTAPRLAFALDSDEKAVNGGAYDSDDEAGDPGASE

SEQ ID NO: 182280 - protein, 1011 aa, Oryza sativa
  unsure (1)..(1011): unsure at all Xaa locations
  Clone ID: PAT_MRT4530_79484C.1.pep
MESLAQLELLCEKLYNSRDSAERAHAESILKCFSENSDYISQCQYILDNASTPYALMLASSSLLNQVNDRSLSLQLRLDIRNSPCQQSFIESVICLAVXFTKLGCYDDDKCRDIVKEAADFLSLASQDHYFIGLKILYHLVGEMNQNCTIANAMPLTLHRKIACSFKDQFLLQIFQISLTSLHQLKXEVPDDFRRDPLLLALRCLSYDFVGCPVDESSEEFGTVQLPASWRPLLQDPSTVQIFFDYYKVNDTCVSKEALECLVRLASVRRSIFVEDPSRTQFLSHLMSGTKEILQTGQGLADHGNYHEFCRLLGRFKVNFQLSELLSIEFYGEWIGLVAEFTTKSLLSWQWASNSVYYLLSLWSRLVTSVPYLKGDTPSMLDETVPKITEGFITSRINSVQASFANDSSDDTLDNVDVLQEQLESLPYLCRFQYQNSSIYIINIMEPLLQAYMERSRLPAPGDANELSVIEGQLTWLVHIIAAILKIRQTIGCSQESQELIDAELAARVLQLINVTDTGVHAQRYQVLSKQRLDRAILIFVQNFRRSYVGDQAMHSSKQLYARLSELLGLNDHLVLLNVIVGKIATNLKCYAERETFPFLEEYRCARSRTTFYYILGCLIFMEDTPVKFRSFMEPLLQVAVNLEATADAAFRTDVVKYAFIGLMRDLRGIAMATNSRRTYGLLFDWLYPSRMPLLLKAISLYADEPEVTTPLLKFMCEFVLNKAQRLTFDSSSPNGILLFREVSKLIVAYGSRILLLPNGTDIYGSKYKGIWISLAVLSRALCGNYVNFGVFELYGDRALADALDISLKMSLSVPLSDILAFKKLSKAFYGYIEVLFSSHITFVLNLDTNTFVHIVSTLESGLKGLDTGISTQCASAIDSLAAFYFNNFTAADGPPSPAALNLARHIGEFPTLFPQILKTLFEIIIFEDAGNQWSLSRPILSLIMISEQMFSNLRAQILASQPVDQQQRLSQCFDKLMTDVATNLEPKNRDKFTQNLTTFRHDFRVKNIQA

SEQ ID NO: 182281 - protein, 339 aa, Oryza sativa
  Clone ID: PAT_MRT4530_79485C.1.pep
AGAKQTAFLLLCSIVPRKMAAKSGEFVAVPVAAHPHDSASEPEPVTDGLIPGKDRAAAGARVLERDHRAPFADRDARPRLTVADTDGADVFARERGVSSREALLSKNGPAGLAVSDLFFKRETGAPLVDMARAGGLTVGGTNANDVFALERGVSESDLLPRETGEPLLLLLLLLDKHRDVFARERGMSFGDALLGNNHPAGLREIDTPLLDEKFFSDDYSFARKTAAPPFAGLVAADEHGARTDKALRPAPSAPHSEQVAIDVLVGAKEVPVAAGADSGGGHGGNLSTVVGIFAASTAVTMVAAGPVSPPVAFGAFLLLLGGLLVSVSRVLENQLVDDI

SEQ ID NO: 182282 - protein, 759 aa, Oryza sativa
  Clone ID: PAT_MRT4530_79486C.1.pep
MTGRATGSTPLSPTEARLRLPSQPPAQASSWRAPVDLGDGYDAVLDRLAGLRSQGLTGAMVFGDYLRRRIAPLQRHARGAWEYTGPEDIMRTHQGRKWDWDPEDFKIVVQWVLNLSSVEASLIPQGVLPLCCDPERANILTIMQEVGASGERAPRGHDGAGGSRRGEQSTPGGGRASGPRDGGPGGSRPTDARGKRKQEDTPSPSPPRGGGAAEEAAWEEARLHRAEESVRETEAARARRADCQAPEPTPPEATTTSEATHDEAAGAPLGPDPSGDAQDEPASGDVPESGTSIGGPSRAASFTRRLFPMPSAAPLSAEPLLQALATANTTVLDGLSAQIEVLQAERAELDAAWARVEEGRRSVEAMVEAGRKAHRWHASELEARRRDLAEIAREVEEERETALIATAVFNAARDDLCLQYGSRGAELEKKLDASRQREEALEARATVLEERARALDTKERELAGREAAVAIREATLAAHEAACAEEESALRLREDTLTEREQALEEAEAAVQRLADSLSLREAAREEQARRNLEGARAERAALDQRAAELEARAKELDARACSGGAAAGDGDLAARLAAAEHTIADLQGALDSSAGEVEALRLAGEVGPGMLRDAVSRLDRAGRQAGLWGERTAKYAANQGGLAQRLSEMAGTLQRLPEELEETIKSSSRDLARGAVELVLASYQARDPDFSPWAALDEFPPGTEDDTRAQVRDAADHIVHSFEGTAPRLAFALDSDEEGGDGGVDDSDDEAGDPGASK

SEQ ID NO: 182283 - protein, 82 aa, Oryza sativa
  unsure (1)..(82): unsure at all Xaa locations
  Clone ID: PAT_MRT4530_79487C.1.pep
MDRLVRVXYSGRVVEPYVGAHVEFXDMSFKTILFPARPTLDELRSRVKEALEWTEDNVEIRFYGXYDVGKGHKYILNVLGQL

SEQ ID NO: 182284 - protein, 1012 aa, Oryza sativa
  Clone ID: PAT_MRT4530_79488C.1.pep
MARGSALLDGSVLPPSRIVSERQAGLPRRFMPESATGREIVTLGEGRPAPDYPGRSVFFLPFAMAGLVPPFSSFFMDVLEFYDLQMAHLTPNAVMTLAIFAHLCEMFIGVRPSLRLFRWFFTVQSVSPPSVVGGCYFQPRGPVLNRYIPCALRKKWDDWKSDWFYTPLADEVRLRLPSQPPAQASSWRAPVDLGDGYDAVLDRLAGLRSQGLTRAMVYGDYLRRRIAPLQRRARGAWEYTGSEDFMRTHQGVRWDWAPEDFKILVQRVLNLNSVEAALIPQGILPLCSDPDRASILTIMMAVGASEERAPKGHDGTGGSRRGEQSIPRGGRASGSRDRGPGSSRPADARGKRKQGGTPPPSPPRGGGAARASSRRPEGAAPTSQPEGERKKKWPRKMGETEPSRGNLISPPKWSFNRPPRSEIPSRPSRHSKSGQSEAEDPAAAEARRRESDRREAADRLREAEEAAQEAARARQAEEIAREEAARARQAEEAVWEEAARARQDEMLATSEAARDEAADASLGPTPSGDAQATTSGAAGDEAAGARLFPTPSIAPLNTEPLLQALAAANTTMLDGLSAQVEALQAERAELDAAWARVEEGRRSVEAMVEVGRKAHRRHVSELETRKKVLAEIAKEVEEEREAALIATTVMNEAQDTLRLQYGSWEAELGKKPDAAQGVLDAAAAREQRAAETEAASRQREEALEARAMALEERACVVERDLADREAAVTIREATLAAHEAACAEEELVLRLREDALTERERALAGAEAAAQQLADSLSLREAAQEEQARRDLEGARAERAALNQWAAELEARAKELDARARSGGAAAGESDVAARLAAAEHTIADLQGALDSSAGEVEALRLAGEVGPGMLWDAVSRLDCAGRQVGLWRGRTVKYADNQGGLAQRLSKMAGALQRLPEELEKTIKSSSRDLAQGAVELVLASYQARDPNFSPWMALDEFPPGTEVRDAADHIVDSFEGSAPRLAFAPNSDEEGNAGGADDSDVEAGGPGASD

SEQ ID NO: 182285 - protein, 98 aa, Oryza sativa
  Clone ID: PAT_MRT4530_79489C.1.pep
RGAEDGGGQGRRQLLTASEVSRKATGGAERTYYTPGQPSPGSDGGHGRGEGDETWSEAAGSSFPTVVATRSSDMSGLKKLDTAMLLQLSPCPSLRKAR

SEQ ID NO: 182286 - protein, 126 aa, Oryza sativa
  Clone ID: PAT_MRT4530_7948C.1.pep
MLVWTQVGEIVFPVYTTMPISTGPPMTGNENAVAMNQDGSMSKNPPVETENGLSTTSKLVKDSDAAKSCPSDINHGPTKMTSETKNHDLSSCKVLLGAVKTPSPKSYVPVRDNGKEQGATPASDRF

SEQ ID NO: 182287 - protein, 125 aa, Oryza sativa
  unsure (1)..(125): unsure at all Xaa locations
  Clone ID: PAT_MRT4530_79490C.1.pep
QDEPGSGDVPESGTSIGGPSRAAFSPRRLSPMPSAAPLSAEPLLQALATANTTVLDGLNAQMEVTAGTPXELEARRKELAEIAREVEEKREAAXHCHRRAXELEARRKELAEIAREVEEKREAAL

SEQ ID NO: 182288 - protein, 108 aa, Oryza sativa
  Clone ID: PAT_MRT4530_79491C.1.pep
MALEDRSHDALDGCHPCPAPSPVAEAGGDVDAVFLGFVYNHAPLPPFTPPVPCLSVGRRDRAGLPPPFPSPVSPPPRRRSAIVGPPLPPHPGDIPTHRPGRPSCREEI

SEQ ID NO: 182289 - protein, 62 aa, Oryza sativa
  Clone ID: PAT_MRT4530_79492C.1.pep
MDMEEVRACMDLGLELPSDYTVEIQCYGLFATSNPTHTNSGSSSNDEEGARREGRASAIGDG

SEQ ID NO: 182290 - protein, 767 aa, Oryza sativa
  Clone ID: PAT_MRT4530_79493C.1.pep
MASSGAPLCSSALVLLPCLFVIAMAALQSGVVVLADAADTVAADRPLSGRQRPLVSNRGKFALGFFQPENSEHWYLGTWYYQISKHTPVWVANRGSPISNPDTSQLTIATDGNMVLLDNSTTAIWSTNISNFTSNSTVGVILDSGNLVLADASNTSIILWQSFDHFGDTWLPGGKLGRNKLTGVSTRLVAWKARNDPVPGVFSLELDPNGTSQYLLQWNSTLQYWTSGNWTGRIFTGVPEMTPTGSYPNSLYTFDYVNGENESYFVYDLKDDSVLTRFVLGEMGQIQFLTWMNGANDWMLFWSQPKAQCDVYSLCGPFSVCTENAMASCSCLRGFGEQNVGEWLQGDHTSGCRRNVELQCSSNGSVVGRSTDRFYTMANVRLPSDAESVVAAELSGQKQKHTKKLITFSVLATGAVLLMIAVLVVILRRRMVKATTRVEGSLISFTYRDLKSVTKNFSEKLGGGAFGSVFKGSLPDATMVAVKKLEGFRQGEKQFRSEVSTIGNIQHVNLIRLLGFCSEKTRRLLVYEYMPNGSLDKHLFGSNQHVLSWNTRYKIALGIARGLDYLHEKCRDCIIHCDIKPENILLDGSFAPKVADFGLAKLMGRDFSRVLTTSRGTVGYIAPEWIAGTAVTAKADVFSYGMTLLEIVSGRRNVQEQGGAAVDGLLPLLAASTLGGGGGGRDELVSAVVDGRVGVNADMGEVERACRVACWCIQDDEKARPAMATVVQVLEGLVEIGVPPVPRSLQILADLANQSNNLRFFSDLPSK

SEQ ID NO: 182291 - protein, 55 aa, Oryza sativa
  Clone ID: PAT_MRT4530_79495C.1.pep
AFGARVCPRTHAKIRSGNRLKTNVVRAVTHAHPTRDGSSSANPFHTPHQRNDGSV

SEQ ID NO: 182292 - protein, 133 aa, Oryza sativa
  unsure (1)..(133): unsure at all Xaa locations
  Clone ID: PAT_MRT4530_79496C.1.pep
VSYLCTYVRTYGEETMNLISSSTEEKKTCVAGAGGENLRWSSMARFCYTPAIXTRPTNTPAALSTIACRPTMVFNRSPSPMPLSRXDNEADQSSKQAXGNRRRKRRRTAGRQCAYPAGPXSNGREKREAGEWD

SEQ ID NO: 182293 - protein, 87 aa, Oryza sativa
  Clone ID: PAT_MRT4530_79497C.1.pep
QASVVARVLLKDVSIQASEACLADSRVHNLVLNAKVRGLSYPSKNWSWECYCQLLAVYRFQLSPGTWYLVLLAVAHILWAMVGCFLR

SEQ ID NO: 182294 - protein, 72 aa, Oryza sativa
  Clone ID: PAT_MRT4530_79498C.1.pep
NSKPFFCKNLLKKPPKGGNGTGGTKKPRGETIFKGALKNKKSLALSQISLKGEITKLLGLNLLPYGPKNFNV

SEQ ID NO: 182295 - protein, 178 aa, Oryza sativa
  unsure (1)..(178): unsure at all Xaa locations
  Clone ID: PAT_MRT4530_79499C.1.pep
PXGAXRGTHPXXXXCKWGXPTASFXPIXXXMIXXDXLAAXEGXMASXGVXXTXNXRXPLSPKHXNXXXPXXXKXSXTXXXDLWXXARXPACASXGXXTCXXXELXTWXVLXXXXKTXXAXXXGXPIXAXVVFXLPLPXXLXVTALEXXXGRPSLLFXLXPXVSXXXXXXRAKRXXXXH

SEQ ID NO: 182296 - protein, 150 aa, Oryza sativa
  Clone ID: PAT_MRT4530_7949C.1.pep
MSKRKTREPKEENVTLGPTVREGEYVFGVAHIFASFNDTFIHVTDLSGRETLVRITGGMKVKADRDESSPYAAMLASQDVAQRCKELGITALHIKLRATGGNKTKTPGPGAQSALRALARSGMKIGRIEDVTPVPTDSTRRKGGRRGRRL

SEQ ID NO: 182297 - protein, 97 aa, Oryza sativa
  Clone ID: PAT_MRT4530_794C.1.pep
FGLFFFFFFFFFFFFFFFFYKGKKPRLLGERFVLLGGTGKKTIQFGGKTRVHKNFLGVFYVQTKKGGKTPFFFEPFFEKTGGLKKKTQYFELQRLPV

SEQ ID NO: 182298 - protein, 140 aa, Oryza sativa
  Clone ID: PAT_MRT4530_79500C.1.pep
MRSRILWMSHAERFFMWLGGFCCSELLKVLESHLEPLTNQQLMGICNLQQSSQQAEDALSQGMEALQQTLGDTLASAAATVVVGGVGADNVTNYMGQMAIAMAMLTTLENFLKLRSNINGELNCLLPWRDAMIFLCRLIC

SEQ ID NO: 182299 - protein, 243 aa, Oryza sativa
  Clone ID: PAT_MRT4530_79501C.1.pep
MFRRAAASTFFRHALSTSPYSSSAAAAAAAASSSAVNSIILRSLKEHFLEVSKMTPPPKISPPKPYTIVKGALDQASGPVLRRGYGDAGEEISISVARLANIMPPGADYDSDDDDGGGGGVSESISQLFLHVDISRPGSSKSLQFLCGLYPDAVGIHSVCLRPKTAESGTAGLAGKGGDGYQGRIFQELDENVRDAFHHYIEARGINEKLFPFLQAWLYVKDHRNLIRWFKSVGTLISEPKSE

SEQ ID NO: 182300 - protein, 42 aa, Oryza sativa
  Clone ID: PAT_MRT4530_79502C.1.pep
KIKNSRWDGNTHFKRFGGIFNAKKIFLDYKAMALFICQNLHT

SEQ ID NO: 182301 - protein, 161 aa, Oryza sativa
  Clone ID: PAT_MRT4530_79503C.1.pep
MASVVAVEGAAAALWSGLSRGVGSGKTTRGGGRRASRRRRQAHDHSRSLELEVGVSSLEFGVAELKEAEFRIAEKDDPYERYTFVIAFVFGQASEVDVAATMVLLQQHASTRQQGSTGRGRWRRSTPAGTRASQSRSPPPTILSFGGRADAAELFASGALA

SEQ ID NO: 182302 - protein, 93 aa, Oryza sativa
  Clone ID: PAT_MRT4530_79504C.1.pep
MCDGKICTVFYSYVNPGDVSVQRVCPNTPPWRFLPASMHLDCLAYSPKRKTMRRPISDIKAPRITNFQKKDSARGKHALRIKTLQSSQFPGAE

SEQ ID NO: 182303 - protein, 70 aa, Oryza sativa
  Clone ID: PAT_MRT4530_79505C.1.pep
IAAYALKHTQLNKESWSETTGALHVHVCGQPATYIEHLRVFPCIFAHQCLSSGDVGLVPIMLGNVAYSRR

SEQ ID NO: 182304 - protein, 760 aa, Oryza sativa
  Clone ID: PAT_MRT4530_79506C.1.pep
MARGSAPLDGSVLPPSRIVSERQAGLPRRFMPESATGREVVALGEGRPTPHYPGRSVFFLSFAMAGLVPPFSSFFMDILEFYDLQMAHLTPNAVMMLAIFAHLCEMFIGVRPSLWLFQWFFTVQLVSPPLVVGGCYFQPRGQVLNRYIPCVLHKKWDDWKSDWFYTPLADEARLRLPSQPPAQASSWRAVVDLGDGYDAVLDRLAGLRSQGLTGAMVFGDYLRRRIAPLQRRARGAWEYTGPEDSMRTHQGRTWDWDPEDFRMVVQQVLNLSSVEASLIPQGVLPLCCDPERANILTIMQTVGAPGERALRGHDGAGGSRRGEQSTPGGGRASGPRDGGPGGSCPADARGKRKQEGTPSPSPPRGGGAFFFCLSEIPSRPSRYSKSGRSEAEEIAAAEAQRREADRREAADRLREAEEAAQEAVWVRQAEEAQEAVRVRQAEEAAREEARLRRAGESVREAEAARARQAACQAPDPTPPEATTTSEATHDEAAGAPLGPDPSSDTWDEPASGGAPESGTSIGRPSRAAPTPRRLSPLPSAAPLSAEPLLQALAAANTTVLDGLSAQMEVLQAERAELDAAWARVEEGRCSVEAMVEAGRKAHRRHASELEARRRDLAEIAREVEEERETALIATAVLDEARDDLRLQYGSRAAEVEKKLDAARGVLDAAAAQERRAAENEAASRQREEALEARATALEERARALDAKERDLAGREAAVATREATLAAHEASGQPAAREEQARRNLEGARAERAALDQRAA

SEQ ID NO: 182305 - protein, 145 aa, Oryza sativa
  Clone ID: PAT_MRT4530_79507C.1.pep
MGFSETQEELVLRSWQSMKKDSESIALKFFLRIFEIAPAAKQMFSFLRDSGDDVPLENHPKACESATQLRKTGDVKVREATLRRLGATHVKAGVADAYFEVVKTALLDTIKDAVPEMWSPEMKGAWEEAYDQLAAAIKEEMKKAA

SEQ ID NO: 182306 - protein, 872 aa, Oryza sativa
  unsure (1)..(872): unsure at all Xaa locations
  Clone ID: PAT_MRT4530_79508C.1.pep
MARGSAPLDGSVLPPSRIVSERQAGLPRRFMPESATGREVVALGEGRPAPHYPGRSVFFLSFAMAGLVPPFSSFFMDVLELYDLQMAHLTPNAVMTLAIFAHLCEMFIGVRPSLRLFRWFFTVQPVSPPSVVGGCYFQPRGSVLNRYIPCVLRKKWDDWKSDWFYTPLADEARLRLPSQPPAQASSWRAPVDLGDGYDAVLDRLAGLRSQGLTGAMVYGDYLRRRIAPLQRRARGAWEYTGSEDYMRTHQGVKWDWVPEDFKMVIQRVLNLSSVEASLIPQGVLPLCSDPERANILTIIEIPSRPSRHSKSGRSEAEETATAEARRRGADRREAADRLREAEEAAQEAVRARQAEEAAWEEARLRRAEESVWETEAARVRRAACQAPDPTPPEATTTSEAAHDEAAGAPLGPDPSGDAWGEPASGNAPESGTSIGGPSRAAPTPRRLSPLPSAAPLSAEPLLQALAAANTTVLDGLSAQMEVLQAERAEVDVAWARVEEGRRSVEAMVEAGHKAHRRHASELEARRRDLAEIAREVEEERETALIATAVFNAARDDLCLQYGSRAAELEKKLDASRQREEALEARATVLGERARALDTKERELAGREAAVAIREATLAAHEAACAEEESALRLREDELTERKRALEEAEAAAQRREEQARLNLEGARAERAALDQRAAEFEARAKELDARARSGGAAAGDGDLAARLAAAEHTITELQGALDSSAGEVEALRLAGKVGPGMLRDAVSRLDRAGRQAGLWGGRTAKYAANQGGLAQRLSEMAGTLQRLPEELEEAIKSSSRDLARGAVELVLASYQARDPDFSPWAALEEFPPGTEDGARARVRDAADHIVHSXFEGTAPRLAFALDSDEEGG

SEQ ID NO: 182307 - protein, 161 aa, Oryza sativa
  Clone ID: PAT_MRT4530_79509C.1.pep
PPNFLFFRGALAPLGQLKLPLWLPEVVFVKGPPPVKFFYQVFREGFPPPPVNGILIWGGWPPKGFFFFFLPATSFKNLPVGALFAKFFPEWKTPKTGGPPGPPGPFEFSLPPGGFTLPFSPPSLGTNPPVPPITVDPPFLGLEPLVPLKVLESFPRPLSSC

SEQ ID NO: 182308 - protein, 1646 aa, Oryza sativa
  unsure (1)..(1646): unsure at all Xaa locations
  Clone ID: PAT_MRT4530_7950C.1.pep
SRARSRRSPAATAPPTLARRLPPPTPRPHNRHDHDDRERRMQGDTGRGHRHNDEDNRDRRRENNGGRRQDSRESSRRPRNPTPKPSDPSSLSSSSSSSSSDRHPRRTHDRRQPTAPSARCRAFGRSLRDVRWPERFRPGAIEKYDGSTDPEEFLQVYSTVLYAAGADDNALANYLPTALKGSARSWLMHFPPYSISSWANLWQQFVANFQGTYKRHAIEDDLHALTQNSGESLREYVWRFNECRNTIPEITDASVIRAFKSGVRDRYTTQELATRRITTTRRLFEIVERCTHVDDALRCKNDKPKTGGEKKPATDAPESSKKKNRKSGKRKAQAEVLVAEYANPPKRPDPQGSDAKKAWCPIHKTDRHSLEDCLVFKKSLEKHMALEKGKRVRVVEKDAEAAAQESDSAYPDSDLHVSHIFGGSTXRYPIVVEPTIRNIKVARVLIDGGSSINLLFASTLDVMGIPRSELTPTDQPFHGITPHSSSKPLGKITLPVTFGQANNFRMEQITFDVAEFDTAYNAIIGKTALAKFMAASHYAYQVLKMPGPKGTITIQGNAKLAVQCDKRSLDMVEHTPSPPATTEPPKKVSKTNKTLKPDGAIKIVQLSSANLDKTEFALITFITNXSDVFAWQPSDMPGVPREVIEHKLLVRPDAKPVKQRLWRFAPDXKQAIREELDKLLKAGFIREVLHPEWLANPVMVRKANGKWRMCVDFTDLNKACPKDHFPLPRIDQLVDSTAGCELLSFLDAYSGYHQISMAKEDEERTAFITPFGVFYYVKMPFGLITVGNTFQRTVQGALSDQLSNNVEAYVDDIVVKTKTSDSLIDDLRETFDNLRXYRLMLNPEKCTFGVQSGKLLGFLVSGRGIEANPEKIKAIENMKSPKRLKKVQKLTGCMAALSRFVARMGERAQPFFALLKKQNKFVWTQEAEEAFIALKRYLSNPPXVLVAPQPNEELFLYIAATPYSVSTVIAVEREXQRPIYYVSEALHDAKTRYPQIQKLLYAVIMTSRKLRHYFQAHRVTVVSSFPLGEVVRNKDVVGRIAKWVVELSQFDVHFVPRTAIKSQVLADFVADWTMPDNKSDNQIDDETWTMAFDGALNSQGVGAGFILTSPSGDQFKHAIHLNFRATNNTAEYEGLLAGIRAAAALGVKRLIVKGDSELVANQVHKDYKCSNPELSKYLAEVRKLEKRFDGIEVRHVYRKNNIEPDDLARRASRREPLEPSTFLDILTKPSVKEVSGEINPDTPDISLEATEAEHAVADIETIDDWRTPLIKFINSEELPEDDAEAEKITRKAKIYCTIGNDLYKKAPNGVLLKCVSSDDGRHLLLDIHEGIYGSHAAGRTLVGKAFRQGFFWPTALKDACDIETHKATRTSAPDYPSYLAVLVLGARYTRAIPTRTGRLQVPIXVAIDKFTKWIEAIPTGEIKADNAIKFIKGIFCRYGLPHRIITNNGSQFISADFQDYCIRLGIKICFALVSHPQSNGQVERANGIVLQGIKTLLWAVCTTPTTSNKETPFFLVYGSEAMLPSELRYQSTXIQRYSDKDQEKQRNDHVNLLEEHRERVAVRAASYQQALRRYHEKRIRARILSIGDYILRRVQSQAGRNKLSPKWEGPYTITQVLRPGAFKVVDGDGRELANSWNIDQLRKFYV

SEQ ID NO: 182309 - protein, 1457 aa, Oryza sativa
  unsure (1)..(1457): unsure at all Xaa locations
  Clone ID: PAT_MRT4530_79510C.1.pep
MGFVSGIDDFAFPPGQAFRFGSLNFITNDFGKISLLDSDPNQSGRDQVPVPFGIPNSAEAYSKSISPESASNHSDEIQSTLPRPDQDDGSYPSILMKLPDDLAAVFTAKTSPTRRSRRAPASAPIQSRSREVGVILQPLGTVSTEELDGYLSSPGVSSRPTEILDYDDFGYHYDHGDLDNFDDSYEDNYTLLFFGVFMADNETEEQRQAREADQDRARQEAERRRLEEERQRQERERLQREQQDHERIAKEAEDRRQRALESGRRARELIGQQDQNAVAAITLLDTLLKEDALNQVDHVVNILNQTKTMIAASVPANSASTRTPTDSRVPHLRSHDYHQPSLSIIGTGSSRRSRGHDERSIHSPPERHRERRVERPRSPPHQRPVDLRDTINQRRAARGHRHSPNRYDDDVDGVAAFTNDLRRVDWPAGFKPTGIEKYDGTTNPESWLTVYGLAIRAAGGDSKAMANYLPVALANSARSWLHGLPRGTIGSWAELRDHFIANFQGTFERPGTQFDLYNVVQKSGESLRDYIRRFSEQRNKISDITDDIIIAAFTKGIRHEDLVGKFGRKPPRTVKQMFEKAHEYAKAEYAITASKQSGTTWKPKKDTPTAGGSGSNNHKDRKHCFVYKQFAEQYVKNARKPSDGDQGTSKKKDDEDDAPTGFQDHRKELNHIFGGPLAYESKRKQKLTEREINAVQPNTPQYLRWSEIAIKFDLSDHVEDNKDIFVWKPSDMPGIPREVIEHSLHVKEDAKPIKQRLRRFAQDRKDAIKEELTKLLAAGFIKEVLHPDWLANPVLVRKKTGQWRMCVDYTDLNKSCPKDPFGLPRIDQVVDSTAGCELLSFLDCYSGYHQIRLKESDCLKTSFITPFGAYCYITMPFGLKNAGATYQRMIQRCFSIQIGRNVEAYVDDIVVKTKQKDDLIADLEETFTSIRAFKMKLNPEKCIFGVPSGKLLGFMVSQRGIQPNPKKINAILNMKPPSSQKDVQKLTGCMAALSRKLSHYFQSNSVTVDTSFPLGDILHNREANGRIANWALELMSLDISFKPRTSIKSQALADFLAEWTECQEDMPEEKMEYWTMHFDGSKRLTGTGAGVVLISPTGERLSYVLWKHFSASHNVAEYEALLHGLRIAISLGIRRLIVRGDSQLVVNQVMKEWSCLDDNMTAYRQEVRKLEDKFDGLELTHVLRHNNEAADRLANFGSKREAAPSVVFVEHLYEPTVPRKETVEAMDAQGVSMIEADWREPFIKFLSKQELPQDKNEAERISRRSRLYIIHEAELYKKSPSGILQRCVSLEEGRQLLKDIHSGICGNHAAARTIVGKAYWQGFFWPTTVSEADKIERTCEGCQXLPDKLICQPKSCKPSRCPGHLRSGGLTWSARLKGQSAVTRISLWLSTNSPSGLRLNRSSRSQQIKLEIFSSTLCIGLGYLIGSSLIMALNSLAEHLKTFVKTSAFVTPPWHTL

SEQ ID NO: 182310 - protein, 80 aa, Oryza sativa
  Clone ID: PAT_MRT4530_79511C.1.pep
PKQIFPEPNRALASVSLFLQLHSILFVVLQLSSIVLNQNMALLNVVLKTMNLVSLLFQLILQSTNDFFAGLYLSWGGDKP

SEQ ID NO: 182311 - protein, 1024 aa, Oryza sativa
  unsure (1)..(1024): unsure at all Xaa locations
  Clone ID: PAT_MRT4530_79512C.1.pep
MARGSALLDGSVLPPSRIVSERQAGLPRRFMPEPATGREIVTLGEGRPAPCYPGRSVFFLPFAMAGLVPPFSSFFMDVLEFYDLQMAHLTPNAVMTLAIFAHLCEMFIGVRPSLRLFRWFFTVQSVSPPSVVGGCYFQPRGPVLNRYIPCVLRKKWDDWKSDWFYTPLADEARLRLPSQPPAQAFSWRAPVDLGDGYDAVLDRLAGLRSQGLTGAMVYGDYLRRRIAPLQRRARGAWEYTGSEDYMRTHQGVRWDWAPEDFKIVVQRVLNLSSVEASLIPQGVLPLCSDPDRASILTIMQAVGASEERAPRGHDGAGRSRRGEQSTPGGGRASGPRDGGPGSSRPADARGKRKQGGTPPPSPPRGGGAARASSRRPEGATPTSQPEGERKKKRLRKMGGTEPSRGNLISPPRWSFNRPPRXIPSRPSRHSKSGQSEAEDPAAAEARRRDSDRREAADRLREAEEAAREAARARXAEEAAREEAGLRQAEATTSSEATRETDRQEAADRLREAEEAAQAAVRAHQAEEAAXEEARLRQAEAATTSEAARDEAAGASLGPTPSGDAQDQPGLXAVANTTVLDGLSAQVEALQAERAELDAAWARVEEGRRSVEAMVEVGRKAHRRHVSELEARRKVLGEIAKEVEEERGAALIATTVMNEAQDTLRLQYGSWEAELGKKLDAAQGVLDAAAARERRAAETEVASRRREEALEARAMALEERACAVERDLADREAAVAIREATLAAHEAACAEEESALRLREDALTERERALGEAEAAAQRLADSLSLREAAREEQARRNLEGARAERAALNQRAAELEARAKELDARARSGGAAAGESDLAARLAAAEHTIADLQGALDSSAGEVEALRLAGEVGPGMLRDAVSRLDRAGRQAGLWGGRTVKYAANQGGLAQRLSEMAGTLQRLPEELKGTIKSSSRDLARGAVELVLASYQARDPDFSPWTVLDEFPPGTEDGARAQVRDAADHIVHSFEGSAPQLAFALNSDEEGDDGGVGDSGDEAVDPGASE

SEQ ID NO: 182312 - protein, 158 aa, Oryza sativa
  unsure (1)..(158): unsure at all Xaa locations
  Clone ID: PAT_MRT4530_79513C.1.pep
MSAAAAGKRFPVDATISVGAPTSPPMGRRRRQTERLHMAEDGDGEFAFDLNEPPLEHGNGFDLNLPLNEFGAVDFDYVQHLAEHVMALVEVNHRRKXKDMTEEVRKQVYQALLARSKNGKLGKKDTRVVADQFVHHITLFWSNLSRTLTFFCSFCSYD

SEQ ID NO: 182313 - protein, 1596 aa, Oryza sativa
  unsure (1)..(1596): unsure at all Xaa locations
  Clone ID: PAT_MRT4530_79514C.1.pep
MGFVSGIDDFAFPPGQAFWFGSLNFITNDFGKISLLDSDSNQSRRDQVPVPFGIPNSAEAYSKIISPESASNHSDEIQSTLPRPDQDDGSYPSILMKLPDDLAAVFTAKTSPTRRSRRAPASAPIQSRSREVGVILQPLGTVSTEELDGYLSSPGVSSRPTEILDYDDFGYHYDHGDLDNFDDSYEDNYTPLFFGVFMADNETEEQRQAREADQDRARQEAERRRLDEERQRQERERLQREQQDREQIAKEAEDRRQRALESGCRARELIGQQDVDGTAGTFERPGTQFDLYNVVQKSGESLRDYIRRFSEQRNKISDITNDVIIAAFTKGIRHEDLVGKFGRKPPRTVKQMFEKANEYAKAEDAITASKQSGTTWKPKKDTATAGGSGSNNHKDRKRKPEELVATTSPSSRQRSRVNTFDKILNSQCPHHPNSNHVAKDCFVYKQFAEQYVKNARKPSDGDQGTSKKKDDEDDAPTGFQDHRKELNHIFGGPLAYESKRKQKLTEREINAVQPNTPQYLRWSEIAIKFDRSDHPDRVVHPRRYPLVLDPVVRNVKLRRTLIDGGSALNILFAKTLDDMQISRTELKPSNTPFHGVIPGLSATPLGQITLPVSFGTRENFRTENVCFEVADFETAYHAILGRPALAKFMAIPHYTYMMMKMPGPRGVISLWSDIKQAVTCDKESCEMAQTHETTLACEEIRLAETTASEGEVPATKLTKTEESDAKTKKIPLDPSDPDKTAXLVWKKTGQWRIXVDYTDLNKSCPKDPFGLPRIDQVVDSTAGCELLSFLDRYSGDHQIRLKESDCLKTSFIMPFGAYCYITMPFGLKNAGATYQCMIQRCFSTQIGRNVEAYVDDVVVKTKQKDDLIADLEETFTSIRAFKMKLNPEKCIFGVPSGKLLGFMVSQRGIQPNPEKINAILSMKPPSSQKDVQKQTGCMAALSRFVSRLGERGMPFFKLLKKTDNFQWGPEAQKAFEDFKKLLTTPPVLASPHPQEPLLLYVSATTQVVSTVLVVEREEEGHIQKVQRSIYFVSEVLADSKTRYPQPRTSIKSQALADFLAEWTECQEDMPEEKMEYWTMHFDGSKRLTGTGAGVVLISPTGERLSYVLWIHFSASHNVAEYEALLHGLRIAISLGIRRLIVRGDSQLVVNQVMKEWSCLDDNMTAYRQEVRKLEDKFDGLELTHVLRHNNEAADRLANFGSKREAAPSNVFVEHLYEPTVPRKEAIEAMDTQGVSMIEADWREPLIKFLTKQELPQDKNEAERISRRSRLYIIHEAELYKKSPSGILQRCVSLEEGRQLLKDIHSGICAVSDADKIVRTCEGCQFFARQTHLPAQELQTIPLSWPFAVWGLDMVGPFKRAVGGYTHLFVAIDKFSKWIEAKPVITITADKARDFFINIVHRFGEPNRIITDNGTQFTGGAFKDFCEDFGIKICYASVAHPMSNGQVERANGMILQGIKARVFDRLRPYAEAMLLSEVEFESLRFRNFNEEGYEEGRVDDINRLEEAREAAFIQSTRYLQGLRRYHNRNVRSRAFLVGDLVLRKIQTTQDRHKLSPLWEGPFIIAEVTRPGSYRLKREDGTLINNSWNIEHLRRFYA

SEQ ID NO: 182314 - protein, 79 aa, Oryza sativa
  unsure (1)..(79): unsure at all Xaa locations
  Clone ID: PAT_MRT4530_79515C.1.pep
CALVKKKKKKKKYKKKKKKKKKKKKKKKKKKKKXLQKKLSHLKNYKTTMKRKKKKKKNKGGTVGGPQKNTTFSSREKPF

SEQ ID NO: 182315 - protein, 981 aa, Oryza sativa
  unsure (1)..(981): unsure at all Xaa locations
  Clone ID: PAT_MRT4530_79516C.1.pep
MARGSALLDGSVLPPSCIVSERQAGLPRRFMPESATGREIVTLGEGRPAPDYPGRSVFFLPFAMAGLVPPFSSFFMDVLEFYDLQMAHLTPNAVMTLAIFAHLCEMFIGVRPSLRLFRWFFTVQSVSPPSVVGGCYFQPRGPVLNRYIPCALRKKWDDWKSDWFYTPLTDEARHRLPSQPPAQASSWRAPVDLRDGYDAILDRLAGLRSQGLTGAMVYGDYLRRRIAPLQRRARGAWEYTGSEDFMRTHQGVRWDWAPEDFKILVQRVLNLNSVEVSFIPQGILPLCSDPDRASILTIMMAVGASEERAPKGHDGAGGSRRGEQSTPGGGRASGSRDRGPGSSRPADARGKRKQGGTPPPSPPREGGAPEGERKKKRFRKMGETEPSRGNLISPPKWSFNRPPRSEIPSRPSRHSKSGQSEAEDPAAAEARRRESDRREAADRLREAEEAARARQAEETAREEAARARQAEEAAREKAGFRQDEAMATSEAARDEAAGASLGPTPSGDAQATTFGAAGDEATGTSLGPTPSGDAQGQTGPGNIPESGTSIGGPSRMASFPRRLFPTPSIAPLNAEPLLQALAAANTTVLDGLSAQVEALQAERAELDAAWARVEEGRCSVEAMVEVGRKAHRRHVSELETRKKVLAEIAKEVEEERGAALIATTVMNEAQDTLRLQYGSWEAELGKKLDAAQGVLDAAAAREQRAAETEATSRRREEALEARAMALEERACVVESDLADREAAVTIREATLAAHEAACAEEELALRLRKDALTERERALEGAEAAAQQLADSLXLREAAQEEQARHNLEGXALDSSAGEVEALRLAGEVGPGMLWDAVSRLDCAGRQVGLWRGRTVKYAANQGGLAQRLSKMAGALQRLPEELEKTIKSSSRDLAQGAVELVLASYQARDPNFSPWMALDEFPPGTEDRARAQVWDAANHIVDSFEGSAPRLAFAPNSDEEGNAGGADDSDDEAGDPGASD

SEQ ID NO: 182316 - protein, 77 aa, Oryza sativa
  Clone ID: PAT_MRT4530_79517C.1.pep
MRERWGRDCDPRSLALQEHESAHAVSHIGCATPYALAKPTRETAGPPRAISHSHCAIPWLPDLPTKKSRYRALKERY

SEQ ID NO: 182317 - protein, 1026 aa, Oryza sativa
  Clone ID: PAT_MRT4530_79518C.1.pep
SLECIWPGLTCQLQELTRRLRLGTRAWRLSSFRWDGARRAGLPRRFMPESATGGRWLRGARDARRHTTRGGLVPPFSNFFMDILEFYDLQMAHLTPNAVMTLAIFAHLCEMFIGVRPSLRLFRWLFTVQPVSPPSVVGGCYFQPRGQVLHRYIPCVLHKKWDDWKSDWFYTPLTDEASLRLPSQPPAQASSWRATVDLGDDYDAVLDRLAGLRSQGLTGAMVFGDYVRRRIAPLQRRARGAWEYTGPEDSMRTHQGCTWDWDPEDFRMVVQRVLNLSSVEASLIPQGVLPLCSDPDRANILTIMQAVGASGERALRGHDGAGGSRRGEQSTPGGGRASGPCDGGPGGSRPADARGKRKQEGTPSPSPPRGGGAVRASSRRPEGAVPTSQPEGERKKKRLRKMGGTEPCRGNLISPPRWSFSRPPRSEIPSRPLRHSKSGRSEAEETATAKARRREADRREAADRLREAEEAAQEAVRVRQAEEAAREEARLRRAEESVREAEAGHARQAACQAPDLTPPEATTTSEATHDEAAGAPLGPDPLGDAQDEPASGDAPESGTSISGPSRAAPSPRRLSPLPSAAPPSAEPLLQALAAANTTVLDGLSAQMEVLQAERAELDAAWARVEEGRRSVEAMVEAGRKAHRWHTSELEAHRRDLAEIAREVEEERETALIATAVFNAARDDLRLQYGSRAAELEKKLDAARGILDAAAARERRAAEIEAASRQREEALEARATVLEERARAKERDLADREAAVAVQEATLAAHEAACAEEESALRLREDALTERERALEEAEAAAQRLADSLFLREAAREEQACRNLEGARAERAALDQRAAELEARVKELDARAHSGGAAAGNGDLAARLAAAEHTIAELQGALDSSAGEVEALRLAGEAGLWGGRTAKYAANQGGLAQRLSEMAGTLQRLPEELEETIKSSSRDLARGAVELVLASYKARDPDFSPWAALDEFPPGTEDGARAQVRDAANHIVHNFEGTAPRLAFALDSDEEGGDGGADDSEDEAGDPGASE

SEQ ID NO: 182318 - protein, 93 aa, Oryza sativa
  Clone ID: PAT_MRT4530_79519C.1.pep
KKKRTVHQSYNTDNHETSVPAQSPRSWSIKSFSADLKLFLNSKRCIGQQAWSWSNDKGKHAITFTCPCLFFALPIESVEHFIAVWYKAHLLRT

SEQ ID NO: 182319 - protein, 81 aa, Oryza sativa
  Clone ID: PAT_MRT4530_7951C.1.pep
YFRPPTGSSTPQRTAPAKVIIALFNLSARWIIFNQSKHGIAVISRGIHAPSRLCCAVVEFARIIYLLTYTRQTIPPKSLNL

SEQ ID NO: 182320 - protein, 980 aa, Oryza sativa
  Clone ID: PAT_MRT4530_79520C.1.pep
MARGSALLDGSVLPPSRIVSEKQAGLPRRFMPESATGREIVMLGEGRPAPDYPGRSVFFLPFAMAGLVPPFSSFFMDVLEFYDLQMAHLTPNAVMTLGIFAHLCEMFIGKSDWFYTPLADEARLRLPSQPPAQASSWRAPVDLGDGYDAVLDRLAGLRSQGLTRAMVYGDYLRRRIAPLQRRARGAWEYTGSEDYMRTHQGVRWDWAPEDFKILVQRVLNLNSVEASLIPHGILPLCSDPDRASILTIMTAVGASEEQAPKGHDDAGGSRRGDQSTPGGGRASGPRVGGSGSSRPTDSRGKRKLGGTPPPSPPRGGGAVRASSRRPEGAAPASQPEGERKKKRLRKMGETEPSRGNLISPPRWSFNRPPRSDISSRSSHHPKSGQSEAEDPAAAEARRRESDRREAADRLREAEEAAREAARARQAEDTAREEAARARQAEEAAREEAARVRQAEAMAASEAVRDEAAGASLGSTPSGDAQDQTGPGAARDEAAGASLGPTPSGDAQDQTGPGVARDKAGASIGGPSRAASSPRQPFPTPSVAPLSAEPLLQALAAANTAVLDGLNAQVEALQAERAELDAAWARVEEGRHSVEAMVEAGRKAHRRHVSDLEARKAALAEIAREVEEERGAALIATTVMNEAQDSLRLQHGNWEAELKKKLDAAQGVLDAAAAREQRATETEAALRRREEALEARAMALEERACVAEKDLADHEAAVASRETTLAAHESACAEEESALRLREDALTERERALGKAEAEAQRAALEQRAADLEAREKELDARARIGGAAAGESDLAARLADAEHTVADMQRALDSSAGEAEALRLAGEIGPGMLWDAVSRLDRAGRQAGLWKGQTIKPAANLGGLAQRLSKMAGALQQLPEELEKTIKSSSRDLAQGAVELVLASYQARDPNFSPWMALDEFPPGTEDSARAQVRDAADHIVHSFEGSAPRLAFAPNSDEEGDASGADDVEDEAGDPGASD

SEQ ID NO: 182321 - protein, 418 aa, Oryza sativa
  Clone ID: PAT_MRT4530_79521C.1.pep
MERRAQPVSAAVAPVTGRRKGAAASRKWMVVPAVGEERRVEFGKHQIMKMTGLPGRDLRVLDPVLSYPSTILGRDRAIVVRLQGVKAIITATEVLVPDHDDVLLASFLLDLRSRLSLPDAAPSTNPAAADRGNGTEQGDQGSVPGLAISGAGNAKIPPFEFKVLEVCLEHACKDLESQTRSLEKEAYPALDKLGSKVSTLNLDHVRNLKSRMVDLSGRVQKIRDELEHLLDDDMDMSEMYLTRKLSFQGLSGSLSRADSHKYASVDHDDDREEEDHDDETESGRESSVYVKPDIEELEMLLEAYFVQIDGTLNTLYHIREYADDTEDYINIMLDEKQNQLLQMGVMLTTATVVVTAGIVVVSLFGMNIHIDLMKDPETPEMVRMSNMHFWETTFGTVAGCIAIYLLAIYAGRKSKILQ

SEQ ID NO: 182322 - protein, 1065 aa, Oryza sativa
  unsure (1)..(1065): unsure at all Xaa locations
  Clone ID: PAT_MRT4530_79522C.1.pep
MANYLPVALADSTRSWLHGLPRGTIGSWAKLRDHFIANFQGTFERPGTYFDLYNISDITDDVLIVAFTKGIRHEDLVGKFGRKPPKTVKQMFEKANEYAKAEDAIIASKQSGTTWKPKKDTPTTGGSGSTNHKDRKCKPKELVATTTPSSRQRSRVNTFDKIMNSQCPHHPNSNHAAKDCFVYKQFAEQYAKNAHDMQIPRAELRPSNAPFHGVIPGLSATPLGQITLPITFGTRENFRIENVCFEVADFETAYHAILGCPTLAKFMVVPHYTYMMMKMSGPRGVISLRSDIKQAVTYDKESCEMAQTREITLAQEEIRLAASTASEGEVLATKMPKSEESDAKTKKIPLDPSDPTKTAVIGAELDYIFAWKPSDMPGIPREVIEHFLHVKEDTKPIKQRLRRFAQDRKDAIKEELTKLLAAGFIKEVLHPDWLANPVLVRKKTGQWRMCVDYTDLNKSCPKDPFGLPRIDQVVDSTASYELLSFLDCYLEYHLIRLKESDCLKTSFITPFGAYCYITMPFGLKNAGATYQRMIQRCFSTQIGRNVEAYVDDVVVKTKQKDDLITNLEETFASICTFRMKLNPEKCIFGVSSGKLLGFMVSHRGIQANLEKINAILNMKLPSSQKDVQKLTGCMAAPSRFVSRLGNYLTTSKLRTSIKSQALADXSSSGLSAKKTCPRRRWSIGPCXFDGSKRLSGNGARVVLISPTGERLSYVLWIRFSASHNVAEYEVLLHGLRIAISLGIRRLIVRGDSQLVVNQVMKEWSCLDDNMTAYRQEVRKLEDRFDGLELTHVLRHNNEVADRLANFGSKREAAPSDIFVEHLYEPTIPRKEIIQAMNTQDVSMIEADWREPLIRFLTKQELPQDKDEAERISRHSRLYVIHETELYKKSPSGILQRCVSLEEGRQLLKVSGATVEIMDTFRHLCRATGQSPFFLVYGAEAMLPSEVEFESLRFRNFSEERYGEDRVDDLNRLEDAREAALIQSARYLQGMSRYHNRNVRSRAFLVGDLVLRRIQTTRDRHKLSPLWEGPFIISEVTRPGSYRLKREDGTPIDNSWNIEHLRRFYG

SEQ ID NO: 182323 - protein, 109 aa, Oryza sativa
  unsure (1)..(109): unsure at all Xaa locations
  Clone ID: PAT_MRT4530_79523C.1.pep
PNLNYHDGAQHKASSKLVKVATQQPTHVIVAELAAQATQQLRLHCDATLTPXRTSINDTHEEHQPTQPRNHFLHTASINNLIKRLQCVIVAKSSSPXTKQLRLYPAETK

SEQ ID NO: 182324 - protein, 794 aa, Oryza sativa
  Clone ID: PAT_MRT4530_79524C.1.pep
MEEGKRARAADTAGSPWKSPRLEPPAASASAAADDSEWFQAMLLEASGTGVERCEHFMSDQDHVDYIVSGLRFSEDVPVCGDYTCDVTAANDIMVCLECELRLCANHACIHAMHEEEHSIALYYERLNRVYCFKCEEAYDIGVKDDDGGMTDNNGVPREESPAKSALRMMMGESLRQRSHVSGLADGHAHAIKGILNLGNTCYLNSLVQCLLVLGKLRARMLGPDTPLGTLGTILYDLFDQTYGVNNTGGLLDMTWLLAYVRKSDSRFIGAFMQDNHELLCCLRKKLDEEDRGTNPPNMQDDAVTPTVTDSIFGGQLSSHISCKCCSFSSVSHVAFHDLSVPLPPTQSKSIASPPRTKGYKSQQKIHAELEVDKRNPEKIHTIAEDSDSQSPSELEDVVLVKTSEPLKVDSTKVEQIFHSKDAVCRPLQTQKDKVQGETVDFLPQNMLPDVKVEEMDLTKTDAHVPEDIGPSLRKENAWIESGSDVGKNVSAVLDDVFSEPEVSSEAKTDTFSVEVRKSRSSDISCDNAQGINSLASIDKYLELHFEAEMVEWTCESCSKVAQKPGINLGKYSNPMMSSTNEDITVDGDQSELSEKITCRSEQSNGRPECHEGVQEAEPSCIPAEKQANLLSGQDQNASILSEERGEQVKLHHGAHQVEENQNEQKDWNKGGIKKHFISKLPPVLVIHLMRSLLGPHKVIGHVRFKEILDMGLFMDPSSEDKDNLSYRLVGVVEHRGLGNDAGHFLAYVRASPRQETSGSSSWFRASDDSIREVSLEEVLKCEAYLLFYERMEN

SEQ ID NO: 182325 - protein, 956 aa, Oryza sativa
  unsure (1)..(956): unsure at all Xaa locations
  Clone ID: PAT_MRT4530_79525C.1.pep
AVMTLAIFAHLCEMFIGVRPSLRLFRWFFTVQSVSPPSVVGGCYFQPRGPVLNRYIPCALRKKWDDWKSDWFYTPLADEVRLRLPSQPPAQASSWRAPVDLGDGYDAVLDRLAGLRSQGLTRAMVYGDYLRRRIAPLQRRARGAWEYTGSEDFMRTHQGVRWDWAPEDFKILVQRVLNLNSVEAALIPQGILPLCSDPDRASILTIMMAVGASEERAPKGHDGTGGSRRGEQSIPRGGRASGSRDRGPGSSRPADARGKRKQGGTPPPSPPRGGGAARASSRRPEGAAPTSQPEGERKKKWPRKMGXQNHLGETSFPLQSGRLTDPLAXEIPSRPSRHSKSGGWEAEDPAAAEARGRESDRREAADRLREAEEAAQEAARARQAEEIAREEAARARQAEEAVWEEAARARQDXMLATSEAARDEAGTRRLGPLPRATLRRQLPGQLATGCGRVAWAHSLGRRLGPTGSGRHPRVRHFHRRPEPRGILSKAALPHAFYRPTEHRAPSAGLGRRKHHDVGWVKCPGGGPAGRAGGARRRVGACRRGATLGGGHGGGGPXGSPPACXELETRKKVLAEIAKEVEEEREAALIATTVMNEAQDTLRLQYGSWEAELGKKPDAAQGVLDAAAAREQRAAETEAASRQREEALEARAMALEERACVVERDLADREAAVTIREATLAAHEAACAEEELVLRLREDALTERERALAGAEAAAQQLADSLSLREAAQEEQARRDLEGARAERAALNQWAAELEARAKELDARARSGGAAAGESDVAARLAAAEHTIADLQGALDSSAGEVEALRLAGEVGPGMLWDAVSRLDCAGRQVGLWRGRTVKYADNQGGLAQRLSKMAGALQRLPEELEKTIKSSSRDLAQGAVELVLASYQARDPNFSPWMALDEFPPGTEVRDAADHIVDSFEGSAPRLAFAPNSDEEGNAGGADDSDVEAGGPGASD

SEQ ID NO: 182326 - protein, 98 aa, Oryza sativa
  Clone ID: PAT_MRT4530_79526C.1.pep
SCSPIGVGIMFIYMITLSHDGDCRVVFGSIREVLRLLNIIIWGYMVWICRGGPLMVTAQYGYSFARVYNPKLLSWAGYSSVFSPDWMAMTGCRKELDN

SEQ ID NO: 182327 - protein, 1062 aa, Oryza sativa
  Clone ID: PAT_MRT4530_79527C.1.pep
MERRNDGCDGGGKIKIGVCVMEKKVWCSPMEQILERLRAFGEFEIIIFGDKIILEDPIESWPLCDCLIAFYSAGYPLEKAEKYAALRRPFLVNELDPQYLLHDRSKVYEHLKLFGVPVPTYAVVRREYPNQELKYFVEQDDFIEIHGKRFYKPFVEKPIDGDDHNIMIYYPSSAGGGMKELFRKVGNRSSEFYPDIRKVRRDGSYIYEEFMPTGGTDVKVYTVGPGYAHAEARKSPVVDGVVMRNSDGKEVRYPVLLTPTEKQIARNICQAFGQAVCGFDLLRCDLGEARSYVCDVNGWSFVKSSHKYYDDAACILRKMFLDDKAPHISSTIPANLPWKVSEPVQPFDAVRDRERGTVGISRQSEELRCVIAVIRHGDRTPKQKVKLKVTEEKLLKLMLKYNGGKAHAEAKLKSALQLQDLLDATRILVPRARSGRESDSDAEIEHAEKLRQVRAVLEEGGHFSGIYRKVQLKPSNWVHIPKSNGNGKEEYPIEALMVLKYGGVLTHAGRKQAEELGRYFRNNMYPSEGPGLLRLHSTYRHDLKIYSSDEGRVQVSLVSKDSSMLDGLQDGSIEIDEAKARLHNIILSSKIANGETMEFPWMVDGAGVPPNAANLLTNLKLAHLKQPNVKIITSIMVTNKLPLSQLSNQAQLTKEITAQVKLLSDNEDEEAVTDSDSPSHPYDQAKALGKTAIDMDRIASGLPCGSESFLLMFARWKKLERDLYNERKNILDRYDLLHNSHLKLNGLSDLFRVSQSLADGVIPNEYGINAKQKLKIGSKIARRLLGKILIDLHNTRREVAAAGGESNACHDPTIVPSSKRKDRGYYGDVKNEGFDRPNSNKKSIDLDDSHKETKYCLDPKYANVMEPERRVRTRLYFTSESHIHSLMNVLRYCNFDESMDGEESLVCKNALDNLFKTRELDYMSYIVLRMFENTEVSLEDPKRFRIEMTYSRGADISSLQFLKNVSIQSEHGKDSLLPDDHTMKIMEPERLQEVGSYLTLDKFDKMVRPFAMPAEDFPPAAPSQSLAVRFCKDNGLQGARLVPYPVLYHRMILPFYFRENSI

SEQ ID NO: 182328 - protein, 71 aa, Oryza sativa
  Clone ID: PAT_MRT4530_79528C.1.pep
MEESERETLVTDRPGAVARAGASYPRKKVRRMGGDWRGWGDGRGRTRQAVGARVTLCLPGAACLRFSHGLI

SEQ ID NO: 182329 - protein, 127 aa, Oryza sativa
  Clone ID: PAT_MRT4530_79529C.1.pep
SPTSVTSTSDTTSSDATPSPTQHGRPTPLRPVTLYSYADAHNAPTRSHPPPSRLRLRNPNPLNNATCAPPGFITPPLSAPPSHNSALNNFLRSPSPRFASSSTILPPSPRAPSHIFPYFTPPPRPAS

SEQ ID NO: 182330 - protein, 829 aa, Oryza sativa
  unsure (1)..(829): unsure at all Xaa locations
  Clone ID: PAT_MRT4530_7952C.1.pep
QWTGRDLLGQELGYLRIVSGLVCSSPTRRAPNLRYKRDPPGRAXIIESQSQHNPHSLXNPYTSVPQYPLYPVYGYPPSTVARQVGGLGIQGSTTMPSSFVDNNANTSSAQVLPTSTMLVWTQVGEIVYPVYTTMPISTGPPMTGNENAVATNQDASTSKNPPVETENGLPTTSKFVKDSDAARPCPSDTNRGPAKMTSETIRSWCPIHKTKKHTLQDYWVFVNARAEIRACKERGIQRTSPTRNVYCPIHKTKNHDLSSCKILLGAMKTPSPKSYVPIRDNSKEQGATPALDRFVGVIDLNPHEPSVLHLLEDYGSSTSDAAREVLAIDDVGTSAQANAVAANQSTTPAQHIRAVQAILRETPYDPVLNNDLERWTERVRASVTNLSNAFEEAITAAQQNRSPVGDANGESPERRESPRQATPPPRGTGDLRDQINGRREARRTRDDANHSRRHVSSRRHDRGSRPKENRDHDDRDRRGPDNTGHGRRRNDEDEGDQRRDNNERXRQDSRDPGRHPRNRTPEPSDPSSSSSSSASSSSSDRHPRRSCDHRQPTAPSAGCRAFGRSLRDVRWPERFRPRVIEKYDGSTDPEEFLQVYSTMLYAAGADANALANYLPTALKGSARSWLMHXPPYSISSWSDLWHQFVANFQGTYKRHAIEDDLHALTQNSSESLREYVRRFNECRNTIPEITDASVIRAFKSGVRDRYTTQELATRRITTTRRLFEIVERCAHVDDALRRKNDKPKTGGEKKSAADTSESSKKKNRKNGKRKAQAEVLAAEYANPPKRPDPQGSDTKKSWCPIHKTDRHSLEDCFVFKKSLEKHMAFERGV

SEQ ID NO: 182331 - protein, 99 aa, Oryza sativa
  Clone ID: PAT_MRT4530_79530C.1.pep
ERIVSAVGNGVESVRNRIKFFRCYKCRIIRIRRILEIPYSHPYLHHTIHICIYIRRISKSPYHILVSDGFGVDRVGYYLIRFHPYEKTLGRSGIFMIIV

SEQ ID NO: 182332 - protein, 100 aa, Oryza sativa
  unsure (1)..(100): unsure at all Xaa locations
  Clone ID: PAT_MRT4530_79531C.1.pep
XXGKKXXVFLXXNPQFRDXXXFXLXPXPRKXAFXGXEXVNXLSLGGXXXXSINXGIVSSXRVXGEXSWXXELIGSFCXRHXKLGXEIALQVQQAHCSWPH

SEQ ID NO: 182333 - protein, 236 aa, Oryza sativa
  unsure (1)..(236): unsure at all Xaa locations
  Clone ID: PAT_MRT4530_79532C.1.pep
MASRVRFENSSEIGVFARLTNAYCVLPDGGXENFFSVFESELADVVPVVRTSIGGTRIIGRMCVGNKNGLLLPHTTTDQELQHLKNSLPDQVVVQRIEERLSALGNCVACNDHGTEEIISDVLGVEVFRQTIAGNILVGSFCAFSNKGGLVHPQTSVEDQAELSTLLEVPLAAGSINRGSEVVAAGMAVNDWAAFCGADTTATELSVVESVFRLRDGRPGALGADMSRSLVVSSYL

SEQ ID NO: 182334 - protein, 792 aa, Oryza sativa
  Clone ID: PAT_MRT4530_79533C.1.pep
MTTAMTAGRFGAARRHGRQARAGAAEGDGGGGDQEVLALTVFLVCAAAVTPAASAQQQQLPGCPDKCGDISIPYPFGIGARCARDQYFELECNRAYSPPRLIVSTHRQHLVNLSLADGEATALINARRQCYNSTEGLIGDANNYVNKDITLVGSNAYRFSAARNRFVALGCPNMGYFVDTYGYYVSGCTSICRPSQGNGASGASTGGCTGEGCCQSRIPTNTDYYELYVQTFKPGEGDPILRGGTTACRYVFLAEDKWIDTTYRGHPDFDRNDDFAVPVVLNWAIRNVGNCSAATRNMTDYACRSVNSHCIDSIDGPGYRCNCSQGYEGNPYLDGGCQDINECERPDKYACFGECTNTLGSYSCMCPRGARGDPSIPQGCLEKDKFTLALKVVTGVSVGVFLPLLMYFCLYLVLQKRKLIRTKQRFFEQNGGVILQQQMHSGGGAGGFKIFSTEELEKATNNFADDRVLGRGGHGVVYKGVLEDNMVVAIKKSKMMEEAQTKEFAREMFILSQINHKNIIKLLGCCLEVEVPMLIYEFVSNGTLYHYIHGKEPIAHISLDTRLRIVAESAKALFYMHSSASPPILHGDIKTANILLDDKLNAKVSDFGASKLAPADEAEIATLVQGTCGYLDPEYLMTCQLTDKSDVYSFGVVVLELLTRKKALYLDGPEEDRSLVSCFITAVKAGRHQELLDNQVRNEMNEEMLTEIAHLLMRCLSMNGEERPTMKEVAERLEMLRRYQQHPWVEAEGTKGFIKLFAQSNDEINDLSYRVVNAELVPHGAPNLSCEGTIHE

SEQ ID NO: 182335 - protein, 495 aa, Oryza sativa
  Clone ID: PAT_MRT4530_79534C.1.pep
MLEHRNMWPASLKGVVILLMLMVFNVSGAFVGINVGTDISNPPSASDTVSILKEKKIQHVRLLDSDHQMLSALANTGIEVVVGVPNDQLLRVGQSRSTAADWINKNVAAYIPATNITHIAVGNEVLTTEPNAALVLVPALQFLQSALLAANLNTQVKISSPHSTDMISKPFPPSTATFNSTWSSIMLQYLQFLNNTASPFMLNAQPYYDYVKGQGVFPLEYALFRSLNPDSQISDPNTNLFYTNMFDAMVDATYNSMQAMNFTGIPVMVTASGWPSHGGQNEKAANVDNALAYNTNLIRHVLNNSGTPGQPNNQVSTFIFELFNEDLRAGPVSEKNWGIMFPNATTVYSLTFEDMATTNTDSPVLRGTFCVANSSAPHSALKQSLDWACGPGSANCSAIQPGQPCYKSDDIVAVASYAFNDYYHRTRASGGTCNFNSTAMVTSTDPRMAMVHAFLQEVLVLLAALAPMAATVVRRLGPRCKNVWPGLYNEELSPT

SEQ ID NO: 182336 - protein, 186 aa, Oryza sativa
  Clone ID: PAT_MRT4530_79535C.1.pep
MSSSGKEQRRMDRFIVIPFSSTCRNGSSVDVVDGGKSGKKPQGGGGGGGEGGGGAAENKPKGESLVARLLRGFKNLSQIFAVYEDDGEEEEEEEREMVIGLPTDVKHVAHIGWDGSTNTTTSLRSWNRAAPPSSSASAASTSSALPAPAPPPPPSQQQPPLPAFSMRQFELAMAAQAAATGTTTAS

SEQ ID NO: 182337 - protein, 146 aa, Oryza sativa
  Clone ID: PAT_MRT4530_79536C.1.pep
MAEPPSQSPAQTPPQAAQQQQQGPGESARDDMMACVAALEAALLPCLPARELQAVDRSLQSSHQIDVERHARDFMEAAKKLQSYFISLQREDRPSTEEMLRKDIAIMEEELKTKSELIDKHKKLIEGWQKELKDQLGKHVTELERV

SEQ ID NO: 182338 - protein, 145 aa, Oryza sativa
  Clone ID: PAT_MRT4530_79537C.1.pep
MACVAALEAALLPCLPARELQAVDRSLQSSHQIDVERHARDFMEAAKKLQSYFISLQREDRPSTEEMLRKNLDEKLNCLSELLILGKAAAAKSSLKHALGWDIAIMEEELKTKSELIDKHKKLIEGWQKELKDQLGKHVTELERV

SEQ ID NO: 182339 - protein, 137 aa, Oryza sativa
  Clone ID: PAT_MRT4530_79538C.1.pep
MALKSNIKEEVAYFAKEKQRAWLIFAEERNVYGHIAGVGLDTLTPTLILGDGLKMIGEYQETIGTCYLFSETNAPPKPIHGEMAPPEENKDKQASCSKEVPSKEVKHLASVQKILKFRSINADHEQRRAYRDNEREI

SEQ ID NO: 182340 - protein, 118 aa, Oryza sativa
  unsure (1)..(118): unsure at all Xaa locations
  Clone ID: PAT_MRT4530_79539C.1.pep
FFGPKISFQFSTNGTMRVNLTTFRAAWFNVPHWXISPCFNKXVMQLNQLGTGVNLQPRFPAYHPNASNPPXLLYRVLGANHSPISHILXGNPVSKAIGSHHLFISISKPSVFIQPSKL

SEQ ID NO: 182341 - protein, 154 aa, Oryza sativa
  Clone ID: PAT_MRT4530_7953C.1.pep
MESQELWALYVGVASLAIGMLGVLGVWLCYLFQAVARGPPPDPPPPPTPPCTPETEEDDKNGLSEEELRMLGGICVAVAGDGEEEEEEQLCPICLDGMEAGRAVRVLPGCSRAFHQDCVDRWLTISPRCPVCNAWVTTQSPGTSPPRTKPALNS

SEQ ID NO: 182342 - protein, 533 aa, Oryza sativa
  Clone ID: PAT_MRT4530_79540C.1.pep
MDPPPQPPTSYPSSYTKFNSALNAGLLNPMSPPPLPLDKTRSSPTLFDMMANEQDYHPRTAAAIHSIPAPPQQAHPLQPARSMDRQVLLQDRVAELIGSCSPGNQFNDADSSDVRLTLTSKDGLSVTLCVHRHILVAHSRFFAAKLSDRWSKQQRTLPHIVEISDCDDVEVYVETLRLMYCKDLRRRLMREDVSKVLGILKVSAAIVFDAGVLSCLEYLEAAPWAEDDDEKVAALLTQLHLENSGAGEVLKRVSLELAPSAVAEEVEVGSGCNGGGNSGGGEEVLVRLLQVVLEGKDEKARREMKGLVSKMLRENSTSRGGAIGGDLRKESLYSACNGCLRLLHEQFEMAAGGDQSEVAQIARQADNLHWMLDILVERQIAEDFLRTWAMQIELAELHGKVPAIHRYEVSRVTARLFVGVGKGQILVSKEVRCQLLSTWLEPFYEDFGWMRRACKGLDRHLIEDGLANTILTLPLATQQEILLAWFNRFLNSGEDCPNIQRGFEVWWRRAFWKRNGEPEQPPRLRITAICENS

SEQ ID NO: 182343 - protein, 363 aa, Oryza sativa
  Clone ID: PAT_MRT4530_79541C.1.pep
LRPAGDSPPPPTDYSAPPRSPPSPPLPMAATTPRVSAVIFDLDGTLLDTERATRDVLNEFLAAYGKVPDKEKEERRLGQMYRESTTGIIADYGLPLTVEEYAVAIYPLYLKRWQKAKPLPGVERLVKHLHRNGVPLALASNSVRRNIDHKLLKLKDWKDCFSVILGGDQISGGRKRTWCKSIIMFGHRRFSLHFIFLLQNSPSVGVQGARASGAKVVAVPSLQSQRQHYSIADSILYSLLDFHPELWGLPPFEDRIQGALPIEQLFLNAQIGHAISKSLHMVIAGDCTYEYVPDQISGIFFGWAKPEAGGVSRSVISIGWDFSLRTVERVMENISQALAITDEDQAIARDALDLPVFSEHAKL

SEQ ID NO: 182344 - protein, 160 aa, Oryza sativa
  unsure (1)..(160): unsure at all Xaa locations
  Clone ID: PAT_MRT4530_79542C.1.pep
QAGAAASPTVAVEATTPRMSSRTRTTTARTTTSPSPSPSPSPCSRRQPWVQSSPPPTAPAPVHAPAPTWPRXSLLGLPPPPPTTTAAXPPSASPSRPPHPQPAPAPSPPAWAQXPELEHDPXPSATPWPPVPQLRPPPPPTPRRTSAPSSTLPSAPSTTH

SEQ ID NO: 182345 - protein, 134 aa, Oryza sativa
  Clone ID: PAT_MRT4530_79543C.1.pep
MEARCDLRSALVNGEDRNMFREEQRSSAVGIPCEKVTRVRILEDQLWSTVGIGTRLREELRSRRLRIPGDEVGYEMAYDGWISCGRDIRNGLHEASRVGFMQQATASRQEEFDFGAAAVLEKKEIKGLIESYCE

SEQ ID NO: 182346 - protein, 622 aa, Oryza sativa
  Clone ID: PAT_MRT4530_79544C.1.pep
MARGSALLDGSVLPPSRIVSERQAGLPRRFMPESATGWEIVMLGEGRPAPDYPGRSVFFLPFAMAGLVPPFSSFLMDVLEFYDLQMAHLTPNAVMTLAIFAHLCEMFIGVRPSLRLFRWFYTVQSVSPPSVVGGCYFQPRGPVLNRYIPCALRKKWDDWKSDWFYTPLADEARLRLPSQPPAPASSWRAPVDLGDGYDAVLDRLAGLRSQGLTGAMVYGDYLRRRIAPLQRRARGAWEYTKSEDYMRTHQGVRWDWAPEDFKILIQRVLNLNSVEASLIPQGVLPLCSDPDRASILTIMMGVGASEEEAPKGHDGAGGNRRGEQSTPGGGRASGPHVGGSGSNRPTDARGKRKLGGTPPLSPPRGGGAVRASSRRPEGAAPTSQPEGEREKKRLRKMGETEPSRGNLISPPRWSFNRPPRSDVPSRSSRHPKSGQSEAKDPAAAEARRRESDRREAADRLREAEEAAREAARAHQAEEAAREEAARARQAEAMATSEAARDEAAGASLGPTPSGDAQDQTGPGDIPESGTSIGGPSRAASSPRQLFPTPSVAPLSAEPLLQALAAANTAVLDGLSAQVEALQAERAELDAAWARVEEGRRSVEAMVEAGRKAHRRHVSDLEA

SEQ ID NO: 182347 - protein, 125 aa, Oryza sativa
  Clone ID: PAT_MRT4530_79545C.1.pep
MADQGRSDDEQVESAAGGTSRSKDMTSSGNDSKSSQGGSNPPPIRQREGQFDYSPAILCKCGYNDGQMDFLSGNNPSRRWYEPETTPYLRIYPDRTWPPLFGGCLDAGREWDRAAQRGIFPLDAG

SEQ ID NO: 182348 - protein, 1113 aa, Oryza sativa
  Clone ID: PAT_MRT4530_79546C.1.pep
MARGSALLDGSVLPPSRIVSEKQAGLPRRFMPESATGREIVMLGEGRPAPDYPGRSVFFLPFAMAGLVPPFSSFFMDVLEFYDLQMAHLTPNAVMTLAIFAHLCEMFIGVRPSLRLFRWFFTVQSVSPPSVVGGCYFLPRGPVLNRYIPCVLRKKWDDWKSDWFYTPLADEARLRLPSQPPAQASSWRAPVDLGDGYDAVLDRLAGLRSQGLTGAMVYGDYLRRRIAPLQRRARGAWEYTGSEDYMRTHQGVRWDWAPEDFKILVQRVLNLNSVEAALIPQGILPLCSDPDRASILTIMMGVGASEEQAPKGHDGAGGSRRGEQSTPRGGRASGSRVRGPGSSRPTDARGKRKQGGTPPPSPPRGGGAARASSKRPEGAAPASQLEGERKKKRPRKMEETEPSRGNLISLPKWSFNRPPRSEIPSRPSHHSKSGQPEAEDPAAAEARRREADRREAADRLREAEEAAQEAARARQAEETAQEEAARAHQAEEAAWEEAGFRQDEAMATSEAAREEAAGASLGPTPSGDAQATTSGAAGDEAAGASLGPTPSGDAQAQPGPEDIPASGTSIGGPSRAASFPRRLFPTPSAALLSAEPLLQALAAANTTVLDGLSAQVEALQAERAELDAAWARVEEGRRSVEAMVEVGRKAHRRHVSELETRKKVLAEIAKEVEEERGAALIATTVMNEAQDTLRLQYGSWEAELGKKLDAAQGVLDAAAAREQRAVETEAASRRREETLEARAMALEERACVVERDLADREAAVTIREATLAAHEAACAEEELALRLREDALTERERALEGAEAAAQQLADSLSLREAAQEEQARRNLEGARAERATLNQRAAELEARAKELDARARNGGAAAGESDLTARLAAAEHTIADLQGALDSSAGEVEALRLAGEVGPGMLRDAVSRLDRAGRQVGLWGGRTAKYAANQGGLAQRLSEIAGTLQRLPEELERTIKSSSRDLARGAVELVLASYQARDPDFSPWTALDEFPPGTEDGARAQVRDAADHIVHSFEGSAPRLAFALNSDEEDDDGRVGDSGDEAGDPGASGLNKGSCPGSGPQKARVGACHAQKFPNRIPSRMCIKIPVQDQPGYTNDNVDIQIHVGKRP

SEQ ID NO: 182349 - protein, 54 aa, Oryza sativa
  Clone ID: PAT_MRT4530_79547C.1.pep
TRQKPTKRLRTMKNIRKLYVFISRGFLNLINYDFSLVGSVDTHTHIYICVCVKH

SEQ ID NO: 182350 - protein, 517 aa, Oryza sativa
  Clone ID: PAT_MRT4530_79548C.1.pep
MARGSALLDGSVLPPSRIVSERQAGLPRRFMPEPATGREIVTLGEGRPAPCYPGRSVFFLPFAMAGLVPPFSSFFMDVLEFYDLQMAHLTPNAVMTLAIFAHLCEMFIGPRGPVLNRYIPCVLPKKWDDWKSHWFYTSLADKARLRLPSHPPAQAFIWPGLTGAMVYGDYLRRRIAPLQRRARGAWEYTGSEDYMRTHQGVRWDWAPEDFKIVVQRVLNLSSVEASLIPQGVLPLCSDPDRASILTIMQAVGASEERAPRGHDGAGRSRRGEQSTPGGGRAFGPRDGGPGSSRPADARGKRKQGGTPPPSPPRGGGAARASSRRPEGATPTSQPEGERKKKRLRKMGGTEPSRGNLISPPRWSFNRPPRRSRRVPPAIPSPASLRPRIRRPQRLGGGILTGEKPRIAYGKPRRPLGRPPGLARPRKPLGRRPDSARPRRRHPPRRPVKLTGKRPRIAFGKPRKLPRRPSELTKLKKPLRRRPDSARPRRRRLPRQLATRPRAHRLGPLPQATLRTNQ

SEQ ID NO: 182351 - protein, 887 aa, Oryza sativa
  unsure (1)..(887): unsure at all Xaa locations
  Clone ID: PAT_MRT4530_79549C.1.pep
MAHLTPNAVMTLAIFAHLCEMFIGVRPSLRLFRWFFTVQPVSPPSVVGGCYFQPRGPVLNRYIPCVLRKKWDDWKSDWFYTPLADEARLRLPSQPPAQASSWRAPVDLGDGYDAVLDRLAGLRSQGLTGAMVFGDYLRRRIAPLQRHARGAWEYTGPEDTMRTHQGRKWDWDPEDFRIVVQRVLNLSSVEASLIPQGVLPLCCDPERANILTIMQEVGASGERAPRGHDGAGGSRRGEQSTPGGGRASGPRDGGPGGSRPADARGKRKQEDTPSPSPPRGGGAVRASSRRPEGAVPTSQPEGERKKKRLRKIGGTEPSRGNLISPPRWSFSRPPRSEIPSRPSRHSKSGRSEAEETATAEARRREADRREAANRLREAEEAAQEAIRARQAEEAAWEEARLHRAEESIRETEAARAXRADCQAPDPTPPEATTTSEATHDEAAGAPLGPDPSGDAQDEPASGDXAQMEVLQVERAELDAVWARVEEGRRSVEAMVEAGRKAHRWHTSELEARRRDLAEIAREVEEERETALIATAVFNAARDDLCLQYGSRGAELEKKLDASRQREEALEARATVLEERARALDTKERELAGREAAVAIREATLAAHEAACAEEESALRLREDALTEREQALEEAEVVAQRLADSLSLREAAREEQACRDLEGARAERAALDQRAAELEARAKELDARARSGGAAAGDGDLAACLAAAEHTIAELQGALDSSAGEVEALRLAGEVGPGMLRDAISRLDRAGRQAGLWGGRIAKYAANQGGLAQRLSEMARTLQRLPEELEETIKSSSRDLARGAVELVLASYQARDPDFSPWAALDEFPPGTEDDACAQVRDATVHIVHSFEGTAPRLAFALDSDEEGGDGGVDDSDDEAGDPGASK

SEQ ID NO: 182352 - protein, 77 aa, Oryza sativa
  Clone ID: PAT_MRT4530_7954C.1.pep
LLRSAGSDGEEAGVAGSGGLGLLTGHDDGPLPASEVRENKSSDARGAHGRLRRRGRGQGRVPRAGEHRTMAVTVEGH

SEQ ID NO: 182353 - protein, 1004 aa, Oryza sativa
  Clone ID: PAT_MRT4530_79550C.1.pep
MARGSAPLDGSVLPPSRIVSKRQAGLPRRFMPESATGREVVALGEGRPAPHYPGRSVFFLSFAMAGLVPPFSNFFMDVLEFYDLQMAHLTPNAIMTLAIFAHLCEMFIGVRPSLRLFRWFFTVQPVSPPSVVGGCYFQPRGPVLNRYIPCVLRKKWDDWKSDWFYTPLADEARLQLPSQPPAQASSWRATVDLGDGYDAVLDRLAGLRSQGLTGAMVFGDYLRRRIAPLQRRARGAWEYTGPEDYMRTHQGRKWDWVPEDFKMVVQRVLNLSSVEASLIPHGVLPLCYDPERANILTIMQAVGASGERALQGHDGAGGSRRGDQSAPGGGRASGPCDGGPGGSRPADARGKRKQEGTPSPSPPRGGGAVRASSRRPEGAVPTSQPEGERKKKRLRKMGGTEPCRGNLISPPRWSFSRPPRSEIPSRPLRHSMSGWSEAEETATAEARRREADRREAADRLREAEEAAQEAVRVRQAEEAAREEARLRRAEESVQEAEAAHARQAACQAPDPTPPEATTTSEATHDEAAGAPLGPDPSGDAQDEPASGDAPESGTSIGGPIRAAPTPRRLSPLPSAAPLSAEPLLQALAAANTTVLDGLSAQMEVLQAERAEVDAAWARVEEGRRSVEAMVEAGRKAHRRHASELEARRRDLAEIAREVEEERETALIATAVLNEARDDLRLQYGSRAAELEKKLDASRQREEALEARATALEERTRALDAKERDLADREAAESALRFREDVLTERGRALEEAEAAAQRLADSLSLREAAREEQARRDLEGARAERAKLDQRAAELEARAKKLDARAHSGGAAAGDGDLAARLAAAEHTIAELQGALDSSAGEVEALRLAGEVGPGMLRDAVSRLDRAGRQAGLWGGRTAKYAANQGGLAQRLSEMAGTLQRLPEELEETIKSSSRDLARGAVELVLASYQARDPDFSPWAALDEFPPGTEDGARAQVRDAAGHIVHSFEGTAPRLAFALDSDEEGGDDGADGSDDEAGDPSASE

SEQ ID NO: 182354 - protein, 594 aa, Oryza sativa
  Clone ID: PAT_MRT4530_79551C.1.pep
MPSAAPLSAEPLLQALAAANTTVLDGLSAQMEVLQAERAELDAAWVRVEEGRRLVEAMVEAGRKAHRRHTSELEARRKELAEIAREVEEEREAALIATAVMNEAQDDLRLQYGSRGAELERKLDASRQREKALEARATVLEERARALDTKERGLAGREAAVAIREATLAAHEAACAEEESALRLREDALTEREQALEEAEAAAQRLADSLSLREAAREEQARRDLEGARAERAALDQRAAELEARAKELDARARSGGAAAGDGDLAARLAAAELSHPENSKYINCCLIGIFRNNFKTVAVAREDHRRARQVVAVLVCPFAVAGDRRSFVAVVKPKSFAASSSSPSPSVDLPPSFWSPVSSPCRPLRLGALRLCPRAAVRRRACAVRAVSSAEPPPLSVTSPLTSSGSSAGALDSSAGEVEALRLAGEVGPGMLRDAVSRLDRAGRQAGLWGRRIAKYAANQGGLAQCLSEMAGTLQRLPEELEETIKSSSRDLAQGAVELVLASYQARDPDFSPWAALDEFPPGTEDGARAQVRDAAVHIVHSFEATTRPATREPQSEPSGLLLPQMARVGASAWGDPRVETGQAGNVVTEGYG

SEQ ID NO: 182355 - protein, 637 aa, Oryza sativa
  Clone ID: PAT_MRT4530_79552C.1.pep
MARGSAPLDGSVLPPSRIVSERQAGLPRRFMPESATGREVVALGEGRPTPHYLGRSVFFLSFAMAGLVPPFSSFFMDILEFYDLQMAHLTPNAVMTLAIFAHLCEMFIGVRPSLWLFRWFFTVQPVSPPSVVGGCYFQPRGQVLHRYIPCVLRKKWDDWKSDWFYTPLADEARLRLPSQPPAQASSWRATVDLGNGYDAVLDRLAGLRSQGLTGPCEIPSRPLRHSQSGRSEAEETATAEARRREADRREAADRLREAEEAAQEAVQVRQAEEAAREEARLRRAEESVREAEAAHARQAACQAPDPTPPEATTTSEATHDEAAGAPLGPDPSGDAQDEPASGDAPESGTSIGGPSRAAPSPRRPSPLPSATPPSAEPLLQALAAANTTVLDGLSAQMEVLQAERAELDAAWARVEEGRRSVEAMVEAGRKAHRRHASELEARRRDLAEIAREVEERETALIVTAVLNEARDDLRLQYGSRAAELEKKLDAARGVLDAAATRERRAAEIEAASRQREEALEARATVLEERARAKERDLADREATVAIREATLAAHEAACAEEESALRLREDALTERERALEEAEAAAQRLADSLFLREAAREEQARRNLEGARAERAAQDQRAAELEARAKELDAKCA

SEQ ID NO: 182356 - protein, 97 aa, Oryza sativa
  Clone ID: PAT_MRT4530_79553C.1.pep
HPTQLNLVYQDEFPNAQIPESYERLIGEVLDGSQVNFVRTDELSEAWRVFTPLLHQIEKQHKKPYSYVFGSRGPSEADDFFISHGFESDPDFAWDKP

SEQ ID NO: 182357 - protein, 113 aa, Oryza sativa
  Clone ID: PAT_MRT4530_79554C.1.pep
RKLVPPQGPGRKFPGGYPRGPFTWPPSLVKLSPRSKWPWLARRGGKAPCSPPGASPSSPGHNQLMFRCLFQQVFFGGPIPVFPPVHSWGSLCRKGDKFCFPSALLGLICCKIV

SEQ ID NO: 182358 - protein, 1063 aa, Oryza sativa
  unsure (1)..(1063): unsure at all Xaa locations
  Clone ID: PAT_MRT4530_79555C.1.pep
MARGSALHDGSVLPPSRIVSERHAGLPRRFMPESATGREIVMLGEGRPAPDYPGRSIFFLPFAMAGLVPPFSSFFMDVLELYDLQMAHLTPNAVMTLAIFAHLCEMFIGVRPSLQLFRWFFTVQSVSPPSVVGGCYFQPRGPVLNRYIPCVLRKKWDDWKSDWFYTPLANEARLRLPSQPPAQVSSWRAPVDLGEDYDAVLDRLAGLRSQGLTGAMVYGDYLRRRIAPLQRRARSAWEYTGSEDYMRTHQGARWDWAPEDFKIVVQRVLNLSSVEASRIPQEILPLCCDPDRASILTIMMGVGASEERAPKGHDGAGERRRGEQSAPGGGRASGPRVGGSGSSRPADAQGKRKLGGTPPPXSPPRGGGAARASSRRPEGAAPTSQLEGERKKKRLRKTGETEPCRGNLISPPRWSFNRPPRRXVFSYSFCSSSGFFFCFSDVPSHSSRHPKSGQSEAEDPAAAEERRRESDRREAADRLREAEEAAREAARIRQAEEAAREEAARAEEAAKEVAARARQAEATAAAGASTGPTPSGNPQATASGEARDEAAGTSPGPTSPGDAQDQTGPGDIPEPSMSSGGPSRIAFSPRRLFSSSSVAPLSAEPILQALAAANTAVLDGFSAQVEALRAERAELEAAWARVEEGRRSVDAMVEVGRKAHRRHVSELEARKAALTEIAREVEEERAAALIATTTMIEAQDALRLQNASREAELKEKLDAAQGVLDSAAARERRVTETEAASRRREESLEARAMALEEHAGAVEKGLTDREAAAALRETTLAAHEAACAEEECALRLREDALAERERALEEAEATTKRLADSLSLREAAQEEQACRNLECVRAERAALEQRAADLEAREKELDARAHIGGAAAGESDLAARLAAAEHTVADMQRALDSSTGEAEALRLAGEIGPDMLWDAVSRMKRAGRQAGLWKGQTTVPPTNLEGLAPHLNRMAWVLEQLPEELEKTIKSSSRDLARGAVELVLASYQARDPNFSPWMALEEFPPGTEDDARARVGDAANHIVQSFEGSAPRLAFAPSSNEEGDASGEDDGGDGASDPGALE

SEQ ID NO: 182359 - protein, 398 aa, Oryza sativa
  unsure (1)..(398): unsure at all Xaa locations
  Clone ID: PAT_MRT4530_79556C.1.pep
LPQDKDEAERISRRSKLYVIHETELYKKSPSGILQRCVSLEDGRQLLRDNHSGICGNHAAARTVVGKAYQQGFFWPTAVSDTDKIVRTCEGCQFFARQTHLPAQELQTILLFWPFAVWGLDMVGPFKKAIGGYTHLFVAVDKFSKWIEAKPVITITADKARAFFINIVHRFGVPNRIITDNGTQFTSGVFQDFCEDFGIKICYASVAHPMSNGQVERANGMVLQGIKAQVFDRLHPYAGKWVEQLPYVLWSLRTTPSRAXGQSPSFLVYGAEAMLPSEVEFESLRFRNFSEERYGEDRVDDLNRLEEAREAVLIQSARYLQGMRRYHNRNVXSRAFLVGDLVLRKIKTARDRHKLSPLWEGPFIVSEVTRPGSYRLKREDGTHIDNYWNIEHLRCFYA

SEQ ID NO: 182360 - protein, 965 aa, Oryza sativa
  Clone ID: PAT_MRT4530_79557C.1.pep
MARGSAPLEGSVLPPSRIVSERQAGLPRRFMPESATGREVVALGEGRPAPHYPGRSVFFLSFAMAGLVPPFSVFFMDILEFYDLQMAHLTPNAIMTLAIFAHLCEMFIGVRPSLRLFRWFFTVQPVSPPTVVGGCYFQPRGQVLNCYIPCVLRKKWDDWKSDWFYTPLADEARLRLPSQPPAQASSWRATVDLGDGHDAVLDRLAGLRSQGLTGAMVFGDYLRRRIAPLQRRARGAWEYTGPEDIMKTHQGRKWDWDPEDFRMVVQRVLNLSFVEASLIPQGVLPLCCDPERANILTIMQEVGASGERAPRGHDGAGGSRRGEQSTPGGGRASGPRDGGPGGSRPADARGKRKQEGTPPPSPPRGGGAVRASGRLPEGAAPTPQPEGERKKKRPRKMGGGPSHAGGASSRPRGGRLADLPAGSSPRPPRPYSFSHLLRRVFTHPFLFVFWFFFCLSEIPSRPPRHSKSGRSEAEETATAEAWRREADRREAADRLREAEEAAQEAVRALAAANSTVLDGLSAQMEALQAERAELDAAWARVEEGRRSVEAMVEAGRKAHRRHTSQLEARRRELAEIAREVEEERETALIATAVLDEARNDLRLQYGSRAAELEEKLDADRGVLDAAAARERRAAENEAASRQREEALEARATALEERARVLDAKERDLADREAAVATREATLAAHEAACAEEESTLRLREDALTERGRALEEAEAAAQRLADSLSLREAAREEQARRNLEGARAERAALDQRAAELEARAKELDARAHSGGAAAGHGDLAARLAAAEHTIAELQGALDSSAREVEALRLASEVGPGMLRDAVSRLDRAGRQAGLWGGRHAKYAANQGGLAQHLSEMTGALERLPEELEETIKSSSRDLARGAVELVLASYQARDPDFSPWAALEEFPPGTEDGARARVRDAADHIVHSFEGTAPRLAFALDSDEEGGDDGADDSDDEAGDPGASE

SEQ ID NO: 182361 - protein, 74 aa, Oryza sativa
  Clone ID: PAT_MRT4530_79558C.1.pep
MTTRLWPRHLGLRRASVVASVRAARTVASGVRMACGACGGGVRRRVAPPAFSLVSRTAREEQETGSSDVRGYQA

SEQ ID NO: 182362 - protein, 105 aa, Oryza sativa
  unsure (1)..(105): unsure at all Xaa locations
  Clone ID: PAT_MRT4530_79559C.1.pep
PCNTLADGCELGRKNPMSRLPSSVHRPFARPASLAGSGDGHRYTSSAGLLACLSSDGRPAPPKLACXXVXGLECLVMCKLLRNGVRNKWSILXPSLGYLKKKKKK

SEQ ID NO: 182363 - protein, 75 aa, Oryza sativa
  Clone ID: PAT_MRT4530_7955C.1.pep
STLEDPRPVCKADRFNGVVSGRTPGLPGTTWPFYTGWVIRLMGSARPGWPFESFAEEDEADPADEEFFQEQAGYD

SEQ ID NO: 182364 - protein, 151 aa, Oryza sativa
  Clone ID: PAT_MRT4530_79560C.1.pep
MATATATVWMTRGGDGVDDGELTSGVVTAAFCTVGAAAAEDSLKRESGTKVHHANIQAAKAVADIIRTTLGPQSMLKMLLDAAGGIVVTNDGNCILRELDLAHPAAKGPEPPGEEYRNFLAEMSSPELPEFLSQELPGNRENQNLGKQNRS

SEQ ID NO: 182365 - protein, 56 aa, Oryza sativa
  Clone ID: PAT_MRT4530_79561C.1.pep
MDKATDGERIHTTGLSSPWRPNTPKNPPLDILNLKNSSTYHGDGRLIILLLFQITQ

SEQ ID NO: 182366 - protein, 88 aa, Oryza sativa
  Clone ID: PAT_MRT4530_79562C.1.pep
LELRGGRPPSPADARWSQMRNRSGWCLYRSLDLGRRRRRSRLESSGSRSRRARASESVVSASHPAVARSSACVRLEYSVIDWLFGHAI

SEQ ID NO: 182367 - protein, 104 aa, Oryza sativa
  unsure (1)..(104): unsure at all Xaa locations
  Clone ID: PAT_MRT4530_79563C.1.pep
AAASPGRRLARRSLLAAPSPSNALPRPPRCPPPVPRPPQPLRRLRQQPPHPFASSRRASPTEPPPQPSPXPSRYSLTGRRGGGAAATAGAAAAVDGGGEGKEEL

SEQ ID NO: 182368 - protein, 57 aa, Oryza sativa
  Clone ID: PAT_MRT4530_79564C.1.pep
VKGSRSDHSTSEYNTIAAVSRLHLQMLKLNVLNGVWCQTVSNLGMHFYIHLASAIHF

SEQ ID NO: 182369 - protein, 71 aa, Oryza sativa
  Clone ID: PAT_MRT4530_79565C.1.pep
LLIKRTIPLHSMSDLNIFSQKRASFTSLQPQLFRCQVLPPPHFTFWIRQGFPLPTKSFFSHPSGPYKTLFP

SEQ ID NO: 182370 - protein, 68 aa, Oryza sativa
  Clone ID: PAT_MRT4530_79566C.1.pep
AVNYNFFFHWNACLLSPTETESDLPNSKLQIFSCKRSAHINSLISITHPHKNNSTPPNLHLDHADINK

SEQ ID NO: 182371 - protein, 113 aa, Oryza sativa
  unsure (1)..(113): unsure at all Xaa locations
  Clone ID: PAT_MRT4530_79567C.1.pep
MRTTRRRGKACACTRGRAGVAAGRIAALHADHIQANPDWEGRKKSKXNPGRRRGPPPPAIRRWPPRPVSCSPCGGREAATGGGIAVRRSPLAARCRCRRFDAGGRVGRGCLLA

SEQ ID NO: 182372 - protein, 398 aa, Oryza sativa
  Clone ID: PAT_MRT4530_79568C.1.pep
VEQCVTSIPEDHEATCWGCGLRLIFASYAPVFKCGWCGAITQSNQISRKPDSVCFSHWRNFRDRFFVTVLILFMLFVICGGVWAVYPVVFSISTFCGIFHCILTGVLAVFTITSYCLASFKSAGAPADMRWGSYPMVGKNDLENYTFCTYCSKPKPPRAHHCRSCKMCVLDMDHHCPFIGNCVGASNHRAFVFFLISVVISCSYAAGMTIYSSYHIWPPLDFENLASTHRSMGYIKMLIEIIGTLASSAFFLSARGLVTVYIAFASLSVNADIGVLLFQQLNYIYEGNTYLNRLSSLNVMHSERGLQNLIRFFGCPYSVSRVLSGYSNTGKLQDNFQQLSYIYEGNTYLNRLSSPNVMHGERGLQNLIRFFGCPYSVFQSIIGLLKHQVYRDSRKNFF

SEQ ID NO: 182373 - protein, 69 aa, Oryza sativa
  Clone ID: PAT_MRT4530_79569C.1.pep
GRVKKKRGEEKKKKKKKKKKKKKKKKKKKKKKKKKLKKKKKGRAVLGVPKFTSPSLQLNTFFLGPPKLN

SEQ ID NO: 182374 - protein, 808 aa, Oryza sativa
  Clone ID: PAT_MRT4530_7956C.1.pep
MEAIEELSELADATRQASALLADDDPSEQPAQRRGGSSFLTVVALGNIPTGENGATRAPICVDLQRDASLSSKSIMLQIDSKSQQVSASSLRHSLQDRLTKAGSFGKGRSEEINVKLCTSTAPPLKLIDLPGIDQRSMDESMIGNYAARNDAILLVIVPALQAPDVASSRALRIARELDSEGSRTIGVVSKVDQVAEDQRALLAVQALLVNQGPRTAADIQWIATIGNSVPIASVQSGVGSESSPETIWKVEVESLKSILLGSPQSKLGREALVDSLAKQIRTRIKVRLPNLLNGLQGKSQIIQEELAKLGEQMVQSSEGTRVIALGLCREFEDKFLQHITGVEVHRVLLDIVSATANATPGLGRYPLFKREVIAIGSAALDGFKDEAKKMVIALVDMERAFVPPQHFIRLLQRRMERQRHEDELKSRSTKKVSDAEPSKATSPQTQTKEGSNLQVLGPAGEITAGFLFKKRAKANDWSNRWFVLNERSGKLGYTKKQEERHFRGVINLEECNLEEVLDEEDPTRSLKDPKKPNVPDIGTPGLIFKITHKVAYKNVLKAHKAIILKAESMAEKTEWVTKIRSIVDQKGASATSGLPMKQSHSDGSLMSTSKKDGSLDTMLRKPVDPEEELKWISQEVRGYVEAVLSSLAANVPKLSMSASCINIIDPVEQAVVLCQVEKAKEGMLNQLYTSISSQLSFVVSMRSVERIEELIQEDHSVKHRREKIKKQSSLLSKVTRLLRIHDNRSATSNWSNDSAGSDSNPGSSGQSGDEWKSAFDPSQDVDPSAAGTNTGSRRIPSRMPPPPPQGG

SEQ ID NO: 182375 - protein, 45 aa, Oryza sativa
  Clone ID: PAT_MRT4530_79570C.1.pep
QGATGWLPTDEDHYDELANSCVERLLGANDVAQQALPAGRLPPDR

SEQ ID NO: 182376 - protein, 55 aa, Oryza sativa
  unsure (1)..(55): unsure at all Xaa locations
  Clone ID: PAT_MRT4530_79571C.1.pep
APNSIGAEIGSVCTEDGMXAIRARRKKVTEKDFLEPVNKVIKGYKKLSAQQEYMV

SEQ ID NO: 182377 - protein, 55 aa, Oryza sativa
  Clone ID: PAT_MRT4530_79572C.1.pep
MGLLGGRLARRGNRWREREREEFASAVKTEENGVSFSGTTSKNRLESKSATTKIG

SEQ ID NO: 182378 - protein, 160 aa, Oryza sativa
  Clone ID: PAT_MRT4530_79573C.1.pep
MASGGGIARARLAEERKAWRKNHPHGFVAKPETLPDGSVNLMVWRCIIPGKEGTDWEGGYFPLTMQFTEDYPTNAPSCKFPSGFFHINVYDSGAVCLSILSTAWKPSITVRQILIGIQELFDDPNPNSAAQNISYELYRKDMEEYRKRVRQQAKKYPSAL

SEQ ID NO: 182379 - protein, 34 aa, Oryza sativa
  Clone ID: PAT_MRT4530_79574C.1.pep
TMSNGTLTQLPGLIEIKGRIPDNISYIVVYNQYV

SEQ ID NO: 182380 - protein, 52 aa, Oryza sativa
  Clone ID: PAT_MRT4530_79575C.1.pep
RRRLAVLWVILPISIQSSLLRSMTDIARLSFIKARSVGVTAYDRTVVAPPAG

SEQ ID NO: 182381 - protein, 51 aa, Oryza sativa
  Clone ID: PAT_MRT4530_79576C.1.pep
GSTGSCPPRPPPASRAAQVRAPEPQATSSPPPTRFGAIPRSLLSPASPPRS

SEQ ID NO: 182382 - protein, 144 aa, Oryza sativa
  unsure (1)..(144): unsure at all Xaa locations
  Clone ID: PAT_MRT4530_79577C.1.pep
MDDGGDAHPRTGENVHAGRGGEVFFGGQAADGRXLAGCVXQRESTLHLVLGLGGGMRIFVETLAGGTMTLEVGSCDAVGGVGAWIQDLEGVPPGQGRLVFAGGRLGGGRALAGCGVRKXATLRLGLGLGGGVRVVGGAWAGGAL

SEQ ID NO: 182383 - protein, 974 aa, Oryza sativa
  unsure (1)..(974): unsure at all Xaa locations
  Clone ID: PAT_MRT4530_79578C.1.pep
MARGSAPLDGSVLPPSRIVSERQAGLPRRFMPESATGREVVALGEGRPAPHYPGRSVFFLSFTMAGLVPPFSSFFMDVLELYNLQMAHLTPNAVMTLAIFAHLCEMFIGPRGPVLNRYIPCVLRKKWDDWKSDWFYTPLADEARLRLPSQPPAQASSWRAPVDLGDGYDAVLDRLAGLRSQGLTGAMVYGDYLRRRIAPLQRRARGAWEYTGFEDYMRTHQGVKWDWVPEDFKMVIQRVLNLSSVEASLIPQGVLPLCSDPERANILTIMQAVGASGEWAPRGHDGAGGSRRGEQSTPGGGRASGPRDGGPGGSRPADARGKRKQEDTPSPSPPRGGGAVRASSRRPEGAVPTSQPEGERKKKRLRKMGGTEPCRGNLISPSRWSFSRPXSQIPSRPSRHSKSGRSEAEETATAEARRRGADRREAADRLREAEEAAQEAVRARQAEEAAWEEARLRRAEESVRXRAACQAPDPTPPEATTTSEAAHDEAAGAPLGPDPSGDAWGEPASGNAPESGTSIGGPSRAAPTPRRLSSLPSAAPLSAEPLLQALAAANTTVLDGLSAQMEVLQAERAEVDAAWARVEEGRRSVEAMVEAGRKAHRRHASELEARRRDLAEIAREVEEERETALIATAVFNVARDDLCLQYGSRAAELEKKLDASRQREEALEARATVLEDRARALDTKERELAGHEAAVAIREATLAAHEAACAEEESALRLREDELTEWERALEEAEAAAQRWEEQARLNLEGARAERAALDQRAAEFEARAKELDARARSGGAAAGDGDLAARLAAAEHTITELQGALDSSAGEVEALRLAGEVGLGMLRDAVSRLDRAGRQAGLWGGRTAKYAANQGGIAQRLSEMAGTLQRLPEELEEAIKSSSRDLARGAVELALASYQARDPDFSPWAALEEFPPGTEDGARARVRDAADHIVHSFEGTAPRLAFALDSDEEGGDDGADDSDDEADGPGASE

SEQ ID NO: 182384 - protein, 178 aa, Oryza sativa
  Clone ID: PAT_MRT4530_79579C.1.pep
PTRPVGQLAKITGCYVVGSAGSDEKVNLLKTKFGFDDAFNYKKELDLEAALKRCFPDGIDIYFENVGGAMLDAVLPNMRVAGRIAACGMISQYNLEQPEGVYNMICIVTKRLRMQGFLVFDFYDMYYQIEEQIAGYLKEGKVAYTEDVVEGLDAAPAALVKLFTSSSIGKQLVAVARE

SEQ ID NO: 182385 - protein, 65 aa, Oryza sativa
  Clone ID: PAT_MRT4530_7957C.1.pep
GKPLYFLWELINYKTCPYPGVLKNMFKLKSELVKFFNTLSFIPTMLRVGTYSWGTPYARYLNTQF

SEQ ID NO: 182386 - protein, 531 aa, Oryza sativa
  unsure (1)..(531): unsure at all Xaa locations
  Clone ID: PAT_MRT4530_79580C.1.pep
HCQGEEVYIMLCDSTLYYRNLDDFDEGFEDNYTPLYFGIFMADNETEEQRKAREAEELRIQQEAEQRCLEEERQAQERERLQCEQQERERAAKEAKDQRQRALDAGRRARELIRQQDVEGTAVFRTPQQNAVTAITLLDTLLKEDALNQANHVVNILNQIKTMIAASVPVNPASVRTPTGSXVPLLRSQDYHQPSLSAAGAGSSRRSRGHGERSVHSPPEXHRERRVERPRSPPRRRPVDLRDTINQRRVAXSYAPHHSPDHHDDDMDGVAAFTSNLRRVDXPAGFKPTGIEKYDDTTNPXSWLTVYGLAIRAAXGDNKAMANYLPVALADSARSWLHGLPRGTIGSWAKLRDHFIANFQGTFERPGTHFDLYNVIQKSGESLRDYIRRFSEQRNKISDITNDVIIAAFTKGIRHKDLVGKFGRKPPKTVKQIFEKANEYAKAEDAIIAYKQSGTTWKSKKDTPTIGGSGSTNHKDHKRKPEELVATTTPSSRQRSRVNTFDKIMNSQCLHQPNSNHAAKDCFIYKQFAEH

SEQ ID NO: 182387 - protein, 942 aa, Oryza sativa
  unsure (1)..(942): unsure at all Xaa locations
  Clone ID: PAT_MRT4530_79581C.1.pep
MARGSALLDGSVLPPSRIVSERHAGLPRHFMPESATGREIVMLGEGRPAPDYPGRSVFFLPFAMAGLVPPFSSFFMDVLEFYDLQMAHLTPNAVMTLAIFAHLCEMFIGVRPSLRLFRWFFTVQSVSPPSVVGGCYFQPRGPVLNRYIPCALRKKWDDWKSDWFYTPLANEARLRLPSQPPAQVSSWRAPVDLGDDYDAVLDRLAGLRSQGLTGAMVYGDYLRRRIAPLQRRARGAWEYTGSEDYMRTHQGVRWDWAPEDFKIVVQRVLNLSSVEASLIPQGILPLCSDPDRASILTIMMGVGASEEETPKGHDGAGESRRGEQSTPGGAMSRRVPPAIPNPASPRPKIRRPQRNGGENLTGERPQIAFGKLKRPPGRPLGFAMQRIPLGRRPPGLAKPKKPLRRRPPGLARLRRWRLPRQPTRRLLARRLGPLPRATLRXTASGAARDEAAGASPRPTSPGDVQDQXGRLFSSSSVAPLSAEPLLQALTAANTAVLDGFNXQVEALQAERAELEAAWARVEEGRRSVDVMVEVGRKAHRRHVSELEARKAALAEIAREVEEEREAALIATTAMIEAQDSLHLQHGSWEAELKKKLDAAQGVLDTAAARERRATEIEAASRRREEALEARAMALEEHAGAVERSLADREAAAAIREATLAVHEAACAEEESALRLREDAIAERERALQEAEAAAQRLADSLSLREAAQEEQARRNLECVRAERAALEQRAADLEAREKELDARARIGGAAAGESDLAARLAAAEHTVADMQRALDSSAGEAEALRLAGEIGPGMLWDAVSRLDRAGRQAGLWKGQTMTHSTNLEGLAPHLTKMAWALQQLPEELEKTVKSSSRDLAQGAVELVLASYQARDPNFSPWMALDEFPPGTEDDARARVRDAADHIVHSFEGSAPRLAFAPNSDEEGDASGADDGDDEAGDPGATE

SEQ ID NO: 182388 - protein, 987 aa, Oryza sativa
  Clone ID: PAT_MRT4530_79582C.1.pep
MARGSALLDGSVLPPSRIVSERHAGLPRRFMPESATGREIVMLGEGRPAPDYPGRSIFFLPFAMAGLVPPFSSFFMDVLEFYDLQMAHLTPNAVMTLAIFAHLCEMFIGVRPSLQLFRWFFTVQSVSPPSVVGGCYFQPRGPVLNRYIPCVLRKKWDDWKSDWFYTPLANEARLRLPSQPPAQVSSWRAPVDLGEDYDAVLDRLAGLRSQGLTGAMVYGDYLRRRIAPLQQRARSAWEYTGPEDYMRTHQGARWDWAPEDFKIVVQRVLNLSSVEASRIPQEILPLCSDPDRASILTIMMGVGASEERAPKGHDGAGERRRGEQSAPGGGRASGPRVGGSGSSRPADAQGKRKLGGTPPPSPPRGGGAARASSRRPEGAAPTSQPEGERKKKRLRKTGETEPCRGNLISPPRWSFNRPPRSDVPSHSSRHPKSGQSEAEDPAAAEERRRESDRREAADRLREAEEAAREAARIRQAEEAAREEAARAEEAAKEEAARARQAEATAAAGASTGPTPSGNPQATASGEARDEAAGTSPGPTSPGDAQDQTGPGDIPEPSTSSGGPSRIAFSPRRLFSSSSVAPLSAEPILQALAAANTAVLDGFSAQVEALRAERAELEAAWARVEEGRRSVDAMVEVGRKAHRRHVSELEARKAALTEIAQTEAASRRREESLEARAMALEEHAGAVEKGLTGREAAATLREATLAAHEAACAEEECALRLREDALAERERALEEAEATTKRLADSLSLREAAQEEQARRNLECVRAERAALEQRAADLEAREKELDARAHIGGAAAGESDLAARLAAAEHTVADMQRALDSSTGEAEALRLAGEIGPDMLWDAVSRLKRAGRQAGLWKGQTTVPPTNLEGLAPHLNRMAWVLEQLPEELEKTIKSSSRDLARGAVELVLASYQARDPNFSPWMALEEFPPGTEDDARARVGDAADHIVNGFEGSAPRLAFAPDSDEGGNASSASDGGNEAGELGASE

SEQ ID NO: 182389 - protein, 230 aa, Oryza sativa
  Clone ID: PAT_MRT4530_79583C.1.pep
MKLPRADRGGRVRPAVARQGGSDPRAPGAPSSGHATVHFPVILVRSTFSSSVACALSTSSASSTPVSTLASSSSTDTRGRTRRALRPRPPAAACGSASSHAPMLQPIDAPRATTTLTASSRTDKRRASGGTDEPWRDLGSSVVASLSPDLGRDPNLSSSRSSMSSSGCASCSPLPSLRSSPPVPPLPHLSLCPPSPAPICLSRISSRSSPLAPSSTVHDHRVESSPSTTT

SEQ ID NO: 182390 - protein, 59 aa, Oryza sativa
  Clone ID: PAT_MRT4530_79584C.1.pep
KKKKKKKKKKKKKKKKKKKKKKKKKKERKKKKKKKGRPFLGSQPSFPLLARETFWGGGP

SEQ ID NO: 182391 - protein, 58 aa, Oryza sativa
  Clone ID: PAT_MRT4530_79585C.1.pep
MAWGKACKGKFAGNLGTKAKAFILIQIKITDTPQPYAIFLHWKLATFAHPPNNASVYL

SEQ ID NO: 182392 - protein, 95 aa, Oryza sativa
  Clone ID: PAT_MRT4530_79586C.1.pep
VVESAGRLVMVVLVEEHLLLVDVLIVRIIEWSQRWPCYSKSKRPPSVAVRSFHCRILGVRSPEVILTRLQLLQHQKVCCGSHSPLHSAPPFVMAP

SEQ ID NO: 182393 - protein, 903 aa, Oryza sativa
  Clone ID: PAT_MRT4530_79587C.1.pep
MARGSAPLDGSVLPPSRIVSERQAGLPRRFMPESATGREVVELGEGRPAPHYPGRSVFFLSFAMAGLVPPFSSFFMDVLEFYDLQMAHLTPNAVMTLAIFAHLCEMFIGPVSPPSVVGGCYFQPRGPVLSRYIPCVLRKKWDDWKSDWFYTPLADEARLRLPSQPPAQASSWRAPVDLGDGYDAVLDRLAGLRSQGLTGAMVYGDYLRRRIAPLQRRARGAWEYTGSEDYMRTHQGGRWDWAPEDFKMVVQRVLNLSSVEASLIPQGVLPLCSDPDRANILTIIEIPSCPSRHSKSGRSEAEETAAAEARRREADRREAADRLREAEEAAREAVRVRQAEEAAREEARLRRAEESVREAEAARARQAAYQAPDPTPPEATTTSEATHDEAAGTPLGSDPSDDVRDEPASGDAPESGTSIGGPSRAAPTPRRLSPLPSAAPPSAEPLPQALAAANTTVLDGLSAQMEVLQAERAELDAAWARVEEGRRSVEAMVEAGRKAHRRHASELEARRRELAEIAKEVEEERETALIATAVLDEVRDDLRLQYGSRAAELEKKLNTARGVLDAAAAWERRAAENEAASRRREEALEARATALEERASAKERDLADREAAVAIREATLAAHEAACAEEESALRLREDTLTERERALEEAEAAAQRLADSLFLREAAQEEQARRNLEGARAERAALARRAAEPEVRAKELDARARSGGAAAGDGDLAARLAAAEHTIADLQGALDSSAGEVEALRLAGEVGPGMLRDAVSRLDRAERQAGLWGERTAKYAANQGGLAQRLSEMAGTLQRLPEELEETIKSSSRDLAWGAVELVLASYQARDPDFSPWAALDEFPPGTEDGARAQVRDAADHIVHSFEGTAPRLAFALDSDEEGGDGGVDDSDDEAGDPGASK

SEQ ID NO: 182394 - protein, 1281 aa, Oryza sativa
  unsure (1)..(1281): unsure at all Xaa locations
  Clone ID: PAT_MRT4530_79588C.1.pep
EDNYTPXLYFGIFMGDNETEKQRQAREEEEQRVRQEAKRRRLEEERQAQERERLQREQQERERAAKEAWEAGRRARELIGQQDVEGTAVFRTPQQNVVAAITLLDTLLKEDALNQANHVVNILNQTKTMIAASVPVNSASVRTPTGSRVPPLQSQDYHQPSLSVVGAGTSRRSRDHDEQSVHSPPDRHRERRAECPRSPHRRRPIDLRETINQRRAARGYIPHHSPDRYDDDVDGVAAFTSDLRRVDWPAGFKPTGIEKYDGTTNPETWLTVYSLAIRAAGGDIKAMANYLPVALADSARSWLHGLPRGTIGSWAELRDHFIANFQGTFERPGTQFDLYNIVQKSGESLRDYIRRFSEQRNKISDITDDVIIAAFTKGIHHDLLVGKFGRKPPRTVKQMFEKANEYAKAEDAVTASKQSGTTWKPKKDTPTTGGSGSTNHKDRKRKPEELVATTTPSSRQCSRVNTFDKIMNSQCPHHPNSNHAAKDCFVYKQFAEQYAKNARKSTYRDQSTSKKKDDEDDAPTGFQDPRKELNHIFGGPLAYESKPKQKLTEREINAVQPDTPQYLRWSETTIKFDRSDHPDRVVHPGRYPLVLDPVVCNIKLRRSLIDGGTALNILFAKTLDDMQIPRTELKPTYHAILGRPALAKFMAVPHYTYMMMKMPGPRGVISLRSDIKQAVTCDKESCEIAQTREIALAREEIRLAASTATEGEVSATKMSKGGEGDAKTEKIPLDPSDPTKTAVIGAKEVIEHSLHVKEDAKPIEQRLRHFAQDRKDAIKEELTKLLAAGFIKEVLHPDWLANPVLVRKKTGQWRMCVDYTDLNKSCPKDPFGLPRIDQVVDSTAGCELLSFLDCYSGYHQIRLKESDCLKTSFITPFGAYCYIAMPFGLKNAGATYQRMIQRCFSTQIGRNVEAYVDDVVVKTKQKDDLITDLEETFASIRAFRMKLNPEKCIFGVQLGKLLGFMVSHRGIRANPEKINAIINMKPSSSQKDVQTLTGCMAAFTRFVSRLGERGMPFFKLLKKTDNFQWGPEAQKAFENFKKLLTTPPVLASPHPQEPLLLYVSATSKVVSTVLVVECEEEGHLQKVQRPIYFVNEVLADSKTRYPQSQALADFVAEWTKCQEDTPAEKIEYWTMHFYGSKRLSGTRAGVVLISPTGERLSYILWIHFSASHNVAEYEALLHGLRIAISLGIRRLIVCGDSQLVVNQVMKEWSCLDDNMTAYRQEVRKLEDKFDGLELTHVLRHNNEAADRLANFGSKREAAPSDVXVEHFYEPTVPRKEI

SEQ ID NO: 182395 - protein, 49 aa, Oryza sativa
  Clone ID: PAT_MRT4530_79589C.1.pep
MAAQSPATTVAGKTPSADVTIGTDELVAVREWEVSTNGSQNTWRQVTQA

SEQ ID NO: 182396 - protein, 1126 aa, Oryza sativa
  unsure (1)..(1126): unsure at all Xaa locations
  Clone ID: PAT_MRT4530_7958C.1.pep
MATIQKQNDAIKVSIGAIEEIKPMVVELVGWKPAVEKAVTELREEMGDLRAQVHQLAKGTTPEVKADERPAPSSTPPNIKPDELPALLPTPPGPKLKQMKEEERSIPQERGEESHGLFSHRVDLNHRGKAVWGNPSSQFLPVKSTHAHEVSGSWEEFAAWVCGKFGREEFQRLEEVLETNLKEGRKIDSHGRNTLRATSTLARPFGGQWMKGEERLKAEVPAEDKVAALRAYRCSKGLCHTCGEKRSQEYRCGPTVQLHVVEELLQLFPSEDVVESDTNDATPDEPETEELLAISREAVLGIESPKTMRLQGLIQRHEVLMPGESFSTPLKVLPLGCYEVILGMDWLERHSPMQIDWKLKTLQFQWQNRQVTLQGVIPDTSDCPPVTCNQLKGLLHHNVVLQAVALCPVDTPVKPSQTIVPADIETLLLEFASVFDEPTGLPPSRVFDHSIPLLPGASPVNLRPYHYNPAQKTEIEKQVSDILQQGVIQRSASPFSSPVLLVQKKDGSWRFCIDYRHINAITIKNRYPLPIIDELLDELAGTCWFTSLDLRAGYHQIRMKPEDEHKTAFKTHHGHYEFKVMAYGLTGAPATFQGVMNTIFEPFLRKGVLVFIDDILIYSRTLEDHIRLLRAVFSFLTEQQLKALKNALTSAPVLALPDFSKVFEIETDASAFGIGAMLMQDGHPLAFLSKALGPRNRGLSTYEKECLAILLAVDHWRSYLQGAEFVIRTLAEFDXIWGRIWVGENPSLQHQILQTLHAGVXIAWSGLRRSVKSFVENCTVCQQAKTERVRYPGFLQPLPVPEHAWQMVSLDFIEGLPVSSRFDCVMVVVDKFSKYAHFVALAHPFSAFDVAQAYLTNIYKLHGLPQSLISDRDRIFTSTLWTTLFKLADTQLRMSTAYHPQSDGQTERVNQCLETFLRCFVHACPKKWFHWLALAEFCYNTSFHFALGTSPFEALYGHPPRHFGVIDIAECVVPDLQDGRKERVAARVGKVAYRLVLPASCAIHPVVHVSQLRKASQPQVPDAPALPPVVAEVDPVPAQVLARRLVRRGAAAVPQVKVCWTGCSSSEATWEDLERLKERFSDAPAWGQAGSQEEGNVTDPNPIKTRPKGTRQRKPNTRVSGPDWVV

SEQ ID NO: 182397 - protein, 833 aa, Oryza sativa
  unsure (1)..(833): unsure at all Xaa locations
  Clone ID: PAT_MRT4530_79590C.1.pep
MAGLVPPFSNFFMDILEFYDLQMAHLTPNAIMTLAIFAHLCEMFIGVRPSLRLFRWFSTVQPVSPPTVVGGCYFQPRGQVLNRYIPCVLRKKWDDWKSDWFYTPLADEARLRLPSQPPAHASSWRAAVDLGDGYDAVLDRLAGLRSQGLTGAMVFGDYLRRRIAPLQRRARGAWEYTGPEDSMRXHQGRTWDWYPEDFRMVVQREVGASGERAPRGHDGAGGSRRGEQSGPGGSRPADARGKRKQEGTPPPSPPRGGGAARRREADRREATDRLREAEEAAQEAVRVCQAEEAAREEARLRRAGESVREAEXRARQAACQAPDPTPPEVTTTSEATHDEAAGAPLGPDPSGDAWDEPAPGDAPESGTSISGPSRAAPTPRRLSPLPSAAPPSAEPLLQALAATNTTVLDGLSAQMEVLQAERAELDAAWARVEEGRRSVEAMVEAGRKAHRRHASELEARRRDLAEIAREVEEERETVLIATAVLNEARDDLRLQYGSRAVELEKKLDAARGVLDAAAAREQRAAENKAASRQRKEALEARATALEESARALDARERGLADREAVVATREATLASHEVACAEKESALRFREDVLTERWRALKEAEAAAQRLADSLSLREAAREEQARRDLEGARAEGAVLDQRAAELEARAKELDARAHSGGAAAGHGDPAARLAAAEHTIAKLQGALDSSAGEVEALRLASEGGRCAKYAANQGGLAQRLSEMAGALRRLPEELEETIKSSSRDLARGAVELVLASYQARDPDFSPWAALEEFPPGTEDGARAQVRDAADHIVHSFEGTAPRLAFALDSDEEGGDGGADDSDDEAGDPGASE

SEQ ID NO: 182398 - protein, 125 aa, Oryza sativa
  Clone ID: PAT_MRT4530_79591C.1.pep
GSLQHSISDLSPSPSPSPSPSPSPSPSPSPFPSSSVPPSFSPSGSIHYPAPPTYMNPSLPPQASPPLHSPQPSVAPSPYLSPAFPPIPGHVDPPNHLPGAVPGPTYQMMSIPSPSLPVFRPSMAP

SEQ ID NO: 182399 - protein, 194 aa, Oryza sativa
  unsure (1)..(194): unsure at all Xaa locations
  Clone ID: PAT_MRT4530_79592C.1.pep
MGESEDAGRRRRRWRCSPTHDTEWVPVADSDGEGVDGMTGTTANATASMARLGTASSGVARFRRPTWGGGGGERGGIRKSNPGRLERGRGRKIEGVGAGDAGASXRGRRGPEDAGXGCGGGCGXRGGAGWRLGEDLTGGPHLSATPGERREAPAQLGLGLRLAQRGGGGRRSLILVLGRLMQKKLKHSDYHFVL

SEQ ID NO: 182400 - protein, 264 aa, Oryza sativa
  Clone ID: PAT_MRT4530_79593C.1.pep
MAGQQPQQQGPPEDDFFDQFFSLTSSFPGAAPGGRAAGDQPFSLALSLDAAAAAEASGSGKRLGVGDDAEGGGSKADRETVQLTGLFPPVFGGGGVQPPNLRPTPPTQVFHPQQSKQGGAAVGPQPPAPRPKLRRERIAERMRALQELVPNTNKTDRAAMLDEILDYVKFLRLQVKVLSMSRLGGAGAVAQLVADIPLSVKGEASDSGGNQQIWEKWSTDGTERQPAQWLTEFEHKMKWKMILMVMFIYLHFSKVEAEALVNGG

SEQ ID NO: 182401 - protein, 56 aa, Oryza sativa
  Clone ID: PAT_MRT4530_79594C.1.pep
KNHTIWYKPGENFKHPFLLNYRGFIFIPIHAIYKIRDITHTPVPQVPRTLFLPKKK

SEQ ID NO: 182402 - protein, 1044 aa, Oryza sativa
  Clone ID: PAT_MRT4530_79595C.1.pep
MARGSALLDGSVLPPSRIVSEKQAGLPRRFMPESATGREIVMLGEGRPAPDYPGRSVFFLPFAMAGLVPPFSSFFMDVLEFYDLQMAHLTPNAVMTLGIFAHLCEMFIGVRPSLRLFRWFFTVQSVSPPSVVGGCYFLPRGPVLNRYIPCVLRKKWDDWKSDWFYTPLADEARLRLPSQPPAQASSWRAPVDLGDGYDAVLDRLAGLRSQGLTGAMVYGDYLRRRIAPLQRRARAAWEYTGSEDLMRTHQGVRWDWAPEDFKILVQRVLNLNSVEASLIPHGILPLCSDPDRASILTIMTAVGASEEQAPKGHDGAGGSRRGDQSTPGGGRASGPRVGGSGSNRPTDARGKRKLGGTPPPSPSRGGGAVRASSRHPEGAAPTSQPEGERKKKRLRKMGETEPSRGNLISPPRWSFNRPPRSDIPSRSSHHPKSGQSEAEDPAAAEARRRESDRREAADRLREAEEAAREAARARQAEDTAREEAARARQAEEAAREEAARVRQAEEAAREEAARARQAEEAAREEAARVRQAEAMASSEAAHDKAAGTSLGPTPSGDAQATASGAARDEAAGGSPGPTSPGDAQDQTGPGDIPEPSASSGGPSRVAFSPRRLFSSSSVAPLSAEPLLQALAAANTAVLDGFSAQVEALRAERAELEAAWARVEEGRRSVDVMVEVGRKAHRRHVSELEARKAALAEIAREVEEERGAALIATTMMIEAQDSLRLQHGNWEAELKKKLDAAQGVLDAAAAREQRATETEAALRRREEALEARAMALEERACVAEKVLADREAAVTSREATLAAHESACAEEESALRLREDALAEREAALEQRAADLEAREKELDARACIGGAAAGESDLAARLADAEHTVADMQRALNSSAGEAEALRLAGEIGPGMLWDAVSRLDRAGRQAGLWKGQSMTRPTNLEGLAPHLTKMAWALQQLPEELEKTIKSSSRDLAQGAVELVLASYQARDPNFSPWMALEEFPPGTEDDARARVRDAADHIVHSFEGSAPRLAFAPNSDEEGDASGADDRDDEAGDPGASD

SEQ ID NO: 182403 - protein, 403 aa, Oryza sativa
  Clone ID: PAT_MRT4530_79596C.1.pep
MASSSPPWLLLPSFPWPPPPPPGSSSGRGGGGGGGGDPGDWKPNVVAAFAGAQLGRALRRRLAGLLRSPEARHLGALPRIGDIWFEGSDSFATHSILGVLENALSAPYACSSVLFNGNGSDRRYIGRGKLPSRRPSGINSKKRLWTNILLAVNILAYVAQITTQGRLLIWGAKINSMIDRGELWRLATSSLLHANLAHLAFNCFSLNSIGPMVEMLTGPRRYLAVYFTSALAGSLMSYRYCASPAVGASGAIFGLVGAYAVYTWRHRRFLGHGKESLEHIGRVVILNMGMGLLTRGIDNWGHLGGLLGGMAMAWFLGPAWQYQYVSKDGRAVFKDNAPILQLSNGKWLRLSAQQMDKRQMSQKDGCKCIVLCSVYDDVTGNEQSYRKIQHQFDYGKSLHSPLP

SEQ ID NO: 182404 - protein, 1011 aa, Oryza sativa
  unsure (1)..(1011): unsure at all Xaa locations
  Clone ID: PAT_MRT4530_79597C.1.pep
EVIEHSLHVKEDAKPIKQRLRRFAQDRXDVIKDELTKLLAAGFIKEVLHPDWLANPVLVQKKTGQWRMCVDYTDLNKSCPKDPIGLPRIDQVVDSTAGYELLSILDCYSGYHQIXLKESDCLKTSFITPFGAYCYITMPFGLKNAGATYQRMIQRCFSTQIGRNVEAYVDDVVVKTKQKDDLIMDLEETFASIHAFRMKLNPEKCIFRVPSGKLLGFMMSHRGIQANPEKINAILNMKPSSSXKDVQKLTGCMVALSRFVSRLGERGMPFFKLLKKTDNFQWGPEAQKAFEDFKKLLTTPPVLASPHPQEPLLLYVSATSQVVSTVLVVEREEEGHVQKVQRPIYFVSEVLADSKTRYPQVQKLLYGHSVTVVTSFPLGDIRHNRKANGRIAKWALEFMSLDISFKPRTSIKSQALADFIAEWTECQEDTPAEKMEYWTMHFERSKRLSGTGAGVVLISPTRERLSYVLWIHFSASHNVAEYEALLHGLRIAISLGIRRLIVRGDSQLVVNQVMKEWSCLDDNMTAYRQEVRKLEDRFDGLELTHVLRHNNEAADRLANFGSKREAAPSDVFIEHLYEPTVPRKEIIEATNTQGVSMIEADWREPLIRFLTKQELPQDKDEAEQISKHSRLYVLHETELYKKSLSGILQXVSLEEGRQLLKDIHSGICGNHAAARTIVGKAYRQGFFWPTAVSDADKIVRTCEGCQFFARQTHLPAQELQTIPLSWSFAVWGLDMVGPFKKAVGSYTHLFVAVDKFSKWIEAKPVITITANKARDFFVNIVHRFGIPNQIITDNGTQFTGGVFKDFCEDFGIKICYASVRHPMSNGQVERANGMVLQGIKARVFDRLHPYAGKWVEQLPSVLWSLRTTPSRAMGQSPFFLVYGVEAMLPSEVEFESLQFRNYREERYGEDRVDDLNRLEEAREAALIQSARYLQGMRRYHNRNVRSRTFLVGDLILRKIQTTRDRHKLSPLWEGSFIISEVTRPGSYQLKREDGTHIDNSXNIEHLRRFML

SEQ ID NO: 182405 - protein, 378 aa, Oryza sativa
  unsure (1)..(378): unsure at all Xaa locations
  Clone ID: PAT_MRT4530_79598C.1.pep
MGKPVDVELGGAAGLEIAGGGGGGGGGVWAVAGAIGRAASFRCVFVLALSVGVLVSALLLLVPTRGHGFLSDDPVVLGAEIQVGFTLEKPVSFLAAHMDKLGGDIFEEIGIPNSKVSIVSMRSLTSKYSTNVVFSVLPSPKEASISLPALSVLRSSLIAMMLNQVNLSLTEPLFGHPSSVELLRFPGGITVIPEQSGSVWADPLFNFVLNNSIYQILGNITELKDQLKLGLNLRSYEKVYLQFRNEIGSSVDAPATIEASVLDGSSILLPYRLKQLAQLIKEPNARNLGLNHSVFXSISDLSPSPSPSPSPSPSPSPSPSPFPSSSVPPSFSPSGSIHYPAPPTYMNPSLPPQASPPLPELEAPGEGGSGVQERDRMN

SEQ ID NO: 182406 - protein, 197 aa, Oryza sativa
  unsure (1)..(197): unsure at all Xaa locations
  Clone ID: PAT_MRT4530_79599C.1.pep
LANLGSKREAAPSDVFVEHLYEPTVPKRETGEDADIEDIPMVEADXREPLIRFLTCQELRQDKDEAEQISRRSRLYIIHETEXVSKAYRQGFFWPTASXLSWPFAVWGLDMVGPFKKAVGGYTHLFVAINKFSKXIEAKPVITITVDKARDFFINIVHRFGVPHRIITDNGTQFTGGVFKDFCEDFGIKICYASVAH

SEQ ID NO: 182407 - protein, 125 aa, Oryza sativa
  Clone ID: PAT_MRT4530_7959C.1.pep
GEKQEQRLQHQTQQHRNPKDETGGCRVTGKGNRFQMGPPNIATIQRRAPPPPKTKAKRGDDDWGMQKKSEPESDQPGMMSGRFGIGFFIGKGPFRAPWGPHPGWSAGPPRGGASRPDFGGGQQGH

SEQ ID NO: 182408 - protein, 222 aa, Oryza sativa
  unsure (1)..(222): unsure at all Xaa locations
  Clone ID: PAT_MRT4530_795C.1.pep
RPGQIAIPSLVLQHSGSINRPIVFFADCLFLLCHGSLSHQILRPSTSRXYSSPRGTSRGXKMLYRSQPFESSPTVSSQAATSEFFNASNDVFPCTTISAVPPAIEPRGLLLPHYTIDASLIYIIAGERXISCCSFPCCPETIPSXFLQSGQVHCVPKRHSHLPKFSCVHHKIRRFRQRDVISLPAAVAHXCYTDGDMPXMLLHYVTDINNXLNLLDPRTLDF

SEQ ID NO: 182409 - protein, 159 aa, Oryza sativa
  Clone ID: PAT_MRT4530_79600C.1.pep
YLTLHLFQLSLETKLITLFNTLHSPTHHLDESVCGCKCVHLCVATPSAYPQCVKHHPSYLRHCAHLFHTHAQTRKLWQPLQTEISPGDQQMVSKHHPTTCAWHDIVTLACELNCGLDTIVLHIVPCIQTTHTSVFAPNHDTLEPLFSPSTLLRYCLPPG

SEQ ID NO: 182410 - protein, 186 aa, Oryza sativa
  Clone ID: PAT_MRT4530_79601C.1.pep
MVWLFASATVAELNRAAMTEPAKSPKAMAVKRFGRALTYPCKRNRRGHGTGNYTGHGRWTERKELVSRLEEEEKKRLIILSGICGGGSPGPIQSNIDQLESRRIELLAQLEECNAELALEKQKLADLPKVVEEQKSKLKASIKHLAEMTKSLKVIPETDAQDAQAIEEVMQIRQRAISAIQRYIAE

SEQ ID NO: 182411 - protein, 57 aa, Oryza sativa
  Clone ID: PAT_MRT4530_79602C.1.pep
DSLLHVISKVQFNNYQSNPRLLAHFAVTFFYRFSSSGKIFRKIARILSFSFDGFYCY

SEQ ID NO: 182412 - protein, 431 aa, Oryza sativa
  Clone ID: PAT_MRT4530_79603C.1.pep
MAMASPTNGGGGGGNKVISLRLQYYCVLAAVVVAVMVLSLAFVSPSAMGAAVRQNLGSVVAATAAAGEGADASAAAAGAGVAATTAAEEEREQAAAAGVVLFNFGDSNSDTGGVAAAGGIRIMPPEGRTYFHHPTGRLSDGRVIIDFICESLNTRELNPYLKSIGSDYSNGVNFAMAGSTVSHGVSPYSLNVQVDQFVYFKHRSLELFERGQKGPVSKEGFENALYMMDIGHNDVAGVMHTPSDNWDKKFSKIVSEIKDAIRILYDNGARKFWIHGTGALGCLPALVVQEKGEHDAHGCLANYNKAARQFNKKLSHLCDEMRLQLKNATVVYTDMFAIKYDFVANHTKYGIKWPLMVCCGNGGPPYNFKPGKFGCDDLCEPGSKVLSWDGVHFTDFGSGLAAKLAMSGEYSKPKVKLASLVNAGSNKSSDS

SEQ ID NO: 182413 - protein, 105 aa, Oryza sativa
  Clone ID: PAT_MRT4530_79604C.1.pep
TAGQEEKVAVTNQHGENTLMLLHHMGYHTIAVVCHGFTAFKKFPLYYSKYNDSIIVDLANALSKKGVGIFRFDFSGNGESEGEFQYGNYRKDADDLHSAISHLNH

SEQ ID NO: 182414 - protein, 281 aa, Oryza sativa
  Clone ID: PAT_MRT4530_79605C.1.pep
MGALLLRCALLALAAGLVAARGGGGGGAGAAGRLSPNYYRHSCPRVERIVADVVAAKQRANPSTAAGTLRLFFHDCFVGGCDASVLVSPLSADRSPERAAEINLSLPGDSFDVVARAKVALEVACPGTVSCADILALAARDLVGILGGPRFPVALGRRDARRPYSFRSADGYDPSLNPAFARALQSSCANYRSDPTISIFNDIMTPGKFDEVYFKNLPRGLGLLASDAALWEYPATRVFVQRYADNRTAFFEDFAAAMQKLGAVGVKTGRQGVVRRHCDVL

SEQ ID NO: 182415 - protein, 441 aa, Oryza sativa
  Clone ID: PAT_MRT4530_79606C.1.pep
MSSSSSLFLALCRIFVATWNVGGRAPPGSLSLDDWLRTSPPADIYVLGFQEIVPLNAGNVLGAEDNGPARKWVSLVRRTLNSLAGTGGGGGGGGGGGMRTPSPAPDPVVEMDDDFEGSSSRQNNPAAFFHRRSFNAGLSRSLRMDGDILGGGGGAQPRLERRYSVNDRVMYGSRPSDYEANCRWGHPSDDGEIDDGGGESPSAVFSPMSYGYGAPPYMEESNGGAAHSSHLTSGQKDGDEHRRNSDVMEILRKTRFPMVYGQYERSPETILEHDRIIWLGDLNYRIALSYRSVKALVEMRNWKALLEKDQLRSEQRGGRVFPGWNEGRIYFPPTYKYSNNSDRYAGDDMNQKEKRRTPAWCDRILWYGRGLSQLSYVRGESRFSDHRPVYSMFSAEVESINHSRIQKMSCSSSQLDIEELLPYSYGYTDINPYGYTDLNFY

SEQ ID NO: 182416 - protein, 155 aa, Oryza sativa
  unsure (1)..(155): unsure at all Xaa locations
  Clone ID: PAT_MRT4530_79607C.1.pep
DDLYFIQKDSXETLELLSIEPPSQPPIEPKPCPSGLQNVVLDNHQESTSFLSDVSLEKENFQTRDPSRHCFAAFNRSSPVLGTMPGDSASTLSTTVPSCASATAQSSPCAAKSPPSTFAVFPHFAFQRMDSATSEDRGHEKKSSEVSFEEARQVT

SEQ ID NO: 182417 - protein, 280 aa, Oryza sativa
  Clone ID: PAT_MRT4530_79608C.1.pep
MGFGSREMACALVALVLGLCCVGGARATGRIDEGLEVMWGDGRGSVSPDGQVMALSLDHTSGSGWRSKNTYLFARVDLQIKLVANNSAGTVTTCYFMSEGEWDIHDEVDLEFLGNVTGQPYTLHTNVFANGTGGKEQQFHLWFDPTTDFHTYSIVWTSQHILVLVDGTPIREMKNHADKGIAYPSSQRMRLYGSLWNADDWATQGGRVKTDWSQAPFVARYRNFTATEAASSSSPAGYDQQMDATAQQAMKWARDNYMVYDYCADSKRFPQGFPPECSMP

SEQ ID NO: 182418 - protein, 129 aa, Oryza sativa
  Clone ID: PAT_MRT4530_79609C.1.pep
MNTRPGDQTVRDTEAGNSSDDEGEKRRRRRRRRRRRTISTPTGDNCIRGRRGEDSGETETVGARQATRGEPEWKRAAVDKAIRVLAAQERRNGKVGGGASAGDASGEGWIDYSWAASRACGGGGPCGPI

SEQ ID NO: 182419 - protein, 156 aa, Oryza sativa
  Clone ID: PAT_MRT4530_7960C.1.pep
MTVTPQLRIRWDRAPRALWLHIARVRGLVAEGQQRQEGRRARAGSPLRACDFETTAGKRRHRDVAETRAAERRNGSGLIPQLSPSQPLVTTAFCSSPPPPNLLSPPPSAPSPPLMASPPRPQERGGRPLLTATFWRGWIVAARARRWQGNDIAVVA

SEQ ID NO: 182420 - protein, 411 aa, Oryza sativa
  Clone ID: PAT_MRT4530_79610C.1.pep
MELAEAVRDETAMAMRLLGHLARAPRGGGGDKNLAVSPLSLHAALALLGAGARGETLDQIIAFLGPAGGPAHAALASHVALCSLADDSGPGDDRGGPKVRFANGVWVDAALRLKAAYARVVADKYRAEARPVSFRDKLEEARREINEWFESATAGRIKDFLPKDAVDRATPAVLGNALYFKGDWESKFDARSTSDDVFYLPDGGHVSAPFMSSGKWQYIACRAGYKVLRLPYARGGRGRGRDTGRLFSMYIYLPDERHGLPDMLRKLCSDPAALIESSAALTEKVPVGAFMVPRFTLSYKTNAAETLRQLGLRLPFEYPGADLSEMVESSPEAEKIVVSAVYHESFVEVNEEGTEAAAATAVVMTLGCAAPSAPVHVVDFVADHPFMFLIKEDLTGVVVFAGQVTNPSSST

SEQ ID NO: 182421 - protein, 965 aa, Oryza sativa
  Clone ID: PAT_MRT4530_79611C.1.pep
MARGSAPLDGSVLPSSRIVSERQAGLPRRFMPASATGREVVELGEGRPVPHYPGRSVFFLPFAMAGLVPPFSSFFMDVLEFYDLQMAHLTPNAIMTLAIFAHLCEMFIGVRPSLRQFRWFFTVQPVSPPSVVGGCYFQPRGPALSRYIPCVLRKKWDDWKSDWFYTPLADEARLQLRSQPPAQASSWRAPLDLGDGYDAVLDRLAGLRSQGLTGAMLYGDYLRRRIAPLQRRARGAWEYTGSVEASLIPQGVLPLCSDPDRANILTIMMAVGASEERAPRGHDGAGGSRRGEQSTPGGGRASGPRDRGPGGSRPADARGKRKQEGTPSPSPPRGGGAARVSSRRPEGAAPTPQPEGERKKKRLCKMGGTESYRGNLISPPRWSFNRPPRSEIPSRPSRHSKSGRSEAEDTATAEARRRETDRREAADRLREAEEAAQEAVRARRAEEAAREEARLRRAEESAREAEAARARQAACQAPDPTPPEATTTSEATHDEAAGAPLGPDPSGDAQDKPGPGVVPESGTSIGGPSRAASSPRRLSPMPSAAPLSAEALLQALAAANTTVLDGLSAQMEVLQAERAELDAAWARVEEGRRSVEAMVEAGRKAHRRHTSELEARRKELAEIAREVEEEREAALIATAVMNEAQDDLRLQYGSWAAELGKKLDAARGVLEAAAARKRRAAETEAASRWREEALEARATALEERACVKERDLADREAAVAIREATLAAHEAACAEEESALRLREDALTERERALEEAEAAAQRLADSLSLREAALEKQTCRNLEAAEHTIAELQGALDSSAGEVEALRLAGEVGPGMLRDAVSRLDRAGRQAGLWGGRIAKYAANHGVLAQRLSEMAGTLQRLLEELEETIKSSSRDLARGAVELVLASYQARDPDFSPWAALDEFPPGTEDDARAQVRDAADHIVHSFEGTAPRLAFALDSDVEGGDGGVDDSDDEAGDPGASK

SEQ ID NO: 182422 - protein, 77 aa, Oryza sativa
  Clone ID: PAT_MRT4530_79612C.1.pep
LISSIKGKAYIGSLRKVGAKATRAHCKETPKVWNPHKGIGDTVKHQGKAKPKEAVPLYYQHPLFGPRTLNPRPYPGV

SEQ ID NO: 182423 - protein, 1968 aa, Oryza sativa
  unsure (1)..(1968): unsure at all Xaa locations
  Clone ID: PAT_MRT4530_79613C.1.pep
MGFISGIDDFVFPPGQAFXFGSLDFITNDFGKISLLDSDSNQSGRDQISAPFGIPNSAEVYPKIISTELASNLSDKVQSTSTRPDQDDGAYPPILMKLPDDLAAVFTTRASSPHRPRRDPASAPARPSSMEVGVILQPLGTVSTEQLDGYLSSPGVDLQPTEIVEYDDFGYRYDYRNLDDFNEGFEDNYTPLYFGIFMADNETEEQRKAREAEELRVQQEAERRRLEEKRQAQERERLQREQQERERAAKEAQDRRRRALDAGRXAQELIGKQDVEGTAVFCASQQDAVAAITLLDTLLKEDTLNQANHVVNILNQTKTMIAASVPINSASVRTPTGSRVPHLRSQDYHQPSLSVAGAGSSRRSKGHDERSVHSPPERHRERRVERPRSPPCRRPVDLRDTINQRHATRGYAPHHSPDRYDDDVDGVAAFTSDLRRVDWPAGFKPTGIEKYEGTTNPESWLTAYGLAIRAAGGDSKAMANYLPVALADSAQSWLHGLPRGTIGSWAELRDHFIANFQGTFERPGTQFDLYNIIQKSGESLRDYIRRFSEQRNKISDITDNVIIAAFTKGIRHEDLVGKFGRKPPKTVKQMFEKANEYAKAEDAITTSKQSGTTWKPKKDTPTIGGSGSTNHKDRKRKPKELVANTTPSSRQRSRINTFDKIMNSQCPHHPNSNHAAKDCFVYKQFVEQYAKNARKTSDGDQSTSKKKDDEDDTPTGFQDHCKELNHIFGEPLAYESKRKQKLTEREINAVQPDTPQYLRWSETTIXFDRSDHLDRVVHPGRYPLVLXLRRSLIDGGSALNILFAKTLDDMQIPRTELKPSNSPFHGVIPGLSATPLGQITLPVTFGTGENFRTENVCFEVADFETVYHAILGRPALAKFMAVPHYTYMMMKMPGPRGVISLWSDIKQAVTCDKESCEMAQIRESTLAREEIRLAASTESALITFLQNNKDIFAWKPSDMPGIPREVIEHSLHVKEDAKPIKQRLRRFAXDRKDAIKEELTKLLAAGFIKEVLHPDXLANPVLVRKKMGQWRMCVDYTDLNKSCPKDPFGLPCIDQTRLKESDCLKTSFITPFGAYYYITMPFGLKNAGETYQRMIQRCFSTQIGRNVEAYVDDVVVKTKQKDDLITDLEETFASIRAFKMKLNPEKCIFGVPSGKLLGFMVSHRGIQANPEKISAILNMKPPSSQKDVQKLTGCMAALSRFVSRLGERGMPFFKLLMKTDNFQWGPEAQKAFEDFKKLLTTPLLLASPHPQEPLLLYVSAASHVVSTVLAVXREEEGYVQKVQXPIYFVSEVLADSKTRYPXVQKLLYGVLITVRKLSHYFQGHSITVVTSFPLGDILHNREANGRIAKWALELISLDISFKPRTSIKSQALADFVTEWIECXEDTPAEKMEYWTMHFDGSKRLSGTGAGVVLISPTGERLSYVLWIHFSVSHNVAEYEALLHGLRIAISLGIQHLIVRGDSQLVVNQVMKEWSCLDDNMTTYRQEVCKLEDKFDGLELTHVLRHNNEAADKLANFGSKXEAAPFDVFVEHLYEPTVPRKETIEATDTQDVSMIEADWREPLIRFLTKQELPQHEDEAERISRHSRLYVXHETELXKRNPSGILQRCVSLEEGRQLLKDIHSGICGNHAATRTIVSKAYRQGFFWPTAVSDVDKIVRICEGCQFFARQTYLPAQEQQTIPLSWPFAVWGLDMVGLFKKAIGGYTHLFVAVDKFSKWIEAKPVITITADKARDFFINIVHRFGVPRRIITDNGTQFTCGVFKDFCEDFGIKICYASVAHPMSNXQVERANGMVLQGIKARDFDRLQPYAGKWVEQLSSVLWSLHTTPSRATGQSPFFLVYGAEAMLPSEVEFESLRFHNFSEERYGEDRVDDLNRLEEAREAALIQSAQYLQGMCRYHNCNVXSQAFLVGDLVLRKIQTTRDRHKLSPLWEGPFIISKVTRPGSYRLKREDGTHIDNSWNIEHLCRFYA

SEQ ID NO: 182424 - protein, 84 aa, Oryza sativa
  unsure (1)..(84): unsure at all Xaa locations
  Clone ID: PAT_MRT4530_79614C.1.pep
IYLNYLATRSMISLYMAALNGKVVVAVMVVAMVVAXPGNPTKDHRPQVGPVFRTALLKDEFQALDPHMKTSWDVFRCRTTHVPT

SEQ ID NO: 182425 - protein, 110 aa, Oryza sativa
  unsure (1)..(110): unsure at all Xaa locations
  Clone ID: PAT_MRT4530_79615C.1.pep
YHAMLXRPALAKFMAVPYSTYMMMKMPGPQGVISLRSDIKLAVTCDKESCEMAQTREITLAREEIRLAASTATEGQVPATKMTKSEESNAKTKKIPLDPSDPTKTVVIGA

SEQ ID NO: 182426 - protein, 1082 aa, Oryza sativa
  Clone ID: PAT_MRT4530_79616C.1.pep
MARGSALLDGSVLPPSRIVSERQAGLPRRFMPESATGREIVMLGEARPAPDYPGRSIFFLPFAMAGLVPPFSSFFMDVLEFYDLQMAHLTPNAVMTLAIFAHLCEMFIGVRPSLRLFRWFFTVQSVSPPSVVGGCYFQPRGPVLNRYIPCALRKKWDDWKSDWFYTPLANEARLRLPSQPPAPVSSWRAPVDLGDDYDAVLDRLAGLRSQGLTGAMVYGDYLRRRIAPLQRRARSAWEYTGSEDYMRTHRGVRWDWAPDDFKIVVQRVLNLSSVEASLIPQGLLPLCCDPDRASILTIMMGVGASEEVAPKGHDGAGGSHQEESTPGGGRASGPRVGGSGSNRPTDARGKRKLGGTPPPSPPRGGGAVRASSRRPEGAAPTSQPEGERKKKRLRKMGETEPSRGNLISPPRWSFNRPPRSDVPSRSSRHPKSGQSEAEDPAAAEERRRESDRREAADRLREAEEAARETARARQAEDTAREEAARAHQAEEAAREEAARARQAEEAAREEAARVRQAEETAREEAARARQTEAMASFEAAHDKAAGASLGPTPSGDAQATASGTARDEAAGGSPGPAPSGDAQDQTGPGDIPKLSASSGGPSRVAFSPRRLFSSSSAAPLSAEPLLQALAAANTAVLDGFSAQVEALRAERAELEAAWARVEEGRRSVDTMVEVGRKAHRRHISELEARKAALAEIAREVEEEREAALIATTAMIEAQDSLRLQHGSWEAELKKKLDAAQGVLDAAAAREQRATEAEAASRRREEALEARAMALEDHAGAVETSLADREAAAAIREATLAAHEAACAEEESALRLREDALAERERALEESEAATQRLADSLSLREAAQEEQARRNLECVRAERAALEQRAANLEAREKELDARERSGGAATGESDLVARLAAAEHTVADMQRALDSSTGEAEALRLSGEIGPGMLWDAVSRLDRAGREAGLWKGQTISRSTNLEGLAPHLRRMAWAVQQLPEELEKTIKSSSRDLAQGAVELVLASYQARDPGFSPWMALEEFPPGTEDDARARVRDAANHIVQSFEGSAPRLAFAPSSDEEGDASGKDDGGDEAGDPGALE

SEQ ID NO: 182427 - protein, 480 aa, Oryza sativa
  unsure (1)..(480): unsure at all Xaa locations
  Clone ID: PAT_MRT4530_79617C.1.pep
MPESATGREIVTLGEGRPAPCYPGRSVFFLPFAMAGLVPPFSSFFMDVLEFYDLQMAHLTPNAVMTLAIFAHLCEMFIGVRPSLRLFRWFFTVQSVSPPSVVGGCYFQPRGPVLNRYIPCVLRKKWDDWKSDWFYTPLADEARLRLPSQPPGQASSWRAPVDLGDGYDAVLDRLAGLRSLGLTGAMVYGDYLRRRIAPLQRRARGAWEYTGSEDCMRTHQGVRWDWAPEDFKIVVQRVLNLSSVDASLIPQGVLPLCSDPDRASILTIMQAVGASEERAPRGHDGAGGSRRGEQSTPGGGRASGPRDGGPGSGRPADVRGKRKQEGTPPPSPPRGGGAARASSRRPEGATPTSQPEGERKKKRPRKMGGTEPSRGXNLISPPSITPPHRTPASTPSPSSTAGTTFPSRGRATTATHRLQPAAAAALVVAAPRRLRRRQRRAKLYPGLRSVSPFHHRNHPSTVHPEPPPPYAASSRVPPSP

SEQ ID NO: 182428 - protein, 85 aa, Oryza sativa
  Clone ID: PAT_MRT4530_79618C.1.pep
GRRRRRHRRRTPPPPAPPRTRPRTVPPPRTPPRTAPPHPPPPRRRHQETPRTRRAPRPPATPRGEDGRRTARTPGETPPPPTTTP

SEQ ID NO: 182429 - protein, 1074 aa, Oryza sativa
  unsure (1)..(1074): unsure at all Xaa locations
  Clone ID: PAT_MRT4530_79619C.1.pep
MARGSAPLDGSVLPPSRIVSERQAGLPRRFMPESATGREIVSLGEGCPAPRYPGRSVFFLPFAMAGLVPPFSSFYMDVLEFYDLQMAHLTPNAVMTLAIFAHLCEMFIGGAPIPSAVPPRGPVLNRYIPCVLRKKWDDWKSDWFYTPLADEARLRLPSQPPVQASNWRAPVDLGDGYNAVLDRLAGLRSQGLTGAMVFGDYLRRRIAPLQRRARGAWEYTGSEDCMRTHQGVRWDWAPEDFKIVVQRVLNLSSVEASLIPQGVLPLCSDPDRASILTIMQAVGASEERAPRGHNGAGGSRRGERSTPGGGRASGPRDGGPGSGRPADARGKRKQEGTPPPSPHRAARASSRRPEXGPRRRRSPRGSGRRNGSARWGXQNHPGETSFPLQGGRLTDPLAGSSHSHRGRIHSLNASFHSSILFVFWSFFCFSEIPSRPSCQPKSGQSEAENAATTEARRRESDRREAADRLREAEEAARGAARARQAEEAAREEARLRQAEATTSSEATRETDRQGAADRLREAEEAAQVAVRARQAEEAAREEARLRQAEAATTSEAAHDEAAGASLGPTPSGDAQDKPSPGDIPESGTSIGGPSRAASSSRRLFPTPSVAPLSAEPLLQALAVANTTVLDGLSAQVEALQAERAELDAAWARVEEGRRSVEAMVEVGRKAHRRHISELEARWKVLGEIAKEVEEERGAALIATTVMNEVQDTLRLQYGSREAELGKKLDAARGVLDAAAARERRAAETEVASRRREEALEARAMALEERACAVERDLADREAVVAIREVTLAVHEAACAEEESALRLREDTLTERERALEEAEAAAQRLADSLSLREAAQEEQARRNLESARAERATLNQRAAELEAREKELDARARSGGAAAGESDLTAHLTAAEHTIADLQGALDSSAGEVEALRLAGEVGPGMLRDAVSRLDRASRQAGLWGGRTAKYAANLGGLAQRLSEIAGTLQRLPEELERTIKSSSRDLARGAVELVLASYQARDPDFFPWTALDEFPPGTEDGARAQVRDAADHIVHSFEGSAPRLAFALNSDEKDDDGGVGDSGDEAGDPGAME

SEQ ID NO: 182430 - protein, 123 aa, Oryza sativa
  Clone ID: PAT_MRT4530_7961C.1.pep
MSGGGGGGRGMTRGLDLKLNLSLPAVARAVSPAADDESSPSSCLSSESELRQQHGGGGGQLQWSDSPEATSMVLAACPRCFLYVMLAEADPRCPKCRSPVILDFLHAGGGGGINADGRRHRRG

SEQ ID NO: 182431 - protein, 77 aa, Oryza sativa
  unsure (1)..(77): unsure at all Xaa locations
  Clone ID: PAT_MRT4530_79620C.1.pep
SNSFFHLIFSLASMSTAMLLTGWSTSVGESAXLVVDGWPSVWVRIATQWATPGQCIWSLVASLLFPDRELYMNQRKY

SEQ ID NO: 182432 - protein, 71 aa, Oryza sativa
  Clone ID: PAT_MRT4530_79621C.1.pep
CWSRCLDTAYCESGMRWSRTMTFTPIRRHRCASRCRLVPSPQQTMCLLPRSSFSRLQLHEHIYCILLCRTS

SEQ ID NO: 182433 - protein, 1316 aa, Oryza sativa
  unsure (1)..(1316): unsure at all Xaa locations
  Clone ID: PAT_MRT4530_79622C.1.pep
MGSVSGIDDFVFPPGQAFRFGNLDFITNVFGKISLLDSDSNQSGRDQVSAPFGIPNSAKIYPKLILIESASNHSDEIPSTPTTPDRDDGAYPPILMKLPDDLAAVFTTRASXSPVFMADNETEEQRQARETEARRVQQEAERRRLEEERQAQEQERLQREQQEREWAAKEAEDRRQRALDAGRXARDLIGQQDVEGTAVFRTPQQNVVAXITLLDTLLKEDALNQADQVVNILNQTKTMIATSVPVNSGSVRMSTGSRVPHLRSHDYHQPSLSIAGAGSNRRSRGHDERSVHSPPERXTGGDSKAVATYLPVALADSARSWLHGLPRGTIGSWAELRDHFIANFQGTFXPGTQFDLYNVIQKSGESLRDYIRHFSEQRNKISDITDDVIIAAFTKGIRHEDLVGKFGRKPPKTVKQMFEKANEYAKAEDSIIASKQSGPTWKPKKDVPTTGGVGSNNHKDRKHPVVRNIKLRRSLIDGGSALNILFAKTLDDMQIPRTELKPSNAPFHGVILGLSATPLGRITLPVTFGTRENFRTENVCFEVADFETAYHAILGRPALAKFMAVPHYTYMMMQMPGPRGVISLRSDIKQAVTCDKESGEMAQTREIAVAREDIRLAATTASEGEVATTKISKTGESEAKTKKIPLDPSDPTKTAVIGAELDYIFAWKPSDMPGNPREVIEHSLHVKEDAKPIKQRLRRFAQDRKDTIKEELTKLLAAGFIKDVLHPDWLANPVLVRKKTGQWRMCVDYTDLNKSCPKYPFGLPRMDQIRLKESDCLKTSFITPFGAYCYITMPFGLKNAGATYQRMIQRRFSTQIGRNVEAYVDDVVVKTKQKDDLITDLEETFASIRAFRMKLNPKKCTFRVPSGKLLGFMVSHRGIQANLEKVNAILNMKPPSSQKDVQKLTGCMAALSRFVSRLGERGMPFFKLLKKTDNFQWGPEAQKAFEDFKKLLTTPPVLASPHPQEPLLLYVSATSQVVSTVLVIEREEEGHVQKVQRPIYFVSEVLADSKTRYPQVQKLLYGVLITVRKLSHYFQADFVAEWTECQEDTLEEKMEYWTMHFDGSKRLSGTGAGVVLISPTGERLSYVLWIHFSTSHNVAEYEALLHGLWIAISLGIRRLIVRGDSQLVVNQVMKEWSCLDDNMIAYRQEVRKLEDKFDGLKLTHVLRHNNEAADRLANFGSKREAAPSDVFVEHLYEPTVPRRETAEATDTQDIAMVEADWREPLIQFLTNQELPQDKDEAERISRRSRLYIIHETELYKKSPSGIVQRCVSLEERRQXLLKDIHSGICGNYAAARTIVGKAYWQGFFWPTVVSDA

SEQ ID NO: 182434 - protein, 179 aa, Oryza sativa
  Clone ID: PAT_MRT4530_79623C.1.pep
KRDQGTIHLNCKLREAALKNRTRHGSIYHHLLESGFGPLGTSCLLSSMPAEFHLRGRNLLVLAAGSRRRRPPAGTDVAAAGNDDDLTFASSSSSPRGGASDTTSITAQRNAQRPRSGSAAAGEMGDDHVYAKARSRGGCFLSTAREEKQLRELCVIHRVSDSIITIHRWLCRRLSKTCP

SEQ ID NO: 182435 - protein, 220 aa, Oryza sativa
  Clone ID: PAT_MRT4530_79624C.1.pep
MAGVEVSKPSRRLSPKGSFKLSLPSLLACGQCKATAVSPPESPTGVGARSFSSSASSSAGTSRGRERDRLAELREIFGHFDRDMDGRISGDELREFFASMGDDSGAAAAAAAAMGLDGAAGGGESGGGGGGLMLAFEDFVRIVERKGGEEEEREDLRRAFGAFEAVKGSGRITPRGLQRVLSQLGDEASVAECEAMISAYDDDGDGELDFHDFHRMMSQD

SEQ ID NO: 182436 - protein, 1413 aa, Oryza sativa
  unsure (1)..(1413): unsure at all Xaa locations
  Clone ID: PAT_MRT4530_79625C.1.pep
HRSWLHGLPRGTIGSWAELRDHFIVNFQGTFERPXSRESLQDYIRHFSKQRNKISDITDDVIIAAFTKGIRDEDLVGKFGHKPPKTVKQMFEKANEYAKAEDAITASKQSGTTWKPKKDTRTAGGSGSNNHKDRKRKPEELVATTSPSSRQRSRINTFDKIMNSQCPHHPNSNHAAKDCFVYKQFAEQYVKNARKPSNGDQGTSKKKDDEDDAPTGFQDHRKELNHIFGGPLAYESKRKQKLTEREINAVQPNTPQYLRWLEIAIKFDRSDHPDRVVHPGRYPLVLDPVVRNVKLRRTLIDGGSALNILFAKTLVDMQIPRTELKPSNSPFHGVIPGLSATPLGQITLPVTFGTRENFRTENICFKVADFETAYHTILGRPALAKFMAVPHYTYMMMKMPGPRGVISLRSDIKQAITCDKESCEMAQTREITLAREEIRLAATTASEGEVPVTKLSKTKEGNDKTKKIPLDPSDPTKTANNKDIFAWKPSDMPGIPREVIEHSLHVKEDAKPIKERLRRFAQDRKDAIKEELTKLLAADFIKEVLHPDWLANPVLVRKKTGQWRMCVDYTDLNKSCPKDPFGLPRIDQIRLKESDCLKTSFITPFGAYCYITMPFGLKNAGATYQRMIQRCFSTQIGRNVEAYVDDVVVKTKQKDDLIADLEETFASIRAFRMKLNPEKCIFGVPSGKLLRFMVSQRGIQANPEKINAILNMKPLSSQKDVQKLTGCMAALSWFVSRLGERGMPFFKLLKKTDNFQWGPEAQKAFEDFKKLLTTPPVLASPHSQEPLLLYVSGTSQVVSTVLVVEREEEGHIRKVQRPIYFVSEVLADSKTRYPQSQALADFLAEWTECQEYTPKEKMEYWTIHFDGSKRLTGAEARVVLISPTGERLSYVLQIHFSASHNVAEYEALLHGLRIAISLGIRQLIVRGDSQLVVNQVMKEWSCLDDNMTAYRQEVRKLEDKFDGLELTHVLRHNNEAADRLANFGSKREAAPSDVFVEYLYKPTVPRKETIEAMDTQGVGMIEADWREPFIRFLTKQELPREKNEAEQISRRSRLYVIHETELYKKSPLGILQRCVSLEEGRQLLKDIHSGICAVSDADKIVRTCEGCQFFAQQTHLPAQELQTIPLSWPFAVWGLDMVGPFKKAVGGYTHLFVAVDKFSKWIEAKPIVTITPGKARDFFINIVHRFGVPNRIITDNGTQFTGGVFKDFCEDFGIKICYASVAHPMSNGQVERANGMVLQGIKARVFDRLRPYAGKWVEQLPSVLWSLRTTPSRATGQSPFFLVYGAEAMLPSEVEFESLRFRNFREERYEEDRVDDINRLEEAREAALIQSARYLQGLRRYHNRNVRSRAFLVGDLVLRRIQTTQDRHKLSPLWEGPFIIAKVTRPGSYRLKHEDGTLVNNSWNIKHLHRFYA

SEQ ID NO: 182437 - protein, 1171 aa, Oryza sativa
  Clone ID: PAT_MRT4530_79626C.1.pep
MADGGGYDLLTALPDDVLRLLLARLPSTAEAARTSVLSRRWRSLWTNLPQLRFADVTDLARVAAVLRHHSAPVLLLRIESSDPAPEKIAAVLDLVAPRLQGKLHFDIITPGNQNSAAGAAGIGAAIRIPCFEKATEVTIRLLRGIGIRLPPPSGVFARLTALSLSHCRLDDQSQRDLGGAVSSEGCPSLRELRIRDADVVSNLAIRSESLRLVQLSRLEGIRQLTISAPALTELDLYACLLWGMPMVDIFAPALGTLRWVDFFRSSSVRFRAMPNVHTLAVFVMVYGYVSHSLPLLQYFTEARDVRLSLVYSSISSNDKLLVEAVKDELPAIEILFLRMSPSTRELKLQLEDHTEGRKVPCSSGCICYKPRDWETMNLSLVFLQKVEINNLSGAECQIYFVKRLLRWTPVLKTITLSFDPSVTVSEELSKELLSFSTPEICMEIYLHRDGAREYMICSICSRHPDAFAFVIRYSIRFTMWMFEMAVCRNVSFQRFGNMTIKNRWREYFVTVLPHFIVTANSAHRNPISKTLVDVASGSANADAVAAAAPRATAPTPAKMDAKVDEMSKAYQELVAAAQAILEARRQPGGENTAAMDAAREAFEQRRKLFAVACDDADALVQSARQSIVSDPGRFVDVVTTPDEDSVRSPTRSSAESSSSSGFGALPDEVLRHILLRLPSAAAAARTSLISRRWRNLWSTLLPKLRFPGVTDLARVGAALRLRVAPVRLLRIESSDRAPDKIVAVLHLAAPLLEGKLCFDVITPAAAAAGAAGTGGAIQIPCFEKATEITIRLRGRLGIQLPPSGVFARLTALSLSHCRFDDQGQRDLGDAVSSEGCPSLRELRIRDADVVSNLAIRSESLRLVQLSRLEGIRQLTISAPALTELDLYACLLWGMPMVDIFAPALETLHWVDFFSSSSVRFVEKPNVHRLSVYGMVYGRRNTPGSLQLVQHFTEARDVHLSLVYPSGRSKESLWHVDLDIMDMSCELLVQAVKKLPAVEILSLRLLTIGHTFGPCVYHLLKMSTGIRELKLKLEDHIADGEVPCSSGCVCYEPQAWKKNNISLNFLQKVEINNLSGAERQIYFVKRLLRWTMPELKTITLSFDPLVTVSEKVSRKLLSFSTPGICMEIYLHRNGTRPGDPPSILLYAEFIVNLLQSSFLVVPCFLYNLCSKI

SEQ ID NO: 182438 - protein, 1034 aa, Oryza sativa
  Clone ID: PAT_MRT4530_79627C.1.pep
MARGSAPLDGSVLPPSRIVSERQAGLLRRFMPESATGREIVSLGEGCPAPRYPGRSVFFLPFAMAGLVPPFSSFFMDVLEFYDLQMAHLTPNAVMTLAIFAHLCEMFIGVRPSLRLFRWFFTVQPVSPPSVVGGCYFQPRGPVLNRYIPCVLRKKWDDWKSDCQPPAQASNWRAPVDLGDGYDAVLDRLAGLRSQGLTGAMVFGDYLRRRIAPLQRRARGAWEYTGSEDCMRTHQGVRWDWAPEDFKIVVQRVLNLSSVEASLIPQGVLPLCSDPDRASILTIMQAVGASEERAPRGHDGVGGSRRGERSIPGGGRASGPRDGGPGSGHPADARGKRKQEGTPPSSPPRGGGAARASSRRPEGATPTSQPEGERKKKRPRKMGGIEPSRGNLISPPRWSFNRPPRSEIPSRPSRHSKSGQSEAEDPATTEARRRESDRREAADRLREAEEAAREAALARQTEEAVREEAGLRQAEATTSSEATRETDRQEAADRLREAEEAVQVAVQARQAEETAREEARLRQAEAATTSEAACDEAAGASLGPNPSGDAQDKLGPGDIPESGTSIGGPSRAASSPRRLFPTPSVAPLSAEPLLQALAVANTTVLDGLSAQVEALQAERAELDAAWVRVEEGRRSVEAMVEVGRKAHRRHVSELEARRKVLEEIAKEVEEERGAALIATTVMNEAQDSLRLQYGSWEAELEKKLDAAQGVLDAAAARERRAAETEVASRRRDEALEARAMALEERACAVEGNLADREAAVAIREVTLAVHEAACAEEESALRLREDALTERDLSLREASQQEQARRNLEDACAERAALNQRAAELEAREKELDARAQIGGAAAGESDLTARLAAAEHTIADLQGALDSSAGEVEALRLAGEVGPGMLRDAVSRLDRAGRQVGLWGGRTAKYAANQGGLAQRLSEIAGTLQRLPEELERTIKSSSRDLTRGAVELVLASYQARDPDFSPWTALDEFPPETEDGARAQVRDAADHIVHSFEGSAPRLAFALNSDGEDDDGGVGNSGDEAGDPGASE

SEQ ID NO: 182439 - protein, 46 aa, Oryza sativa
  Clone ID: PAT_MRT4530_79628C.1.pep
MSYMVTKYEDHCMILKLNAKHIFGGPNSETYFTFTQYSQGEEELPV

SEQ ID NO: 182440 - protein, 40 aa, Oryza sativa
  Clone ID: PAT_MRT4530_79629C.1.pep
PLLSDQDPIITPSPINLTLTLLYVISSLQVLSYMLCSVNA

SEQ ID NO: 182441 - protein, 194 aa, Oryza sativa
  Clone ID: PAT_MRT4530_7962C.1.pep
MATTVTATVTTTMIATARRAAVSALGGFITNWYHNLFFAKQILCQNHPMFTMISRGEKITKLLEKVHAVKNNNHGGYYHPTTAIFKDKDHVTYIVTKHLPKVIPWKCSMKCTSLDTNPDLETPDCSKETDAKCLMLGLDVKGGSFLLMARPLGGNHRFDGVHGLKLDTVISVENEMSDKCSMKCTKDDKKLLME

SEQ ID NO: 182442 - protein, 987 aa, Oryza sativa
  Clone ID: PAT_MRT4530_79630C.1.pep
MARGSALLDGSVLPPSRIVSERQAGLPRRFMPESATGREIVMLGEGRPAPHYPGRTVFFLPFAMAGLVPPFSSFFMDVLEFYDLQMAHLTPNAVMTLAIFAHLCEMFIGVRPSLRLFRWFFTVQPVAPPSVVGGCYFQPRGPVLNRYIPCVLRKKWDDWKSDWFYTPLADEARLRLPSQPPAQASSWRAQVYLGDGYDAILDRLAGLRSQGLTGAMVYGDYLRRRIAPLQRRARGAWEYTGSEDCMRTHRGVKWDWVPEDFKVMIQRVLNLSSVEASLIPQGVLPLCSDPDRANILTIMMAVGASEERAPKGHDGASGSRKGDQSTPGGGRASGPRDGGSGGSRPADARGKRKQEGTSSPSPPRGGGAARVSSRRPEGATPTPQPEGERKKKRLRKMGGTEPSRGNLISPPRWSFNRPPRSEIPSRPSCQSKSGQSEVENAAITEARRRESDRREAADHLREAEEAAREAARARQAEEAAREEARLRQAEATTTSEAARDEAAGASLGPTPSGDAQDKPGPGDIPESGTSIGGPSRAASSPRRLSPTPSAAPLSAEPLLQALAVANTTVLDRLSAQMEALQAERAELDAAWARVEEGRRSVEAMVEVGRKAHRQHVSELEARRKVLGEIAREVEEERGAALIATTVMNEAQDDLRLQYGSWEAELGKKLDAARGVLDAAAARERRAAETEAASRQREETLEARAMALEERSCVMVMDLADCEAAVAIREVTLAAHEAACAEEESALRLREDALIERERALEEAEAAAQRLAESASLREAALEEQARRNLESARAERAALNQRAAELEAQARELDARARSGGAATGDSDLAARLAAAEYTIADLQGALDSSTGEAGLWGGRTVKYAANQGGLAQRLSEMAGTLQRLPEELEGTIKSSSRDLARGAVELVLASYQARDPDFSHWTALDEFPPGTEDGARAQVRDAANHIVHSFEGSAPRLAFTLNSDEEDDDGGVGDSGDEAGDPGASE

SEQ ID NO: 182443 - protein, 156 aa, Oryza sativa
  Clone ID: PAT_MRT4530_79631C.1.pep
MKISHGGMMHKKQYQRMSHGGAYPELPKAVEARGEHAPALVGWICRRRSPPPRRLALPSAAAPHHRCTPPRRWTPSSPPHCCCCPMRPLPPHLVTVVVVVAVGSPPHIVVVGAGGDLSLLPHLGRRTHAAATADADLEGATRRRRRRGGEAARGSC

SEQ ID NO: 182444 - protein, 366 aa, Oryza sativa
  unsure (1)..(366): unsure at all Xaa locations
  Clone ID: PAT_MRT4530_79632C.1.pep
MSSSDQNPSPTPASGTGTSVPPPGRATTVSSQLLDMGAQAVQALKPVRQMKQHACSFALYAHDLSRQVEVHHFVSRLNQDVLQCAVYDSXKPSARLIGVEYIGSDAIFESLPPEEQKLWHSHAYEVKAGLWTDVGVPEPLQSSEMARMAKTYGKLWCTWQVDRGDALPLGAPALMVSPQAVEPGRVRAELVHGRDERYKIDSSAQGLKGARVEMDEPEWINPNADYWRLHGKGFAIDVTATEMKRHAPFPNVAQKLLENGAEDIDLKKNGGPRTLIRGTALASGGIDEDARWVAVSPNSSSHAIAITVEVEIVAAVQIRRARGQSGERAGLGRGSTIGKGRRRERGDAGEEIVEEKGSAGEFGEIW

SEQ ID NO: 182445 - protein, 370 aa, Oryza sativa
  Clone ID: PAT_MRT4530_79633C.1.pep
MGAVVAAAAAEMRRTGRCGGGGGGGGEKKGAKEEGVVVAAEAAAERGRRLRLVGYDELPDFLRDNEFIRGYYRAEWPLRDAALSAFSWHNETLNVWTHLGGFLLFLALALAGAAGDAAADVAPGIIRFVVGSTNASWQTNDHSGAASHDAAAAAAAAAVLGGGHGVPRWPRMVFLVGAMTCLAISATAHLLACHSRRASVVFWQLDYAGISAMIVASFVPPVYYAFLCHRPARVAYLSAISALGALVVGALLSPPCSSPRFRRLRAALFLAMGLSGVVPALHALWLNWGHAACYLALSLEVAMGLAYAAGAWFYVSRVPEKWRPGVFDVVGHSHQIFHVLVLVGAVTHYVAVDVLLNWRETVAAACSATS

SEQ ID NO: 182446 - protein, 363 aa, Oryza sativa
  Clone ID: PAT_MRT4530_79634C.1.pep
RSTLKAGRRMTIWCKKHEAPVYDNDKEELQRNCCHTSSRSLVDAESMGTTTENVAGNSSELLKGKKVSALQASLFGKKLKIKTHKKPNYDTTRKPNGENEGYVLDHRNGSTYLHTEDKSLKTEKESATASALLKEARDLKHLSDRLKGKGDDLESANICFEACLKFLHVASLKEAAGVDSSKQGDPYGPIGLFNRFCAREFERLKKMANAALAYKCVEVAYMKAAFYKHPGAIKDSHALQAASVIAPPAESPSSSASDVDNLNNPSTIAKIVSTRGLCTSQIAKNPISRSNHHLMGLLAYVEDTNYAFEGTRNWESAFFSYLYGIEKDQDDGIALLTEVLNFSFHNVKGLLQLIRHSLECINH

SEQ ID NO: 182447 - protein, 96 aa, Oryza sativa
  Clone ID: PAT_MRT4530_79635C.1.pep
MAGRDFDTRPPHMHVTVALAPPSLSDVASVSVSFFGAIPSWMAATNPCSAPSAASLTPRLVEEIYKVAERSSMAHGMAIEQQGWRKKTRKVAACGT

SEQ ID NO: 182448 - protein, 129 aa, Oryza sativa
  Clone ID: PAT_MRT4530_79636C.1.pep
GSADGGVRRAESPCASTTAPLARPSTGGRGVEVRGAKGRPGPPRRSGSSSSPARSEGRCLPQARRPAGRHSGCLVCSNRNWCAPLSNGNLHCFAWCVSGCVHNLGLNSFFKSNCTGMVNSIVKLSPLVN

SEQ ID NO: 182449 - protein, 72 aa, Oryza sativa
  Clone ID: PAT_MRT4530_79637C.1.pep
GRREYNIFYTSTSSIYTLDSPLNITETIVLCYVQSILVDSTNITFVRHLVKYFLKLQNHVHRKYEFSDTDSC

SEQ ID NO: 182450 - protein, 534 aa, Oryza sativa
  Clone ID: PAT_MRT4530_79638C.1.pep
MARMKKKGALSRLRTATSRAATVARRKGVVVVGRAGDCGGGGEDRISDLPDDLLRLVLRRLDTRTALATGALSRRWASLCRGLDALDFLVSDVLPPRYHRCRDHLLLHHPHATKGIDADDAKVVAGRYERLSMRKMVASIDSFLDAAPDDDDPDRRRRITRLRLEFIINHHSDSINRLIATAIDAWGVKDLEILAGTPAHQLRPLDRLHIFPHQGICSDPRSSTLTSLTLANCTIPPLQGFQALRILVLQHLPSSTRPADYESVFTSCTQLRVLHLKSCMFDGVLRVNAPCSSIEQLVFDHCGGGLIILYALPKLEEMAVVQTCVWFQRGSMPCLKRLNLIFRYKHDHHSTSMPWGMNLMQIAEYTPEITELFLEFTGRGAATMDAPPSSPLPSLPNLRKLVVVVPSSWDVSWPRLLLEVAPCLEILHVHVAACEDEPRGEISWRRCESRHRKLKELGMSGFEGTGRQVYFVNFVMEVSLALKSVSLCKYAGVYWDYDIVREDRRWSSDDRADVLKQIGERVSCTDIPVQLVRE

SEQ ID NO: 182451 - protein, 95 aa, Oryza sativa
  Clone ID: PAT_MRT4530_79639C.1.pep
MDSPKHPPGGFLDPCCRELPPVPIQCRCAALSVLVPGVVPEEGARVSGMFSQPAAPGWDPPPIPGMASALTDYGRGNLQPPAGSFACLMFGGGMG

SEQ ID NO: 182452 - protein, 2735 aa, Oryza sativa
  Clone ID: PAT_MRT4530_7963C.1.pep
MSGRDNHQWPPPHRGYDPRDPAAAWQGDASTSAAAAAAAAGVNPYIYVPNPQYAPNPLNLVLNHVLHNPAALAAYHHQQQQQYHHHQQLLHSSAYHQNPTHNLQHRAAVPAPAAPAAAPSIQHRPVAPATAAAAPGQPQPKKKKKQKEPAPQAHPPPPLPPPQQQQQQQPKPQQQPGALERAQAAARKVRDEIIKAGEGVTGWKIAQAVLVALKVDSWGSLGVQLHEVPLLRDLFLVEGKVNTFIHCYVAARKIVSVYDLESEICKNESIGQFEELGLGPFLQHPLVAHYFSVPADLSLVPKLSSDEIINWLQKFMDNSKKKITVENFLDYLAEQKSVSGKENLGVRIQSLRLHISFLRQARRTEVSAVKVQGNTSGSGDGSCEKDLVKNRKFHLSKQALDERFSAITSRIKKLPGINKHIHFDSTDDETDGDSSSEGDAVDNSESKTGSAAIDNKDVDKRVSSCPYPSKTEEMERLGLKSETSKKPPLDSSKVKESSKKGYTREKRKSEENGSPTSSCKRPKKKQKVQMQKHELSPNCFLSIGKLEKFITTWKEACREHPVQQKEVLELLANYYAETPKEKKKIIKFFSEYPGIGFLNVALDYFIWAWNGENIIQILAASMTSQILHAVTHVFSLEIFALPFLVEVRAMGCGLLDSLYDAINVFNENKSSSNIPGTTTELMEVEPPPSVTADDVIRRITEFFESNRGVSRTDASQVRKSTFLRTLLDCETCITAKFSANQFSALGHGTFLEFLGKHEQHLPPKLSSFLKVGKLTHSSVEVSVLQQQIEVLLCQAGGNWLEDGEFSEDSFSKLLKRQFPTISFDIVQDKSGEGLLDSIERQRKNIEINNIMFSMSLLEKRWSGIVPGPVQDLACIVTTDGRFIRVDPSATVDQFLEGIIQCSPFQVAVKLLSLLHVYNGSTNTPISLLKCYAQRAIGIIMDNGNDLLNTKSEGKSFSARNIWSDMSKDIDDIVHLVAKFVLDCLGHLPSEFRSLAADVLLAGLRTITKNCYSAILLEATETGQLCMLHDIGLSLGVAEWAEDCRRLCLTDEIHANIEMHASSRHPSTASGVAICENSNLLNATDVDIMKRSKSLPGKDNQIVAVSKNQNVLNIVTAKLDTAEFITNKSPTLGEVNPEEATLVIETIRREEFGLDQSLSCTENSLLKKQHARLGRALHCLSQELYSQDSHLLLELVQNADDNTYVEDVEPTLAFILQDNGIVVLNNESGFSAENIRALCDIGSSTKKGSNQGYIGNKGIGFKSVFRVGSPDAPEIHSNGFHVKFDITEGQIGFVLPTAVAPYNTDSVSRMLSVEDVKDSSSFWNTCIVLPFRSKFKEGTGMHSIASMFSDLHPSLLLFLHRLKCIKFKNMMNDTLLVMRRKALGNGIVRISNGNDMMSWLVVSKKLQGTIVRNDVCSTEIAVAFTLQETQMGEYEPYLKQQPVFAFLPLRNYGLKFILQGDFVLPSSREEVDADNAWNQWLLSEFPSLFVSAQESFCALPCFQGCPGKAVTTFMSFVPLVGEVHGFFCQLPHLILSKLRLTRCMVLEGSSSRWVYPCNTLRGWDEQTRILISDSLLLEHLGLGYLSKDIIISDTLSRALGIHEYGPKVLIDIISSICRVDGCIESLGLEWLCAWFISLHLSLMHHSSKNLPLTTSPEDLLCALRKIPCIPLSDGSFSSIADGPIWLPYDVLNSKPDSRSSMLNFPVLYSNLRTIKPRLLSVSCQNKYLTEEMRANDLMDILLKMGVRKLSGHDIIKNHILVSLSNSTEANVANTMMIEYVSFIMLHLQSPCASCNFEKEEIMSELRRRPILLTNHGYKCPYDEPIHFSKEYGNSVDLCKLLLNVEIKWIELDSCYLMNRGSDSLPPFELKKWRQFFEEMGVTDFVQVVKVEKNISQADSSLAGRLSQGHHSGTPCIVYDWESPELVLDKFWDAHYSAKARIHADATHSGENIAVESSFMNSIRTFKWIASAMDEDLHYATDLFYNTEDVRSILGSVAPYAVPQVCSRSLGKDIGFKIKVSHSDALMILKSWIASQTSFSASMDQMCKFYTFVSEEKVISMKNKISMFPRKMLSSAYPSLCEFFTEACGVPKVPKTSDYVDILLGLSNAALPSEVANQLFPANYCFYNKTPFYMILSCKVFHVFARWANDLHSANDNMNDILFLEGSLQKLETTILPTLGDKWVSLHPSFGLVCWVDDNELMQHFEDYNGVNFIQFGELSYEDKQLLYGRIAALLKSLGIPALSKVIYREAIFYGTVDNREKVTVISWLLPYMQRYIYKMHRDTYVNFQQNEITKLSNLQVIVVEKLFHKYKLKERESSCKRRFKCNCLLQGNNLYATQEADSHSLFLELSRLFFDGSPDLHFANFLHMVKTMADSGTTAEQIESFIVNNQNVPDLPEHEAVWSFSSLIIADQDVDCQRTEFQSICDSQKTEIRSTCELNISKHQRTSGVASSWPPNDWKTAPDFITSHNSQFTPNQETNLNNVVPSLDLTKTQCENSEDIVGPVDLEGDWITEDDFGSENTVLAERIGATGDEPHMVMSINSANLPAYLDLETGSSANSVVDIELTEFNDKLANVSEKRDRLCIKAPDRDKLLRIGKQGEAAAHQHFVDHFGSNNVRWVNQENETGLPYDIVVTHKSGFTEYVEVKATTNSYKNWFYITLREWQFALEKGNAFTIARVVLKDSKKANDKSNVLILKNPYKLCLNKSVYLALIIPQQYQTKRRYFEGNSDLQSEVNH

SEQ ID NO: 182453 - protein, 98 aa, Oryza sativa
  Clone ID: PAT_MRT4530_79640C.1.pep
MAAGLKSNDENDNNLRSGGGLGSARWIHRHWPRLGQIPSVHGSDVDDDRASLGRGISNDGSPGMASTKSVAAIMGMVAAMMTNCNGGDFDWGLGLWFL

SEQ ID NO: 182454 - protein, 1110 aa, Oryza sativa
  Clone ID: PAT_MRT4530_79641C.1.pep
MAAEAILGAFMQTLFQKLSEATLDHFISWRGIHGKLESLSSTLSQLQAFLDDAEEKQLTDASVRGWLAKLKDIAYDLDDLLDSYSAKSMRMKQRQVIFPTKASFLSSSFLSRNLYQHRIKHKINIILERLDKIAQERDTIGLQMICEMRRYDTSERPQSSSLVDSSAVFGRERDREEMVRLVLSDNGHNSCNLCVIPVVGMGGLGKTTLMQMVYHDDRVREHFDLRIWIYVSESFDERKLTQETLEASDYDQSVASTNMNMLQETLSRVLRGKRYLLVLDDVWNEDLDKWHSYRAALISGGFGSKIVVTSRNENVGRIMGGIEPYKLQKLSDDDSWSVFKSHAFRDGDCSAHPELEAIGMEIVKKLKGLPLASKALGSLLFCKTDEEEWKDILQNDIWELPADKNNILPALRLSYNHLPPHLKQCFAFCSVYPKDYMFRREKLVKIWLALGFIRQSRKKRMEDTGNAYFNELLSRSFFQPYENNYVMHDAMHDLAKSISMEDCDHLDYGRRHDNAIKTRHLSFPCKDAKCMHFNPLYGFRKLRTLTIIHGYKSRMSQLPHGLFMKLEYLRVLDMHGQGLKELPESIGNLKQLRFLDLSSTEIETLPASLVKLYNLQILKLSDCNFLREVPQGITRLINLRHLEASTRLLSRIHGIGSLVCLQELEEFVVQKRSGHNVTELNNMDELQGQLSIRGLNNVPNGQDAVCAKLRNKEHLRTLHLIWDEDCESNPSEQQEVLEGLQPHLDLKELVIKGFPGVRFPSWLASSFLPKLQTIHICNCRSTRLPALGQLPFLKYLVIAGVTEVTQLSSEFTGFGQPKGFPALEDLLLEDMPNLSEWIFDVADQLFPQLTELGLIKCPQLKKLPPIPSTLRTLWISESGLESLPELQNNSCPSSPTSLYINDCPNLTSLRVGLLAYRPTALKSLTIAHCEGLVSLPEECFRPLISLRSLHIYECPCLVPWTALEGGLLPTSIEDIRLNSCTPLASVLLNGLSYLPHLRHFEIADCPDINNFPAEGLPHTLQFLEISCCDDLQCLPPGLHNISSLETLRISNCPGVESLPKEGLPMGLNELYIKGCPQIKQQCQEGGEYHAKIAHIRDIEIDGDVIVPEQI

SEQ ID NO: 182455 - protein, 50 aa, Oryza sativa
  Clone ID: PAT_MRT4530_79642C.1.pep
MAAKVRSGDVAGDKGIGSGEAREDDTDYERGTKVGIAQHHMEGLFACKSA

SEQ ID NO: 182456 - protein, 73 aa, Oryza sativa
  Clone ID: PAT_MRT4530_79643C.1.pep
MPDECLDNSPKVRVGADGYLPTTSWVFRRGKVLDAVVMVITEGSQPLGRPSPTSAQAWLCLGHVGPDGPFGHL

SEQ ID NO: 182457 - protein, 73 aa, Oryza sativa
  Clone ID: PAT_MRT4530_79644C.1.pep
IEISFHSMVCQHSSQDYTIFSLVLCYKVFLVAFTYYEIYGITSMQSYFMHINSSFLLDTLFLRKKRTVNLLKA

SEQ ID NO: 182458 - protein, 72 aa, Oryza sativa
  Clone ID: PAT_MRT4530_79645C.1.pep
STELTHSENVSLPIVVHLSMRRTESCHSEKTQFPLMYHRALRISPPMLREHQGCRRGDVKEGVSATANATEK

SEQ ID NO: 182459 - protein, 98 aa, Oryza sativa
  Clone ID: PAT_MRT4530_79646C.1.pep
INIESKIWEWSKGKEGNIRSLLSTLQYVLWPESGWKPVPLVDIIEGAAVKKAYQKALLCLHPDKLQQRGAAMHQKYIAEKVFDILQEAWKEFNTVTFG

SEQ ID NO: 182460 - protein, 194 aa, Oryza sativa
  unsure (1)..(194): unsure at all Xaa locations
  Clone ID: PAT_MRT4530_79647C.1.pep
KGSCRRGISSNTLWASTQIGAPNMPMAKLFLGRVLMQSVVANANANANANAKPLAFNWFLPSPDRSSIQARQDGVAMDGDKMQLSSRKTAVKCPGLGWTVWPAISRDPVRAILHGPQENRCQSVKAYGPHVTVIPSPXKGPFXPMHYVASCLTSDSRRRVDCLRAPTEFLDLSHGDAASHFSTAGMDTRDTLKR

SEQ ID NO: 182461 - protein, 415 aa, Oryza sativa
  Clone ID: PAT_MRT4530_79648C.1.pep
MACLPPRLVLASTAPVLVLLLFVPLSPCRAASGSSPSAVLLPVDKDGATQQYVTMFWQRTPSVPVKAVVDLAGAMLWVDCESGYESSSYARVPCGSKPCRLAKSAACATGCSGAASPGCLNDTCTGFPEYTITRVSTGGNIITDKLSLYTTCRPMPVPRATAPGFLFTCGATSLTKGLGAAATGMMSLSRARFALPTQVASIFRFSRKFALCLAPAESSGVVVFGDAPYEFQPVMDLSKSLIYTPLLVNPVNGRAVPLNATLLAIAKSGVGGTKLSMLSPYTVLETSIYKAVTDAFAAETAMIPRVPAVAPFKLCYDGTMVGSTRAGPAVPTVELVLQSKAVSWVVFGANSMVATKDGALCFGVVDGGVAPETSVVIGGHMMEDNLLEFDLEGSRLGFTSYLPLLQTTCNSFHLG

SEQ ID NO: 182462 - protein, 253 aa, Oryza sativa
  Clone ID: PAT_MRT4530_79649C.1.pep
MIGDEEVLRIQSAEDSCPPILVKWWDDDKQPQGIVINRQKEDEEVCLLKKALSQATRIVNVDSRGSPNFGTLEATRNQLHERSRSKDRVELAKQRDSALKDVEDRKIKSQAQFDVLVNKIKRLEGARDEVANVATPLIQAMFFNNNGPSAFDASEIFDKLRVAPDTYFKNIKKAGSMGASLALAMTKSLYPKIDVDAIDGFADGTSEEAAFDLINDAQKAAEKIAVDVVDRFQDNDLRPTGSNNSDDEKTDTD

SEQ ID NO: 182463 - protein, 83 aa, Oryza sativa
  Clone ID: PAT_MRT4530_7964C.1.pep
MGDGGEASLLEPKRLDEIDSIWSNREVGRGSMKYEAQVAFGLLFFSKQPFMDIWDAQFFQKYTVDFVQPLHENDVGVTSRVVF

SEQ ID NO: 182464 - protein, 1012 aa, Oryza sativa
  Clone ID: PAT_MRT4530_79650C.1.pep
MARGSALLDGSVLPPSRIVSERQAGLSRRFMPESATGQEMVTLGEGRPAPDYLGRSVFFLPFAMAGLVPPFSSFFMDVLEFYDLQMAHLTPNAVMTLAIFAHLCEMFIGVRPSLRLFRWFFTVQSVSPPSVVGGCYFQPRGPVLNRYIPCALRKKWDDWKSDWFYTPLADEARLRLPSQPPAQASSWRAPVDLGDGYDAVLDRLAGLRSQGLTGAMVYGDYLRRRIAPLQRRARGAWEYTGSEDFTRTHQGVRWDWAPEDFKILVQRVLNLNSVEAALIPQGILPLCSDPDRASILTIMMAVGASEERAPKGHDGAGGSRRGEQSTPRGGRASGSRDRGPGSSRPADARGKRKQGGTPPPSPPRGGGAARASSRRPEGAAPTSQPEGERKKKRPRKMGETEPSRGNLISPPKWSFNRPPRSRGGRPGAARARQAEETAREEAARARQAGETAREEAGFCQDEAMATSEAARDEAAGASLGPTPSGDAQATTSGAAGDEAAGASLGPTPSGVAQDQPGPGDIPESGTSIGGPSRVASSPRRLFPTPSIAPLNAEPLLQALAAANTTVLDGLSAQVEVLQAERAELDAAWARVEEGRRSVEAMVEVGRKAHRRHVSELETRKKVLAEIAKEVEEERGAALIATTVMNEAQDTLRLQYGSWEAELGKKLDAAQGALDAAAAREQRAAETEAASRRREEALEARAMALEERTCVVERDLADREAAVTIREATLAAHEAACAEEEFTLRLREDALTERERALEGAEAAAQQLAVSLSLREAAQEEQARRNLEGARAERAVLNQRAAELEARAKELDARARSGGAATGESDLAARLAAAERTIADLQGALDSSAGEVEALRLAGEVGPGMLWDAVSRLDCAGRQVGLWRGRTVKYAANQGGLTQRLSKMAGALQRLPEELEKTIKSSSRDLAQGAVELVLASYQARDPNFSPWMALDEFPLGTVDRARAQVRDAADHIVDSFEGSAPRLAFAPNSDKEGNAGGADDSDDEAGDPGASD

SEQ ID NO: 182465 - protein, 936 aa, Oryza sativa
  Clone ID: PAT_MRT4530_79651C.1.pep
MARGSALLDGSVLPPSRIVSERQAGLPRRFMPESATGREIVMLGEARPAPDYPGRSIFFLPFAMAGLVPPFSSFFMDVLEFYDLQMAHLTPNAVMTLAIFAHLCEMFIGVRPSLRLFRWFFTVQSVSPPSVGLTGAMVYGDYLRRRIAPLQRRARSAWEYTGSEDYMRTHRGVRWDWAPDDFKIVVQREVAPKGHDGAGGSRQEESTPGGGRASGPRDGGSGSNRPADARGKRKQGGTPPPSPPRGGGVVRASSRRPEGAAPTSQPETERKKKRLRKTGETEPSRGNLISPPRWSFNRPPRSDVPSRSSRHPKSGQPEAEDPAAAEERRRESDRREAADRLREAEEAAREAARVRQAEDTAREEAARARRAEEAAREEAARARQAEAMASSEAVHDKTAGASLGPTPSGDAQATTSGAARDKAAGASPGPAPSGDAQDQTGPGDIPELSASSGGPSRVAFSPRRLFSSSSAAPLSAEPLLQALAAANTAVLDGFSAQVEALRAERAELEAAWTRVEEGRRSVDAMVEVGRKAHRRHISELEARKAALAEIAREVEEEREAALIATTAMIEAQDSLRLQHGSWEAELKKKLDAAQGVLDAAAAREQRATEAKAACRQREEALEARAMALEDHAGAVEISLADREAAAAIREVTLAAHEAACAEEESALRLREDALAERERALEESEAATQRLTDSLSLRKAAQEEQARRNLECIRAERAALEQRAANLEAREKELDARERSGGAATGESDLVARLAAAEHTVADMQRALDSSTGEAEALRLLGEIGPGMLWDAVSRLDRAGREAGLWKGHTISHSTNLEGLAPHLRRMAWAVQRLPEELEKTIKSSSRDLAQGAVELVLASYQARDPGFSPWMALEEFPPGTEDDARARVRDAANHIVQSFEGSAPRLAFAPSSDEEGDASGEDDGGDEAGDPGALE

SEQ ID NO: 182466 - protein, 1047 aa, Oryza sativa
  Clone ID: PAT_MRT4530_79652C.1.pep
MARGSALLDGSVLPPSRIVNERHAGLPRRFMPESATGREIVMLGEGRPAPDYPGRSIFFLPFAMAGLVPPFSHFFMDVLEFYDLQMAHLTPNAVMTLAIFAHLCEMFIGVRPSLQLFRWFFTVQSVSPPSVVGGCYFQPRGPVLNRYIPCVLRKKWDDWKSDWFYTPLADEARLRLPSQPPAQVSSWRAPVDLGEEYDAVLDRLAGLRSQGLTGAMVFGDYLRRRIAPLQRRARSAWEYTGPEDYMRTHQGARWDWAPEDFKIVVQRVLNLSSAEASRLPQEILPLCTDPDRVSILTIMMGVGASEERAPKGHDGAGERRRGEQPAPGGGRASGPRVGGSGSSRPADAQGKRKLGGTPPTSPPRGGGAARASSRRPEGAAPTSQPEGERKKKRLRKMGETGPSRGNLISPPKWSFNRPPRSDVPSHSSRHPKSGQSEAEDPAAAEERRREADRREAADRLREAEEAAREAARVRQAEEAAREEAARARQAEEAAREEAARARQAEATAAAGASLGPTPSGGPQATSSEAARDEAAGASPGPTSPGDAQDQTGPGDIPEPSASSGGPSRVIFSPRRLFSSSSVAPVSAEPIMQALAAANTAVLDGFSAQVEALRAERAELEAAWARVEEGRRSVDAMVEVGRKAHRRHISELEARKAALAEIAREVEEEREAALVATTAMIEAQDSLRLQHGSWEAELKKKLDAAQGVLDAAAAREQRATEAEAALRRREEALEARAMALEDHAGAVETNLGDRKAAAALREATLAAHEAACAEEECALRLREDALAERERALEEAEATTKRLADSLSLREAAQEEQARRNLECVRAERAALEQRAADLEAREKELDARAPIGGAAAGESDLAARLAAAEHTVAEMQRALDSSTGEAEALRLAGEIGPDMLWDSVSRMDRAGRQAGLWKGQTRMRPANLEGLAPHLNRMAWVLERLPEELEKTIKSSSRDLARGAVELVLASYQARDPNFSPWMALEEFPPGTEDDARARVGDAADHIVNGFEGSAPRLAFTPSSDEEGDASGEDDGGDEAGDPGAFE

SEQ ID NO: 182467 - protein, 195 aa, Oryza sativa
  Clone ID: PAT_MRT4530_79653C.1.pep
MADPRLFPSGSNSSGDASGPGRRKYNPYHDLSTPYSYQTLYDLPTSPEFLFQEESAAQRRSWGENLTYYTGVGYLSGAVAGAALGLRDAAAGAEPGDTAKIRANRVLNSCGGGGRRLGNRLGVIGLMYAGMESAMVAARDRDDWVNSVAAGLGTGALFRAANGPRSAAVAGAIGGVLAGAAMAGKQLAKRYVPAI

SEQ ID NO: 182468 - protein, 966 aa, Oryza sativa
  Clone ID: PAT_MRT4530_79654C.1.pep
MARGSALLDGSVLPPSRIVSERQAGLPRRFMPESATGREIVTLGEGRPAPCYPGRSVFFLPFAMAGLVPPFSSFFMDVLEFYDLQMAHLTPNAVMTLAIFAHLCEMFIGVRPSLRLFRWFFTVQPVSPPSVVGGCYFQPRGPVLNRYIPCVLRKKWDDWKSDWFYTPLADEARLRLPSQPPAGGRRSAEASLIPQGVLPLCSDPDRANILTIMQAVGASEERAPRGHDGSGGSRRGEQSTPGGGRASGPRDGGSGGSRPADVRGKRKQEGTSSPSPPRGGGAARVSSRRPEGAAPTPQPEGERKKKRLRKMGGTEPSRGNLISPPRWSFNRPPRSEIPSRPSRHSKSGQSEAEDPATTEARRRESDRREAADRLREAEEAAREVARARQTEEAAREEAGLRQAEATTSSEATRETDRQEAVDRLREAEEAAQVAVRARQAEEAAREEARLHQAEATTTSEATRGEAAGASLGPTPSCDAQDKPGPGDIPESGTSIGGPSRAASSSRRLFPTPSVAPLSAEPLLQALAVEALQAERAELDAAWARVEEGRRSVEAMVEVGRKAHRRHVSELEARRKVLGEIAKEVEEERGAALIATTVMNEAQDTLRLQYGSWEAELGKKLDAARGVLDAAAARERRAAETEVASRRREEALEARAMALEERACVVERDLADREAAVAIREATLTAHEAACAEEESALCLREDALTERERDLEEAEAAAQRLADCLSLREAAQEEQARRNLESARAERVALNQRAAELEAQARELDARACSGGAATGESDLTARLAAAEHTIADLQGALDSSAGEVEALRLAGEVGPGMLRDAVSRLDRAGRQAGLWGGRTAKYAANQGGLAQRLSEIAGTLQRLPEELERTIKSSSRDLARGAVELVLASYQARDPDFFPWTALDEFPPGTEDGARAQVRDAADHIVHSFEGSAPRLAFALNSDEEDDDGGVGDSGDEAGDPGASE

SEQ ID NO: 182469 - protein, 55 aa, Oryza sativa
  unsure (1)..(55): unsure at all Xaa locations
  Clone ID: PAT_MRT4530_79655C.1.pep
YQEPYIYYHXSRSNYYSSLCPPTLRNMHEPRKCNLLGCSMISSMRPIVHGRWMEF

SEQ ID NO: 182470 - protein, 1166 aa, Oryza sativa
  unsure (1)..(1166): unsure at all Xaa locations
  Clone ID: PAT_MRT4530_79656C.1.pep
MGSVSGIDDFVFPPGQAFRFGSLDFITNDFGKISLLDSDSNQSGRGQISAPFGTPNSAEVYPKIISAELASNHSYEIQSTRTRPDQDDGSYPPILMRLPDDLAAVFTTKASPTRRPRRDPASASIQSSSREVGVIFQPLGTVSTEELDCYLSSPGVSSRPTEILEYDDFGYRYDYAITLLDTLLKEDALNQADHVVNILNQTKTMIAASVPANSASTRTPTGSRVPPLRSQDYHQPSLSVIGAGSSRRSRGHDERSVHSPPERHRERRVERPRRHPIDLRDTINQRRAARGCAPNHSPDRYDDDVDGVAAFTTNLRRVDWPAGFKPSGIEKYDGTTNPESWLTVYGLAIRAAGGDDLYNVVQKSGESLRDYIRRFSEQRNKISDITDDVIIAAFTKGIRHDDLVGKFGRKPPRTVKQMFEKANEYAKAEDAITASKQSGTTWKLKKNMPNTGGSGSTNHKDRKRKPEELVATTTPSSRQRSRVNTFDKIMNSQYPHHPNSNHAAKDCFVYKQFAEQYAKNARKTADGDQSTSKKKDDEDDAPTGFQDHRKELNHIFGGPLAYESKRKQKLTEREINAVQPDTPQYLRWSETTIKFDRSDHPXEWSTRGGTPWYXDPVVRNVKLRRSLIDGGSALSILFAKTLDNMQIPRTELKPSNAPFHGVIPGLSATPLGQITLPVTFGTRENFRTENVCFEVADFETASHAILGRPALAKFMAVPHYTYMMMKMPDIFAWKPSDMPGIPREVIEHSLHVKEDAKPIKQQLHRFAQDRKDAIKEELTKLLAAGFIKEVLHPDWLANPVLVRKKTGQWRMCVDYTDLNKSSPKDPFGLPRIDQTSFITPFGAYCYITMPFGLKNAGATYQRMIQRCFSTQIGRNDEAYVDDVIVKTKQKDDLIADLEETFASIRAFRMKLNPKKCIFGVPSGKLLGFMVSHRGIQANPEKINAILNMKPPSSQKDVQKLTGCMAALSRIAISLGIRRLIVRGDSQLVVDQVMKEWSCLDDNMTAYRQEVRKLEDKFDRLELTHVLRHNNEAADRLANFGSKREVAPSDVFVEHLYEPTVPRKETIKATDTQDGCQFFARQTHLPAQELQTILLSWPFAVWGLDMVGPFKKAVGGYTHLFVAVDKFSKWIEAKPVITIMADKARDFFINIVHRFGVPNRIITDNGT

SEQ ID NO: 182471 - protein, 825 aa, Oryza sativa
  unsure (1)..(825): unsure at all Xaa locations
  Clone ID: PAT_MRT4530_79657C.1.pep
MARGSAPLEGSVLPPSRIVSERQAGLPRRFMPESATGREVVALGEGRPAPHYLGRSVFFLSFAMAGLVPPFSSFFMDVLELYDLQMAHLTPNAVMTLAIFAHLCEMFIGVRPSLRLFRWFFTVQPVSPPSVVGGCYFQPRGPDDWKSDWFYTPLADEARLRLPSQPPAQASSWRAPVDLGDGYDAVLDRLAGLRSQGLTGAMVFGDYLRRRIAPLQRRARGAWEYTGSEDYMRTHQGGRWDWAPEDFKMVVQRVLNLSSVEASLIPQGVLSLCSDPERANILTIMQAVGASGERAPRGHDGAGGSRRGEQSTPGGGRASGPRDGGPGGSRPADARGKRKQEDTPSPSPPRGGGAVRASSRRPEGAVPTSQPEGERKKKRLRKMGGDRTMPGKPHLPPKMEVLQAERAELDAAWARVEEGQRSVEAMVEAGRKAYRRHASELEARRWELAEIAREVEEERETALIATAVLNEARDDLRLQHGSRVAELEKKLDAARGVLDAATARERRATENEAASRRREVALEARATALEERARARERDLADRETAIAIREATLAAHEAACAEEESALRLREDALTERERSLEEAEAAAQRLADSLSLREAAREEQARRNLEGARAERAALDQRAAELEARAKELDARARSGGAAAGDGDLAARLTAAEHTIADLQGALDSSAGEVEALRLXGRDRAGRQAGLWGERTAKYAANQGGXLAQRLSEMAGTLQRLPEELEETIKSSSRDLARGVVEFVLASYQARDPDFSPWAALDEFPPGTEDDARAQVRDAADHIVHSFEGTAPRLAFALDSDEEGGDGGVDDSDHEAGDPGASK

SEQ ID NO: 182472 - protein, 1054 aa, Oryza sativa
  Clone ID: PAT_MRT4530_79658C.1.pep
MARGSALLDGSVLPPSRIVSERQAGLPRRFMPESATGREIVTLGEGRPAPDYPGRSVFFLPFAMAGLVPPFSSFFMDVLEFYDLQMAHLTPNAVMTLAIFAHLCEMFIGVRPSLRLFRWFFTVQSVSPPSVVGGCYFQPRGPVLNRYIPCALRKKWDDWKSDWFYTPLADEARLRLPSQPPAQASSWRAPVDLGDGYDAVLDRLAGLRSQGLTGAMVYGDYLRRRIAPLQRRARGAWEYTGSEDFMRTHQGVRWDWAPEDFKILVQRVLNLNSVEASLIPQGILPLCSDPDRASILTIMMAVGASKERAPKGHDGAGGSRRGEQSTPGGGRASGSRDRGPGSSRPADARGKRKQGGTPPPSPPRGGGAVRASSRRPEGAVPTSQPEGERKKKREIPSRPSRHSKPGQSEAEDPAAAEARRRESDRREAADRLREAEEAAQEAARARQAEETAREEAARARQAEEAAREEAARARQAEEAVREEATRARQAEEAAREKAGFRQDEALATSEAARDEAAGASLGPTPSGDAQATASGAAGDEAAGASLGPTPSGDAQDQPGPGDIPESGTSIGGPSRMASSPRRLFPTPSIAPLNAEPLLQALAAANTTVLDGLSAQVEALQAERAELDVAWARVEEGRRSVEAMVEVGRKAHRRHVSELETRKKVLAEIAKEVEEERGAALIATTVMNEAQDTLRLQYGSWEAELGKKLDAAQGVLDAAAAREQRAAETEAASRRREEALEARAMALEERACVVERDLADREAAVTIREATLAAHEAACAEEELALRLREDALTERERALEGAEAAAQQLADSLSLREAAQEEQARRNLEGARAERAALNQRAAELEARAKELDARARSGGAAAGESDLAARLAAAEHTIADLQGALDSSAGEVEDLRLAGEVGPGMLWDAVSCLDCAGRQVGLWRGRTVKYAANQGGLAQRLSKMAGALQRLPEELEKTIKSSSRDLAQGAVELVLASYQARDPNFSLWMALDEFPPGTEDRARAQVRDAADHIVDSFEGSAPRLAFAPNSDEEGNAGGADDSDDEAGDPGASD

SEQ ID NO: 182473 - protein, 1753 aa, Oryza sativa
  unsure (1)..(1753): unsure at all Xaa locations
  Clone ID: PAT_MRT4530_79659C.1.pep
MGSVSGIDDFAFSPGQAFRFGSLNFITNDFGKISLLDSDSNQSGRDQVPVPFGILNSAEAYSKIISSESASNHSDEIQSTPPRLDQDDEPYPSILMKLPDDLAAVFTAKTSPTRRPRRAPASAPIQSRSREVGVILQPLGTVSTEELDGYLSSPGVSSRPTEILDYDDFSYHYDHGNFDNFDDSYEYNYTPLFFGVFMADNETEEQRRAREADQDRARQEAEPVFRTPQQNVIAAITLLDTLLKEDALNQAYHVVNILNQTKTMIAASIPANSASTLTPIGSRVPHFRSHDYHQPSLSITGTRSSRRSRGHDERSVHSPPERHRERRVERPRSPPRQRPVDLRNTINQRRAARGHRHSPNRYNDDVDGVAAFTNDLRRVNWPAGFKPTGIEKYDGTTNPESWLTVYGLAIRAAGGDSKAMANYLPKSGESLRDYIRRFSEQRNKISDITDDVIIAAFTKGIRHEDLVGKFGRKPPRTVKQMFEKANEYVKAEDAITASKQLGTTWKPKKDTPTAGGSGSNNHKDRKRKPEELVATTSPSSRQRPRVNTFDKIMNSQCLHHPNSNHVAKDCFVYKQFAEQYVKNARKPLDGDQGTSKKKDDKDDAPTGFQDHCKELNHIFGRPLAYESKRKQKLTEREINAVQPNTPQYLRWSEIAIKFDRSDHPDRVVHPRRYPLVLDPVVRNVKLRRTLIDGGSALNILFAKTLDDMQIPRTELKPSNAPFHGVISGLSATPLGQITLPVTFGTRENFRIENVCFEVADFETAYHAILGRPALARFMAVPHYIYMMMKMPGPRGVISLRSDIKQAVTCDKESCEMAQTHETTLAREEIRLAATTASDGEVPATKLTKTEESDAKMKKIPLDPSDPDKTANNKDIFAWKPSDMPGIPREVIEHSLHAKEDAKPIKQRLRHFAQDRKDAIKEELTKLLAAGFIKEVLHPDWLANPVLVQKKTGQWRMCVDYTDLNKSCPKDPFGLPRIDQVVDSTAGCELLSFLDCYSGYHQIRLQESNCLKTSFITPFGAYCYITMPLRLKNAGATYQRMIQRCFLTQIGRNVEAYVDDVVVKTKQKDDLIADLEETFTSIRAFKMKLNPEKCIFGVPSGKLLGFMVSQRGIQANPEKINSILNMKPPSSQKDVQKLTGCMAALSQFVSRLGERGMPFFKLLKKTDNFQWGPKAQKAFEDFKKFLTTPPVLASPHPQEPLLKLSHYFQSHSVTVVTSFPLGDILHNREANGRIAKWALELMSLDISFKPRTSIKSQALADFLAEWTECQEDMPEEKMEYWTMHFDGLKRLTGTGAGVVLISPTGERLRYVLWIHFSASHNVAEYEALLHGLRIAISLGIRRLIVRGDCQLVVNQVMKEWSCLDDNMTAYRQEVRKLEDKFDGLELTHVLRHNNEAADRLANFGSKREAAPSDVFVEHLYEPTMPRKEAVEAMDTQGEGRQLLKDIHSGICGNHAATRTIVGKAYRQGFFWPTAVSDADKIVPTCEGCQFFARQTHLPAQELQTIPLSWPFAVWGLNMVGPFKRAVGGYTHLFVAIDKFSKWIEAKPVIMITADKARDFFINIVHRFGVPNQIITDNGTQFTGGAFKDFCEDFGIKICYASVAHPMSNGQVERANGTILQGIKARVFDRLRPYDGKWVDQLPSVLWCLRTTPSRATSQSPFFLVYGAEAMLLSEVEFESLRFRNFNEEGYEEGRVDDINRLEEAREAALIQSTRYLQGLRRYHNRNVRSRAFLVGDLVLXDRHKLSPLWEGPFI

SEQ ID NO: 182474 - protein, 35 aa, Oryza sativa
  Clone ID: PAT_MRT4530_7965C.1.pep
GLIYTRDPLHRHGMDLSEIFRAFQILILNRTKYCM

SEQ ID NO: 182475 - protein, 1051 aa, Oryza sativa
  unsure (1)..(1051): unsure at all Xaa locations
  Clone ID: PAT_MRT4530_79660C.1.pep
MARGSALLDGSVLPPSRIVSERQAGLPRRFMPESATGREIVTLGEGRPAPDYPGRSVFFLPFAMAGLVPPFSSFFMDVLEFYDLQMAHLTPNAVMTLAIFAHLCEMFIGVRPSLRLFRWFFTVQSVSPPSVVGGCYFQPRGSVLNRYIPCALRKKWDDWKSDCQPPAQATNWRAPVDLGDGYDAVLDRLAGLRSQGLTGAMVYGDYLRRRIAPLQRRAWGAWEYTGSEDYMRTHQEVRWDWAPEDFKIVVQRVLNLSSVEASLIPQGVLPLCNDPDRASILAIMQVVGASEERAPRGHDGAGGSRRGEQSTPGGGRASGPRDGGPGSSRPADARGKRKQGGTLPPSPPRGGGAARASNRRPEGATLTXQPEGERKKKRLRKMGETEPSRGNLISPPRWSFNRPPXGQSEAEDPAAAEAQRRESDRREATDRLREAEEAAREAARARQAKETAREEAAQARQAEETAREEAGFRQDEAIATSEAARDEAAGASLGPTPSGDAQATTSGAAGDEVAGASLRPTPSGDAQATTSGAAGDEVAGASLGPTPSGDAQDQPGPGDIPESGTSIGGPSRMASSPRQLFPTSSIAPLSAEPLLQALAAANTAVLDGSSAQVEALQAERTELDTAWARVEEGRRSVEAMVEVGRKAHRRHVSELEARKKVLAEIAKEVEEERGAALIATTVMNEAQDTLRLQYGSWEAELGKKLGAAQGVLDAAAAREQRAAETEAASRRREEALEARAMALEERACVMERDLADREAAVTIREATLAAHESACAEEESALRLREDALTERERALEEAEAAAQRLADSLSLREAAQEDQARRNLECVRAERAALNERAAELEAREKELDARARSGGAAAGENDLAARLAAAEHTIADLQGALDSSAGEVEALRLAGEVGPGMLWDAVSRLDRAGRQVGLWRGRTVKYAANQGGLAQRLLKMAGALQRLPEELEKTIKSSSRDLAQGAVELVLASYQARDPNFSPWMALDEFPPGTEDSARAQVRDAADHIVHSFEGSAPRLAFAPNSDEEGDAGGADDSDDEAGDPGASD

SEQ ID NO: 182476 - protein, 255 aa, Oryza sativa
  unsure (1)..(255): unsure at all Xaa locations
  Clone ID: PAT_MRT4530_79661C.1.pep
MATIVNTTEEEPMLAVVRFTAELAWADAGADVAEPEVTRLCVEAQQHILAARWLDMASLMLASADLLLQSTRLPDKDKDLECILAIICNLVTKARSQDEALQIAELICAKLTHQPQDKPALRLKVLFSLYNLLGSPYAKAFVYKKALDLAAAGKAADCIIPTFKNIDSFISDWGIGKVEQRDLFLAAARILKDQKGMNKEYFNFLNKYLATFDGSADDADAIGDAKEEAVAXIIEFVKSSDLYQCDLLXMPAVAQ

SEQ ID NO: 182477 - protein, 912 aa, Oryza sativa
  Clone ID: PAT_MRT4530_79662C.1.pep
MARGSAPLEGSVLPPSRIVSERQAGLPRRFMPESATGREVVALGEGRPAPHYPGRSVFFLSFAMAGLVPPFSIFFMDILEFYDLQMAHLTPNAIMTLAIFAHLCEMFIGVRPSLRLFRWFFTVQLVSPPTVVGGCYFQPRGQVLNRYIPCVLRKKWDDWKSDWFYTPLADEARLRLPSQPPAQASSWRAAVDLGDGYDAVLDRLAGLRSQGLTGAMVFGDYLRRRIAPLQRRARGAWEYTGPEDIMRTHQGRKWDWDPEDFRMVVQRVLNLSSVEASLIPQGVLPLCCDPERANILTIMQEFGRSEAEETATAEVRRQEADRREAADRLREAEEAAQEAVRVRQAEEAAREEARLRRAGESVRETEAACARQAACQTPDPTPPEVTTTSEATHDEAAGAPLGPDPSGDTWDEPASKDAPESGTSIGGPSRAAPTPRRLSPLSSAAPLSAEPFLQALAAANSTVLDGLSAQMEALQAERAELDTAWARVEEGRRSVEAMVEAGRKAHRRHTSQLEARRRELAEIAREVEEERETALIATAMLDEARVDLRLQYGSRVAELEEKLDAARGVLDAATARERRAAENEAVSRQREEALEVRATALEERARALDAKERDLADREAAVATREATLAAHEAACAEEESALRLREDALTERERALEEAEAAAQQLADSLFLREAAREEQACRNLEGARAERAALDQRAPELEARAKELDGRVHSGGAAAGHGDLVARLAAAEHTIAELQGALDSSAGEVEALRLASEVGPGMLRDAVSRLDRAGRQAGLWGGRHAKYAANQGGLAQRLLEMTGALERLPEELEETIKSSSRDLARGAVELVLASYQARDPDFSPWAALEEFPPGTEDGARAQVRDATDHIVYSFKGTAPRLAFALDSDEEGGDDGADDSDDEADDPSASE

SEQ ID NO: 182478 - protein, 434 aa, Oryza sativa
  Clone ID: PAT_MRT4530_79663C.1.pep
MATIVNTTEEEPMLAVVRFTAELAWADAGADVAEPEVTRLCVEAQQHILAARWLDMASLMLASADLLLQSTRLPDKDKDLECILAIICNLVTKARSQDEALQIAELICAKLTHQPQDKPALRLKVIGFVTMLCFHCMRPTQGSLFSLYNLLGSPYAKAFVYKKALDLAAAGKAADCIIPTFKNIDSFISDWGIGKVEQRDLFLAAARILKDQKGMNKEYFNFLNKYLATFDGSADDADAIGDAKEEAVAAIIEFVKSSDLYQCDLLNMPAVAQLEKDEKYQLVYELLKIFLTQRLDSYLEFQSANSALLKGYGLVHEDCITKMRLMSLLDLSSRCAGEIPYHAIIDALKINDDEVEYWIVKAISCKILDCKVDQLNQVIIVSRHTERIFGMPQWQSLRSKLGVWRGNIASAINTIQANKVTDDGSQGIQGLMIR

SEQ ID NO: 182479 - protein, 154 aa, Oryza sativa
  Clone ID: PAT_MRT4530_79664C.1.pep
PGGLNLQHSIEYWLTLDLLASEQGAPMAAVAVATCDDTVGECDLDDEEEVEQMALMGAAGAAAGETGCRTLQRRLLDYLAARPEWRRSGGRDHVVLAHHPNGMLDARYKLWPCVFVLCDFGRYPPSVVGLDKDVIAPYRHVVPNFAGQRLRRLR

SEQ ID NO: 182480 - protein, 65 aa, Oryza sativa
  Clone ID: PAT_MRT4530_79665C.1.pep
TTTRRTTRTPIEEEGEQHGHSTSRSRATGLSIHIFRSSSWVICVVLHLLLTGSRCSLPLSTAKCH

SEQ ID NO: 182481 - protein, 130 aa, Oryza sativa
  Clone ID: PAT_MRT4530_79666C.1.pep
MAWLPFDGRPHIGLVVYDDARNTAVLVRRGGFTAGSLPLPLPAAQAAAAEEEGVVVGGGGGGGGARVRYCHCGVESREKEVRRPGPTQGRHFFGCGRWTAARGAACDYYVWDEAAPSTFGLNSQPSPPRE

SEQ ID NO: 182482 - protein, 982 aa, Oryza sativa
  Clone ID: PAT_MRT4530_79667C.1.pep
MAELVTSMVIGPLVSMVKEKASSYLRDKYKVMEGMEEQHEILKRKLPAILDVITDAEEQASHREGAKAWLEALKKVAYEANDIFDEFKYEALRREAKKNGHYRELGMNAVKLFPTHNRIVFRYRMGNKLRRIVQFIEVLVAEMNAFGFKYQRQALASKQWRQTDSIIDYSEKDIVERSRAAEKQKIVKALLENDDIMVLPIVGMGGLGKTTFAKLIYNEPKIQENFQLKRWVCVSDEFDLGEIASKITMTTNDKDCDKALQKLKQEVCGKRYLLVLDDVWNRDADKWAKLKTCLVQGGAGSAILTTTRLTEVARTMGSVQAHNLTTLEKSFLREIIERRAFNLQKEKPSELVDMVDKFVDRCVGSPLAARALGSVLSNRTTPEEWSTLLRKSVICDDDSEILPILKLSYEDLPSQMKQCFAFCAVFPKDYEIDVEMLVKLWMANDFIPSKDGVCLEKIGHSIFNELARRSFFQDVEETLMSKYSLEYNLCRFRKMCKIHDLMHDIALHVMREECITVTGTPNSTRLKDSSRHLFLSYDRTNTLLDAFFEKRTPLQTVLLDTIRLDSLPPHLLKYNSLRALYCRCFMGTNLIQPKHLHHLRYLNLTYSQNMVRLPEEISILYNLQTLDLSACWPLRCLPKNMKYMTSLRHLYTHGCEQLECMPPELRKLTALQTLTYFVVGNVSDSSNIGELQKLKLGGELDICNLENSNEEQANGANIEEKVDLTHLSFKWSSDIKKEPDHYENVLGALRPPAKLQLLKVRSYKGAKFPAWMTDNSTLRHLTELHLVDCPLCMEFPEFWQLHALQVLYLIGLDNLQCLCSGARFRDLPSSLQSLALFNCPKVQFLSGKLDALTCLAISGCETLRSLESCLGDLPSLTTLMIERCKSLTSLPDGPRAYSSLESLEIKYCPAMKSLPGCLKQRLDSVEEKLLSHMRSSDPREGSMGYGNHSSYQELVLNCWNQNLGNMSFVGTEICDPTLLMRP

SEQ ID NO: 182483 - protein, 440 aa, Oryza sativa
  unsure (1)..(440): unsure at all Xaa locations
  Clone ID: PAT_MRT4530_79668C.1.pep
GYLRVRCNGGLNQQRSAICNAVVAARIMNATLVLPGRXELDTNSFLYDESGFLGIYDVLHFIKTLKYDVRIAMVIPEITTNGKTKKLKAHQIRPPRDAPVTWYTTVALEKMKKYGAIYLTPFSHRLAEDIDDPELQRLRCRVNYHALRFKPHIMKTSSEIVNKLRTEGHFMSIHLRFEMDMLAFAGCIDIFTPQEQKILIKYRKEHFAEKELIYRERRLIGKCPLTPEEVGLILRSMGFDHKTRIYLASGDLFGGNRFMTPXRLCFHALEDHSTVGPGKLEENTRGLAGSAVDYMVCLLSDIFIPTYDGPSNFANNLMGHRLYYGFRTTVAPTRKALAPIFMDREEGRAARFEERVRQVMFNTYFGGPHKRVHPESFYTNSWPECFCQPNPRNRADKCPPDNIYEVLESQFQSVEGEEDIEEVKSTNQTDSTSQIEELVV

SEQ ID NO: 182484 - protein, 39 aa, Oryza sativa
  unsure (1)..(39): unsure at all Xaa locations
  Clone ID: PAT_MRT4530_79669C.1.pep
RGCRLLDGLXRCCPVTSPRRLWRRPGAGCEWFGVHHRRS

SEQ ID NO: 182485 - protein, 40 aa, Oryza sativa
  Clone ID: PAT_MRT4530_7966C.1.pep
SCLCKESKEGQFHSQCGVSKQSGLRSTLYSLRTSFLLCLS

SEQ ID NO: 182486 - protein, 1412 aa, Oryza sativa
  Clone ID: PAT_MRT4530_79670C.1.pep
MAMASSSLAAANHPLLPSKPLSCPKPLTRATPLSRALHAGAAAAARGASTSQAELRPDSKNAPALSAELRRLARVGRLPSALALLDHLSHRGVPATASAFAALLTACRSLAHARQVHAHLRVHGLDSNEFLLARLVELYLALGAREDARKVLDGLPRASSFSWNALLHGHVRRGRGQAGAAVVDGFAEMRAAGADANEYTYGCVLKSISGSAAPSMAMATATHAMLIKNAYAGAPRMLMTGLMDVYFKCGKVKPAVMVFEEMPERDVVAWGAVIAGFAHKGMKREALEHFRWMVEDGIKVNSVVLTSVVPVIGELRAWNLGREIHGFVLKKFQHRKDVGNIQAGLVDMYCKCGDMVSGRRVFYSAKKRNVVSWTALMSGYASNGRPDQALRCILWMQQEGIRPDLIAVGTVLPVCTKLKALREGKELHAYALRRWFLPNISLCTSLITMYGTCSHSDYSQRVFHVMDKKTVQAWTALVDAYLKNGDPSTAVDVFRSMLLSNRRPDAVAISRMLSACRDIGASKLGKELHGQALKLRMEPLPLVAAGLVSMYGTCGDLKAAQRVFNRIESKGSLTCTAIIEAYAINQRHKEALELFAWMLSNRFVPNNGTFDVLLRICEAAGLHDEALQIFNSMVQEYNLEASEHNFDCIIRLLTAADRTSEAHREKQINTRFFVLAFGMCLHTKLKFAYSCLLPKIFGRNSVKIGLNLIHSFKKASYVLMGCLCSKGAKDDTDATSENKTPSRNSAAASAKTATGTNDGNSAVIDGQLKENASKLQLGDGEKAIVALDVRTGSGNNAELKGLSGEHVAAGWPAWLANVAPKAVEGWVPRRADSFEKLDKIGQGTYSIVYKARDLETGNIVALKKVRFVNMDPESVRFMAREIKILRTLDHPNVIKLQGIVTSRVSQSLYLVFEYMEHDLSGLIATPGLKLSEPQIKCFVQQLLHGLDHCHKNGVLHRDIKGSNLLIDNNGVLKIADFGLAISYDPKNPQPLTSRVVTLWYRPPELLLGATEYGVAVDMWSTGCIVAELFAGKPIMPGRTEVEQIHKIFKLCGSPMDDYCKKSKVPETAMFKPQHQYRRCVAETFKVFPTSAVVLIDSLLSLDPEARGTAASALQSDFFTKEPFACDPSSLPKLPPSKEYDVRLRQEEARRQKTAALAGQGAESVRPENDNRVTNRTISGVNGEMQQQTHTSSKSNSEVFNQEDSVPGFRVEPRERPTAVQLPGYSSTWNNMEGDNDQPTVPGRACCSVRVANPCGIRKKGSSHSLIPQFGATDLRSTVEATDHNDSPDRHDENKNPEVKDGMNHGRKYRRIHHSGPLMPPGGNVEDMLKEHERQIQEAVRKARVSKPGSPALLEHEKLSWIQRRKRRVALVVLVWFCIKSMENGMIQKAMVHLASEPLPMAIHLPEQKTGKT

SEQ ID NO: 182487 - protein, 253 aa, Oryza sativa
  unsure (1)..(253): unsure at all Xaa locations
  Clone ID: PAT_MRT4530_79671C.1.pep
FSGGFGXXAPPXFFPGXKKXGKGPXNRXVSXXSPPPXPPXPLTITPPLXPXFNXFPPFPPXSPXVPXFXXPXGPGPPGXGKXPFWXKXGXRRXXKPKXXRGKXPPLRXPGXKGGGXKGXFWXGGGAXXKFSPPKXXQEKKDXGPPXXXXIWPXFPXQNXPPXFPLLXPPXGXXXXNLXXXPLFPXFGGXPPLFXKXNPFXWXXXXGGGFSPXFWGPPXSPPGGGPXXPXGFFFPFFKKKKNFFNFKKFWLPKK

SEQ ID NO: 182488 - protein, 242 aa, Oryza sativa
  unsure (1)..(242): unsure at all Xaa locations
  Clone ID: PAT_MRT4530_79672C.1.pep
LLSSVKKREKKTERKKEKSDKKTWRKKNGRKKNKYVRQKKRKKKEKIPKRIRLHRRGKKSXKNKKKTVLFQRKMNYMYRGEKKKSDKKNXAEKNRVEKKQICPTKKKAKKGKKSKKKRKKGKKKKKRPKKSSDSYSYRTIKFKKRAEKCKKKRGAAKKKKRENKSRKVHKKKKESXKKKKKNNNNKSSVSPMWQKKKRNPNEKKSDSYKRQKKSEKKXRFDSVKNRKKSQITIKAKKNRKKI

SEQ ID NO: 182489 - protein, 645 aa, Oryza sativa
  Clone ID: PAT_MRT4530_79673C.1.pep
MAAAAVADENGSPKKTKQGGFKTLPFILVQVLHLKCSIRVLRVHYSVNAANEVCDRFATAGFNANMITYLTQQLHLPLVEASNLLTNFTGTAAFTPVLGAIAADSFAGRFWTIAGGGVLYQIGMLGLVVSALVPALRPAPCGGGGAAAPCQRADGGQLAMLYLSLLCTALGSGGIRPCVVAFGADQFGLGGRRPGGEQKWSYFNLYFFSMGLAVLLALTVVVYIQETVGWGWGFGIPAIAMFVSVLSFVVGYPLYVKVKPEGSPFKRLVQVVVAAFKKIKEPVPDDAGELYHNKELDAAIAADGRLLHSDQLRQAFSMHRSLCPFTCGSLFILTQFNVFLDRAAIVTAGDIAGSGEPNLWRVSTVHRVEELKSIVRMLPLWAASITAIAAGSHNFTFAIQQARTMDRHLAPSFQIPPATMIIFTTLTMLVSLALYDRVLVPVARRYTGRRSGITYFQRMGAGFAVAALGVLAGALVEAKRRAAAAEHGLLDAPGAVVPVSVFWLVPQYALHGVGDALATVGHMEFLYDQSPESMRSSAAALFWVAGSLGNYLGTVLVTVVQSASRGEWLQDNINRGRLDYYYWLVTFLLVLNLAYYFVCFHFYTLKSFEVDAGDEAQRRRDVAGSAEGETELSAGCVVASRNGVL

SEQ ID NO: 182490 - protein, 236 aa, Oryza sativa
  unsure (1)..(236): unsure at all Xaa locations
  Clone ID: PAT_MRT4530_79674C.1.pep
KSDCKKKKASAKKNRKGEKKGGEKKKSGKKRPIPTRQKKRKKGKKKKKKRPKKSSDSYSYRTIKFKKRAEKCKKKRGAAKKKKKRATKNRRKKPNEKNRNCPIKKGKKKSDSVKKGDKKTAPKKRTSEKKNRKYKRENKSRKVHKKKKESCKKKKKNNNNKSSVSPMWQKKNRRSERKKXDSYKRQKKVKKKILDSIPXKQEKKSDSYKGEKKQKKNLKKFVRFHKKVAKKKVRKK

SEQ ID NO: 182491 - protein, 301 aa, Oryza sativa
  unsure (1)..(301): unsure at all Xaa locations
  Clone ID: PAT_MRT4530_79675C.1.pep
NKRCFHRPSKKLAKKKPGERGKKPKQGERGKKPGQKNRNCPAKKIIRFCEKNTKCFLRPCKKSPTVKKKKASAKKNRKGEKKGGEKKKAAKKDRFRRGKKNVKKVKKKRPARKKIGRVKKRAARKKKAAKKDRFRRGKKKRKKXKKKKKRPKKSSDSYSYRTIKFKKRAEKCKKKKRRSKKKKKKKRATKNRRKKPNEKNRNCPIKKGKKKSDSVKKGDKKTAPKKRTSEKKNRKXRSQKKGEKNKSRKVHKKKKXKLQKKKKNNNNKSSVSPMWQKKTVDPNEKKSDSYKRQKKVKKNTR

SEQ ID NO: 182492 - protein, 223 aa, Oryza sativa
  Clone ID: PAT_MRT4530_79676C.1.pep
MENFFEGRGFQSVVKMYYAEETFDKDVLLWWLHVDDPCQTWEDMTFVLRRKFVYSLDSVRFNWVIDPFKSIKSNKFQDSLEKVVAAAILQSLATKPTDSSKEFHEEDSQLLLKGAVLDQTVMHESDGLSMMAWEVHSDDTPVDVKGQRSNIFQTACKIQDKAEVFAALKVKKKAIAPTSKPRTALLQEGENDVTVRSKIIAYESSGENAIARTSECYWYLWEF

SEQ ID NO: 182493 - protein, 290 aa, Oryza sativa
  unsure (1)..(290): unsure at all Xaa locations
  Clone ID: PAT_MRT4530_79677C.1.pep
MGSNEQIHRDKLIIDTDPGIDDSMTILMAFRAPTVEIIGLTTIFGNTTTKNATQNALLLCERAGHPEVPVAEGSAEPLKGGEPRVADFVHGSDGLGNLFLPAPTSKKVDENAAEFMVNKVSQFPGEVSILALGPLTNVALAIKRDPSFASKVKKIVVLXGGAFFAAGNVSPAAEANIYXGDPEAADIVFTSGADVDVVGINITTQVCFTGIFLHDPVSFTALVHPEYFTFKKGVVRVETQGICTGHTLMDQGLKKWNSENPWSGYKPISVAWTVDVPNVLAFVKELLMAP

SEQ ID NO: 182494 - protein, 152 aa, Oryza sativa
  Clone ID: PAT_MRT4530_79678C.1.pep
MTAADGTVRRPRGADDSSGWGGGAWQQRRSAEEFGLAGVWRYPKPASQEMCPGWTRRGGARASGTYTRNLRRGMEEPGGCISGRRPLDATGLSPTPVAPLPHLAPATNSPPDAARLSTTPAAPPPRLALATNSPLDVARLSTMPAAPSVGHI

SEQ ID NO: 182495 - protein, 60 aa, Oryza sativa
  Clone ID: PAT_MRT4530_79679C.1.pep
PGCQFPCLEFSFLVSFMFTRREINCSGAKGNSFDCTSVHGYCLNAHLDTIVRIQKSCILA

SEQ ID NO: 182496 - protein, 116 aa, Oryza sativa
  unsure (1)..(116): unsure at all Xaa locations
  Clone ID: PAT_MRT4530_7967C.1.pep
MHKVMMAARTAIQFIHGTDQQTIPHVRLTKSRHGTNHVAIFTFHQASVFDSSPELGDITGFYMIYDEGGLHSVDVNAKFIXGKPALIHAKNVMRTPAQLDRFMPFLERDSQPNGLQ

SEQ ID NO: 182497 - protein, 431 aa, Oryza sativa
  Clone ID: PAT_MRT4530_79680C.1.pep
MADELVTPSQSSSSCFQQHKGGLVLDGYLTCLQLHMALFYWIEELEFECSVGIASRVDVRFSVDGFFSLCYECTFLKHKDQKALYSALERLKEELMLLGFISFVLSLSEGFIVGICVSENAMHLMLPCKKETYQLSEGVKLCKKKGEVPLLSVEALHQLHIFIFILGLVHVVFCATTILLGGAKIRKWKLWETEIQQEMQQKLQKRDATPGRIAHNQQGEFVSERTKGLWMKLAVVSWIIAFFKQFHDSVSKSDYKALRSAFGLDSESGISSLMEQELFRDWFFHLGLGIVHCALPLQLQAFNDYDFAESQLIKESLDSVLIQMICSYVTLPLYAIVTHMDGGIKLQGIGSGLHESVAGWALDARRKKEEQQSSHGGATTGATEGSNYRSDHFGASPRSALAPPPPPSPDLVEIVSVAAADDDGDDSRHRR

SEQ ID NO: 182498 - protein, 206 aa, Oryza sativa
  Clone ID: PAT_MRT4530_79681C.1.pep
MSSESGGRKRLSSISSAILLAAAIGVIEASALILGSEILLSIMGVSHASTMHSPAKLFLSLRALGAPAVVVSLAIQGIFRGLKDTKTPLLYSGLGNISAVLLLPFLVYSLNLGLNGAALATIASQYLGMFLLLWSLSKRAVLLPPKIEDLDFVGYIKSGGMLLGRTLSVLITMTLGTAMAARQGTIAMAAHQICLQVWLAVSLLSD

SEQ ID NO: 182499 - protein, 2014 aa, Oryza sativa
  unsure (1)..(2014): unsure at all Xaa locations
  Clone ID: PAT_MRT4530_79682C.1.pep
MGSVSGIDDVTFPPGQAFRFGSLNFITNDFGKISLLDSDSNQSGRDQVPAPFGIPNSAEAYSKIISPESASNHSDEIQSTPPRPDEDGGSYPSILMKLPDDLATVFTTKTSPTRRSRQAPASAPIQSRSREVGVILQPLGTVSTEELDGYLNSPGVSSRPTEILDYDDFGYHYDQGDLDNFDDSYEDNYTPLFFGVFMDDNETEEQRRAREADQDRARQEAECRRLEEEXQRQERERLQREQQDRERIAKEAEDRRQRALESGRRPRELIGQQDVDGTTVFRTPQQNAIAAITLLDTLLKEDALNQTDHVVNILNQTKTMIAASVPANSASTRTPTGSRVPHLRSQDYHQPSLSIAGVGSSRRSRGHDERSVRSPPERYRKRRVERPHSPHRRRPIDLRDTINQRRAARGHHSPDRYDDDVDGVAAFTSDLRRVDWPTGFKPTRIEKYDGTTNPESWLTVYSLAIHAAGGDSKAMANYLPVALADSARSWLHGLPRGTIGSWAELHDHFIANFQGTFERPGTHFDLYNIIQKSGESLRDYIRRFSEQRNKISDITDDVIIAAFTKGIRHEDLVGKFGRKPPKTVKQMFEKVYEYAKAEDAITAFKQSGITWKPKKDTPTAGGSGSNNHKDRKRKPEELVATTSPSSRQRSRVNTFDKIMNSQCPHHPNSNHVAKDCFVYKQFAEQYVKNARKPSDGDQGTSKKKDDEDDAPTGFQDHRKELNHIFGGPLTYESKRKQKLTKREINAVQPNTPQYLRWSEIAIKFDRSDHPDRVVHPGRYPLVLDLVVRNVKLRRTLIDGGSALNILFAKTLDDMQIPRTELKPSNAPFHGVIPGLSATPLGQITIPVTFGTRENFRTENICFEVADFETAYHAILGRPALAKFMAVPHYTYMMMKMPGPXGVISLRSDIKQAVTCDKESCEMAQTHEITLAREEIRLAATTASKGEVPTTKLSKTEEGDNKTKKISLDPSDPTKTAESALITFLQNNKDIFAWKPSDMPGIPREVIEHSLHVKEDAKPIKQRLRRFAQDMKDAIKEELTKLLAAGFIKEVLHPDWLANLVLVRKKTGQWRMCVDYTDLNKSCPKNPFGLPRIDQVVDSTAGCELLNFLDCYSGYHQIRLRESDCLKTSFITPFGAYCYITMPFGLKNAGATYQRMIQRCFSTQIGRNVEAYVDDVVVKTKQKDDLIVDLEETFASIRAFRMKLNPEKCIFGVPSGKLLGFMVSQRGIQANPEKINAILNMKPPSTQKDVQKLTGCMAALSRFVSRLGERGMPFFKLLKKTDNFQWGPEAQKAFEDFKKLITTPPVLASPHPQEPLLLYVSATSQVVSTVLVVEREKEGHVQKVQRPIYFVSEVLADSKARYPQVQKLLYGHLVTVVTSFSLGDILHNREANGWIAKWALELMSLDISFKLRISIKSQALADFLAEWTECQEDMPEEKMEYWTMHFDGSKRLTGTGAGVILISPTGERLSYVLWIYFSASHNVAEYEALLHGLRIAISLGIRRLIVCGDSQLVVNQVMKEWSCLDDNMTAYRQEVRKLEDKFDGLELTHVLRHNNEVADRLANFGSKREAAPSDMFVEHLYEPLYPXKSTIEALDTQGVSMIETDWREPLIKILTKQELPQDKNEAERISRRSRLYIIHKTELYKKSPSGILQCVSLEEGRQLLKDIHSSICGNHAAARTIVGKAYRQGFFWPTAVSDADKIVRTCEGCQFFVRQIHLPAQELQTIPLSWPFAVWGLDMVGPFKRAVGGYTHLFVAIDKFSNWIEAKPVITITADKARDFFINIVHRFGVPNRIITDNGTQFTGGAFKDFCEDFGIKICYASVAHSMSNGQVERSNGMVLQGIKARVFDRLRPYAGKWVDQLPSVLWSLRTTPSWATGQSPFFLVYGAEAMLPSGVEFESLRFRNFNEERYEEGRVDDINXLEEAREAALIQSTRYLQVLRRYHNRNVRSRAFLVGDLVLRKIQATQDRHKLSPLWEGPFIIVDVTRPGSYQLKREDGTLINNSWNIEHLRRFYS

SEQ ID NO: 182500 - protein, 145 aa, Oryza sativa
  Clone ID: PAT_MRT4530_79683C.1.pep
GVGNNGEGWGVYREKDKEGEKGGGAPPAGGAAQGSGRPGRKMTGRSRGDGTARGARREARRATADGARRGRRQRHSGDGDRRRWRRLGARGAHGSGLAATAARTVMATTTAEGRRIGGRRTGREGSAAEEGLGLGNAIEHLGSNE

SEQ ID NO: 182501 - protein, 967 aa, Oryza sativa
  unsure (1)..(967): unsure at all Xaa locations
  Clone ID: PAT_MRT4530_79684C.1.pep
MARGSAPLEGSVLPPSRIVSERQAGLPRRFMPESATGREVVALGEGRPAPHYPGRSVFFLSFAMAGLVPPFSSFFMDVLELYDLQMAHLTPNAVMTLAIFAHLCEMFIGVRPSLRLFRWFFTVQPVSPPSVVSGCYFQPRGPVLNRYISCVLRKKWDDWKSDWFYTPLADKARLRLPSQPPAQASSWRAPVDLGDGYDAVLDRLAGLRSQGLTGAMVFGDYLRRRIAPLQRRARGAWEYTGSEDYMRTHQGGRWDWAPEDFEMVVQRVLNLSSVEASLIPQGVLPLCSDPERANILTIMQPVGASGERAPRGHDGAGGSRRGEQSTPGGGRASGPRDGGPGGSRPADARGKRKQEDTPSPSPPRGGGAVRASSRRPEGAVPTSQPEGERKKKRLRKMGVTEPCRGNLISPPRWSFSRPPRSEIPSRPPRHSKSGRSEAEETATAEARRREAVRREAADRLREAEEAAQEAVRVRQAEEATREEARLHRAGKSAREAEATRARQAACQAPDPTPPEATTTSESTHDEAAGAPLGPDPSGDVQDEPASGDAPESGTSIGGPSRIAPTPRRLSPLPYAAPLNTEPLLQALAAANTMVLDGLGAQMEVLQAERAELDAAWARVEEGRRSVEAMVEAGRKAYRRHASELEARRRELAEIARENEAASRRREVTLEARATALEERARAREKDLADRETAVAIQEATLAAHEAACAEEESALRLREDALTERERSLEEAEAAAQRLADSLSLREAAREEQARRNLEGARAKRAALDQRAAELEARAKELDARARSGEAAAGDGDLAARLAAAEHTIADLQGALDSSAGEVEALRLAGEVGPGMLRDAVSRLDRVGRQAGLWGERTAKYAANQGGLAQRLSEMAGTLQRLPEELEETIKSSSRDLARGXAVELVLASYQARDPDFXPVRDAADHIVHSFEGTAPRLAFALDSDEEGGDGGVDDSDHEAGDPGASK

SEQ ID NO: 182502 - protein, 85 aa, Oryza sativa
  Clone ID: PAT_MRT4530_79685C.1.pep
AAHHSCLIRTPSSSAVPCSYLALLSQSTQPTTPKPTAARQRRLIRKLPYINCTALTRPAYRRNTCTRQTPLIIVPTLRETRGAYS

SEQ ID NO: 182503 - protein, 1044 aa, Oryza sativa
  Clone ID: PAT_MRT4530_79686C.1.pep
MARGSALHDGSVLPPSRIVSERHAGLPRRFMPESATGREIVMLGEGRPAPDYPGRSIFFLPFAMAGLVPPFSSFFMDVLEFYDLQMAHLTPNAVMTLAIFAHLCEMFIGVRPSLQLFRWFFTVQSVSPPSVVGGCYFQPRGPVLNRYIPCVLRKKWDDWKSDWFYTPLANEARLRLPSQPPAQVSSWRAPVDLGEDYDAVLDRLAGLRSQGLTGAMVYGDYLRRRIAPLQRRARCAWEYTGPEDYMRTHQGARWDWAPEDFKIVVQRVLNLSSVEASRIPQVILPLCSDPDRASILTIMMGVGASEERAPKGHDGAGERRRGEQSAPGGGRASGPRVGGSGSSRPADAQGKRKLGGTPPPSPPRGGGAARASSRRPEGAAPTSQPEGERKKKRLRKTGETEPCRGNLISPPRWSFNRPPRSDVPSHSSRHPKSGQSEAEDPTAAEERRRESDRREAADRLREAEEAAREAARIRQAEEAAREEAARAEEAAKEEAARARQAKATAAAGASTGPTPSGNPQATASGEARDEAAGTSLGPTSPGDAQDQTGPGDIPEPSTSSGGPSRIAFSPRRLFSSSSVAPLSAEPILQALAAANTAVLDGFNAQVEALRAERAELEAAWARVEEGRRSVDAMVEVGRKAHRRHVSEVEARKAALTEIAREVEEERAAALISTTAMVEAQDTLRLQHASWEAELKKKLDAAQGVLDSAAARERRVTETEAASRRREEALEARAMALEEHAGAVERGLTDREAAAGLREATLAAHEAACAEEESALRLREDALAERERALEEAEATTQRLADSLSLREAAQEEQARRNLECVRAERAALEQRAADLEAREKELDARARVGGAAAGESDLAARLAAAEHTVADMQRALDSSIGEAEALRLAGEMGPDMLWDSVSRMDRAGRQAGLWKGQTRMRPINLEGLAPHLNRMAWVLERLPEELEKTIKSSSRDLARGAVELVLASYQARDPNFSPWMALEEFPPGTEDDARARVRDAADHIVNGFEGSAPRLAFAPNSDEEGNTSSADDGGDEVVDSGASE

SEQ ID NO: 182504 - protein, 85 aa, Oryza sativa
  unsure (1)..(85): unsure at all Xaa locations
  Clone ID: PAT_MRT4530_79687C.1.pep
MPPRRHLRSRRAVVPEPPRRASPPCAAVEPEGVVDPSEGQDPQDFEQGKSSLFFEHVDPNCEIIFIYXNKIACNDEHPTCDYAMP

SEQ ID NO: 182505 - protein, 1047 aa, Oryza sativa
  Clone ID: PAT_MRT4530_79688C.1.pep
MARGSALLDGSVLPPSRIVNERHAGLPRRFMPESATGREIVMLGEGRPAPDYPGRSIFFLPFAMAGLVPPFSHFFMDVLEFYDLQMAHLTPNAVMTLAIFAHLCEMFIGVRPSLQLFRWFFTVQSVSPPSVVGGCYFQPRGPVLNRYIPCVLRKKWDDWKSDWFYTPLADEARLRLPSQPPAQVSSWRAPVDLGEEYDAVLDRLAGLRSQGLTGAMVYGDYLRRRIAPLQRRARSAWEYTGPEDYMRTHQGARWDWAPEDFKIVVQRVLNLSSAEASRLPQEILPLCIDPDRVSILTIMLGVGASEERAPKGHDGAGESRPGKKSAPGGGRASGPRVGGSGSSRPADAPGKRKLGGTPPPSPPRGGGAVRTSGRRPEGAAPTSQPEGERKKKRLRKMGETEPARGNLISPPRWSFNRPPRSDVPSHSSRRPKSGQSEAEDPAAAEERRRESDRREAAARLREAEEAAREAARVRQAEEAAREEAARARQAEEAAQEEAARARQAEAAAAAGASLGPTPSGGPQATSSEAARDEAAGASPGPTSPGDAQDQTGPGDIPEPSASSGGPSRVAFSPRRLFSSSLVAPVSAEPIMQALAAANTAVLDGFSAQVEALQAERAELEAAWARVEEGRRSVDAMVEVGRKAHRRHISELEARKAALAEIAREVEEEREAALVATTAMVEAQDTLRLQHASWEAELKSKLDAAQGVLDSAAARERRATEAEAASRRREEALEARAMALEEHAGAVERSLMDREAATALREATLAAHEAACAEEESALRLREDALAERERALEEAEATTQRLADSLSLREAAQEEQARRNLESVRAERAALEQRAAGLEAREKELDARAPISGAAAGESDLAARLAAAEHTVADMQRALDSSTGEAEALRLAGEIGPDMLWDAVSRMKRAGRQAGLWGGQTSVPPTNLEGLAPHLNRMAWVLERLPEELEKTIKASSRDLARGAVELVLASYQARDPNFSPWMALEEFPPGTEDDARARVGDAADHIVNSFEGSAPRLAFAPSSDEEGDASSEDGGGDEAGDPGAYE

SEQ ID NO: 182506 - protein, 285 aa, Oryza sativa
  unsure (1)..(285): unsure at all Xaa locations
  Clone ID: PAT_MRT4530_79689C.1.pep
XXHPRGGDPPGRNKPTKKRRGEERSQETQKVINSKYSLKYHFFRSSMGIEIVPQSFNEELDSTVTITPASDNIDVSDDTSVPHPSEVPATVNVVLVEQSDNSISEPLESDGANGATENVVPLASEKSTDNNDAMNSEPVNSEPYEASPANNAEKGDVMQQSDENNGDKQENQDLLSPMAETAGSDSTSVTSMEDVQEAKDAAPSETDDATGHPPDLSNDKACAGNGNGNVFQNAKCVLTTSTKKMKRSASATTRKSLQATNTDEGNASTLTNSKSSNGRTTTVPA

SEQ ID NO: 182507 - protein, 1325 aa, Oryza sativa
  Clone ID: PAT_MRT4530_7968C.1.pep
MVITRSNGNGPNNPNNNNEGNPTLAQVLAQQTQLMNMMMQQLQNQQNQGNNHAPPQNKLAEFLRVRPPIFSSTTNPVEAGDWLHAIEKKLDLLQCTDQEKVSFASHQLHGPASEWWDHFRLNRTTAEPITWLEFTAAFRKTHIPSGVVSLKKKEFRSLTQGSRSVTEYLHEFNRLARYAPEDVRNDEERQEKFLEGLNDELSYPLMAGDYPDFQKLVDKAIRQEDKYNRMEQKKRRIAQFKTQPGNNQRPRLTLGPQSMPHGGSSSVVRPRRQFFNNNAGNNIRNQAPRPVAVSTQQQPAKREQGSKPVVCFNCGDPGHYADKCPKPRRVKVVPAQSNSTASASKARVNHVAAAEAQDAPDVILESKDLDVILGMDWLARHKGVIDCANRKVTLTSNDGRVVTVHALSSESLRSRLNQITLEEIPIVREYPDVFPDDLPGMPPKRDIEFRIDLVPGTTPIHKRPYRMAANELAEVKRQVDDLLQKGYIRPSSSPWGAPVIFVKKKDHTQRMCVDYRALNDVTIKNKYPLPRIDDLFDQLKGATVFSKIDLRSGYHQLRIKEEDIPKTAFTTRYGLFECTVMSFGLTNAPAFFMNLMNKVFMEYLDKFVVVFIDDILICSRTKEEHEEHLRLVLEKLREHQLYAKFSKCEFWLSEVKFLGHVISAGGVAVDPSNVESVTNWKQPKTVSEIRSFLGLAGYYRRFIENFSKIAKPMTRLLQKDVKYKWSEECEQSFQELKNRLISAPILILPDPKKGFQVYCDASKLGLGCVLMQDGKVVAYASRQLRPHEKNYPTHDIELAAVVHALKIWRHYLFGTRTEANVVADALSRKGYCNATEGRQLPLELCKEFERLNLGIVSRGFVAALEAKPTLIDQVREAQINDPDIQEIKKNMRRGKAIGFLEDEQGTVWLGERICVPDNKDLKDAILKEAHDTLYSIHPGSTKMYQDLKERFWWASMKREIAEYVAVCDVCQRVKAEHQKPAGLLQPLKIPEWKWEEIGMDFITSLPRTSSGHDSIWVIVDRLTKVAHFIPVKTTYSGSRLAELYMARIVCLHGVPKKIVSDRGSQFTSNFWKKLQEEMGSKLNFSTAYHPQTDGQTERVNQILEDMLRACALDFGGSWDKNLPYAEFSYNNSYQASLQMAPYEALYGQKCRTPLLWDQTGERQVFGTDILREAEEKVKIIQERLRVAQSRHKSYADNRRRDLSFEEGDYVYLRVTPLRGVHCFHTKGKLSPRFVGPYKIVSRRGEVAYQLELPQSLAGVHNVFHVSQLKKCLRVPTEEANLEQIEVQEDLTYVEKPIRILETDERRTRNQVIRFCKVQWSNHSEE

SEQ ID NO: 182508 - protein, 58 aa, Oryza sativa
  Clone ID: PAT_MRT4530_79690C.1.pep
SVLLFNRQDSSKWQSDSFGDLTRSSCKQKESKTTDKVNVSWKPWHARVVPHWNICSRN

SEQ ID NO: 182509 - protein, 907 aa, Oryza sativa
  Clone ID: PAT_MRT4530_79691C.1.pep
MAPLPAYEGRERGRQRRGTGNKPRGPVLNRYIPCVLRKKWDDWKSDWFYTPLANEARLQLPSQPPAQFSSWRAPVDLGEDYDAVLDRLAGLRSQGLTGAMVYGDYLRRRIAPLQRRARSAWEYTGPEDYMRTHQGARWDWAPEDFKIVVQRVLNLSSVEASRIPQEILPLCSDPDRASILTIMMGVGASEERTPKDHDGAGESRRGKQSAPGGGRASGPRVGGPGSNRPADAQGKRKLGGTPPPSPPRGGGAVRASSRRPEGVAPTLQPEGERKKKRLRKMGETEPSRGNLISPPRWSFNRPPRSDAPSHSPRHPKSGQSEAEDPAAAEERRRESDRREAADRLREAEEAAREAARVRQAEEAAREEAARARQAEEAAKEEADRARQAEATAAAGASLGPTPSGGPQATSSEAARDEAAGASPGPTSPGDAQDQTGPGDIPEPSASSGGPSRALAAANTAVLDGFNAQVEALRAERAELEAAWARVEEGRRSVDAMVEVGRKAHRRHVSELKARKAALAEIAREVEEERAAALISTTAMVEAQDTLRLQHASWEAELKKKLDAAQGVLDSAAARERRVTETEAASRRREEALEARAMALEEHAGAVERGLTDREAAAGLREATLAAHEAACAEEESALRLREDALAERERALEEAEATTQRLADSLSLREAAQEEQARRNLECVRAERAALEQRAADLEAREKELDARARVGGAAAGESDLAARLAAAEHTVADMQRALDSSIGEAEALRLAGEMGPDMLWDSVSRMDRAGRQAGLWKGQTRMRPINLEGLAPHLNRMAWVLERLPEELEKTIKSSSRDLARGAVELVLASYQARDPNFSPWMALEEFPPGTEDDARARVRDAADHIVNGFEGSAPRPAFAPNSDEEGNTSSADDGGDEAVDSGASE

SEQ ID NO: 182510 - protein, 249 aa, Oryza sativa
  Clone ID: PAT_MRT4530_79692C.1.pep
MAAGSGARAVGDNGGGGVGGGPPAPASLPLPPRHPSSPRRRTPASPIGLLPTRRLRCQYSTGSLPESAAGHAVATPRSPSRRPGADAADEGEVLGLSSAAAVWMGAQARSGCEGNAESMAVALSACPYAGDLALAKGEATHGCGVMKGVIHGYVFITNSLVCMYGKLGEMDNAKKAFRDATEKNIVTWNTLITSYATAGLCDEALDVLAQMEQIGGTVAPNVVSWSAVISGFGKRKRERMRERRIRKEE

SEQ ID NO: 182511 - protein, 133 aa, Oryza sativa
  unsure (1)..(133): unsure at all Xaa locations
  Clone ID: PAT_MRT4530_79693C.1.pep
MRRRCLLRGRGFRVVDDDRPEKPRRHGVTEMRSPFYAFRPRAXHALQEILNSLGPFGDGWKFTGGSEGLMGKELRREITDLPHELDIYVSTGXDWAECLLRQGPSFFNQYVEESMGLRFDXIELNAGSIKLPE

SEQ ID NO: 182512 - protein, 1362 aa, Oryza sativa
  unsure (1)..(1362): unsure at all Xaa locations
  Clone ID: PAT_MRT4530_79694C.1.pep
MQTSRTPTVPSAVADESTAAIPSSFAPSLVHAQASISAAAGVGSGGSATDGAPGPSAMGFVSGIDDSVFPPRQVFQFGSLDFITNDFGKISLLDSDSNQSGRDQVSAPFGIPNSAEVYPKIISTELASNHSDEILSTSTRPDQDDGAYPPILMKFPDDLAAVFTTRASSPRRPRRDPASAPARPSSKEVGVILQPLGTVSMEQLDGYLSSPGVDSRPTEIVEYEDFGYRYDYRNLDDFDEAEELHAQQEAERRQLEEERQAQEREWLQPITLLDTLLKEDALNQANHVVNILNQTKTMIAASVPVCKRPHADWRPVDLRDTINQRRAARGYAPHHSPDRYDDDVDGVAAFTSDLRRVDWPASFKPTGIEKYDGTTNLESWLTVYSLAIRVAGGDSKAMANYLPVALANSARSWLHRLPRGTIGSWAELRDHFITNFQGTFERPGTHFDLYNVIQKSGESLRDYIRRFSKQRNKISDITDDVIITAFTKGIRHEDLVGKFGRKPPKTVKQMFEKANEYAKVEDAITAFKLSGTTWKPKKDTPTTRGSGTPPSPPSLQPCSAAVSVVVVAREGHRRDRLVVAVLVRSFAAAEDHRNTLAAVDPKFAAASSSSPSPSVDLPPSLWSPFAEQYAKNARKASNRDQSTSKKKDDEDDAPTGFQDHRKELNHIFGGPLAYESKRKQKLTEREINAVQPDTPQYLRWSETTIKFDRSDHPDRVVLPGRYPLVLDLVVRNVKLRRSLIDEGSALNILFAKTLDDMQIPRTELKPSNAPFHGVIPGLSATPLGQITLPVTFGTRENFRTENVCFEVADFETAYHAILGRLALAKFMAVPHYTYMMMKMPGPRGVISLRSDIKQAVTCDKKSCEMAQIREIMLAREEIRLAASTASEGELLATKMPKSGESDAKTKKIPLDPFDPTKTAVIGAELDYAKPIKQRLRRFAQDRKDAIKEELTKLFVAGFIKEVLHPNWLANPVLVRKKTGQWRMCVDYTDLNKSCPKDPFGLPRIDQIGRNVEAYVDDVVVKTKQKDDLITDLEETFASIRAFRMKLNPEKCIFGVPSGKLLGFMVSHRGIQANSVKINAILNMKPPSSQKDVQKLTGCMAALSRLXASPHPQEPLLLYVSATSQXDFIAEWTECQEDTPAEKMEYWTMHFDGSKRLSGTRAGVVLISPTGERLSYVLWIHFSASHNVAEYEALLHGLRIAISLGIRRLIVRGDSQLVVNQVMKEWSCLDNNMTAYRQEVRKLEDKFDGLELTHVLRHNNEAADKLAKFGSKREAAPSDVFVEHLYEPTVPRKETINATDTQDELQTIPLSWPFTVWGLDMVGPFKKAVGGYTHLFVAVDKFSKWIEAKPVITITXDKARDFL

SEQ ID NO: 182513 - protein, 787 aa, Oryza sativa
  unsure (1)..(787): unsure at all Xaa locations
  Clone ID: PAT_MRT4530_79695C.1.pep
MHLAAADHPHRGGGGRAALGLGLGHLAAAALRREHRRRALAGGAVLASALLLVATPRLRHSPALHLFADMRNLLGVPNTLNVLTAYPLLLAGVPGLVLCLCGSGCFGISLRWEALGWFLFYAGNVAAAFGSAYYHLKPDDDRLIWXQVAGFYLLARFEGLADRKXHRPRGARHLSTAAGDQPIHHHHPPTTSAVPWNRLLRAHLGRSRGDLALALYRRMRALSPALPNSYTLPLALRAAASPRVASAVHAHALHLGLHAQHDVAGQILAAYSRLGRAADARRVFDAMPPGRTTFHWNALISAYSSGCDPDAARDAFARMAAAGARPDAVTWTALLSAHARSGKHADVLQLFGEMQRSGCEGNAESMAVALSACPYAGDLALAKGKAIHGCGVVKGLMHGYLFVTNSLICMYGKLGEMDDAKKAFRDATAKNTVTWNTLITSYAAARLCDKALDVLAQMEQIGGTVAPNVVSWSAVIGGFASSGDTDRALELFRRMQQQWLSPNVVTMATVLSACVDLLALRLGRELHGHAMKAELDRHSLVENGLINMYAKCGKVSGARKVFDGMKTRDLISWNSMLAGYGMHGLCDEALALFTDMAGATVEPDGVTFVAVLSACGHAGRVTEGRRLFDRMVRAHKISPSMEHYTCMVYLLGRAGLLRDASELVETMPVRPDLCVWGALLNSCRIHGDAAMAEATIANVLQSEDQSTGNHMLITNLYAMCGMWDESKKVRVMTKEAGLRKNPGQSWIEVDNKVVAFAAGSAPPNLTGAEDVFGMLDDLYAEMEDEQR

SEQ ID NO: 182514 - protein, 1030 aa, Oryza sativa
  unsure (1)..(1030): unsure at all Xaa locations
  Clone ID: PAT_MRT4530_79696C.1.pep
MARGSALHDGSVLPPSRIVSERHAGLPRRFIPESATGREIVMLGEGRPAPDYPGRSIFFLPFAMAGLVPPFSSFLMDVLEFYDLQMAHLTPNAVMTLAIFAHLCEMFIGVRPSLQLFRWFFTVQSVSPPSVVGGCYFQPRGPVLNRYIPCVLRKKWDDWKSDWFYTPLANEARLRLPSQPPAQVSSWRAPVDLGEDYDAVLDRLAGLRSQGLTGAMVYGDYLRRRIAPLQRRARSAWEYTGPEDYMRTHQGARWDWAPEDFKIVVQRVLNLSSVEASRIPQEILPLCSDPDRASILTIMMGVGASEERAPKGHDGAGERRRGEQSAPGGGRASGPRVGGSGSSRPADAQGKRKLGGTPPPSPPRGGGAARASSRRPEGAAPTSQPEGERKKKRLRKTGETEPCRGNLISPPRWSFNRPPRSSRPKIQRPQRSGGENLTGVKPQTAFGKLKRPPGRPPGFAKRRKLLGRRPPGLRKPLRRRPPGLARLRQQLLLARQLGPLPRATLRXTASGEARDEAAGTSPGPTSPGDAQDQTGPGDIPEPSTSSXGGPSRIAFSPRRLFSSSSVAPLSAEPILQALAAANTAVLDGFSAQVEALRAERAELEAAWARVEEGRRSVDAMVEVGRKAHRRHVSELEARKAALTEIAREVEEERAAALIATTTMIEAQDALRLQNASREAELKEKLDAAQGVLDSAAARERRVTETEAASRRREESLEARAMALEEHAGAVEKGLTGREAAATLREATLAAHEAACAEEECALRLREDALAERERALEEAEATTKRLADNLSLREAAPEEQARRNLECVRAERAALEQRAADLEAREKELDARAHIGGAAAGESDLAARLAAAEHTVADMQRAPFSTGEAEALRLAGEIGPDMLWDAVSRLKRAGRQAGLWKGQTTVPPTNLEGLAPHLNRMAWVLEQLPEELEKTIKSSSRDLARGAVELVLASYQARDPNFSPWMALEEFPPGTEDDARARVGDAADHIVNGFEGSAPRLAFAPSSDEEGDASGEDDGGDEAGDPGALG

SEQ ID NO: 182515 - protein, 346 aa, Oryza sativa
  unsure (1)..(346): unsure at all Xaa locations
  Clone ID: PAT_MRT4530_79697C.1.pep
MTELGGPHRETAQAPLCRFGRGPWVSYPEPAGACRVAMEFPSSTSPSPSPSSGQHQQQPTTPRRQLQGPRPPRLNVRMESHAIKKPSSGAAAAAAQAQAHQLPAQAQARREQQQPPPRAPVIIYDAXSPKIIHAKPNEFMALVQRLTGPGSGPPAPPHQGEAQAQDYPMMDEAAAQQFFPPELLLSPSAAMSPAARLATIERSVRPMPEPAPEYVDITNGGGGGGVDDGGLAAILGSIRPGILSPLPSSLPPAAVPGQFSPLPFDASCISWLNELSPILRAASAGAASSGSGGGGSGGNTSNGGAARPPPSYYADPFVPSPRHLLATPTVPSPATCAELFSNLPDL

SEQ ID NO: 182516 - protein, 85 aa, Oryza sativa
  Clone ID: PAT_MRT4530_79698C.1.pep
DPCFRGGRENDGSRTLDGPRHDVHHPAQVSGYLVPHPSRRHPLFSGVSGRYCRRDGWRIKDAHYPHTRTRPHALFSEEEAVHSFS

SEQ ID NO: 182517 - protein, 1027 aa, Oryza sativa
  Clone ID: PAT_MRT4530_79699C.1.pep
MARGSALLDGSVLPPSRIVSERHAGLPRRFMPESATGREIVMLGEGRPAPDYPGRSIFFLPFAMAGLVPPFSSFFMDVLEFYDLQMAHLTPNAVMTLAIFAHLCEMFIGVRPSLQLFRWFFTVQSVSPPSVVGGCYFQPRGPKSDWFYTPLANETRLRLPSQPPAQVSSWRAPVDLGEDYDAVLDRLAGLRSQGLTGAMVYGDYLRRRIAPLQRRARSAWEYTGPEDYMRTHQGARWDWAPEDFKIVVQRVLNLSSVEASRIPQEILPLCSDPDRASILTIMMGVGASEERAPKGHDGAGERRRGEQSAPGGGRASGPRFGGSGSSRPADAQGKRKLGGTPPPSPPRGGGAARASSRRPEGAAPTSQPEGERKKKRLRKTGETEPCRGNLISPPRWSFNRPPRSDVPSHSSRHPKSGQSEAEDPAAAEERRRESDRREAADRLREAEEAAREAARIRQAEEAAREEAARAEEAAKEEAARARQAEATAAAGASTGPTPSGNPQATASGEARDEAAGTSPGPTSPGDAQDQTGPGDIPEPSTSSGGPSRIAFSPRRLFSSSSVAPLSAEPILQALAAANTAVLDGFSAQVEALRAERAELEAAWARVEEGRRSVDAMVEVGRKAHRRHVSELEARKAALTEIAREVEEERAAALIATTTMIEAQDALRLQNASREAELKEKLDAAQGVLDSAAARERRVTETEAASRRREESLEARAMALEEHAGAVEKGLTDREAAAALREATLAAHEAACAEEECALRLREDTLAERERALEEAEATTKRLADSLSLREAAQEEQARRNLECVRAERAALEQRAADLEAREKELDARAHTGGAAAGESDLAARLAAAEHTVADMQRALDSSTGEAEALRLAGEIGPGMLWDAVSRLKRAGRQAGLWKGQTTVPPTNLEGLAPHLNRMAWVLEQLPEELEKTIKSSSRDLARGAVELVLASYQARDPNFSPWMALEEFPPGTEDDARARVGDAADHIVNGFEGSAPRLAFAPDSDEEGNASSASDGGNEAGDLGASE

SEQ ID NO: 182518 - protein, 250 aa, Oryza sativa
  unsure (1)..(250): unsure at all Xaa locations
  Clone ID: PAT_MRT4530_7969C.1.pep
MSRVSTSWGFVXSRVNKAEGRGARTGSTGVGPTRQPHGPWWTGCTRLTPVGAVGPTRQPHPRARAADGRAPHGSRGARPKAATPAQPTGGGAPAPRWSPPVTTGAAERRPREGREGGSETAVHGSPRVDGGDGNGDRSGGRRRRGSGRRGRRRSGGRRAKRRGGRGRRGCGEPEEGDAETGGGPGRRRRRTGARRRRRRERATARARFRRRERAARGGTGHRGCGEGLNRAGAREGGRGREETGAGGRPP

SEQ ID NO: 182519 - protein, 56 aa, Oryza sativa
  unsure (1)..(56): unsure at all Xaa locations
  Clone ID: PAT_MRT4530_796C.1.pep
FFFFFFFFXNLXXXPFXFFLSLLSNFPXAKGTHTXTHTDKHTTNSSPNSHXXSPAA

SEQ ID NO: 182520 - protein, 1101 aa, Oryza sativa
  unsure (1)..(1101): unsure at all Xaa locations
  Clone ID: PAT_MRT4530_79700C.1.pep
MARGSALLDGSVLPPSRIVSERQAGLPRRFMPESASGREIVTLGEGRPAPDYPGRSVFFLPFAMAGLVPPFSSFFMDVLEFFDLQMAHLTPNAVMTLAIFAHLCEMFIGVRPSLRLFRWFFTVQSVSPPSVVGGCYFQPRGPVLNRYIPCVLRKKWDDWKSDWFYTPLADEARLRPPSRPPSQPPAQASSLRAPVDLGDGYDAVLDRLAGLRSQGLTGAMVYGDYLRRRIAPLQRRARGAWEYTGSEDYMRTHQGVRWDWAPEDFKIVVQRVLNLSSVEASLIPQGILPLCSDPDRASILTIMQAVGASEERAPRGHDGAGGSRRGEQSTPGGGRASGPRDGGPGSSRPADARGXRKQGGTPPPSPPRGGGAARANSRRPEXGPRRRRSPRGSERRSGSARWEGQNHPGETLFPLQGGRLTDPLAGSSHAHRGCIHPLNASFHSPILFIFWSFFCFSEIPSRPSRHSKSGQSEAEDPAAAEARRRESDRREAADRLREAEEAAREAARARHAEEAAREEARLRQAEATMSSEATRDTDRQEAADRLREAEEAAQVAVRARQAEEAAREEVRFHQDEAATTSEAARDEVAGASLGPTPSGDARDQPGPGDIPESGASIGGPSRAASSPRRLSPTPSAAPLSADPLLKALAVANTTVLDGLSAQMEALQAERAELDATWARVEEGRRSVEAMVEVGRKAHRRHVSELEARQKVLGEIAKEVEEERGAALIATTVMNEAQDALRLQYGSWEAELGKKLDTARGVLDAAAAREQRAAETEAASRQREETLEARAMALEERSCVMVKDLADREAAVAIREVTLTAHEAACAEEESTLRLREDALIERERALEEAEVAAKRLAESASLREAALEEQARRNLEGARAERAALNQRAAELEAQARELDARARSGGAAAGESDLVARLAAAEHTIADLQGALDSSAGEVEALRLAGEVGPGMLRDAVSRLDRAGRQAGLWGGRTAKYAANQGGLAQRLSEMAGTLQRLPEELERTIKSSSRDLARGAVELVLASYQARDPDFSPWTALDEFPPGTEDGARAQVRDAADHIVHSFEGSAPRLAFALNSDEEGDDGGVGDSGDEAGDPGASE

SEQ ID NO: 182521 - protein, 922 aa, Oryza sativa
  unsure (1)..(922): unsure at all Xaa locations
  Clone ID: PAT_MRT4530_79701C.1.pep
MARGSAPLDGSVLPPSRIVSERQAGLPRRFMPESATGREVVALGEGRPAPHYLGRSVFFLPFAMAGLVLNRYIPCVLRKKWDDWKSDWFYTPLADEARLRLPSQPPAQASSWRATVDLGDGYDAVLDRLAGLRSQGLTGARVFGDYLRRWVAPLQRRARGAWEYTGPEDYVRTHQGRKWDWDPEDFRTVVQQMLNLSSVEASLIPQGVLPLCCNPERAKILAIMQVVRASGERAPRGHDGAGGSRRGEQSTPGGGRASGPRDGGPGGIRPADARGKRKQEGTPPPSPPRGGGAVRASSRRPEGAVPTPQPEGERKKKRPRKMGGTEPCRGSLILPPRWSFSRPPRSRSEAEETATAEARRREADRREAADRLREAEEAAQEAVRVRQAEEAAREEARLRRAGESVREAEAARARQAACQTPDPTPPETTPTSEATHDEAAGAPLGPDLSGDAWDEPASGDAPESGTSIGGPSRAAPTPRRLSPLPSAAPLSAEPFLQALAAANSTVLDGLSAQMEALQAERAELNAAWARVEEGRRSVEAMVEAGRKAHRRHASQLEARRRDLAEIAREVEEERETALIATAVLDEARDDLRLQYGSLAAELEEKLDAARGREEALEARATALEERARALDAKERNLADREAAVANREATLAAHEAACAEEESSLRLREDALTERGRTLEEAEAAAQRLADSLFLREAAREEQARRNLEGAHAERAALDQRAAELEARAKELDARAHSGGAAAGHGDLAARLAAAEHTIAELQGALDSSAGEVEALRLASXDRAGRQASLWGGRYTKYAANQGGXLAQRLSEMAGALERLPEELEETIKSSSRDLARGAVELVLASYQARDPDFSPWAALEEFPPGTEDGARAQVRDAADHIVHSFEGTAPRLAFSLDSDEEGGDDGADDSDDEAGDPGASE

SEQ ID NO: 182522 - protein, 272 aa, Oryza sativa
  unsure (1)..(272): unsure at all Xaa locations
  Clone ID: PAT_MRT4530_79702C.1.pep
DYFRSRFYCXCDDQKKTYRLTKWRIMCQXKKGGLGIHDSDMKNIAFLSKWLFQLLTADGVWQQLIRNKYLGSKLVSQVEFKAGDSQFXASLMKVKRDFLHFGKFIMRDGAQINQVWEDKWLGEAPLRXQYPCLYNIVRNKXDTVAKVLQNYPPNVSWXRDLIGPKLVAWNNLLPQTASLVLTEDQDXFIWNLTQNGEFSVKSHYLALVHSDLPNINKVIXKLKITLLGKAKQWFYANRAMINIWDKCSTTFLSKFFPMGKTNALHGRISSFQ

SEQ ID NO: 182523 - protein, 81 aa, Oryza sativa
  unsure (1)..(81): unsure at all Xaa locations
  Clone ID: PAT_MRT4530_79703C.1.pep
KXGKGNXRLKXCPSPSKXKKIPAAGRRGPLGAGPFVVSRRVSVTILERDSHPLPCASSIYVLKTKMHWMMASSVHSKKKKK

SEQ ID NO: 182524 - protein, 46 aa, Oryza sativa
  Clone ID: PAT_MRT4530_79704C.1.pep
LKDLYGVDPKVIKKRTFPRKRDCSVGKASSSQVVESYKPKGKGAGG

SEQ ID NO: 182525 - protein, 50 aa, Oryza sativa
  Clone ID: PAT_MRT4530_79705C.1.pep
MYILLEFVNGNTKHIRNLECKFKHIKKYPHVDKKKPKKNSDKFSLSLPRA

SEQ ID NO: 182526 - protein, 72 aa, Oryza sativa
  Clone ID: PAT_MRT4530_79706C.1.pep
MRVVRSPNVRDDGCGGKTSSALRSAYTTRGGNSASDKLQQRAKPHPAHDDPTARFNLNKPTKINNMDQNITK

SEQ ID NO: 182527 - protein, 39 aa, Oryza sativa
  Clone ID: PAT_MRT4530_79707C.1.pep
QKHIEARPTQPPGQFHLPGTSPPAFWQATTPPHLCPQFL

SEQ ID NO: 182528 - protein, 64 aa, Oryza sativa
  Clone ID: PAT_MRT4530_79708C.1.pep
MVVREEGDGGEAAAAEEVSEVDERDATAAAMNDRESGSWLLIVCTAQWLLIDCCSSHVFGTSNI

SEQ ID NO: 182529 - protein, 52 aa, Oryza sativa
  Clone ID: PAT_MRT4530_79709C.1.pep
MVLWRNDWEKPQQGWMKVNVDGSYDAQTGTGGIEVVLRDSEVGMAIGRDGHG

SEQ ID NO: 182530 - protein, 150 aa, Oryza sativa
  unsure (1)..(150): unsure at all Xaa locations
  Clone ID: PAT_MRT4530_7970C.1.pep
LGLTEAGRRGSNPARLXSAPSMTPAKVCGRISRRIRKREREGKVGGERLRESRGVISPSLLRAGAAGCGGIRGGGGARARARRRERREDRDDRWAPPVSEGGGRARPSAARARGGGRLGRGGEEREGGRWAEPAQEGXGGEKDFLGFFFL

SEQ ID NO: 182531 - protein, 124 aa, Oryza sativa
  Clone ID: PAT_MRT4530_79710C.1.pep
MGRYRSHTVCSRGGRTIVHASDIWSRVADEKLGPRRASPLHVIGRLCGGRSAIDQGWSCWCQGQRRRCTVIGINLGTTYSWVGVYRNGIVEIIANDQGNHITPWWWWITFTDDGERLIGEAAKN

SEQ ID NO: 182532 - protein, 157 aa, Oryza sativa
  Clone ID: PAT_MRT4530_79711C.1.pep
MAPTLLPAFFTAVHHHLARQPRRNLAVPAFVPSPRHAGLRAGGRHPTPRREKGGRRDPGLHHHHRHCHLVASFSTLPAPPWRRREGGGPQSRGRTAAPSFSITTGATSAASVPSPAGLLHWRAALEEERRGRAPGPGEDLRAIILRHHHRYSVAPAA

SEQ ID NO: 182533 - protein, 260 aa, Oryza sativa
  Clone ID: PAT_MRT4530_79712C.1.pep
METTREWKYEMPSCVAVPVAAIDDGGCIRAHDSTDAPDERHRGNRGRGGAADWCTTGTGCSLARGTCTACSLTRSAATAPSRQAPYIGYGSTAAAATACVHGSRSIRLFGGGEELDSVDKAGVEIARQLVQHILGGWGGGRHAAAGRQEQMRHEARGGEAAAVEACRCAAESIASERAAAHDGAPEPPERPVELRQLRLPERLDVGGLPPPEPPPRDVAQPRHLHLGLVRRPPQRLGLAVVDVGDGRLAAAAEDGVVDEG

SEQ ID NO: 182534 - protein, 140 aa, Oryza sativa
  Clone ID: PAT_MRT4530_79713C.1.pep
RAGQTEAGPGRGVRCGRPAAGAACGGGEPATAGQQARQGQPPAGRTIAAAAAVGRAGAVRRCRRLVDSRDGPRDAVACPPVGRAGVGGWTPSHLPLPPTPDDRAGAPPSPSAGPGSSDGLRGAVGRVGVGGWAPSRLPFR

SEQ ID NO: 182535 - protein, 73 aa, Oryza sativa
  unsure (1)..(73): unsure at all Xaa locations
  Clone ID: PAT_MRT4530_79714C.1.pep
XFXFFFFFFFFFFFFFFFFKTSLTEMFYFLQKIYPLVDHLHLGSTKMGHGKGAHPNWGFFITGITTRWLISTF

SEQ ID NO: 182536 - protein, 134 aa, Oryza sativa
  Clone ID: PAT_MRT4530_79715C.1.pep
MSGVFGKVFGKSKAQSQATALASIDKLSETLEMLEKKENLLVKKANLEVEKAKTFTKAKNKRAAIQCLKRKRLYEQQIEQLGNFQLRIHDQMIMLEGAKATTETVDALRTGASAMKAMHIATNIDDVDKTMDEI

SEQ ID NO: 182537 - protein, 1074 aa, Oryza sativa
  unsure (1)..(1074): unsure at all Xaa locations
  Clone ID: PAT_MRT4530_79716C.1.pep
MARGSALLDGSVLPPSRIVSERQAGLPRRFMPESATGWEVVELGEGRLAPHYSGRSVFFLSFAMAGLVPPFSSFFMDVLEFYNLQMAHLTPNAVMTLAIFAHLCEMFIGVRPSLRLFRWFFTAQPVSPPSVVSGCYFQPQGPVLSRYIPCVLRKKWDDWKSDWFYTPLADEARLRLPSQPPAQASSWRAPVDLGDGYDAVLDRLAGLRSQMLTGAMVYGDYLRRRIAPLQRRARGAWEYTGSEDYMRTHQGGRWDWVPEDFKMVVQRVLNLSSVEASLIPQGVLPLCSDPDRANILTIMQAVGASEERAPRGHDGAGGSRRGXQSTPGGGRASGPHDGGPRGSRPADARGKRKQEGTPSPSPPRGGGAVRASSRRPESAVPTPRPEGERKKKRLRKMGXSKHAGETSSHPQGGRLADLPAGSSSRPPRPYSFSHLPRRVFTYPFLFVFWFFFCFSEIPSCPPRHSKSGWSEAEEAATVEARRREADRRDAVDRLREAEEAAQEAVRVRQAEETTREEARLRWAEESVREVEAARACQAACQALEPTPPEATTTSEATHDEAAGALLGPDPSDDVRDGPASGDAPESGTSIGGPSRAAPTPRRLSPLPSAAPPSAEPLLQALAAANTTVLDGLSAQMEVLQAEWAELDAAWARVEEGRRSVEAMVEAGRKAHHRHASELEARRRELAEIAREVEEERETALIATAVLDEVRDDLRLQYGSRAAELEKKLDAARGVLDAAAARERRAAENEAASRRREEALEARATALEERAHAKERDLADREAAVAIWEATLAAHEAACAEEESALRLHEDTLTEREQALEEAEAAAXRLADNLFLREAAQEEQVRRNLEGSRAEKATLDQRAAELEARAKELDARAXGGGAAAGDSDLAARLAAAEHTIAELQGALDSSAGEVEALRLAGEVGPGMLRDAVSRLDRAGRQAGLWDERTAKYTANQGGLSQRLSEMARTLQRLSEELEETIKSSSRDLARGAVELVLASYQARDPDFSPWAALDEFPPGTEDGTRAQVREAADYIVHSFKGTAPRLAFALDSDEEGGDGGEDDSDDEAGDPGASK

SEQ ID NO: 182538 - protein, 70 aa, Oryza sativa
  Clone ID: PAT_MRT4530_79717C.1.pep
MPKVGGPTINRAHLQVALELAGRRNPRRPGPLSVAVLRGALLHGWTSTTQSKRYDTMSNYKPTVSRDTRY

SEQ ID NO: 182539 - protein, 764 aa, Oryza sativa
  Clone ID: PAT_MRT4530_79718C.1.pep
MSISLPPSPLSSATADNNTCRNLDRHAYCSRVLRLGLADLGVAGHSRGSGEPHELAGIEDSTDAASLVQGVPPSADGSCGDSGRHGGAGRRAPRRRYPPREPFAPADGQSGEVGVILQPLGTVSTEQLDSYLSSPGVDSRPTKIVEYDDFCYRYDYRNLDDFDEGFEDNYTPPYFGIFMVDNETEEQRKAREAEELRQDVEETAVFRTPQQNAVAAITLLDTLLKEDALNQPNHVVNILNQTKTMIAASVPVNSASVSTLTSSRVSPLRSQDYHQPSLSVAGARSSRRSRAGFKPTGIEKYDGTTNPESWLTVYGLAIRVAGGDSKAMANYLPMALADSAQSCLHGLPRGTIGSWAKLGEHFIANFQGTFERPGTHFDLYNVIQKSGESLRDYIRRFSEQRNKISDITDDVIITAFTKGIRHEDLVGKFGRKPPKTVKQMSEKANEYAKAEDAITASKQSGTTWKPKKDTPTTGETGSTNHKDRKRKPEELVATTTPSSRQHSRINTFDKIMNSQYPHHPNSNHAAKDCFVYKQFAKQYTKNARKASDGDQSTSKKKDDEGDAPTGFQDHRKELNHIFGGPLAYESKRKQKLTKREINAVQPDMPQYLRWLETTIKFDRSDHPDRVVHPGRYPLVLDLVVHNVKLHRSLIDGGSALNILFAPAGRPPLLPGVAPPAAATHGTAAARHGRRPAWHRRRPPWSPPGAAPPAAARHGRRRRGPAGRRPPDRMGREERRRRGGWEVRRGGGVRSVKRKWNGSMKCRRG

SEQ ID NO: 182540 - protein, 1012 aa, Oryza sativa
  Clone ID: PAT_MRT4530_79719C.1.pep
MARGSALLDGSVLPPSRIVSKRQAGLSRRFMPESATGQEIVTLGEGRPAPDYPGRSVFFLPFAMAGLVPPFSSFFMDVLEFYDLQMAHLTPNAVMTLAIFAHLCEMFIGVRPSLRLFRWFFTVQSVSPPSVVGGCYFQPRGSVLNRYIPCALRKKWDDWKSDWFYTPLADEARLRLPSQPPAQTSSWRAPVDLGDGYDAVLDRLAGLRSQGLTGAMVYGDYLRRRIAPLQRRARGAWEYTGSEDFTRTHQGVRWDWAPEDFKILVQRVLNLNSVEAALIPQGILPLCSDPDRASILTIMMAVGASEERAPKGHDGADGSRRGEQSTPREGRASGSRDRGPGSSRPADARGKRKQGGTPPPSPPRGDGAARASNRRPEGAAPTSQPEGERKKKRPRKMGETEPSRGNLISPPKWSFNRPPRSEIPSRPSRHSKFGQSEAEDPAAAEALRRESDRREAADRLREAEEAARARQAEETAREEAGFRQDEAMATSEAARDEAAGASLGPTPSGDTQATTSGAAGDEAAGASLGPTTSGDAQDQPGPGDIPESGTSIGGPSRVASSPRRLFPTPSIALLNAEPLLQALAAANTTAERAELDAAWARVEEGRRSVEAMVEVGRKAHRRHVSELETRKKVLAEIAKEVEEERGAALIATTVMNEAQDTLRLQYGSWEAELGKKLDAAQGVLDAAAAREQRAAETEAASRRREEALEARAMALEERACVVERDLADREAAVTIREATLVAHEAACAEEEFTLRLREDALTERERALEEAEAAAQQLAEQARRNLEGARAERAVLNQRAAELEARAKELDARARSGGAATGESDLAAHLAAAERTIADLQGALNSSAGEVEALRLAGEVGPGMLWDAVSRLDCAGRQVGLWRGRTVKYAANQGGLAQRLSKMAGALQRLPEELEKTIKSSSRDLAQGAVELVLASYQARDPNFSPWMALDEFPPGTEDRARAQVRDAADHIVDSFEGSAPRLAFAPNSDEEGNAGGADDSDVEAGDPGASD

SEQ ID NO: 182541 - protein, 81 aa, Oryza sativa
  Clone ID: PAT_MRT4530_7971C.1.pep
NWSIKHWRQRTVEPHVSGEPGGAHWSIPLTSALSLSPNNVAGRLYFGPVVRMSARIRRKKLGRDGAELIFSGTVMCCSCPV

SEQ ID NO: 182542 - protein, 209 aa, Oryza sativa
  Clone ID: PAT_MRT4530_79720C.1.pep
MKSEYMTEEDPLVLWQSLKDRCDHQGSILLPWAQHGLITLCFQDYKFIVAYNSALYWISAWLCLCDQKITDTEMIEKKLSTYHPNNMHGRRDRRVREVSCSRGKGRVSPKAKAECKKVTCGTSGENMIIAIDVEALSIGLVTAMFPSIWLSSNEKMSQYESYFTTEPEAHIENYDDMFVNTKDGEDVHMDDDEDNLIEEVISYMSLISV

SEQ ID NO: 182543 - protein, 1436 aa, Oryza sativa
  unsure (1)..(1436): unsure at all Xaa locations
  Clone ID: PAT_MRT4530_79721C.1.pep
MGSVSGIDDFVFPPGQAFRFGNLDFITNVFGKISLLDSDSNQSGRDQVSAPFGIPNSAKIYPKLILIESASNHSDEIPSTPTTPDRDDGAYPPILMKLPDDLAAVFTTRASPPXVFMADNETEEQRQARETEARRVQQEAERRRLEEERQAQEQERLQREQQEREWAAKEAEDRRQRALDAGRXARDLIGQQDVEGTAVFRTPQQNVVAXITLLDTLLKEDALNQADQVVNILNQTKTMIATSVPVNSGSVRMSTGSRVPHLRSHDYHQPSLSIAGAGSNRRSRGHDERSVHSPPERHXGGDSKAVATYLPVALADSARSWLHGLPRGTIGSWAELRDHFIANFQGTFXPGTQFDLYNVIQKSGESLRDYIRHFSEQRNKISDITDDVIIAAFTKGIRHEDLVGKFGRKPPKTVKQMFEKANEYAKAEDSIIASKQSGPTWKPKKDVPTTGGVGSNNHKDRKRKPEELVATTTHSSRQRSRVNTFDKIMNSQCPHHPNSNHAAKDCFVYKQFAEQYAKNARKTSDGEQSTSKKKDDDDDAPTGFQDHRKELNHIFGGPLAYESKRKQKLTEREINAVQPDTPQYLRWSETTIKSLIDGGSALNILFAKTLDDMQIPRTELKPSNAPFHGVILGLSATPLGRITLPVTFGTRENFRTENVCFEVADFETAYHAILGRPALAKFMAVPHYTYMMMQMPGPRGVISLRSDIKQAVTCDKESGEMAQTREIAVAREDIRLAATTASEGEVATTKISKTGESEAKTKKIPLDPSDPTKTAVIGAELDYIFAWKPSDMPGNPREVIEHSLHVKEDAKPIKQRLRRFAQDRKDTIKEELTKLLAAGFIKDVLHPDWLANPVLVRKKTGQWRMCVDYTDLNKSCPKYPFGLPRMDQIRLKESDCLKTSFITPFGAYCYITMPFGLKNAGATYQRMIQRRFSTQIGRNVEAYVDDVVVKTKQKDDLITDLEETFASIRAFRMKLNPKKCTFRVPSGKLLGFMVSHRGIQANLEKVNAILNMKPPSSQKDVQKLTGCMAALSRFVSRLGERGMPFFKLLKKTDNFQWGPEAQKAFEDFKKLLTTPPVLASPHPQEPLLLYVSATSQVVSTVLVIEREEEGHVQKVQRPIYFVSEVLADSKTRYPQVQKLLYGVLITVRKLSHYFQADFVAEWTECQEDTLEEKMEYWTMHFDGSKRLSGTGAGVVLISPTGERLSYVLWIHFSTSHNVAEYEALLHGLWIAISLGIRRLIVRGDSQLVVNQVMKEWSCLDDNMIAYRQEVRKLEDKFDGLKLTHVLRHNNEAADRLANFGSKREAAPSDVFVEHLYEPTVPRRETAEATDTQDIAMVEADWREPLIQFLTNQELPQDKDEAERISRRSRLYIIHETELYKKSPSGIVQRCVSLEERRQXLLKDIHSGICGNYAAARTIVGKAYWQGFFWPTVVSDA

SEQ ID NO: 182544 - protein, 1009 aa, Oryza sativa
  unsure (1)..(1009): unsure at all Xaa locations
  Clone ID: PAT_MRT4530_79722C.1.pep
MARGSAPLDGSVLPPSRIVSERQAGLPRRFMPESATGREVVALGEGHPAPHYPGRSVFFLSFAMAGLVPPFSIFFMDILEFYDLQMAHLTPNAIMTLAIFAHLCEMFIGVRPSLRLFRWFFTVQPVSPPTVVGGCYFQPRGQVLNRYIPCVLRKKWDDWKSDWFYTPLADEARLRLQSQPPAQASSWRAAVDLGDGYDAVLDRLAGLRSQGLTGAMVFGDYLRRRIAPLQRRARGAWEYTGPEDYMRTHQGRKWDWDPEDFRMVVQRVLNLSSVEASLIPQGVLPLCCDPERANILTIMQEVGASGERVPRGHDGAGGSRRGEQSTPGGGRASGPRDGGPGGSRPADARGKRKQEGTPPPSPPRGGGAVRASSRRPEGAVPTPQPEGERKKKRPRKMGGTEPCRGNLISPLRWSFSRPPRSEIPSRPPRHSKSGRSEAEETVTAEAQRREADRREAVDRLREAEEAAQEAVRVRQAEEAAREEARLRRAGESVREAEAARACQAACQAPDPTPPEATTTSEATHDEAAGAPLGPDPSGDAWDEPASGDAPKSGTSIGGPSRAAPTSRRLSPLPSAAPLSTEPLLQVLATANSTVLDGLTAQMEALQAERAQLDAAWARVEEGRRSVEAMVEAGRKAHRRHASQLEARRRDLAEIAREVEEERETALITTAVLDEARDDLRLPYGSRAAELEEKLDTARGVLDAAASRERRAAENEAASRQRDEALETSATALEERARALDAKERDLADREAAVATREATLAAHEATCAEEESALRLREDAVTERGLFLREAAREEQARRNLEGVRAERATLDQRAAELEAWAKELDARAHSGGAATGHGDLAARLAAAEHTIAELQGALDSSAGEVEALRLASEVGPGMLRDTVSRLDRAGRQVGLWGGRYAKYAANQGGLAQRLSEMAGVLKRLPEELEETIKSSSRDLARGAVELVLASYQARDPNFSPWAALEEFPPETEDGARAXVRDAADHIVYSFEGTAPRLAFALDSDEEGG

SEQ ID NO: 182545 - protein, 161 aa, Oryza sativa
  Clone ID: PAT_MRT4530_79723C.1.pep
MADIGSGAHTRTVDALPRDRELLAGGVGTGAGEEEDNTDAATDEEVECEGVALTTAVGAEHNEHDAAVYDELRRGTWMTKDTAVGDELHRGTWMTKEAVAGDELQRGVDGGGCGRRRRAPAWGVDDGGRGRRRQALTWRGRWRMWLPATSSSVGHGRWDIW

SEQ ID NO: 182546 - protein, 1045 aa, Oryza sativa
  Clone ID: PAT_MRT4530_79724C.1.pep
MARGSALLDGSVLPPSRIVSEKQAGLPRRFMPESATGREIVMLGEGRPALDYPGRSVFFLPFAMAGLVPPFSSFFMDVLEFYDLQMAHLIPNAVMTLGIFAHLCEMFIGVRPSLRLFRWFFTVQSVSPPSVVGGCYFLPRGPVLNCYIPCVLRKKWDDWKSDWFYTPLADEAHLRLPSQPPAQAPSWRAPVDLGDGYDAVLDRLAGLRSQGLTGAMVYGDYLRRRIAPLQRRARAAWEYTGSEDYMRTHQGVRWDWAPEDFKILVQRVLNLNSVEASLIPHGILPLCSDPDRASILTIMTAVGASEEQAPKGHDGAGGSRRGDQSTPGGGRASGPRVGGSGGNRPTDARGKRKLGGTPPSSPPRGGGAVRAGSRRPEGAVPTSQPEGERKKKRLRKMGETEPSRGNLISPPRWSFNRPPRSDIPSRSSHHLKSGQSEAEDPAAAEARRRESDRREAADRLREAEEAAREAARARQADDTAWEEAARARQAEEAAREEAARVRQAEEAAREEAARVRRAEAMAASEAVHDEAADASLGPTPSGDAQDQTGPGVARDEAGASIGGPSRAASSSRQLFPTPSAAPLSAEPLLQALAAANTAVLDGFNAQVEALQAERAELDAAWARVEEGRRSVEAMVEAGRKAHRRHVSDLEARKTALAEIAREVEEERGAALIATTAMIEAQDSLRLQHGNWEAELKKKLDAAQGVLDAAAAREQRATETEAALRRREEALEARAMALEERACVAEKVLADREAAVTSREATLAAHESACAEEESALRLREDALAERERALEEAEAEAQRLADSLSLREAALTEQARRNLESVRAERAALEQRAADLEAREKELDARACIGGAAAGESDLAARLADAEHTVADMQRALDSSAGEAEALRLAGEIGPGMLWDAVSRLDRAGRQAGLWKGQSMTRPANLEGLAPHLTKMAWALQQLPEELEKTIKSSSRDLAQGAVELVLASYQARDPNFSPWMALEEFPSGTEDDARARVRDAADHIVHSFEGSAPRLAFAPNSDEEGDASGADDRDDEAGDPGASD

SEQ ID NO: 182547 - protein, 131 aa, Oryza sativa
  unsure (1)..(131): unsure at all Xaa locations
  Clone ID: PAT_MRT4530_79725C.1.pep
TAASCTVHATRPHPPPSTPRRSLSPTATSFPTSTSXPSTCSLCSAPTAVVRATPSHSTSSSVAASVLSSSSPAPVPTPPARSSRSXAVRRQCGCGRRCLCQPCARAGAAPCPAEVAAAVQDVHGQVSLLFE

SEQ ID NO: 182548 - protein, 77 aa, Oryza sativa
  unsure (1)..(77): unsure at all Xaa locations
  Clone ID: PAT_MRT4530_79726C.1.pep
MGRRWGGSGKAASSPPMAGGGRLAEVAAAARXRGGGELPSARSGARGASGEVAGSRLAEATAAQLGGGSGRTLPMRR

SEQ ID NO: 182549 - protein, 414 aa, Oryza sativa
  Clone ID: PAT_MRT4530_79727C.1.pep
MAGMAPEGSQFDAKHYDSKMQELLHQGDNEEFFTSYDEVFESFDDMGLQENLLRGIYAYGFEKPSAIQQRGIVPFCKGLDVIQQAQSGTGKTATFCSGILQQLDYGLVECQSLVLAPTRELAQQIEKVMRALGDYLGVKVHACVGGTSVREDQRILASGVHVVVGTPGRVFDMLRRQSLRPDHIKMFVLDEADEMLSRGFKDQIYDIFQLLPPKIQVGVFSATMPPEALEITRKFMNKPVRILVKRDELTLEGIKQFYVNVEKEDWKLDTLCDLYETLAITQSVIFVNTRRKVDWLTDKMRSRDHTVSATHGDMDQNTRDIIMREFRSGSSRVLITTDLLARGIDVQQVSLVINYDLPTQPENYLHRIGRSGRFGRKGVAINFVTRDDERMLFDIQRFYNVTIEELPANVADLL

SEQ ID NO: 182550 - protein, 986 aa, Oryza sativa
  unsure (1)..(986): unsure at all Xaa locations
  Clone ID: PAT_MRT4530_79728C.1.pep
MARGSAPLEGSVLPPSRIVSERQAGLPRRFMPESVTGREVVALGEGRPAPHYPGRSVFFLSFAMAGLVPPFSSFFMDVLELYDLQMAHLTPNAVMMLAIFAHLCEMFIGVRPSLRLLQWFFTVQPVSPPMVVDGCYFQPRGQVLHRYIPCILRKKWDDWKSDWFYTPLADKARLRLPSQPPAQASSWRAPVDLGDGYDAVLDRLAGLRSQGLTGAMVFGDYLRRRIVPLQRRARGAWEYTGSEDYMRTHQGSKWDWVPEDFKMVVQRVLNLSSVEASLIPQGILPFCSDSERANILTIMQTVGASGERAPRGHDGAGGSRRGEQSTPGGGRASGPRDGGPGGSRPADARGKRKQQGTPSPSPPRGGGAARASXSRRPEGAVPSSQPEGXRKKKWLRKMGGPNHAGETSSPPQGGRLADLLAGSSPRPLRPYSFSHLPRQVFTHPFLFVFWFFFCLSEIPSLPLRHSKSGRSEAEETATAEARRREADRREAADRLREAEEAAQEAVRARQAEENAREEARLRRAEESIREAEAARARQAACQAPDPTPPEATTTSEATHDEATGAPLGPDPSGDAQDEPASGGVPESGTSIGGPSRAATSPRRLSPMPSTAPLSAEPLLQALAAANTTVLDGLSAQMEVLQAERTELDAAWARVEEGRRSVEAMVEAGRKAHRRHTSELEARRRELAEIAREVEEERESALLAAAVLNEARDDLRLQYGSRAAELEKKLDAARGVLDAAAARERRAAESEAASRRREEALEARATALEERARVKERDLADREAVVAIREATLAAHEAACAEEESALRLREDALTERERALEEAEATAQRLADSLFHREAAREEQARHRAGRQAGLWGGRTAKYAANQGGLAQRLSEMAGTLPRLPEELEETIKSSSRDLALGAVELVLASYQARDPDFSPWAALDEFPPGTEDGARTQVRDATDHIVHSFEGTTPRLAFALDSDEEGGDGGADASGDEAGDPGASE

SEQ ID NO: 182551 - protein, 910 aa, Oryza sativa
  unsure (1)..(910): unsure at all Xaa locations
  Clone ID: PAT_MRT4530_79729C.1.pep
MARGSALLDGSVLPPSRIVSERQAGLPRRFMPESATSREIVTLGEGRPAPDYPGRSVFFLPFAMAGLVPPFSSFFMDVLEFYNLQMAHLTPNAVMTLAIFAHLCEMFIGVRPSLRLFRWFFTVQSVSPPSVVGGCYFQPRGPVLNRYIPCVLRKKWDDWKSDWFYTPLADEARLRLPSQPPAQASSWRAPVDLGDGYDAVLDRLAGLRSLGLTGAMVYGDYLRRRIAPLQRRARDAWEYTGSEDYMRTHQGVRWDWAPEDFKIVVQRVLNLSSVEASLIPQGVLPLCSDPDRASILTIMQAVGASEERAPRGHDGAGGSRRGEQSTPGGGRASGPRDGGPGSSRPADARGKRKQGGTPPPSPPRGGGAARASSRRPEGATPTEIPSRPSRHSKSGQSEAEDPAAAEARRRESDRREAADRLREAEEAAREAARARQAEEAAREEAGPRQAEATTSSETTRETDRQEAADRLREAEEAAQMAVRARQAEEAAREEARRRQAEATTTSEAAHDEAAGASLGPTPSGDAQDKPGPGDIPESGTSIGGPSRAASSPRRLFPTPSVAPLNAEPLLQALAIANTTVLDGLSAQVEALQAERAELDAAWARVEEGRRSVEAMVEVGRKAHRRHVSELEARRKVLAEIAKEPACSEEESALRLREDALTERERALEEAEAAAQRLADSLSLREAAREEQARRNLEGVRAERAALNQRAADLEAQAKELDARARSXGGASLGESDLAARLAAAEHTIADLPGALDSSTGEFEALRLAGXDRAGRQAGLWGGRTVKYAANQGGLAQRLLEMAGTLQRLPEELERTIKSSSRDLARGAVELVLASHQARDPDFSPWTALEEFPPGTEDGARAQVRDAADHIVHSFEGSAPRLAFALNSDEEDDDGGVGGSGDEAGDPGASD

SEQ ID NO: 182552 - protein, 243 aa, Oryza sativa
  unsure (1)..(243): unsure at all Xaa locations
  Clone ID: PAT_MRT4530_7972C.1.pep
SAKNDRPKTGGEKKPAPDTSESSKKKNRKTGKRKAQAEVLAAEYANPPKRIDPQSSDPKKSWCPIHKTDRHSLEDCLVFKKSLEKHMAFEKGKXVHVVETNEETAPHEPDSAYPDFDLHVSHIFGGSTTYSSKREYKKVEHEVCSTWQGATPKMKWSEQKIEFSEXEDHPKTVVIPGRYLIVVEPTIRNIKVARVLIDGGSSINLLFANTLDAMGIPQNELIPTDQLFHGITPQSSLMCTART

SEQ ID NO: 182553 - protein, 2021 aa, Oryza sativa
  unsure (1)..(2021): unsure at all Xaa locations
  Clone ID: PAT_MRT4530_79730C.1.pep
MGFVSGIDDFAFPPGQAFRFGSLNFITDDFGKISLLDSDSNQSGRDQVPVPFGIPNSAEAYSKIISPESASNHSDEIQSTLSRLDQDDGSYPSILMKLPYDLAAIFTAKTSPTRRSRRAPASAPIQSRSREVGVILQPLGTVSTEELDGYLSSPGVSSRPTEILDYDDFGYHYDHGDLDNFDDSYEDNYTPLFFGVFMADNETEEQRQAREADQDRARQEAERRRLEEERQRQERERLQREQQDRERIAKEAEDRRQRALESGRRARELIGLQDVDGTAVFRXPQQNAVAAITLLDTLLXENALNQADHVVNILNQTKTMIAASVPANSASTRTPTGSRVPHLRSHDYHQPSLSIIGTGSSRRSRGHDERSVHLPPERHRERRVERPRSPPHQRPVDLRDTINQRRAARGHRHSPNRYDDDVDGVAAFTNDLRGVDWPASFKPTGIEKYDGTTNPESWLTIYGLAIRAAGGDNKAMANYLPVALADSARSWLHGLPRGTIGSWAELRDHFIANFQGTFERPSTQFDLYNVVQKSGESLRDYIRRFSEXRNKISDITDDVIIAAFTKGIRHEDLVGKFGRKPPRTVKQMFEKANEYAKAEDAITASKQSGTTWKPKKDTPTAGGSGSNNHKDRKRKPEELVATTSPSSRQRSRVNTFDKIMNSQCPHHPNSNHVAKDCFVYKQLAEQYVKNARKPSDGDQGTSKKKDDEDDAPTGFQDHRKELNHILGGPLAYESKRKQKLTEREINAVQPNTPQYLRWSEIAIKFDRSDHPDRVVHPGRYPLVLDPVVRNVKLRRTLIDGGSALNILFVKTLDDMQIPRTELKPSNAPFHGVIPGLSATPLGQITLPVTFGTRENFRTENVCFEVADFETAYHAILGGPALAKFMAVPHYTYMMIKMPGPRGVISLRSDIKQAVTCDKESCEMAQTHETTLAREEIRLAATMGSEEEVPATKLTKTEESDAKMKKIPLDPSDPDKTANNKDIFAWKPSDMTGIPREVIEHSLHIKEDAKPIKQRLRRFAQDRKDAIKEELTKLLAAGFIKEVLHPDWLANPVLVRKKTRQWRMCVDYTDLNKSCPKDPFGXPRIDQVVDSTAGCELLSFLDCYSGYHQIRLKESDCLNTXFITPFGAYCYITMPFGLKNAGATYQRMIQRCFSTQIGRNVEAYVDDVVVKTKQNDDLIADLEETFASIRASRMKLNPEKCIFGVPSGKLLGFMVSQRGIQANPEKINAILNMKPPSSQKDVQKLTGCMAVLSQFVSQLGERGMPFFKLLKKTDNFQWGPEAQKAFEDFKKLLTTPPVLASPHPQEPLLLYVSATSQFVSTVLVVEREEEGHIQKVQRPIYFVSEVLADSKTRYPQVQKLLYGVLITVRKLSHYFQSHSVTVVTSFPLGDILHNREVNGRIAKWALELMSLDISFKPRTSIKSQALADFLAEWTECQEDMPEEKMKYWTMHFDGSKRLTGTGAGVVLISPTGERLSYVLWIRFSTSHNMAEYEALLHGLRIAISLGIRXLIVRGDSQLVVNQVMKEWSCLDDNMTAYRQEVRKLEDKFDGLELTHVLRHNNEAADRLXNFGSKREAAPSDVFVEHLYEPIVPRKETIEATDTQGVSMIEADWREPFIKFLSKQELPQDKNEAERISRRSRLYIIHEGELYKKSPSGILQRCVSLEEGRQLLKDIHSGICGNHAAARTIVGKAYRQGFFWPTAVSDADKIVRTCEGCQFFAGQTHLPAQELQTIPLSWPFAVWGLDMVGPFKRAVGGYTHLFVAIDKFSKWIEAKPVITITVDKARDFFINIVHRFGVPNRIITDNGTQFTGRAFKDFCEDFGIKICYASVAHPMSNGQVERANGMILQGIKARVCDRLRPYAGKWVDQLPSVLWSLRTTPSRATGQSPFFLVYGAEAMLPSEVEFESLQFRNFNEEGYEEGRVDDINRLEEAREAALIQSTRYLQGLRHYHNRNVRSRAFLVGDLALRKIQTTQDQHKLSPLWEGPFIIAEVTRPGSYRLKREDGTLINNSWNIEHLRRFYA

SEQ ID NO: 182554 - protein, 170 aa, Oryza sativa
  unsure (1)..(170): unsure at all Xaa locations
  Clone ID: PAT_MRT4530_79731C.1.pep
ALAVALATSPPPPPSPPPPSPLFFLIERVLTVKFGKXRSSHRLRVSIGLEVLRLADESCQVVSCRILAIFGXEIXSTKGSLSRSVDFMTLDLQPMCALTFGSVLIXYHINASRLVYTGLYCYFITSSTTDCHYTIIYIGHIAEFLHPIGIGYYRHRLXNHYIGLSADRLF

SEQ ID NO: 182555 - protein, 169 aa, Oryza sativa
  Clone ID: PAT_MRT4530_79732C.1.pep
VHGARHRTQGTILVARHGQHVLYLRGFKPPVPEGGGHAPGRQAPPTSPGWNTGCQTHWEPGPGPVGEPLGAALRPDWEGNHPLPIAPPSQGAQPHRLGLAFRPLAPEGARQGTVSKLAPCACPNRVHSRQPCQPPEPFPGSFFRPFPNLPANSALFPKGSSRPTFKLRT

SEQ ID NO: 182556 - protein, 65 aa, Oryza sativa
  Clone ID: PAT_MRT4530_79733C.1.pep
FFDDDITTRSEDVALLEEIGKLLLKCICLEIDQRPTMKQVAQHLRIIRRCWKNNCTADGASLVTN

SEQ ID NO: 182557 - protein, 1054 aa, Oryza sativa
  Clone ID: PAT_MRT4530_79734C.1.pep
MARGSALLDGSVLPPSRIVSERQAGLPRRFMPESATGREIVMLGEGRPAPDYPGRSVFFLPFAMAGLVPPFSSFFMDVLEFYDLQMAHLTPNAVMTLAIFAHLCEMFIGVRPSLRLFRWFFTVQSVSPPSVVGGCYFLPRGPVLNRYIPCVLRKKWDDWKSDWFYTPLADEARLRLPSQPPAQASSWRAPVDLGDGYDAVLDRLAGLRSQGLTGAMVYGDYLRRRIAPLQRRARGAWEYTGSEDYMRIHQGVRWDWAPEDFKIVVQRVLNLNSVEASLIPHGILPLCSDPDRASILTIMTAVGASEEGAPKGHDGAGGSRKGDQSTPGGGRASGSRDGDPGSSRPADARGKRKQGGTPPQSPPRGGGAVRASSRRPEGAAPTSQPEGEHKKKREIPSRPSRHSKSGQSEAEDPAAAEARRRESDRRVAADRLREAEEAAQEAARARQAEETAREEAARARQAEETAREEAARARQAEEAAREEAARAHQAEEAAREKAGFRQDEAMATSEAARDEVAGASLGPTPSGDAQATTSGAAGDEAAGASPGPTPSGDTQDQLGPGDIPESGTSIGGPSRAASSPRRLFPAPSIAPLSAEPLLLALAAANTAVLDGFNAQVEALQAERAELDAAWARVEEGRRSVEAMVEVGRKAHRRHVSELEARKKVLAEIAKEVEEERGAALIATTVMNEAQDTLRLQYGSWEAELGKKLDAAQRVLDTAAAQEQRAAETEAASRQREETLEARAMALEERACVVEKDLADREAAVAIREATLAAHESACAEEESALRLREDALTERERALEEAEAAAQRLDDSLSLREAALAEQARRNLECVRAERAALDQRAADLEAREKELDSRARSGGAAAGESDLATRLAATELTIADMQRALDSSAGEAEALRLASEIGPGMLWDAVSRLDRAGRQVGLWKGQTMKYSTNQGGLAQHLSKMAGALQQLPEELEKTIKSSSRDLAQGAVELVLASYQARDPNFSPWMALDEFPPGTEDDARARVRDAAEHIVHSFEGSAPRLAFAPNSDEEDDAGGADDSDDEAGDPGASD

SEQ ID NO: 182558 - protein, 190 aa, Oryza sativa
  unsure (1)..(190): unsure at all Xaa locations
  Clone ID: PAT_MRT4530_79735C.1.pep
RRTSAERGEYQKPAPETRRVCSPPLAPLLLLTSPPPGMNPINPKHIILLTVKFGKXRSSHRLRVSIGFEVLRLADESCQVVNCRILTIFACFLIVNKGFIGVSADFMTSDLQPMCALTFGSMLIXYHINASRLVYTGLYCYFITSSSSSDCLYIIIYIGHIADCLNPIAIGYYRXIGWNYSIGLSADRLF

SEQ ID NO: 182559 - protein, 772 aa, Oryza sativa
  Clone ID: PAT_MRT4530_79736C.1.pep
MDTKLAENKIMIGNITRCYDKLKFKVDINQNIKVFTEDEIKRITSNFSIPIGQGGFGEVYKGTLDDDYDLVAVKRYISKDLRKEFMEEVSIHSQMSHRNVVELIGYCIGESTLMIVTKYISKGNLDDILHNSDISIPLDVRLGIAIGCADALSYMHSMHLSNGSLICHGDIKPANILLDSNLTSKLSDFGVSRLLSGGVTQYTVHIKGSVSYMDPIYFHEGCLTPRSDVYSFGMVLLELIARKRVRKGDINLIGGGEIFDAEIANRSNMKILKEMRKLAIECLTLDIHKRPQMNVVAKRLRTLKKELKDMHGRYSEHILASHRSWRKNDNQGPSYNSRMQLKKSLSIFKRNLSNSSKILLGLGNMRIFTQEELNEITQNYSCLLSGGTSGKVYKGTLEDNTVVAVRIFSEALEGFEEAFINGGMILSQIVHKNIIRLLGYCLNADCPAFVYEYAARGTLSDILDGREDFPLHLRVKIAVETAEALEYLHSSAAGMIRHGYVAPSKTLVDDSFTPKLTGFSWAQRLNNDDSAIHDHDKYCVSLKLKTDVYQFGVLVLTLISRKNFAFYADHEHLVSQFLAAYKADNSGRAFFDDDITTRSEDVALLEEIGKLLLKCICLEIDQRPTMKQVAQHLRIIRRCWKNNCTADGASLLPCAVLAGRGRDEDDAAAKRGSEIRLPFEHHAFFHADLTGEELDLQAEGTNATRTEAVEVVIATTGGGGGEPSVIFAGVTPLAGPHRIFDHHRRGGPDLEKRRGSVEMQGHRRRGRVSCPP

SEQ ID NO: 182560 - protein, 148 aa, Oryza sativa
  unsure (1)..(148): unsure at all Xaa locations
  Clone ID: PAT_MRT4530_79737C.1.pep
GTANALLTVKFGKXRSSHRLRVSIGFEVLKLADEICQVVSCRILAIFACFLIANKGFIGVSADFMTLDLQPMCALTFGSMLIYHITIYRLVYTGLYCYFITSSSTDCLYIIIYIGYIADCLNSIAIGWYRHRREIGGTEEEKREERDD

SEQ ID NO: 182561 - protein, 123 aa, Oryza sativa
  unsure (1)..(123): unsure at all Xaa locations
  Clone ID: PAT_MRT4530_79738C.1.pep
MASNMVLASVLLLARTSTLAETHTIDQYHHQHQPVYTPGPVCQTGPVYPRHPLANRQCVGKRQCVGRETVRRDXQRQLDCCQHLCGRYDRCSHSQASSHRLLGIYKERHATDDVHPMCEIFHL

SEQ ID NO: 182562 - protein, 46 aa, Oryza sativa
  Clone ID: PAT_MRT4530_79739C.1.pep
TQVSALGKSVHSSGPVRGRSGEDMLMVNAPLLLVGAVHIRSDNLLM

SEQ ID NO: 182563 - protein, 275 aa, Oryza sativa
  Clone ID: PAT_MRT4530_7973C.1.pep
LEAFGMTPEDVLRAYFLAAACIFEPNRASERLAWARVSVLANTISRHFYSDMSSMKRMERFMWSSLYEENGNVLGLEGYAKDGILARTLCQLIDLLSQETPPVREGQKCIHNLIRCAWIEWMMQQINMKDGRYDKGRVMHPGSCTVHNKETCLLIAQIVEICAGRIEEAASMINNTEGSWFIQLASSICDSLHAKMLLSQDTKKNETTINQIDKEIELGMQELAQYLLPRVDDRRINNKTKQTFLSIVKSCYYAANCSPHMLDQHISEVIFEQVI

SEQ ID NO: 182564 - protein, 81 aa, Oryza sativa
  Clone ID: PAT_MRT4530_79740C.1.pep
DMTTSPRNAYEVPAYNFARVESKLPFYDEKYDSVAYIDWELAVDNEFDEYDFSDAQMIKAVSNKFTSSALFWWSYVTPSVS

SEQ ID NO: 182565 - protein, 77 aa, Oryza sativa
  unsure (1)..(77): unsure at all Xaa locations
  Clone ID: PAT_MRT4530_79741C.1.pep
YTLLXSAIXLIXYELXLICYELSXHHQYIXXQLFRXSHNSSTHXSISTVLGSITKQLLAFEVSIINXQHKRXQNQWV

SEQ ID NO: 182566 - protein, 83 aa, Oryza sativa
  Clone ID: PAT_MRT4530_79742C.1.pep
ASLVPVPGPVRYSRGGPRVRWCSFRGRYGAWASCPPFLFILLLLPVFKFTYQLLPVYLSAPRSRSFFRFPLRHIFYSICASIF

SEQ ID NO: 182567 - protein, 52 aa, Oryza sativa
  unsure (1)..(52): unsure at all Xaa locations
  Clone ID: PAT_MRT4530_79743C.1.pep
LLLEFILSLRFLIYXYGIVYHLHIVHRNRSFMVYXLSWLVIAIVLRHHFTST

SEQ ID NO: 182568 - protein, 204 aa, Oryza sativa
  Clone ID: PAT_MRT4530_79744C.1.pep
MTLIAAGRDTIGSALSWFFYLLTKNPHVASKILEELDSVERATTTPDGMVTFDPDELKSLVYLHAAVCESLRLYPPVPLDHKGVVAADVMPSGHKVRPGDKIVVSIYAMGRTESVWGSDCMEFRPERWISDDGKLRYVPSYKFTPFITGPRTCLGKDMALVQLKVVAATVVKNFEIEAVPGHIVEPKLSMVLHMKNGLMVRVKR

SEQ ID NO: 182569 - protein, 61 aa, Oryza sativa
  Clone ID: PAT_MRT4530_79745C.1.pep
PRTPPPRSSCPRRGCPACTPARSPRRPARRRSASRPAPSAPRTPPARGPRPAGGRGTSRTP

SEQ ID NO: 182570 - protein, 59 aa, Oryza sativa
  Clone ID: PAT_MRT4530_79746C.1.pep
MSSTTLVLPKEPPSTPRLLPLRLLPLLDPPRQPPPPPCPPLTPPTPHLPREPTPPPPAA

SEQ ID NO: 182571 - protein, 82 aa, Oryza sativa
  Clone ID: PAT_MRT4530_79747C.1.pep
PRGPRKAGRLVLREIGLPSQKLLHPCKEEGRFKLLIPPEAVPRSAGPGAGPRVGSGREGPGAPEFCSVDQTEFSFFLVFKAP

SEQ ID NO: 182572 - protein, 95 aa, Oryza sativa
  Clone ID: PAT_MRT4530_79748C.1.pep
YKEVSRLTCFARPASHSRLSDPLIPLACPVFCGLPRAVCTTLLLCASSLIGRLRLGGSGSRACILWEVVHAFLFLSGSAYHRVYGKSFLDSVRII

SEQ ID NO: 182573 - protein, 780 aa, Oryza sativa
  Clone ID: PAT_MRT4530_79749C.1.pep
MGRRARALLHAPAPLLLLLALAAAAAAVAVASGPPFSCGAPSSAAFCNPRLPIEQRADDLVSRLTLEEKISQLGDQSPAVDRLGVPAYKWWSEALHGVSNAGRGIHLDGPLRAATSFPQVILTAASFNPHLWYRIGQVIGTEARAVYNNGQAEGLTFWAPNINVFRDPRWGRGQETPGEDPTVTGKYAAVFVRGVQGYALAGAINSTDLEASACCKHFTAYDLENWKGVTRYAFDAKVTAQDLADTYNPPFRSCVEDGGASGIMCSYNRVNGVPTCADYNLLSKTARGDWRFYGYITSDCDAVSIIHDVQGYAKTAEDAVADVLKAGMDVNCGSYVQEHGLSAIQQGKITEQDINRALHNLFAVRMRLGLFNGNPKYNRYGNIGPDQVCTQEHQNLALEAAQHGVVLLKNDANALPLSKSQVSSIAVIGHNANDATRLLGNYFGPPCISVTPLQVLQGYVKDTRFLAGCNSAACNVSSIGEAAQLASSVDYVVLFMGLDQDQEREEVDRLELSLPGMQENLINTVANAAKKPVILVLLCGGPVDVTFAKYNPKIGAILWAGYPGEAGGIAIAQVLFGEHNPGGRLPVTWYPKEFTSVPMTDMRMRADPSTGYPGRTYRFYRGNTVYKFGYGLSYSKYSHHFVANGTKLPSLSSIDGLKAMATAAAGTVSYDVEEIGPETCDKLKFPALVRVQNHGPMDGRHPVLLFLRWPNGAADGGRPASQLIGFQSLHLKSMQTVHVEFEVSPCKHFSRATEDGKKVIDHGSHFMMVGDDEFEMSFTP

SEQ ID NO: 182574 - protein, 363 aa, Oryza sativa
  unsure (1)..(363): unsure at all Xaa locations
  Clone ID: PAT_MRT4530_7974C.1.pep
VTMFVTTGNNPTGVPYVRVLFLVPGGKTEPXTKPYPLDMWKYGSALQQRPEDRSLYGRGGAHAAASRCARRRPLGAAGGRRRXAPMVAGGGHRHGGAAAERGEGKGEKRRRSTAHPRSTATTKKAAGAEEGGGAARVDGVDGAPAVGDRNGEVDEVGEDATKPTEAAPRWXDDGSGPELGGDGGERERRRELESGEEEGRXEAETGEGGAGRVXIGLEGGESGRSGWKPAREVRPPSMAPARFAXGQIRPFEREREREKWGERERGSRGVIPPTLLHAGTAGGGGIRAAAGARARGRRRERREEGDDGWAPPVSEGGGLARPSAGRAPGEAEWAAGRGERGGGRWAEXRPKGGKGDFLGFFFL

SEQ ID NO: 182575 - protein, 101 aa, Oryza sativa
  Clone ID: PAT_MRT4530_79750C.1.pep
GGFPPPIRFIGKGGRPCLTLRGPREAGRLVFREIRLPSQEFFHPCKKDGRFKLLIPPEAAPRSVGPGAGPRVGSGREGPGAPEFCSVDQPEFSFSLVFKAP

SEQ ID NO: 182576 - protein, 896 aa, Oryza sativa
  unsure (1)..(896): unsure at all Xaa locations
  Clone ID: PAT_MRT4530_79751C.1.pep
MAPPPPPTPSPAQPKTRKKDHVRLNNPFPRAVPSSSLRHRDAAPPLSFSPSSKLAHGAHDFPVGPHFLLRWDPSLGGAVSLAPRRGGGGATMWETVPGVAFVSAASVDTEADECRGSFALRDGRARLVPDRQRVDRIRAVYRRDADADADADLLRVAGAAFQASEHEQARFPVVVITGVVSARKPTPSPSCLCGRRRAAAAAGRPVLSARYWILLEEKSDTQVAFRVNLGDYQWSCDHDRHATHPSPLPSPSPSTSPRTHRAGSILRLRLSTRVQRSSGGSKKKKKLAFAAAGVPADREELAPLVPAAAAKEELEFNRVWMTLASSREERFYGFGEQFSRVEFKGKRVPVLVQEQGIGRGDQPITFAANLVSYRSGGNWSTTYAPSPFYMTSKMRSLYLEGYDYSIFDLTKPDRVQIQVYGSSVQGRILHGGSPTELITSYTESTGRPPALPRWITSGAVVGMQGGTDAVRRVWKQLQDHDVPVSAFWLQDWVGQRKTSIGSQLWWNWEVDDDHYAGWNDLVRDLRRRGVRTMTYCNPCLVPMDKKANAXEAPVRGGQEAGAPGPGRRRRAVHDAQHGVRRRHAGLHQPGRARLVQGRGPRRDGPRRRRRLDGRLRRGPPAERAAALLRLRRRRPRRGAQPLVFFVRAGFRESSRWAMLFWEGDQMVSWQANDGIKSSVVGLLTGGMSGFPLNHGDAGGYCTVDLPLLRYRRSEELLLRWLELSAFTVVFRTHEGNKPGSNCQFYSNNRTLAHFARCAKIYKAWEFYRIQLVEEAAEKGLPVARHLFLHYPEDQRVQKMTYQQFLVGTEMLVVPVLDKGRSTVTAYFPMSDGGLWKHVWTGDEFGGRTSRGGVGEGMSHGSEAEVEARIGFPAVFVRVGSTVGERFVRNLRDLKVL

SEQ ID NO: 182577 - protein, 102 aa, Oryza sativa
  unsure (1)..(102): unsure at all Xaa locations
  Clone ID: PAT_MRT4530_79752C.1.pep
TRVEPGXLPFTEKDVRNLIQSCRKSDQEESVDLIKMCRRFQEKDPDFKYEFTKGASNRVENVAWSFASSVQSYEMFGDAVVFNTTHRLPALDMLLGIWVGLN

SEQ ID NO: 182578 - protein, 121 aa, Oryza sativa
  Clone ID: PAT_MRT4530_79753C.1.pep
NKRLKATGKQENQQEIHQKRPNKRTRTKPYEPTGWDQTLKLTAGVKVLHKGRGSSRAPLKLNRVQIKEHARPRRRPEIKKAPTTGGGRILVLSPTRYKRLMAQTTDWTKHAGDSVRTNTPI

SEQ ID NO: 182579 - protein, 78 aa, Oryza sativa
  Clone ID: PAT_MRT4530_79754C.1.pep
YVRSPKKTLRWGGFKTLLGGSGRVGNIKLPQGLGGIAPVLGFHSVELEFRSLLGVVFNFNSGRRFLEFPFHQLEPLGS

SEQ ID NO: 182580 - protein, 59 aa, Oryza sativa
  Clone ID: PAT_MRT4530_79755C.1.pep
MERGIPEQCVASFSPGLREAFARNTLVHCVEVYGLMVWCLHPETTVIKIVIMQNSKKHR

SEQ ID NO: 182581 - protein, 207 aa, Oryza sativa
  Clone ID: PAT_MRT4530_79756C.1.pep
MEKTTEITTENTSTPRLPKIHVENGSTRSTGQLASNPLDCFYYGRRLALRFDTLHPSRGRRIPCALAIFVDLVGNLLVYLRIYRIRIPHNLKNRRGQSGGGRRKLKRRRRRNCSSLLWMNLADNQLIGRIPPEMAEIGRNPAPTFEKNRKDVSVLARLPAHPAAAWGSFHATHSSARPPALPPAAAAAPAPAHFRRPCPSIAPRERR

SEQ ID NO: 182582 - protein, 107 aa, Oryza sativa
  Clone ID: PAT_MRT4530_79757C.1.pep
VLLALEPGEHKITYGVARILNIPFLKLVHTAPLRTTTLPSMLIITESMGAITDVAALVQEIQATLENKTNDAWTLNGDIYVNPDFNIYDRHRNGRSPAAHPYIDMRD

SEQ ID NO: 182583 - protein, 41 aa, Oryza sativa
  unsure (1)..(41): unsure at all Xaa locations
  Clone ID: PAT_MRT4530_79758C.1.pep
PVEMRRXRTARXWXAARQPTMAKEPDLLGARLKLRRKKGGR

SEQ ID NO: 182584 - protein, 176 aa, Oryza sativa
  Clone ID: PAT_MRT4530_79759C.1.pep
MEEGEDAGRRRRPWRCSPAHGAEWVPAVESDGRGVDGVARTTANATASTVRLGAAASGGRSGGGGGGKGGDGARAMEGTGTGDCKTKKREEGTGNLYIDPRGSIVAGVTVISAAEWGERRRWFVVLIGVGVSQVEMHEEEKARAGAIDYFLYIDARYLRESTFDFSASSSTAQHVE

SEQ ID NO: 182585 - protein, 840 aa, Oryza sativa
  unsure (1)..(840): unsure at all Xaa locations
  Clone ID: PAT_MRT4530_7975C.1.pep
RWPSSSVRLAARRRRRRRRGSSRRQRRRRRRRSGVEGAGHHRRRVELQHVKFWAASQHHRXETPRITKWPNESRDLDDHQQNNEADEEADDELQPLVEQVRSMLSSMEDGAITASAYDTAWVALVPRLDGEGGTQFPAAVRWIVGSQLADGSWGDEALFSAYDRVINTLACVVALTRWSLHHDQCKQGLQFLNLNLWRLAEEEPDTMPIGFEIAFPSLVEAARGLGIDFPYDHPALKGIYANRELKLKRIPKDMMHIVPTSILHSLEGMPGLDWQRLLKLQCSDGSFLFSPSATAYALMQTGDKKCFAYIDRIIKKFDGGVPNVYPVDLFEHIWVVDRLERLGISRYFQREIEQNMDYVNRHWTEDGICWARNSNVKEVDDTAMAFRLLRLHGYNVSPSVFKNFEKDGEFFCFVGQSTQAVTGMYNLNRASQISFPGEDILQRARNFSYEFLREREAQGTLHDKWIISKDLPGEVQYTLDFPWYASLPRVEARTYIGQYGGNDDVWIGKTLYRMPIVNNATYLELAKQDFNRCQALHQHELQGLQKWFIENGLEAFGMTPEDVLRAYFLAAACIFEPNRASERLAWARVSVLANTISRHFYSDMSSMKRMERFMWSSLYEENGNVLGLEGYAKDGILARTLCQLIDLLSQETPPVREGQKCIHNLIRCAWIEWMMQQINMKDGRYDKGRVMHPGSCTVHNKETCLLIAQIVEICAGRIEEAASMINNTEGSWFIQLASSICDSLHAKMLLSQMYLLGTTTNRCQEDTKKNETTINQIDKEIELGMQELAQYLLPRVDDRRINNKTKQTFLSIVKSCYYAANCSPHMLDQHISEVIFEQVI

SEQ ID NO: 182586 - protein, 425 aa, Oryza sativa
  Clone ID: PAT_MRT4530_79760C.1.pep
MAFRNHDAAMVLFFFLLMVTTYANAHGHSKKPEEITQGVYGAAAAVAAGPGGTFDITKLGAVGNGRADSTGAVMAAWRSACAGAGKQTILIPKGDFMTGAMELRGPCNGAVTIQLDGNLLGSNDLSKYPGKKMPNWVEVRHVDNFVISGKGKLDGQGPGVWSKNSCAKNYNCKLLPNTLVLNTVNDGVVSGITLLNAKFFHMNIYRCKDIKISGVTINAPGDSPNTDGIHMGDSSKITIAATTIGTGDDCISIGPGTDGVNITGVTCGPGHGISIGSLGRYKDERDVRDVSVTRCVLRKTTNGLRIKSYEDSVSPVTVSKVSYDGVVMDHVDNPIIIDQKYCPNSICTSKGDSKVSVRDVTFRNITGSSNTPAVVQLLCSGKLPCSGVAMQDVRVLYGGSDKKTTAVCDHALGKSTGCLKELACL

SEQ ID NO: 182587 - protein, 151 aa, Oryza sativa
  Clone ID: PAT_MRT4530_79761C.1.pep
MTAEGARRWDPENTRQRKEEIERAKERTRGEGTRWDASPRESRGGSSKQSAKATRRDTAIGRENTRAQYAHAPKGQTDFEREGPQPFKLAGIGGVSEFFGWTDQQRAQAVKEGLGYRLIFTGRLVGALVLVDALFLGAQRIGPLLQELQSR

SEQ ID NO: 182588 - protein, 74 aa, Oryza sativa
  Clone ID: PAT_MRT4530_79762C.1.pep
RICSAFSSLLFQYIFCCKSMSASCGQKFHALHDFSGRTQRAPVTSAQYSCLCVKFCLDRSFHISNANAPGLGGI

SEQ ID NO: 182589 - protein, 130 aa, Oryza sativa
  Clone ID: PAT_MRT4530_79763C.1.pep
AVLITWYDRDVWSDVEMNTQARADLTCARMEAGHGVHRPACRRACIWPPGPGAPAVGPGSPELGPPPPPPTPKPDGGPCSNSWGPRSPEKPYHGWHPTTTTCRSGWAPHLPSLEGYRRRLSRITRPARGG

SEQ ID NO: 182590 - protein, 94 aa, Oryza sativa
  Clone ID: PAT_MRT4530_79764C.1.pep
AHTNGRHASSLHRAVVNDRVARRSLTFFLNPRLDRVVSPPPALVDAAHPRAFPDFTWREFLEFTQRHYRSDTNTMDAFVAWIKQRNGYESLDKY

SEQ ID NO: 182591 - protein, 326 aa, Oryza sativa
  Clone ID: PAT_MRT4530_79765C.1.pep
MSSPPPQGPAVMAAPHACAGRRQLPQPLPCAFLAAAASSPHRVPASPTCRPHCRCGRQLRPSLPPARDIPARADRRRLPPAAPSCLPRRHGLLAPPRPRVPDAGTTVPALHRHYRRVSGERKMSFRAREMYKKVVRRVGGEGKLPAELMASVKNLLPDSKVVMGRAKRGIYAGRHIQFGNKVSEDGGNKSRRTWKPNVQEKRLFSYIHDRHIRVKVTTHALRCIDKAGGIDEYLLKTPYNKMDTEMGVAWKAKIEKMYSQLAQMEVGFFSPEEETKIEQGFEEARAAKREHRREARRALAKQTQLEAGNAGGDKTAEAASNVAVKS

SEQ ID NO: 182592 - protein, 236 aa, Oryza sativa
  Clone ID: PAT_MRT4530_79766C.1.pep
MATAEVASPETAVRHGSGREEQPPPSTSWCPTPSSAVGGEKGPAAAILAARQLAGGLLRLRRGGGEGGGREGGGGAWRSKSIGGAGGGVGADICAMVAEHEKIEWEVRPGGMLVQKRRAPEEQDDGSSSMSAHSGADAIVVRVSTGWQWHDVSIDSTATFGDLKVMLSLVTGLWPRDQRLLYKGKERDDGDHLHMVGVQDKDKVLLLEDPAVKERKLRSTTLAQLMGVPCHSFIEV

SEQ ID NO: 182593 - protein, 79 aa, Oryza sativa
  unsure (1)..(79): unsure at all Xaa locations
  Clone ID: PAT_MRT4530_79767C.1.pep
SASPPSEKVVVLPRRRRREYTAEGAAGVRRPPSLRRHRRRLERVIALPISGELPFTFLSFFWLFIGRXKGGXLSGSRRX

SEQ ID NO: 182594 - protein, 71 aa, Oryza sativa
  Clone ID: PAT_MRT4530_79768C.1.pep
FVEGKNKSFDMHLVSKHRLHNAILNSASHVASQIGGSPSGKPHKFPPKFEWFMHFVHLFLCSCSLISSNRT

SEQ ID NO: 182595 - protein, 87 aa, Oryza sativa
  unsure (1)..(87): unsure at all Xaa locations
  Clone ID: PAT_MRT4530_79769C.1.pep
PYIPLSGEPGGVTAGGAXSQLVAAGRTNGSEARGMDGLGRRLPPWWMDXGIFLTCKRAQSRQSLDGDWMAEIHRMSHCDMLTQCHRI

SEQ ID NO: 182596 - protein, 280 aa, Oryza sativa
  Clone ID: PAT_MRT4530_7976C.1.pep
FKRVYCVSRGEGARGPGPREWGPRGSLTVHAGPGAPGLTPAGAVGPTRQPHLRARAADGRAPRGSHSARPRAAKPVRPAGGGARAPMVASGGHRHGGAAAERGEGKEEKKRRSTAHPRSTATTKKAAGAEEGGGAARVDGVDGVPAVGDRNGGVDEVGEDAAKPKEAAPRWEVIRDDDGGGPELDGDGGGRERRRDLDSGEEEGRREAETEGGGRGRAGGSGGRKGMTGGPHPSARVAGGPARQWRARGESPDGPRGEEREGEGDGPSRPKREREGKGTF

SEQ ID NO: 182597 - protein, 155 aa, Oryza sativa
  Clone ID: PAT_MRT4530_79770C.1.pep
IHSTDPTSSTCAGESLPPLQRLTVHSTAARSSLVAHRYTKARSEPLVPPRARGNSPLRPRSSCKYRNASGPFPAAASEQLRRYMHPQGLPPPICPEHANADVMFWLLRSISGISSTTNIDSGSDKYSCIVVRSTSGTRPGNAGSFTSPLLAVTSK

SEQ ID NO: 182598 - protein, 88 aa, Oryza sativa
  Clone ID: PAT_MRT4530_79771C.1.pep
MRQAEPEPGQDRSVEEDLGGACSDATARLRRQERDHLRSGRGWGRPRLRRGQRWTSAATTDGEELGSSGNWGRRRLRGRPRLRRWLGM

SEQ ID NO: 182599 - protein, 235 aa, Oryza sativa
  Clone ID: PAT_MRT4530_79772C.1.pep
MPGARGLIGGRGRHGRLVARTEQLIDTQNQIEARRHRQRHARAPAASITETCSFAKLCMESQSSLPLTARAAADTSVLASAAVLLVKQNLHGATAAAGGGDLDGTPYDNADDGMVRYGRAVAARLAGAARRAQWRRRTPLQRRHGHHQAAPTPTFFLFLVGLELDLEPASLRRTGRTALANVALALVAAALLAATAHALPLAMAREVVAREAVPRPPVPSKPCALWASPPSPSKP

SEQ ID NO: 182600 - protein, 125 aa, Oryza sativa
  Clone ID: PAT_MRT4530_79773C.1.pep
VHSTAARSSLVAHRYTKARSEPLVPPRARGNSPLRPRSSCKYRNASGPFPAAASEQLRRYMHPQGLPPPICPVSTTIGYNSCSSQSLFLFLLALQILSEIEGDLSGFRFCLAHMFCMNTIRRTNS

SEQ ID NO: 182601 - protein, 77 aa, Oryza sativa
  Clone ID: PAT_MRT4530_79774C.1.pep
MESWRGVDEAAAAAGGSKVDDECETARRVREDRALWWVSHGSKCASLVVLGPSIFRPKSRPCCPDLSGGDSVTGGRR

SEQ ID NO: 182602 - protein, 78 aa, Oryza sativa
  Clone ID: PAT_MRT4530_79775C.1.pep
MLLGKNIPCHLVQTSRYHRNSIPQSRFVEDSPDPTIAQRLEAPTSYSELSQEQTKMGHTVAVTLEAVEQHSIDGGGSA

SEQ ID NO: 182603 - protein, 89 aa, Oryza sativa
  unsure (1)..(89): unsure at all Xaa locations
  Clone ID: PAT_MRT4530_79776C.1.pep
GGHAPPPCAPPPPRAPLSPPLPAPGRRALAIHPATAAAADELACSALRCXARLAYQIHAQACRRXPACNLFDEMAHKDAASYTAMSNRG

SEQ ID NO: 182604 - protein, 64 aa, Oryza sativa
  Clone ID: PAT_MRT4530_79777C.1.pep
MPSVQDALRCFPPLIRLHCVTANPVAPCCLLPLISPSRPPQPLPLGLSYTPCVLESVLQLATNL

SEQ ID NO: 182605 - protein, 39 aa, Oryza sativa
  Clone ID: PAT_MRT4530_79778C.1.pep
MKPLVKELAGSAAADGRCGASKRAHRRGHGCGVSMRAAQ

SEQ ID NO: 182606 - protein, 79 aa, Oryza sativa
  Clone ID: PAT_MRT4530_79779C.1.pep
MGWVTLEKDLGLYGKLVSWAIKPNIKHGPKPSRDVEKLAKKPGSFSTAWKEHKARFFENEVRKFRTLSQEDGKGISPGF

SEQ ID NO: 182607 - protein, 48 aa, Oryza sativa
  Clone ID: PAT_MRT4530_7977C.1.pep
GSTSSEESPVHHVILCNHVKKMSLRSFTFHHTGFNQMIVHAQLHTVYS

SEQ ID NO: 182608 - protein, 98 aa, Oryza sativa
  unsure (1)..(98): unsure at all Xaa locations
  Clone ID: PAT_MRT4530_79780C.1.pep
LLYFFFFLFFFIFNYFSKNKKDGIVDTDDLCLKPXGNPQGVGANKNNFWQDGNEECLLNNGEACAIGARTELRGQFRFIYCVEDLLVNHKQREGESWW

SEQ ID NO: 182609 - protein, 978 aa, Oryza sativa
  Clone ID: PAT_MRT4530_79781C.1.pep
VREIPDMDGFGLSSTHSAVKSLVGRLTDVLSDQVQLLGGLRREVQFIRDEMESMNGFLLNHARRGRMDHQLQAWMNQVKDLANHSQYCVDQYLRCLGTTSHRSPGGLWGSVRRLPRFVSTLPARYRLAIQIQDIKIRVVEVSQRQQRYPLHGTATEQEPQSGMASDHSQQAFLTGDSEADQQEHLRRRILAEDDSGLFKEAADELTSWLTVEGDGRSDLRIIPIVGSRGMGKTTLAEQVYKGYSSRLADHKAWISVGSNQSPQQVLRDILAQIVGLHANNLQDMGTWGNSQIALMIQEQLEGKRFLIVLDDVCSESLWKDIEASLHCGNSAPSAILVTTSLPEVAQSFCPYRIYDLRYIQEEHNRSLVDFFLVRAANFISDNGHGKASLKEEVLRSILVKCSPCIFSMKMLLRFLYANPNKTLQELHDFSNSLCFCSPLHLSSWLSNAEKMLTFCYNALPCDYRSCLLYLTIFPNDHNIRRTSLLRKWIAEGLIAERDGLSAFDVANRCFDALLAQRFVLPGDVGNSGKVNSCRVHNLVRDFIAWVIRDDNFVYTKLPVDLAHRLPIHNGERLQQVSRIKLRASHFDDCWSMTRCCFTTKSVDPLAGISMLLRSIQESAQLGLRLNVLDLEGCKGLEKYHLNSVCKIFQLKYLSLRNTDVSHLPKKIDKLQYLETLDIRQTQIKAFPGKHFILPGLKHLLAGCTNCPSKKNNLMEKESCSFSTVLMPQKIVRMGKLEILCYAEVSSGLTGLMGICQLRRLRKLGVLLQGNAACNLDYLFRQIDMLDRSLHSLSIRMERLKLAKDDARKRDDMVPASFPFSPPKFVQKLNISGIRSALLGWIGDLHQLSKITLHETSLTEHVLGILGQLGSLRCLKLQCNSTMGSSLSFRSGAFRNLVALVVQDNNLLDIIFDYGAAPRLERVILSIAAIDSLSGVQHLQQLKELELHGSARNIGEVEQAIAGHHNNPVFRHEQWNDLH

SEQ ID NO: 182610 - protein, 1371 aa, Oryza sativa
  Clone ID: PAT_MRT4530_79782C.1.pep
MGLVATAIEAAIGWVVESILGNFFTGQMQVWTREVGLSEEVEELETEMRSMQMVLAAAESSKIDNRPLSESLDELKELLYDAEDVMDELDYYRLQQHIEGGKGSTAASCTNPEGSYVSSSTPSYFQRKRKREEEEEQTHSTMLPLEIKHDISKRINEIVNCLRTRCKPVQGVLQLEILRQIAMPKHSQSEPRKPRQTTSLAIEHKVYGRDTERDNIIELLTKEIRGKRFLLILDDMWEDGNRSGWDKLLAPLKCNEVSGCMVLATTRRASVARIIGTMSKVEVNGLDETVFWLLFKEWAFLGNEKLECNPTLQSIGKHIAKALKGNPLAARSVGALLNRSVSFDHWRKVQHKWKFLLKQDDDILAILKFSYEFLPVHLQHCFSYCSLFPKDHKFNGKKLVRAWISQNFVKCECRAERLEETGKQYLDNLVDWGFFEEVESHYVMHDLMHDLAEEVSSDECDTVDGLESKKISPGLQHLSIITTAYDREEPCNFPREKFENILQSIGSLPKLRTLMFFGENSIMLLRSLNTICKESKRLRLLKIYVTAADISSTHNLFKPNHLRYLEFIVVPTNNMFGSRGIVNTSIPQALTKFYHLQVLDVSSKGNLAVPTGLNNLINLRHLIAHEKVHSTIAGLGNLTSLQELIFKVQDADNFNIGQLRALNELVILGISQLENVKTKQEASSARMIDKEHLEELSLLWNDNSMNPEPTAEKTRDDVIEGLEPLQNLKHLQLIRYSGATSPTWLASRVTSLQVLHLENCRQWQIVQSLEMLPLLRKLKLIRMWNLMEVSIPSCLEELDLVNVPKLEKCVGTYGLDLTSGLRVLIVKDCPILNEFTFFHKDYFHAEQKSWFPSLNKLIVGRCHRIITIAEVSYTYFVKLCYRAWKILPLEEMQALKKLELMDVPVVEELSVPSLEKLVLIQIPRLQSCRGITTAPSPHFSTSQGDQRELVCGLRELTINDCPSLLVQFPIPPSSLISFLSIKGLSSFPTMVINRRVLTIESNELSELDGRISPFHNLKGITWVNLRRCPNLTRISIDGFSQPHVMSKPVHDNSIPITSYPVLPSVNSLSIQSCGIAGGWLTLMLPHLQSLENLELRDCPQIKLLSTSQCTKIEAPNSLASAETTSARDKYLLQIPYNLLRSLKWLIIWACRDLEFSGVNEGFGGFTSLVELQIRDCPRLVPSLCPFSLSGLPSITKLDLWNSPDLKSLQLGYCTALVDLAIDSCKSLASIEGFQSIRNLRSLRVGDSPSVYPCLQLMSQQQGASDIFSQLETLTVDDASVLSVPLCKHLTSLRVLGLHRDGYSGKSMASRANFLTGQMQVWTREVGLSEEVELETEMRSMYDAEDVMDELDYYRLQQHIEGGAESHQPSIP

SEQ ID NO: 182611 - protein, 588 aa, Oryza sativa
  Clone ID: PAT_MRT4530_79783C.1.pep
MDLDKSTSTSASLKKLQEEGALPGCGTMKREPGGTEPEPILGRMVAVEDYILCGFLPPPSEFLLLVLNFYGLSLLHLNPNSIAFLSIFSHLCEAYIGVEPFLDLFHFYYELHWMESTRVSGCVGFRLRDGLKSRYIPFQCPSSHSKWRARWFYLQIENSDPIFAVPEEQPDKSTGLNSETVGHRVGQLMISGPSTASDVPVPLCEKGKAECEAAINALPLTDVIGPLVDHQAADSLKEGVAQETSDTAVATVATTSGSHVPKKGRKFTSVLCSRRKAPSPSLLPPVSVAAFRRAARTKAAQDGPSGTSSASPVVASTDVVVMPRSREATPSGPASDLVASRGPPAAVLTWEELQVEMGCLLEAGARGISREVAEARAAAASSANKRADKLAEARGGGFLKSRILVPLDLDVEDVQQRGQPELPVIIPALAFEPHVSPDNVDQNLPVETGMATTSLDLESALADQDRHIQYWKTKFEVAELERTMLEVKKEQAVETLRGREVWFNSYLKSCCTSMARVCRELRVPRGDPEESAAGYISWLNGAYTQLEGVDKGFSRSRRTPVEIDHLAKSMAPLAEKVFQSMDWRWPSW

SEQ ID NO: 182612 - protein, 111 aa, Oryza sativa
  Clone ID: PAT_MRT4530_79784C.1.pep
IILWFLFENVMALHRLKATLIGFFEAGRANEWIVTQKLGNIQKLKSIVRVTKNCRFKDRFHCLELFIGGFLLTSACYDYLYRDDIFYIFLLSQSIIYFAIGFEFMGVSVSS

SEQ ID NO: 182613 - protein, 446 aa, Oryza sativa
  unsure (1)..(446): unsure at all Xaa locations
  Clone ID: PAT_MRT4530_79785C.1.pep
MEREPGGLNRETVERRVGQLMISGPTTASDVPIPLCEKGXAEREAAINSEDVPLTSYWSYLGLGRVSATSTMAEAGDAGRELQVEMGRILEAGAHGISREIAEARTSAASSANERADKLARDLAEVCEDLQKMRELVAGNERQRRGLEDRMSELENNPSRIRGSLRVTYTGLHQLARECGVTTTIPVNPDEFSLTTSLAKLAKAMEAIPSKHAARIGEEASNGIYTEACHVLACVRDVDVEDVQQRGQPESPVIVLALAFEPHVSPDDVGQILPVETGMATTSLDLESALADQDRRIQYWKTKFDVAELERTMLEVKKEQAVETLRGREVWFNSYLKSCCTSMARVCRELRVPRGDPKESAARYISWLNGACTQLEGVGKRIDEALKQECHRSSRYARGHVLACIRDHRPQLHLEFLHEGFSRSRRTLAEIDYLAKSMAPLAEKVF

SEQ ID NO: 182614 - protein, 67 aa, Oryza sativa
  Clone ID: PAT_MRT4530_79786C.1.pep
MNKEYAAKEIREDAGKLVMEMIGLWTSASFFSWRIQQLPGLDWRTSPSNGTRHGRLPWDLVPATGPL

SEQ ID NO: 182615 - protein, 150 aa, Oryza sativa
  unsure (1)..(150): unsure at all Xaa locations
  Clone ID: PAT_MRT4530_79787C.1.pep
TDLESALAGQDRRIQYWKTKFEVAELERTMLEVKKEQAVETLXGREVWFNSYLKSCCTSMAKVCRELRVPRGDPEESAAGYISWLNGACTQLEGVGKRIDEPLKQECRRSSRYAGGHVLACXTEIDHLAKSMAPLAEKVFQSMNWRWPSW

SEQ ID NO: 182616 - protein, 48 aa, Oryza sativa
  Clone ID: PAT_MRT4530_79788C.1.pep
LQLRQSCYGCGMQIQSPNLMDTVHSNNLAQNYYNKVIVAFNLDLPLKN

SEQ ID NO: 182617 - protein, 307 aa, Oryza sativa
  Clone ID: PAT_MRT4530_79789C.1.pep
MNGRSGSVVLCSFAAQLFLALLAGVRRRKATGVRVLLLWAAYQLGGFAGTYALGSMSLSRTTPQQQQQLALWAPFLLLHLAGPDNITAYSLDDTALAGRQVLTVAVQIAGAAYVLYRQIYSSSSSTAGGGDGGSGLMWVSVVMFVIGVAKYVERAVAMRQADLGSMRSSSKKSKLERRRSFSDVRELGNELALLVAHDLLYITKGAFVDHLDDEHPLDRDAVRSEIFRHGWKEMCEVVEMELLLAANHPIEHFVRTLHTSGTATDKKRLENTGRNSEQRSRVFQSFRESRERRNLWDNFLGSFIQLN

SEQ ID NO: 182618 - protein, 804 aa, Oryza sativa
  unsure (1)..(804): unsure at all Xaa locations
  Clone ID: PAT_MRT4530_7978C.1.pep
MDNTGNKGYGNDGSDDSKTQANGNEKSINETSPELIQIVVNQTNMLATAFQLLQNRNNPAGATNVQVPTVQQQCKLSEFLKTGPPTFAMAVDPMEASDWLRTVEKKLGLIQCTDQERVGFATHQLVGPASEWWDSYEASRPEGHTITWNEFSSVFKRSHVPAGMITLRKREFRYLKQGDLTVAEYLHEFYRLAHYAPEDVETDEDKQEKFLQGLKDELAVQLLLEDYEDFEKLVDKAMQLESEHNRMTNCKRRMVNNPVFPGGNQRQRTEPLQITGSSVVYPEFLPQEDGRNADNNTSNTNNDDTTNNHGSCPISDHSNKACNVGSIRQDVNDSINVGTQNDNLSNXFDTEKDSNGDSNDGTADANVSKGFQPPIPTPSHNDHPQMDSSAKKTLICYNCKEPGHFSRDCPQPKRNLRHHSGHYARRRQVTRLVVTGANAVPVSLKGSKPKDLIVTRSIHNSRSEEYLVDKVDSKDMNYAKXSGTEAPSSSAATQSKSAKGSTRDKSAAPSPSVSPPFRGESTGDASSPASSGVATTSPPPAASATSPERRPTPPPPSSAPRRRSHPRHHLLLARTSPEHRXRAGFSFLLGGSTGRPHLHHLRHRSGKVVLGIISPPSKPLRGPSSSSPIVLVVDVPSVARLVVSRRRLRHRHRSGVFHVILAAVQPLPAALVASSPAPVVVVLVLSSFSVVVAFVPPSSRSRSSSSLXSRSLQPPSSSSSSPPRRQASRRPRLAFVQGSPPKPSPRRSSPLRPSVSAAPVRRCRSHASSRGGKVPSXRCPVLVLSVSPVPVVRLSAPVPVYRRR

SEQ ID NO: 182619 - protein, 68 aa, Oryza sativa
  Clone ID: PAT_MRT4530_79790C.1.pep
MGATFSWSASSSWSLGSLDDYIIVGCVVTAADAVVEGASVKLLFSCGGRILPRHADGALRYVGGDNRV

SEQ ID NO: 182620 - protein, 513 aa, Oryza sativa
  Clone ID: PAT_MRT4530_79791C.1.pep
MGGSRFTSWSWSSSSQQKKGGKESSLTPPEQEEELETVGDDRISALPDDILLQILERLDLPMAIRTSTLSRRWLQLPRLLSHLIIDITHFMPAPPRRAVNFNVDQIMAAYTAAVNNLLLSSPSSSNSNTRRIIKWLTNLALRNLAFQESDVSHILNTCHNLKFLALCSCVSDFVVLKIDAPHSELLTLEIVTCGFDRADLIHLPNLRRVVCWDWCLPNPPIRFGNVTRLHNMSLSCSATYDQMPFRLTELISSATNLTILYLDFQDQMIWIEPQGPKLLYPVFSNVRDVYLCNIFYECDLNWTVFVLEAAARLSNFYLKLCQHPCERNRCEDSAEKVNLLWDQMSSDFKHRHLNLLEITGFAMDDKMINYTRLIMERAVNLKRIRLLDQVPCDKGNAMNVPRRTFIWNLRIPLKIKIFLWYLWRGITLTKDNLAKRKWKGSIKYCFCNSNETIQHLFVYCHLVIFKGTYWAQQWSLLFKEEDGHNLKEYRKMLEARVMELYAKYGWNLIRRLE

SEQ ID NO: 182621 - protein, 358 aa, Oryza sativa
  Clone ID: PAT_MRT4530_79792C.1.pep
MQAQSRLAAAASGGSGSGISGSGGISRLGGGAGEEHEAVVRELTRGHELTARLRAEALRALRGQGQAEATATFILGEVSRAFTVCLSIMASASPSASPPQPDETPPADSAVSPPPPRAAREDNVPRKRLLTASPYDDGYQWRKYGQKKINNTNFPRSYYRCSYHRERRCPAQKHVQQRDGDDVPALHVVVYTHEHTCLQGAPAELPDAATNGGAAAAASPDYFPAGGETPSSLRRLRGVGGGGLQPQFVDHRAAMEERERQVLVSSLARVLQGRQCYDDDDDDDTDVASLGAVHARAPAAAAPVAASSSSSGPVDAAGEELDVMDYDMTDALFWGPFGTDSNSYDGNLTSTRCFDLIN

SEQ ID NO: 182622 - protein, 104 aa, Oryza sativa
  Clone ID: PAT_MRT4530_79793C.1.pep
GGPVPNQKDPTFREGASEGVSLIVPTSPKGIYAPRHKSGATAVFSAQPVVKAVARGFFLGVPQKKKIRYVTARGIKVGYPPRGCPPSFFLFFFVSVFFFFGDTI

SEQ ID NO: 182623 - protein, 130 aa, Oryza sativa
  unsure (1)..(130): unsure at all Xaa locations
  Clone ID: PAT_MRT4530_79794C.1.pep
GRDVMLLFGASTLSLSLXHSPRAAATAPAAGRRRDGSAVVVRQPAGPILSGFQRYAIGVRGGNWSSQPHWGGGDAVVPWARELPWPAGRGNWTSIGIHPGRQAGVLMKARVPPTALQISPLPSKLRRLLI

SEQ ID NO: 182624 - protein, 66 aa, Oryza sativa
  unsure (1)..(66): unsure at all Xaa locations
  Clone ID: PAT_MRT4530_79795C.1.pep
IIAQFMVRDIKPLPWSGEMRVNYFPMLSTLISPVGVTLRNGGHSGSWSRRSPPKFFIXXXXFXKIK

SEQ ID NO: 182625 - protein, 260 aa, Oryza sativa
  unsure (1)..(260): unsure at all Xaa locations
  Clone ID: PAT_MRT4530_79796C.1.pep
VNVGYGSPLVFPGLTKPGSSRCLCVVGMVGNAGNQVGDDSDDGIKVTNEKLRAVIRKSKEVLEIHRNLLEXGGLGDVAGALPKALARRGHRVMVVVPMYKNYAEPQQLGEPRRYQVAGQDMEVIYYHAYIDGVDFVFIDNPIFHHVENDIYGGDRTDILKRMVLLCKAAIEVPWYVPCGGYCYGDGNLVFLANDWHTALLPVYLKAYYHDNGFMIYARSVLVLHNIAHQGXRGPLDDFSYLDLPVDYMDLFKXYDPFGGD

SEQ ID NO: 182626 - protein, 410 aa, Oryza sativa
  Clone ID: PAT_MRT4530_79797C.1.pep
MTARLALLASLLLLLQLVPPSSAVVLELHGNVYPIGHFFITMNIGDPAKSYFLDIDTGSTLTWLQCDAPCTNCNIVPHVLYKPTPKKLVTCADSLCTDLYTDLGKPKRCGSQKQCDYVIQYVDSSSMGVLVIDRFSLSASNGTNPTTIAFGCGYDQGKKNRNVPIPVDSILGLSRGKVTLLSQLKSQGVITKHVLGHCISSKGGGFLFFGDAQVPTSGVTWTPMNREHKYYSPGHGTLHFDSNSKAISAAPMAVIFDSGATYTYFAAQPYQATLSVVKSTLNSECKFLTEVTEKDRALTVCWKGKDKIVTIDEVKKCFRSLSLEFADGDKKATLEIPPEHYLIISQEGHVCLGILDGSKEHLSLAGTNLIGGITMLDQMVIYDSERSLLGWVNYQCDRIPRSESAITSRL

SEQ ID NO: 182627 - protein, 749 aa, Oryza sativa
  Clone ID: PAT_MRT4530_79798C.1.pep
MAAAAVSSLLAPSGSCYSPGCHSCWGPGPGGGRRLPSPRRRPITAAARPTWAVPRRSRLEWGRVEAQNSGARTSCRAALQWLSSTARSHVNVGYGSPLVFPGLTKPGSSRCLCVVGMVGNAGNQVGDDSDDGIKVTNEKLRAVIRKSKEVLEIHRNLLEKISASERKKITSIIEDSSIYNEQDPFGQRDSSFYHLDEVPDDDEFSYDLQMYLDRHPDQSEVVATQDYEAQLSQISEMGQSVAEGTSDDPSASASVDLINIILVAAECAPWSKTGGLGDVAGALPKALARRGHRVMVVVPMYKNYAEPQQLGEPRRYQVAGQDMEVIYYHAYIDGVDFVFIDNPIFHHVENDIYGGDRTDILKRMVLLCKAAIEVPWYVPCGGYCYGDGNLVFLANDWHTALLPVYLKAYYHDNGFMIYARSVLVIHNIAHQGRGPLDDFSYLDLPVDYMDLFKLYDPFGGDHLNIFAAGIKAADRLLTVSHGYAWELKTAEGGWGLHGIINESDWKFQGIVNGIDTTDWNPRCDIHLKSDGYTNYSLETVQAGKQQCKAALQKELGLPVRGDVPVIAFIGRLDHQKGVDLIAEAMPWIAGQDVQLIMLGTGRQDLEDTLRRLESQHYDRVRGWVGFSIRLAHRMTAGADILLMPSRFEPCGLNQLYAMMYGTVPVVHAVGGLRDTVEHYNPYEESGLGWTFEKAEANRLIDALGHCLNTYRNYRTSWEGLQKRGMMQDLSWDNAAKLYEEVLLAAKYQW

SEQ ID NO: 182628 - protein, 995 aa, Oryza sativa
  unsure (1)..(995): unsure at all Xaa locations
  Clone ID: PAT_MRT4530_79799C.1.pep
MAAAAVSSLLAPSGSCYSPGCHSCWGPGPGGGRRLPSPRRRPITAAARPTWAVPRRSRLEWGRVEAQNSGARTSCRAALQWLSSTARSHVNVGYGSPLVFPGNQVGDDSDDGIKVTNEKLRAVIRKSKEVLEIHRNLLEKVHKLKIQDYYELPKISASERKKITSIIEDSSIYNEQDPFGQRDSSFYHLDEVPDDDEFSYDLQMYLDRRPDQSEVVATQDYEAQLSQISEMGQSVADGNSDEASASAAVDLINIILVAAECAPWSKTGGLGDVAGALPKALARRGHRVMVVVPMYKNYAEPQQLGEPRRYQVAGQDMEVIYYHAYIDGVDFVFIDNPIFHHVENDIYGGDRTDILKRMVLLCKAAIEVPWYVPCGGYCYGDGNLVFLANDWHTALLPVYLKAYYHDNGFMIYARSVLVIHNIAHXGLNQLYAMMYGTVPVVHAVGGLRDTVEHYNPYXGVRTWLEAADRLLTVSHGYAWELKTAEGGWGLHGIINESDWKFQGIVNGXWLLRCMRNINGDQSKNYSLETVQAGKQQCKAALQKELGLPVRGDVPVYIFLXILDETEFFCQDLTSFXQARPWIAGQDVQLIMLGTGRQDLEDTLRRLESQHYDRVRGWVGFSIRLAHRMTAGADILLMPSRFEPCGLNQLYAMMYGTVPVVHAVGGLRDTVEHYNPYEESGLGWTFEKAEANRLIDALGHCLNTYRNYRTSWEGLQKRGMMQDLSWDNAAKLYEEVLLAAKYQCFFVRSDIIFKKAHDEPTSQVNTAADDAFVGRWQNTWKIQPSASMHLCPKERLQAPLCALERLQTTIVRPWIPRLVHWHMKEKEIASMQRPCGYQRVQCSQARMRWPQACDAGCLAPRRDGDIQGYKKEHIKVQLVRSRRRLVVSGECPVAGETNRWSRFRLQFPVPDGCDLKAIQARLHDGVIRVTLPGVKPQQQPPPAKTAAAAAVVGGDQRGGGERCQFLRERGKLATTLLGVVLVLFSFVIYIRYSVKP

SEQ ID NO: 182629 - protein, 254 aa, Oryza sativa
  Clone ID: PAT_MRT4530_7979C.1.pep
MISPDAARNVVGIIGNVISFGLFLSPVPTFWRICKRKDVEQFKADPYLATLLNCMLWVFYGIPIVHPNSILVVTINGIGLIVEGTYLFIFFLYSPNKKRLRMLAVLGVELVFMLAVILGVLLSAHTHKKRSMIVGILCVFFGSIMYFSPLTIMGKVIKTKSVEYMPFFLSLVCFLNGVCWTAYALIRFDIYVTIPNGLGAIFGAIQLILYACYYRTTPKKTKAAKDVEMPSVISGPGAAATASGGSVVSVTVER

SEQ ID NO: 182630 - protein, 84 aa, Oryza sativa
  Clone ID: PAT_MRT4530_797C.1.pep
MAVGRRRWGDRRQDPDPAGRDHIHRAPMGGAVPGLCPLDIKGRVLVWRDYRGDDSSLQAERFFTKLLDKEGDSEAHSPGVYDDA

SEQ ID NO: 182631 - protein, 58 aa, Oryza sativa
  Clone ID: PAT_MRT4530_79800C.1.pep
KKTGKFLAPFWPIIHWPYRIKPTPFYIKTALKWPRGQRVFLGGPQGGGLRGKNKFPGC

SEQ ID NO: 182632 - protein, 121 aa, Oryza sativa
  Clone ID: PAT_MRT4530_79801C.1.pep
TPQPQLHLLLCTAFDSLAHSLQEVLDKHKPKLHLDTLFLHGNLPFAKVGVPPPPPGAAPLLSPASVSVHQQEQPATPPETETEDTAGPCHPLILIQTRRNSSLYSTSSDMQNLKESDSLRS

SEQ ID NO: 182633 - protein, 70 aa, Oryza sativa
  Clone ID: PAT_MRT4530_79802C.1.pep
TKDGSTHELEDYNEIAEIADITAGGCSLEIVAGNKYCITGNSKSFYVNSSNGSILDPRPSKQALEDSTLV

SEQ ID NO: 182634 - protein, 64 aa, Oryza sativa
  Clone ID: PAT_MRT4530_79803C.1.pep
GDYSEAPLKQYAECTLPTLVDPCYLTLLSKLAQKSIQLDCHQKFMEIYREIRSSTLERTLKRLG

SEQ ID NO: 182635 - protein, 832 aa, Oryza sativa
  Clone ID: PAT_MRT4530_79804C.1.pep
MSADRQETAKAKVQKFLKTGVIQEIDYPEWLANRVLVQKSNGKWRMCVDFTDLNKACPKDDFPLSRIDQLVDSTAGCKLMSFLDAYSGYHQIHMSPADIPNTAFITLFGTFCHLRMPFGLRNAEANFARLVYKVLDKQLGRNMEAYVDDIVVKSRKAFDHRRPSTTCAAGMKLKPEKCVFGVRAGKLLGFLVSERGIEASSEKIDAIQQMKPLTSVHEIQKLAGRIAALSRFLSMAAERGLPFFKTLRGAGKFNWTPECQAVFDELKQYLQSPPALINLAPGSELLLYPAALPVAVSAALVQETESGQKPVYFVSEALQGAKTRYIEMGKLAYALVMASRKLKHYLQAHKVIVSSQYPLGKILRGKEVTGWLSKWTAELSPFDLHLVARTAVNGVPIRYAARLQFDTTNNAAEYEAILLGLRKAKALGIRRLLIRTDYKLVAGHVDKSFGAIEEGMKRYLEAVRSMEKCFTGITVEHLPRGYNEEADALAKSAACGGPHSPGIFLEVQYEPSVPMESMEVMAIDQAKLGEDLYDWRTPFVKYLETSWLPEDEAEAKHLQLRAARYKMVSGQPYRSGVLQPLLRCISFAEGEEMAKKIQQGLCGTHQAARTVASKKVKKCESCQRHGRSQTAPQYELQPIAPIWPFAIWGLDIIGPFPVARNGYKFAIVAVEYFSRWIEAEPLGAITSAAVQKFVWKNIVCHFGVPKEFITDNGKQFDSDKFKEMCEGLNLEIRFASVTHPQSNGAAKQTNGKILEALKKRLEGAAKGKWPEEMLSVLWALWMTPTRPTKFSPFMLLYGEEAMTPTELGANSPRVLFSGAKRGARCHSNSWRG

SEQ ID NO: 182636 - protein, 657 aa, Oryza sativa
  Clone ID: PAT_MRT4530_79805C.1.pep
MEQDLPALKPQWLVQGQVTTTGAANLWTVASPRPGPDNQGRGGSSRNHSSSGHHRDQNSRTSSSRISSNGPRKHDRDRDGMGKSRGYASFGRNREREREKEFDSRDRESRSITADGFGSFSTCRPERDRLNRSRSRTDSWNKGVVSPNNCNTSRNNTGTGGSFEREFPQLPFDDKRQDINRVPSPASPIQRTVAPDRWNSLLADVPGSSEPKKNLGVSSVLRPAPSKQPEAAPNSGISLSMAETVMQVPLSVGPQLSMEAQKMEEISLRQNTLRPMTSPAIKSSVTNSSKTKGVRNGDPSGPIKAHQSLIPSTNGSARAPVKTDLSKVSHAGNLKILTREQNCTIHTAKDCPDNPMSPPPAPVASVEPLKKPCVSQKLKVATHDIPLSILQSAYVDKKLNARDKHRFFESLRIKSSNGSSSTAESGCPSPSSVADVKQDSCLNVGKDVSLYHSGKDISLYHSGTKCMGNGKCSCEEANSSDGSQRHLSDNENNSSLDHTADGVSQNLLVESRSISSSEPSDRGDEFRVFLSNNTEGSSSSAPADSDDGYKRSQSGSEEASSSSETTEPGDEEHPAEDSLPADFVAFMISLGWEKDKKVEPLGLEEIAVTVRANEELEQKLLSMEDNANIKIVLLYIYSGRGLDKELMKPNAGDKNNA

SEQ ID NO: 182637 - protein, 176 aa, Oryza sativa
  Clone ID: PAT_MRT4530_79806C.1.pep
MAKEIHQGLYGANQAARTVASKVFRQGIYWPTILKVCVVQVKKCESCQRHGRSPTAPQYELQPIAPIWPFARWGLDIIRPFPVARNGYKFAIVAVEYFSRWIEAEPLGAVTSAAVQKFVWKNIVCRFGVQKEFITDNGKLLLLLLLCDDFLQPMEFAHWIQKSELEDEEADNTTTD

SEQ ID NO: 182638 - protein, 46 aa, Oryza sativa
  Clone ID: PAT_MRT4530_79807C.1.pep
DRRTEPRKASLIGKHERTTTINSLASYSAQMCTATTMHASIHFVSS

SEQ ID NO: 182639 - protein, 411 aa, Oryza sativa
  Clone ID: PAT_MRT4530_79808C.1.pep
MRKDVEMFVTRCTTCQKAKSRFNPHGLYMPLPVPSISWADISVDFVLGLPRTKRGRDSIFVVVDRFSKMAHFIPCHKSDDVVHIADMFFHEIVHLHGMPSTIVLDCDAKFLSHFWRTLWNKLGTKLLFSTTCHPQTDGQTEVVNRTLGTMLRAILKKNLKMWEECLPHVEFAYNRATHSTTKVSPFQVVYGFNPRAKMHETTKHNIEKMTEKYRIAGNKGRQEVKFEPGDLVWLHLRKDRFPELRKSKLMPRADGPFKIVEKINDNAYKLELPPEFGVSPTINISDLKPYLGEEDELESRTTSIQEGEDDADITPLDTQNNPPTVIQGPITRARARQLNLEVSSFLCSSLYEFENRFLPNDYTVIRNNGGDKKTLGEGLRAMGDHRGRPSQGGGPNQVDLGCNSESITSLY

SEQ ID NO: 182640 - protein, 821 aa, Oryza sativa
  unsure (1)..(821): unsure at all Xaa locations
  Clone ID: PAT_MRT4530_79809C.1.pep
LRLPGNEGEKSPQDFADYVSXSNYELSKKKDITEAVGKSVQDAFTKLSFLNHMERLDKRISTLTDRVAALETPSNEEVVSGDDDAHPEDTVYDSSGYIDTPATRQAQLRRHLRTNRTGMGGTRHQQGNNNRVPDYPYAMVMFKIPSFSGYYDAEKYLDWEMAVEQXFNAQLIPEQHRVRQASKKELQGRDHQGKNKASTYTPRTTPSAGLPKAVSFRVHSQPASKRPAASGASTAPKPSPPSRVRKXCPSQRAYVATEDGYITTSDVKEEEEEEEVEDEDGEVFGHDDTSDYRTIIVQRVLSTQIFFVINNHRARVIIDAGSCNNLWLNDSGRAKVTQVCRVSFSIGSYADSVDCDVVPMQACLLLLGRPWEHDNDATHHDRSNKYTFVHNEKKITFLPFTPAEIVEADKERAASLKLDESENQQVAKSVFPPKKDKLSPSSKVEGIKLKGGVMLATKCDIAEYEDVFPAEISPGLPPMRGIEHQIDLIPGASLPNRAAYRTNLEETKEIQRQVQDLLDSGLDDMLDELCGSIIFTKIDLRSGYHQIRMKLGDEWKTAFKTKFGFYRRFVKDFSTFAAPLHELMKKGVVFHWGKTQGKSFDTLKNKLTHAPLLQLPNFGKTFELECDASGVGIGGVLMQDGKPVAYFSEKLHGPVLNYSTYDKELYALEAHGGGLMGHFGAKKTEDVLAMHFFWPRMRKDVERSRCKTLKSFLAHAMEQLGYKAIVFYIMSPTNRWTNRGSQPNFGYHIEGYFEEKFEDVRRMFASCGVCIQSGNTFYYQDLKPYLGEEDELELRTTSIQEGEDDADITTSVTHNNPPMVI

SEQ ID NO: 182641 - protein, 58 aa, Oryza sativa
  Clone ID: PAT_MRT4530_7980C.1.pep
MPIEPRAGRNEPVARPVRWPDDPCRSPALQPTQRTKTPAIEMGIEGHRSSAVATPPDT

SEQ ID NO: 182642 - protein, 266 aa, Oryza sativa
  Clone ID: PAT_MRT4530_79810C.1.pep
MSLKVLPWTAAPAPTPTVGETTARTGIHRAVLWFLAVYFPSIPIFTTSGAAYALCTALQYPTFSGCVRRDLWRLTTLTLWAAYMSLLALVSMHMRLFLPRAPDAVLTDLLDVGAARIGIPLAFLACLAASLGVTRVAIALDCVFVVLIAHVLAIWSRLVRTSEHGDEQLTGAQLRPPRPVEADASHAVGGYMSLLMLRAPYAVLKDLLDVGVKRIGIATVLVFLSCLGLSFGVTWVAIALDCVYLVIIAHVLAIWVRLVRTYALRD

SEQ ID NO: 182643 - protein, 135 aa, Oryza sativa
  Clone ID: PAT_MRT4530_79811C.1.pep
MRAKDEEEVLGTTPNERSLRVRPRHVGGPPCAPAGVNHCEFYDECAPPRYHFVLRDNGHLDMLDDGVPYAINNCMCMRNLGDTKEVARRTIGGLMVAFLRDALEDQHDDLKLVLKVGVNPGLAPAVIKPVAYDLA

SEQ ID NO: 182644 - protein, 577 aa, Oryza sativa
  unsure (1)..(577): unsure at all Xaa locations
  Clone ID: PAT_MRT4530_79812C.1.pep
MSGNKGEKSPQDFADCVSQEQLRTLQQNTQKDITEAVAKSVQDTFTKIGFLNHMERLDKRISTLTDRVAALETPSNEEXDTVYDSNGYIDAPATRQARLXRRLRTNHTGMGGTRHQQGXFKIPSFSGYYDAEKYLDWEMTVEQKFNAHLVPEQYRVRQASSEFKDFAIMWWARLSDEGVLPTTWEELKVAMHDRFVPPSYHRDLRKKLMRLEQGDKSVQDYYLFRFAMLAEKELQGREHQGKSKASTYTPHTMPSAGLPKAVSFRASSQPVGKQPAASGASAAPKPSPPPRPAESEDGYITTSDVEEEEGEEEEVEDEDGEVFGRDDTTDYRTIIVQRVLSAQVQQHDRLQCHNLFEIFFVINNRRARVIIDGGSCNNLVSSDLVKKLGLTTRTHPHPYHIQWLNDSGRAKVTQVCRVSFSIGSYADSVDCDVVSMQACSLLLGRLWEHDNDATHHGRSNKYTFVHNGKKITLLPLTPAEIVEADKERAASLKLDESENQQVAKSVFPPKKDKLSPSSKAEGIKLKGGVMLATKCDIAEISDDDMCYFLICKQALVSLDDIASSIPFGRSGTLVHII

SEQ ID NO: 182645 - protein, 49 aa, Oryza sativa
  Clone ID: PAT_MRT4530_79813C.1.pep
GTIQSDGSGEQLGITPPVDGGGHLVRPLPVHGQSDRARCLPGPEEREPP

SEQ ID NO: 182646 - protein, 82 aa, Oryza sativa
  unsure (1)..(82): unsure at all Xaa locations
  Clone ID: PAT_MRT4530_79814C.1.pep
EYEDVFPAEIPPGLPPMRGIEHQIDLIPGASLPNRAAYRTNPDETKEIQRQVQDLLDRGXIEVDESKIEATRSWPVPQTITQ

SEQ ID NO: 182647 - protein, 733 aa, Oryza sativa
  Clone ID: PAT_MRT4530_79815C.1.pep
MAKTMEHERRGARDRASTLSSQRPLGRRVQGEEYIPEEDDFATASSPPRGPKKPFRPINPRDRKADDRPMAHQGPMSPYYIMYPCKCPFHKGNHDADITISDTHNNPPTVIQGPITRARTMEGTRRHLEKDLDPWRTIGDVQVKVEAQTKSTSGAIRSPGPVYTKTGAQHYYLSLDCVPLIFVYLAFLAPLITSGQHRFLIPAITDYAFQVSFALLVTKDITEAVAKSVQDAFTKIGFLNHMERLDKRISTLTDRVAALETPSNEEVVSGDDDAHPEDTVYDSSGYIDAPATRQAQLRRRLRTNCIGMGGTRHQQGNNNNRVSDDPYAKVKFKIPSFSGYYDAEKYLDWEMTVEQKFNAHLVPEQHRVRQASSEFKDFAIMWWVGLTAEGVLPTTWEELKVAMRNRFVPPSYHRDLRKKLMRLEQGDKSVQDYYGELQKGLFRFAMLAEKELQGRDHQGKSKASTYTPRTTPSAALPKAVSFRVSSQPAGKRPAASGASAAPKPSPPPRPAESGKGSTQVPAKSASSVASTGRIQCHRCQGFGHVQKDCPSQRAYVATEDGYITTSDMEEEEGEEEVEDEDGEVFGRDDTTDYRTNIVQWVLSMQVAATHLVSSDLVEKLGLTTLTHPHPYHIQWLNDSGRAKQVAKSVFPPKKDKISPSSKVEGIKLKGGVMLATKCDIAEMSDDDMCYFLICKQALVSLDDIASSIPPVVTNLLQKYEDVFPAEIPPGFRL

SEQ ID NO: 182648 - protein, 462 aa, Oryza sativa
  Clone ID: PAT_MRT4530_79816C.1.pep
MKVKVESSRIVKPLYDAAAPAPEWMPLSVFDTATYDESIAIIYAFRPPNPPSAAMELGLARTLAVYREWAGRLGVGPDGRRSVLLSDAGARLDEAAVDAPLAAAAPFIIRRRPSPEVKRLHPSVDGAPAEEELLRVQVTRFSCGSMVLGVAAHHRVADGQATAGFLVAWGLATRRGGLLPAVGVPVRDRATRFVPRDPPLVEFPHRETEYKAPPPPAKIKSGVAGEDDDDDELGAAPAHDKIKMHKVHYTKDFVARLKSRASSGLPPSRRGRGYTTFESLVAHLWRAVTAARGLGAAATTTRVRIAVNGRARMRPPVPRDYFGNLVLWAFPRCDAGELVARPSHHAAELIHRAVAGIDDAYFRSFVDFASSGAVEAEGLVPTADAGEVVVCPDMEVDSWLGMSFYDLDFGGGCPLYFMPSYLAMEGTIFLVPSFLGDGSIDVYVPLFENHLEEFKKICYNIA

SEQ ID NO: 182649 - protein, 1269 aa, Oryza sativa
  Clone ID: PAT_MRT4530_79817C.1.pep
MSGNEGEKSPQDFADCVSQEQLRTLQENTQKDITEAVAKSVQDAFAKIGFLNHMERLDKRISTLTDRVAALETPSNEEVVSGDDDAYPEDTVYDSSGYIDAPATRQARLRRRLCTNRTGMGGTRHQQGNNNNRVPDDPYAKVKFKIPSFSGYYDAEKYLDWEMIVEQKFNAHLVPEQHRVRQASSEFKDFAIMWWAGLSDEGVLPTTWEELKVAMRDRFVPPSYHRDLRKKLMRLEQGDKSVQDYYEKELQGCDHQGKSKASTYTPRTMPSVGLPKAVSFRASSQPAGKRPAASGASATPKPSPPRPAESGKGSSQVPAKSASSVASTGRIQCHRCQGFGHVQKDCPSQPAYVATEDGYITTSDVEEEEGEEEVEDEDVEVFARDDTTNYRTIIVQWVLSTQIFFVINNRRARVIIDGGSWNNLVSSDLVKKLGLTTRTHPHPYHIQWLNDSGRANVTQVCRVSFSIGSYADSVDCDVVLMQACSLLLGRPWEHDNDATHHGRSNKYTFVHNGKKITLLPLTPAEIVEADKERAASLKLDESENQQVAKSVFPPKKDKLSPSSKVEGIKLKGGVMLATKCDIAEISDDDMCYFLICKQALVSLDDIASSIPPVVNNLLQEYEDVFPAEIPPGLPPMRGIEHQIDLIPGASLPNRAAKSLDEHMDHLRAIFNALRDARLFANLEKCIFCTERVSFLGYVVTPQGIEVDESKIEAIKSWPVPQTITQVRSFLGLAGFYRRFVKDFSTFSAPLNELTKKGVVFHWGKTQEKSFDTLKDKLTHAPLLQLPNFGKTFELECDASGVGIGGVLMQDGKPVAYFSEKLHGPVLNYSTYDKELYALEAHGGGLMGHFGAKKTEDVLAMHFFWPRMRKDVERFVARCTTCQKAKSRLNPHGLYMPLPVPSIPWADISMDFVLRLPRIKRGRDSIFVVVDRFSKVAHFIPCHKSDDAVHIADLFFHEIVRLHGMPSTIVSDRDAKFLSHFWRTLWNKLGTKLLFSTTCHPQIDGQTEVVNHTLGTMLRAILKKNLKMWEECLPHVEFAYNRATHSTTKMTEKYRIAGSKGRQEVKLEPGDLVWLHLRKDRFPELRKSKLMPRADGPFKIVEKINDNAYKLELPPEFGVSPTFNISDLKPYLGEEDELESRMTSIQEGEDDADITNSDTHNNPPTVIQGPITRARARQLNLEEQWGGTRRHLEKDLEPWRIIEDVQVKVEAQTKSTSGAIRSPGPVCTKTGAQVAYALRLGRSLYVWKAKKITFPMVLVPCPNSFRVNGN

SEQ ID NO: 182650 - protein, 928 aa, Oryza sativa
  unsure (1)..(928): unsure at all Xaa locations
  Clone ID: PAT_MRT4530_79818C.1.pep
MPMDWTCRRATGGKGDERLLVYEHMVNGSLDAHLFQSKATILNWTTRYNLAIGVARGLSYLHHSCNECIIHCDIKPENILLDVSFAPKIADFGMAAFVGRNFSRVLTTFRGTVGYLAPEWISGVAITPKVDVYSFGFQQYSILVAQSFASFQTGTIDGTRRHLEKDLEPWRINEDVQVKVEAQTKSNSSAIRCPGPVCTKTGAQVAYVLGLGRSLYGWKAKKINFPIVFVPRPNYFSVNRNRANNLTSRICPSAASTICRKIGNPSTHPHPYHIQWLNDSGRAKVAQILLIVMWFLCKIVHFCWVVLGNMIMMLHTMQVAKSVFPPKKDKLSPSSKVEGIKLKGGVMLATKCNIAEISDDDICYSWICKEALVSLDDIASSIPPAVANLLQELDDMLDELCGSIIFTKIDLRSGYHQIRMKLGDEWKTAFKTKFGFYECKSLDEHIDHLHAVFNALRDARLFANLEKCIFCTERVSFLGYVVTPQGIEVDETKIEAIKSWPVPQTITQETHGGGLIGHFGAKKTEDVLALHFFWLRMRKDVERTKRGRDSIFVVVKSFSKMAHFIPCHKSDDAIHITDLFFHEIVRLHGMPSTIISDRDAKFLSHFWRTLWKQLGTKLLLSTTCHPQTDGQTEVVNHTLGTMLRAILKKNLKMWEECLPHVEFAYNQETHSTTKVSPFQIVYGFNPRAPIDILPLPTSERVHNDSQARVEFILKMHETTKHNIEKMTEKYRIAGSKGRQEVKLEPGDLFWLHLRKDRFPELRKSKLTPRADGPFKIAENINDNAYKLELPPEFGVSPTFNISDLKPYLGEEDELESRTTSIQEGEDDADFTPSNTHDNPPIVIQGPITRARAQQLTLEVSSFLCSSLYEFENRLLPNVYIVIRNNGGDKETFGEGLTAMEDHRGRPCQGGGPNQVELXCNSEYRTSLH

SEQ ID NO: 182651 - protein, 45 aa, Oryza sativa
  Clone ID: PAT_MRT4530_79819C.1.pep
MSSFALHYNVQEIDEAVKLDNPVASQPTTFDLGFDSELHGAVRDI

SEQ ID NO: 182652 - protein, 1421 aa, Oryza sativa
  Clone ID: PAT_MRT4530_7981C.1.pep
MTSATTSAMTSAPAVARQRMLAGERRRGGANEEHQDVERDAANSPVTKEAAEKQRTAPATRKKRRRRSGRRRRRQTSRRSRDHRQPTAPSAGCRALSRSLRDVRWPERFRPGAIEKYDGSTDPEEFLQVYSTVLYAAGADDNALANYLPTAWKGSARSWLMHLPSYSISSWSDLWQQFVANFQGTNKRHAIEDDLHALTHNSGESLRGYVRRFNECRNTIPEITDASVICAFKSGVRDHYTTQVLATRRITTTQRLFEIVERCAHVDDALRRKNDKPKTGGEKKPTADASESSKKKNHKNGKRKAQAEVLAAEYANPPKRPDPQGSDTKKSWCPIHKTDRHSLEDCLVFKKSLEKHMAFEKGKRGAAPKMKWSEQRIEFSAEDHPKTSVIPGRYPIVVKPTIRNVKVARVLINGGSSINLLFASTLDAMGVPQTYSAIIGRTALAKFMAASHYAYQVLKIPGPKGTITIQGNAKLAVQCDKRSLDMVEQMPTPPATFEPPKKLVDSTAGCELLSFLDAYSGYHQISMVKEDEEKTVFITPFGVFCYVKMPFGLITAGNTFQRTVQGALSNQLGNNVEAYVDDIVVKTKTSDSLIDDLRETFDNPRRYRLMLNPEKCTFGVPSGKLLGFLVSGRGIEANPEKIKAIENMKSPTRLKEVQKLTGCMAALSRFVARMGERGQPFFALLKKQDKFVWTQEAEEAFIALKRYLSKPPVLVAPQPNEELFLYIAATPYSVSTVIVVEREKVQRPVYYIQKLLYAVIMTSRKLRHYFQAHRVTVVSSFPLGEVVRNKDVVGRIAKWVVELSQFDIHFVPQTAIKSHVLADFVADWTIPDNKSDSQGENETWTMAFDGALNSQGAGAGFILTSPSGDQFKHAIHLNFRATNNTAEYEGLLAGIRAAAALGAKRLIIKGDSELVANQVHKDYKCSNPELSKYLSEVRKLERRFDGIEVRHVYRKDNVEPDDLARRASRREPLEPGTFLDVLTKPSVKEVSGEVGPSTPDISSEVTEAECEVADIETTDDWRSPLIKFIGSEELPEDDTEAEKITRKAKIYSPNGIFLKCVSTDDGKQLLLDIHEGICGSHAAGRTLVGKAFRQGFFWPTALKDACDMVQRCEACQFHSKHKKLPAQALQTIPLTWPFSCWGLDILGPFPRGQGGYRFLFVAINKFTKWIEAVPTGEIKADNAIKFVRGIFCRYGLPHRIITDNGSQFISADFQDYCIGLGVKICFASVSHPQSNGQAERANGIVLQGIKTRVYDRLMSHDKKWVEELPSVLWAVRTTPTTSNKETPFFLVYGSEAMLPDELRHQSTRVQKHSDENQENQRDIDVNLLEEHRERVAVRAASYQQALRRYHEKRIRARILSIGDYVLRRVQTQAGRNKLSPKWEGPNTITQVLRPGAFKIADGDGRELANSWNIDQLRKFYV

SEQ ID NO: 182653 - protein, 266 aa, Oryza sativa
  unsure (1)..(266): unsure at all Xaa locations
  Clone ID: PAT_MRT4530_79820C.1.pep
EAHGGGLMGHFGAKKTEDVLALHFFWPRMRKDVESDDAVHIADLFFHEIVRLHGMPSTIVSDRDAKFLSHFWHMLWNKLGTKLLFSTTCHAQTDGQTEVVNRTLGTTLRDILKKNLKMWEECLPHVEFAYNRATHSTTKVSPFQIVYGFNPRAPIDILPLPTSERVHNDAKARAEFILKMHESTKLNIEKMTEKYRIVGSXRNNGGDKKTLGEGLRAMEDHRGRPSQGGGPNQFDLGXAIRSPGPICTKTGAQVAYMLGLGRSLYG

SEQ ID NO: 182654 - protein, 971 aa, Oryza sativa
  unsure (1)..(971): unsure at all Xaa locations
  Clone ID: PAT_MRT4530_79821C.1.pep
AESGKNSSQVPAKSASSVASTGRIQCHRCQGFGHVXKDCPSQQAYVATEDGYITTSNVEEEEEEGEVEDEDGEVFGRDDTTAYRTIIVKRVLSTQVQQPERLQRHNLFQIFFIINNRRARVIIDGGSCNNLVSSDLVKKLGLTARTHPHPYHIQWLNVSGRAKVTQVCRVSFSIGSYAYSVDCDVVPMQACSLLLSRPWEHDNYATHNGRSNKYTFVHNEKKITSLPLTPAEIVEADKERVASLKLDESENQQVVKSVFPPKTDKLSPSSKVEGIKLKGGVMLATKCDIAEISDDDICYSLICKQALVSLDDIGSSIPPVVTNLLQEYEDVFPAEIPPGLPPMRGIERQIDLIPGASLPNRAAYRTNPKETKEIQRQVQDLLDRGYVRQSLSPCAIPVILVPRKDGSWRMCVDCRAINNIIIRYRHPIXCVLNYSTYDKELYALVRSLETWRHYLWPKEFVIHSDHESLKYLRSQNNFNRRHAKWVEFIESFPYVIKHKKGKDNVIADALSRRYTFLSQLDCQIFGLESIKEQYVLDPDFNEVMLNCKEGRTWNKFVINGGFVYRANHLCIPVGSIRLSLIQEAHGGGLMGHFGAKKTKDVLALHFFWPRMRKDVERFVACCTTCQKAKSHLNPHGLYMPLPVPSIPXADISMDFVLGMPRTKRGRDSTFVVVDRFSKMAHFIPCHKSDDVVHIADLFFHEIVRLHGMASTIVLDRDAKFLSHFFRTPWNKLGTKLLFSTTCHPQTDGQTEVVNRTLGTMLRAILKKKLKMSEECLPHVEFAYNRATRSTTKVSPFQIVYGFNPRAPIDILPLPTSERVHNDAKARAEFILKMHETTKHTIEKMTEKHRIAGSKDRQEVKLEPSDLVWLHLRKDRFPELRKSKLMPHADGPFKIIEKINDNAYKLELPPEFGVSPTFNISDLKPYLGEEDELESKTTSIQEGEDDADITTSDTHNNPPTVIQVPITRAHAR

SEQ ID NO: 182655 - protein, 854 aa, Oryza sativa
  unsure (1)..(854): unsure at all Xaa locations
  Clone ID: PAT_MRT4530_79822C.1.pep
MLIEKEYHVELVGHVFNDKELIVRFKTDIDNQGVFYSDLNGFQMSRRQTYDKIPLQGNYYPMSSLAFLQDSLGNRFSVHSKQSLGAASLKNGWLEIMLDRRLTQDDGRGLGQGVVDNRPMNVIFHLLRESNVTALPKTHSLLTLQYVSTEEAEAQFRNYEKLFDYINSNPHLKAEVKFGTLEDYFSTLRDEAERINYTRPGELVSSELPGFPTLSGDFFTYADRNQDYWSGYYVSRPYFKAVDRVLEQTLRASEILSSFVLGYCQKLQCVKLPISFSHKLTAARRNLALFQHHDGVTGTAKDHVVVDYGTRMHTSLQDLQLFMSRAVEVLLGDIHDRSDPTLLSHFEPVQERSKYDVQPVYKVLNPHGGKAHSVVLFNPLEQTRDEIVMVVVSNPDVSVLNSNGSCLISQXGDRLTNWKFGAHSSKQIVVISISFCSSADXSCAITASVCFATVVIQRDMPASAIXNRNLNLYMRKFIFKDGEHTDVGEEMAWEAQSIVEEGGYFILSEGPLVQEAHSLPKTQWHKSPISHSTRIYSCGDSIQDMLIEKEYHVELVGHVFNDKELIVRFKTDIDNQGVFYSDLNGFQMSRRQTYDKIPLQGNYYPMPSLAFLQDSLGNRFSVHSKQSLGAASLKNGWLEIMLDRRLTQDDGRGLGQGVVDNRPMNVIFHLLRESNVSALPKTHSLLTLQPSLLSHRVGAHLNYPMHAFVSKKAQEKSFKLAQQTFAPLTSPLPCDVHVVNLKAPQPLKFHHAEAVEARFALLLQRRGWDASFCRRGGLNCTTIGEEPVNLFYMFKDLAVLDVKATSLNLLHDDPEMLGYLEQIGDVAQEGNVLISPMDIQAYKLDLQPPSSQEE

SEQ ID NO: 182656 - protein, 64 aa, Oryza sativa
  Clone ID: PAT_MRT4530_79823C.1.pep
MEGGGVVIAIRSQPRSIAHLEFPLQESPISVLSLVLGERKSQLRLQLAGLHGSIHREQFFQNDS

SEQ ID NO: 182657 - protein, 170 aa, Oryza sativa
  unsure (1)..(170): unsure at all Xaa locations
  Clone ID: PAT_MRT4530_79824C.1.pep
RSPXXPCPXFRLHHAARRQTPPFRHFVVSPRACSIAWTPRSQRPPRFGVCAAVTVPTPAATAPWPSSSWRDLVPIQPRLDFCFYMLHVDPRWLNRRWFFXXWSSLCRRRFWDLGAVDRRRAARRXIAALRRRRXGVSGDAPPLAPXCAXPFRLGPXHHXXPLLCSVXSGK

SEQ ID NO: 182658 - protein, 317 aa, Oryza sativa
  unsure (1)..(317): unsure at all Xaa locations
  Clone ID: PAT_MRT4530_79825C.1.pep
MVALGPEGRVGARDGDVGEAWRCGGTGKGGDAALGDAMLGKKGPWAMLGTDRCITSYLSIFFRTFIIVYKVSNGDGAFVLTRSRKPESEICLDFLMEGVELKSPLFGEKRRVSHEVMALIYEDHITVELALKVFIPFGREEKVDSRGSPAEPEMITHHDHPQHKLRLVTTTCDMPFRCDGCLEPGYAPRYRCDACNFDMHTFCSXPLPAILQHPMYKGRIFRFCPKPLPPSGRRVCDACGDPVRGFIYHCFGANLDLHPCCASLHGPIILDGLAFDIGAPRKCCLCMQEKGPERDLWCYHSNINGEGDLNASRECCR

SEQ ID NO: 182659 - protein, 68 aa, Oryza sativa
  unsure (1)..(68): unsure at all Xaa locations
  Clone ID: PAT_MRT4530_79826C.1.pep
FFFXYXEXCMEELTFTDXDRYDFSQFLXPKLAXGGGGXEKDRNXENKXXKTEKAIGFLSXDXXXRRXR

SEQ ID NO: 182660 - protein, 101 aa, Oryza sativa
  unsure (1)..(101): unsure at all Xaa locations
  Clone ID: PAT_MRT4530_79827C.1.pep
MASTTDQSTAMGPVPLPYVQPRLAAGNVPARTWVPGIIAIQRRGEVVLASPPKCGTTWLKALAFATMARRAHPXPAAADGVQHPLLRLNPHDRRPCPVHGV

SEQ ID NO: 182661 - protein, 145 aa, Oryza sativa
  Clone ID: PAT_MRT4530_79828C.1.pep
MPALVKIGQWGGYGGSAQDITVTPIKLTGMTIRSGNAIDSISFSYSGIDGQEHVVGPWGGNGGHATTIMLGPTEHVIEVSGTHGKFGPVADVVTYLKIVTDITTYEFGVRSGTDFSVPLQGGAHVVGFFGRFGVLMDAIGIYTRP

SEQ ID NO: 182662 - protein, 342 aa, Oryza sativa
  Clone ID: PAT_MRT4530_79829C.1.pep
NYKKVERKNEKKSVKKRKEKLKAHVVPRAIELFSLSELAKATMDFALDREIGEGSFSNVYRGMLPDGREVAIERKKVDSSARGMEAFRAEVTIQSLLHHKHIIRLVGCCNMVEKRLLVFEYMENGSLFDHLHGPSTSSFSPVTASWKTRIEILLGVSRAIEYLHSYATPAVIHCDIKSSNILLDSSWSPRLSSFDIAVSCDEAECVDICVRGTLGYLDPEFVRTRTLKPASDVYNFGVVMLEVLSGRRAICRWKEDHGDGDGDSPMDSLVNHALPLIDAGQVLHLLDRRPAEEPTPRQLEAADLVARTAAHCLQENGDDRPAMSDVVTRLQAALELVRCDDE

SEQ ID NO: 182663 - protein, 120 aa, Oryza sativa
  Clone ID: PAT_MRT4530_7982C.1.pep
RRRGLRARFRTNPREREREKRGKRERESRGVISPSLLRAGTAGCGGFGGGGGARARAGGGRGARREMTGGSHPSARVAGGPACQRRARAGEADGPRGEERGGGNWAEPAQEGKGGKEDFF

SEQ ID NO: 182664 - protein, 101 aa, Oryza sativa
  Clone ID: PAT_MRT4530_79830C.1.pep
GRPFFFFFFFGSHVKRYKHLILDSTIIFQHYYTANAGQSFTCATTEGACHLLGFDHYTQVCLFLHLPRPYLHVSNTIYTTHLTWMRNFAHEQLQLSSEDGR

SEQ ID NO: 182665 - protein, 350 aa, Oryza sativa
  Clone ID: PAT_MRT4530_79831C.1.pep
MTAYKNINQDLAGGGRGNAGSGGNSVERRRRGDRDPAHLSGGVEEATVGEDGEECVDHGGRAEDECRVVEEVGEGGSKVGKRAGAAKGKDVVGVSVEVVAEKEVGGSADVRSGQEWEGGTAWRERRRRRRWEIGAAVVVLLVEACEDNIIRLRMRLPKAEMNSVIAKVSKMIKCPYYGCLVQVRPLAALVFTLEAPRTGRWCVVMLPGLVSGWEWLGYGLNLNRFKRTRLRRRRPGTSDGVGSHAQPSAGGSGRQGVGGSVDGQARATASPATLSHPRAAAARLVAVQLTILITVQLTVLVAVIQLAVHQPGRAVRDNWTRVGFHRVADSIQQIKPMPTNSIGKSAMRKN

SEQ ID NO: 182666 - protein, 98 aa, Oryza sativa
  unsure (1)..(98): unsure at all Xaa locations
  Clone ID: PAT_MRT4530_79832C.1.pep
MNLDWDSTXELVDFRVASTVSVDIXCSPNTYVKRTSTTAASRMGTDLVIMLINNVVPLCSGSLFKSSRRRQTYTEQGDCNIYRGAGIRYTRYVGMEYP

SEQ ID NO: 182667 - protein, 100 aa, Oryza sativa
  Clone ID: PAT_MRT4530_79833C.1.pep
IHPHSRMTVPDQQPVSSFYKPLSFKLPNTESQRGGGGPGPLGILLKFLFLYPTCPAPPVSALHSLLFPCPFFRISCSFLRPVVLGCVFTSSSLLFFVPPF

SEQ ID NO: 182668 - protein, 432 aa, Oryza sativa
  Clone ID: PAT_MRT4530_79834C.1.pep
MDPHAGAVASGESAGDEDDGSGEHETHPTSPAPSANSRPRKRSRLTAAADESTTVDDCSAGGSGSGSGDGGGGGGESVGAWPYDESAARDELVTLIVSQDLPVGIAGSASFEAMVLQAFCPQFERIDNAVTIRDILVFHEDHVAGLKEEFTGGDLSFALSCEIWGTSYHRMSYLCVAAHYVDGDHILNKRVISFKLIDGAPTAEAMARRILDVAMEYGIENRIVSVTLGDGLADAETMDALAPLLGWYTGGFVFLQRCIFSILNDIVRAGLTEMAEPLDAIRSAIAYVSSSEANFAEFEKCCVERGQKARKLWPDSKVRWDSTYDMLKEVLPYKEVLTDFVNGSMQQEFLSEHNCLVLSIFHKFLAKFYKAATKLLKELELKELELQKDSSPSSSVHQRKAKNEFNKKYIETPCSLRLNSRGPDPNIIMGIL

SEQ ID NO: 182669 - protein, 40 aa, Oryza sativa
  Clone ID: PAT_MRT4530_79835C.1.pep
NFPQETGMPMVSPSFNIGKYGEPWGPGRTLPGIPGGPHGS

SEQ ID NO: 182670 - protein, 709 aa, Oryza sativa
  Clone ID: PAT_MRT4530_79836C.1.pep
MWPKATHDFFMRPPLLKSIAGVELAGIWSSLSLPRPRRTTSSIPRILSPPPSPSFTTPTTMAITSSSSSPPAAHHPFSFPRRAKQHGRPRLAAASSRWANRRASSSIWVNPAAPPRPGQTLRRLVQLGDLDAALRLLLLPGALPAPAAALISCNILIKKLCATRRLADAERVLDALKAAAAADAVSHNTLVAGYCRDGRLADAERVLGAARATGAANVVTYTALIDGYCRSGRLDDALRLIASMPVAPDTYTYNTVLKGLCIAKKWEEAEELMAEMIRNRCPPNEVTFATQIRSFCQNGLLDRAVQLLDQMPRYGCTPDVVIYSTLINGFSEQGHVDQALDLLNTMLCKPNTVCYNAALKGLCIAERWEDIGELMAEMVRKGCSPNEATFSMLISSLCQNNLVDSAVEVLEQMEKYGCEPDTVNYNIIINSLSERGRVDDALRLLNSMVCKPDALGFNAVLKGFCRAERWHDASELIAQMFRDDCPLIEMTFNILIDMLCQNGLVNYATQVFEQMPRYRCTPDIVTYSSLLNGFSEQGLVEVAIQLFRSMPCKPDIFSYNAVLKGLCRAARWEDAGELIAEMVGKDCPPNEVTFNILINSLCQKGLVDRAIEVLEQMPNYGSTPDIFTYNALINGFSEQGRLDDALKLLSTMSCKPDAISYNSTLKGLCRAERWQDAEELVAEMLRNKCTPNEVTFKYANHLLMPNRAG

SEQ ID NO: 182671 - protein, 64 aa, Oryza sativa
  Clone ID: PAT_MRT4530_79837C.1.pep
LYIHDYTITTSMFLTCLVLFIPTIRKFTNTYHGMHNQSPQTQPYTSGTREIRITTTNLGDYYIR

SEQ ID NO: 182672 - protein, 123 aa, Oryza sativa
  Clone ID: PAT_MRT4530_79838C.1.pep
NLNKLLKPTNQPNVRHRKQICICIASKWSFTFASRQRASQAAVPDESVFCTSSHFAHILDMETTNALMISQNRLVSFFGCTFPVFLLMAVVVLSPCSGLLSCSSIVMIDIDCLSSLLSSFTMP

SEQ ID NO: 182673 - protein, 125 aa, Oryza sativa
  unsure (1)..(125): unsure at all Xaa locations
  Clone ID: PAT_MRT4530_79839C.1.pep
MAAYTSMSIALFGVIALSARATTAFTTLQSYPPTLAMGTLDPCRQYMMHTLGMXSSTAMFMSQPMALLHQHSCMQVQGMMPQCHCGTSCQMMHSMHQVICAALAHQHMMKMVMQMPYMCNMATCN

SEQ ID NO: 182674 - protein, 64 aa, Oryza sativa
  Clone ID: PAT_MRT4530_7983C.1.pep
MEENKVHRHVEGGAVAGGAKGVDPAPVAARGGSGDGGRARIEGICASAGSWRPGRSSGCDRWIR

SEQ ID NO: 182675 - protein, 735 aa, Oryza sativa
  Clone ID: PAT_MRT4530_79840C.1.pep
MAAAAPSSARRMSHTQFIELLRRRASCPRHGEALHAWALKSGAASHAPVANSLINFYSSLPRPLLAAAFAVFDDIPPAARDVTSWNSLLNPLSGHRPLDALSRFRSMLSSSTVLPSPHSFAAAFTAAARAASAPAGTAAHALACKIPSAVSNVYVCTSLLNMYCKLGIVSDARRVFDGMPQRNSFSWSTMVAGYAAEKCSEEAFDLFRLMLEECPSEKSEFVATAVLSAVSVPLGLLMGEQMHGLIVKDGLLDFVSVENSLVTMYAKAGCMGAAFHVFESSRERNSITWSAMITGYAQNGEADSAVSMFSQMHAAGFTPTEFTFVGVLNASSDLGALAVGKQAHGLMVKLGFEVQIYVKSALVDMYAKCGCIADAKEGFDQLYEVDIVLWTAMVSGHVQNGEHEEALTLYARMDKEGIIPSKSTIASGLRACAGIAALEPGKQLHTQIVKYGLGLGAPVGSALSTMYSKCGNLEDGMSVFRRIPDRDVIAWNSIISGFSQNGCGNGALDLFEEMKMEGTIPDNITFINILCACSHMGLVDRGWEYFSLMTKDYGLTPRLDHYACMVDILSRAGMLKEAKDFIESITIDHGTCLWRIVLGACRSLRDFDVGAYAGERLMELGTGDSSAYILLSNIYASQRKWNDVERVRHLMRLRGVNKDPGCSWVELNSRVHVFVVGEQQHPEAENINAQLRRLAKHMKDEGYHSSSKLSFDEELGPLAESHEEDQLEWISAAYS

SEQ ID NO: 182676 - protein, 458 aa, Oryza sativa
  Clone ID: PAT_MRT4530_79841C.1.pep
MAAAARRLLLLAIAVAAVSLAPRAAAEIRTEAFREDPRPTILFEKFGFSKTGAVRIVITGAGISSTFARPDPKQLGFFLLSDESMFQAIYEAQARRPPERREEVAGGGADEPDVSRCILTSPYVKTLFTFHDLKRGHYNKTFPVTHPDEYSLYFANCAPESLVTMRVRTEMYNGNADGSVDYLPVGQAPVPAIYGFFAACYAAFLAAWGYLTLSSRDHRAAAHQIHHLMSGLLAARLLYCLSAAEDQHYIRVTGTPHGWDVAFYLFQLVKGVVLFAVIVLVGTGWSFLRPVLQDREKKVLMVVIPLQVMANIASAVIGETGPFLQGWVTWNQILLFVDVACCCAVLFPVVWSMRSLRETSKTDGKAARTLSKLTLFRQFYIVVIGYLYFTRIVVYALKTIASYQFRWVSVLAEEVATLAFYLFMFYTFRPAERSRYFSFDEDEEEAAEMVLREEEFEL

SEQ ID NO: 182677 - protein, 45 aa, Oryza sativa
  Clone ID: PAT_MRT4530_79842C.1.pep
MKAILPNKGFKHTTNRSVHDNENNMLSISYRSWPMWTTIGYTCDN

SEQ ID NO: 182678 - protein, 53 aa, Oryza sativa
  Clone ID: PAT_MRT4530_79843C.1.pep
YIFYTADSLSVESLLELLDEDSLRKDTALPSPEWSSDRIALLAEFRCKPRVRR

SEQ ID NO: 182679 - protein, 314 aa, Oryza sativa
  Clone ID: PAT_MRT4530_79844C.1.pep
GSSSSYSYTSIKSMNEPKLGLWETLARKAKGILDEDGTAHKSDEYTKQKTPRKFDSSNTGSRTRSEALAASVNQLGGRIRDALEKIQIRRKQANSNSYMPNPAFDTLRPPNLSHDQAETAAQETQLKASRDVANAMAAKAKLVLRELKTVKADLAFAKQRCAQLEEENKFLREAKQKGSKTEEDDDLIRVQLETLLAEKSRLAQENSMYARENRFLREIVDFHQFTTHDVAPLDDDMEDSIPGEDSNHTYSEDMFPVVEAYLDREELSPVPSRPESPILSSCESSSPKSSNSKSSAANLPSYVSKPNALVPDTD

SEQ ID NO: 182680 - protein, 118 aa, Oryza sativa
  Clone ID: PAT_MRT4530_79845C.1.pep
AREKPAFQNSRGTKIGPKASVLTEQKKTRFKRRAFCPLGAKINGPKKKSQGRGPNLTKTKTRFFNGGQANPPLNEGHFFLGGALGTLAPGGALFSTVLKTPTPTGCPMGPPPKQPKRG

SEQ ID NO: 182681 - protein, 250 aa, Oryza sativa
  Clone ID: PAT_MRT4530_79846C.1.pep
MAYRRKQGPIAADDRRSSYPQPPQGSSSSYSYTSIKSMNEPKLGLWETLARKAKGILDEDGTAHKSDEYTKQKTPRKFDSSTGAQESQSRWSFENHSRTGDTGSRTRSEALAASVNQLGGRIRDALEEGLTIVDNKTSNIIEETKKIQIRRKQANSNSYMPNPAFDTLRPPNLSHDQAETAAQETQLKASRDVANAMAAKAKLVLRELKTVKADLAFAKQRCAQLEEENKFLREAKQKGSKTEEDDDLVC

SEQ ID NO: 182682 - protein, 496 aa, Oryza sativa
  Clone ID: PAT_MRT4530_79847C.1.pep
MAIKDRFTGNPGRLTVLTTSGSGDLMHIQLRNSGLRISGRDIKAGVIEEIDHPEWLANPVLVSKMNGKWRMCVDFTILKKVCPKDDFPLPQIDQLVDSTAGCELMSFFDAYSGYHQIHMNPADIPKTAFITPFGTFCHLRMPFGLRNAGATFARLVYKAAETGLPFFKTLRGAGKFSWTPKCQVAFDELKQYLQSPPALISPAPGSELLLYLAASPVAVSAALVQETESGQKPVYFISKALQGAKTRYIEMEKLAYALVMASRKLKHYFQAHKVIVPSQYPLGEVLRGKEITGRLRKWAAELSPFDLHFVARTAIKSQVLANFVAEWTPTFVPEPELIEQPWIMHFDGSWSHRGPGAAAVLTSLGGVPIWYAARLQFDSTNNTAEYEAVLLGLMKAKALGVRRLLIVTDSKLVASHVDKSFEAKEEGMKKCFASIMVEHLPRGQNKEADTLAKSTACGGLHSPGIFFEVLYAPSMPAESLDIMAIDQAELGEDQED

SEQ ID NO: 182683 - protein, 264 aa, Oryza sativa
  unsure (1)..(264): unsure at all Xaa locations
  Clone ID: PAT_MRT4530_79848C.1.pep
PPSILSLKSPSVVIVASGIKMSESLPSTPPLLTSADPSSSRSRSLNVDENSTTKAHRSPGHQLCRQNLDNKVLSFKSFNESYLEEGRPLSSMPSVYSKDIIAGGSHGESSXGFSESMASTXRERWSVDNDLLGHVTTNRTRSNAPHSTSLAPGQEEVCKLCSKQLKEQSTWNAHELAIVAVLFCGHSYHASCLDGISVESEKYDPPCPIRTHGEKYFTNLYGKQDSKIKKNKVSKSVITDIDIDRSSKHRHKSLREPRLDTSSS

SEQ ID NO: 182684 - protein, 102 aa, Oryza sativa
  Clone ID: PAT_MRT4530_79849C.1.pep
DLAANSISISAGSPSNRRPNHSPIAAKKPRDLPAPAAATTCGMAQTPNPSRRSLVGAVTTPFPDSAGGAVPAGAVLVGRGLAELLAPQRGRVNQRRQQHWLP

SEQ ID NO: 182685 - protein, 214 aa, Oryza sativa
  unsure (1)..(214): unsure at all Xaa locations
  Clone ID: PAT_MRT4530_7984C.1.pep
MKLRRIPTLTTRRVMKTMALSSVSWEWCYITGLPNPFYKNNPDYYYYFPFTWPKTTLVPESDEDKQEKFLQGLKDELAVQLLLGDYEDFEKLVDKAMQLESEHNRMTNCKRRMVNNPVFPGGXQRQRTEPLQITGSSVVYPEFLPPEDERNXDNNNSNTNADDXTHNHGSCPIIDPSNKACIVSXSLPQDVTDCLNVGTQMTTLXNFDSEKDSN

SEQ ID NO: 182686 - protein, 80 aa, Oryza sativa
  Clone ID: PAT_MRT4530_79850C.1.pep
MELWWRRGVDAAVAEWMQQAPKGHGSGSRRWRWSGSSGFSKFKSENYSPFNAAATFNRCGGIDLGKGERGVGGAPDLGDG

SEQ ID NO: 182687 - protein, 357 aa, Oryza sativa
  unsure (1)..(357): unsure at all Xaa locations
  Clone ID: PAT_MRT4530_79851C.1.pep
MLRAGARPDGYTLPLLNRAAASLPASRGEAELVGAAHAVGVRAEFAANVYFCNTLVDAYAXAGMVACARKLFDEMPTRDVVSWTSLVSSHAGVWDVREVSRVLYYMRLDGCQPSAVTLAVVLRVCTAKXNVGGGGQLHCYAVKILTHLCRMAASDDAVALFQQSPRRDAISWNIMISEYSSEGNISKRGGSGNLALFHMMLDEGGRPNGVTFLSLLSACSHSGLVNEVQEFFDCMTRTFGITPELGHHTCMVDVLGRSGNLDDALQVISDMNVKPDGRIWGALLASCRTYSNSKLASYVAQKLMKLEPGNVGYHVVFSNTQASSDQWDEVESIRSSMVEMDLQKLPAWTCVAETGSP

SEQ ID NO: 182688 - protein, 224 aa, Oryza sativa
  Clone ID: PAT_MRT4530_79852C.1.pep
MDDVPSQLLFSHPEVPDSFDDFLNNITTCTHTHTCNPPGPSATMHTHTCLHTHTQVFASGSGEDDIKEDLTKTRRPLGNREAVRKYREKKKAHAAFLEEEVKKLRAANQQLLKRLQGHAALEAEVIRLRSILLDVRGKIDMEIGTFPYQKPCSVGSVACTDPGMCFNGNSEIGGVWEECSRPVGADRMIDKDGSMSQEIDIPGPVHSISMDVVGSLVTSASLSE

SEQ ID NO: 182689 - protein, 125 aa, Oryza sativa
  Clone ID: PAT_MRT4530_79853C.1.pep
ASPQRYRSSPVPTPPPVPLLPGADAASRRRRRPRRSSPMSTLPPAPLLPGADTTARASPPRRRCRRGRRHPRRSSLALTRPAVDAAARAAPPNDGRSSRRRPLLPAPLLGSSPYRAEPSQLDIQP

SEQ ID NO: 182690 - protein, 49 aa, Oryza sativa
  Clone ID: PAT_MRT4530_79854C.1.pep
MAPLFLPLCQCHPLNGEVMIFPEIRLFNGILGYVRGASEIDDMSVQDLV

SEQ ID NO: 182691 - protein, 131 aa, Oryza sativa
  unsure (1)..(131): unsure at all Xaa locations
  Clone ID: PAT_MRT4530_79855C.1.pep
GATVMVTDKAYLLSYDLCNMRIRYTIEDMIYFRIRXGNHKIIWKISLXQVTNDVLLGILLGDXVDPRYKRXPPGGFKASNLTGSIPTIVYEAGAREANLPGDLVXSHDYDLILVPMYPNTLFIRSTGISPQ

SEQ ID NO: 182692 - protein, 290 aa, Oryza sativa
  Clone ID: PAT_MRT4530_79856C.1.pep
MRFRFAPRRCAAAAAASDSKGGGGGGDCDCSVFLRWLRSKSGTHISSVLSLGTSSAFGRSLFASEPIQEGDCIMQVPYHVQLTLDKLPQKFNTLLDHAVGDTSKLAALLIMEQHLGNVLWDLNELHAVQNSSIYDEAIEHKEQAKKEFLALKPALDHFPHLFGEVKLGDFMHASALDFLNHDGVFGSVLIYDEQKDVCEIIADRNYAVGEQVMIRYGKYSNATLALNFGFTLARNIYDQALIRIDMPVQDPLYKKKLDIWQKHRLPIFEDMCNLSSATSFVINMLNLEIE

SEQ ID NO: 182693 - protein, 102 aa, Oryza sativa
  Clone ID: PAT_MRT4530_79857C.1.pep
EISLMGVHESHNGQSSVGFSHFWHNSRSRMMMLALGAWEPSTGCDGKVTVVLHSCWFKMQPCNWRRPRWQVPCTTLEDVGNWNGGVIWVCENGSSQRVMYSA

SEQ ID NO: 182694 - protein, 364 aa, Oryza sativa
  Clone ID: PAT_MRT4530_79858C.1.pep
MKLLRVVLVLLLPAVSSCLPCRRRDDYDYDSIFSFGDSFADTGNGAVVFAEHSLFSPATKPPYGMTFFGQPTGRNSNGRLIIDFIAEKLGLPFVPPYLAHNGSFRQGANFAVAGATSLDASFFSDIPGVGKFVLNTSSSVQLGWFDSLKPLLCSPAQECKGFFHKSLFFMGEFGVNDYSFSVFGKTPLEVRSMVPDVVKTISSATERIIKRDGAKAVVVPGIPPLGCMPPNLAMFPSTDPAGYEPGTGCLRQFNEIAVYHNTLLQDAIKNVQKNHPDVRVIYADFFTPVIRIVQSPGTFGFTSDILRCCCGGGGKYNFNMSAGCGMPGATVCEDPSTHLFWDGHMTEAAYHFIADGWLNSINES

SEQ ID NO: 182695 - protein, 54 aa, Oryza sativa
  Clone ID: PAT_MRT4530_79859C.1.pep
RTGRRRPCSSPPGPDPWSPPCRSTSPPCPPPSPRLPPRTSFRNRPFQPERRRQS

SEQ ID NO: 182696 - protein, 48 aa, Oryza sativa
  Clone ID: PAT_MRT4530_7985C.1.pep
NHPGKMMASRLTNAASCKNLRNNFGAGNPYGLPITRFIPLIPPIYISN

SEQ ID NO: 182697 - protein, 455 aa, Oryza sativa
  Clone ID: PAT_MRT4530_79860C.1.pep
MADRLSELPDDVLLSILKRVDLRDAVRTAILAKRWRHLPAALPDIVLDVLSFRKKQDDDHQDGFTFTSRLSREARANLAVAHAAKAILARRSGEHAIDRLLVRFYLRAESIGIVRSVDDAIASGRARFREAAFDVRGEKRALECTGRDTLANGRRLASLVGGCPRAFAGLTRLRVESVTLRGSNDVANVLAACENLEILSLHSCDASAGSNVAALEMEHPRLVRLDVDACDFETVDLKWLPRLVQVSNNIWFPSRTLPPLVFGHVPQLRTVLSTVGTVNYRTLKLSGLLVNATGIRTLQMIFESEKIWFQPESPKHLAPLLRNLRIACLDKIHKECDLIWTMFVLEAAPLLKELRISVTEHSCGSLAAADVMRKLLYCKKNNIEWHIDSDFRHYNLLLVTVVGFEIKDKFVKLIKRLAHAAVNLEDIHLEDEVKCENCQYYPTTWYPSTDKERES

SEQ ID NO: 182698 - protein, 635 aa, Oryza sativa
  Clone ID: PAT_MRT4530_79861C.1.pep
MASKPGPLTQWPWNNLGNYKYALVAPSAAYSTYRFVTASSAAERDLLNFMVFPMLLLRLLYGQLWITVSRHQTARSKHKIVNKSLDFEQIDRERNWDDQIILTALVFYLVSATMPQAQVAPWWSTKGMVVTAVLHAGPVEFLYYWLHRALHHHWLYARYHSHHHASIVTEPITSVIHPFAEEVVYFVLLAIPILSTVATGTVSVVTANGYLVYIDFMNYLGHCNFELVPKCLFHVFPPLKYLLYTPSFHSLHHTQFRTNYSLFMPVYDYIYGTTDKSSDELYERTLQGRDEAAWRPDVVHLTHLTTPESVFHNRLGFAAVASNPLGAAASGHLLRAASAVASPLLSLFASTFRSEANRLDKLNIETWVIPRFTSHYTSKSDGYKVSRLIEKAVSDAEASGARVLTLGLLNQGYDLNRNGELYVVRKPSLKTKIVDGTSLAVAAVLNMIPQGTKDVLLLGNANKISLVLTLSLCKREIQVRMVNKELYECLKQQLQPEMQEHLVLSCSYSSKVWLVGDGVTDEEQMKAQKGSHFVPYSQFPPNKARNDCVYHCTPALLVPESFENLHVCENWLPRRVMSAWRAAGIVHALEKWDGHECGGRVTGVQKAWSAALARGFRPYDDHHHPGITHDGRGGL

SEQ ID NO: 182699 - protein, 54 aa, Oryza sativa
  Clone ID: PAT_MRT4530_79862C.1.pep
WSSAWLHWIRSFQVDPALTSLVRFLIHETSSYVTGNIFIVDSGATLPGVPIFSS

SEQ ID NO: 182700 - protein, 170 aa, Oryza sativa
  Clone ID: PAT_MRT4530_79863C.1.pep
SVFILTNPGQLNFYDGGALFSVPKSEEGKAQIEAQKFPVTVPTTDPNITVTNLYSLNGRESQSIPLKKFVVKQNAAPFMQRNMKWPLTGGVPSEMSMNENYTVERIYIAGYQDSSVRIWDATFPVLTPMFVLDGKVVGVNMDGENSAVSSLAFCSLNMTLACGTTSGLYL

SEQ ID NO: 182701 - protein, 72 aa, Oryza sativa
  Clone ID: PAT_MRT4530_79864C.1.pep
IHQSTDTHMDPKVAVALALSIIGGLSTSLGMHICTSHHSFFLAVCTAMQFCTLNWTFMVFSLELFWDQFCSN

SEQ ID NO: 182702 - protein, 111 aa, Oryza sativa
  Clone ID: PAT_MRT4530_79865C.1.pep
MDTRRETGDGLTGLEDEDEGLRSEDYSRRIHRVDLSPDKMLSGRKGIWRWSLGTSSWSPPHPWQRLGAMPYYFFVSADTPSRPRILDGTDEAYSSEKPSSDTYSSSGVGKK

SEQ ID NO: 182703 - protein, 260 aa, Oryza sativa
  Clone ID: PAT_MRT4530_79866C.1.pep
MKQLSGRSSSSSPPLTIEPRMYEVIFRVKSDTCLGFREELKGKHATLVAQFPAAGAAGPTPAALAASSTPSRRAVRGAIRAAALCIPAVVQAAPKRLVVIPLATLRALLQGCGRDRFAADFQIRSAPPTTASHFEGGNYSASQAKSKCAIGGDAQRIQLLPNHQLQGDGTSLQSALLLATALLLKRQPPSASFSKQQVEDASFASRETTAPPTAVTRSGASSAGGRDTGPDPAELTLIWLCSAWSVASSTVTVTPRRHLR

SEQ ID NO: 182704 - protein, 813 aa, Oryza sativa
  Clone ID: PAT_MRT4530_79867C.1.pep
MGDASRIDPSCGSGWRWRGDSHHKALWSSLDDGGDAEGSGPDGPADGAATWGRRSSEGGGRRASGAGGGELGDERRMLTFQLLKLVKRIPETFTSSSNYFNSFTYPLLEETHVDVFSSLDGYSHQNFISVARMKELLHDDETTFFCFEVANPAKDEKSKETYAPCEGDIIVLTSRKPKQVSDLTRNMTSYILGSIVKGGEDDDDLPDNCFIARLSSVLPVETDSSTNEPKEPLFAVILINMKTYDRIWDCLHKGNSHIVDTVWRYKSKFQLPIALTVAFATKEVDEAMSSSSQLSQRFAARSAVDLNLEKYMLNNSQLNAVADCVLVSEKISSPIKLIWGPPRTGHRTLTCAPTNTAVLEVASRIVKLVHESPASSGQYLSDIVLFGNKKRMKIGHGDSDPLKWPDLLASVHTDVCNKSKIRKARLLCVRILRYLKINLKLPDWDRLSLSDDDRKREIRVYLLQRTKCILCTVSSSYVLHNVSMDDRSECLKPLELLVVDEAAQLKECETLIPMQLPGIKQAVFIGDECQLPALVKSKISDNADFGRSVFERLSSLGYNKHLLNIQYRMRPEISKFPVASFYDGKISDGPNVVSKNYKRNILPGKMFGPYSFINVDGGHETTEKHGRSLKNTIEVAAVLWIVRRLFEESVFLGSKLTVGVVSPYNAQVRAIQEKIGKTYDMYDDFSVKVKSVDGFQGAEEDVIIISTVRSNRAGSVGFLTNLQRTNMALTRAKHCLWIVGNGTTLSNSRSVWQKVVNDAKHRGCFFEASEYKHLSNAIVNAVIELDDAENLVKMDSLQITNPRFQRAGSRYRA

SEQ ID NO: 182705 - protein, 283 aa, Oryza sativa
  Clone ID: PAT_MRT4530_79868C.1.pep
MAEMAVTAALRPCSGVSPAVSGTSHRRRRPAAWRALAPPPPHAGLRLSSPAVRVPRAASSAAVEDGSSSNTDTVPTPKVIIDQDSDPDATIVEITLGDRLGDLLDTMNALKNLGLNVVKASVCLDSTGKHIKLAITKLSTGRKIGEPELLEAVRLTIINNMIQYHPEASSQLALGATFGPEPPTELVDVDIATHIDIYDDGPDRSLLVVETADRPGLLVDLVKIIDDINITVQSGEFDTEGLLAKAKFHVSYRGKPLIKALQQVLANSLRYFLRRPTTEEGSY

SEQ ID NO: 182706 - protein, 116 aa, Oryza sativa
  Clone ID: PAT_MRT4530_79869C.1.pep
MDKMNTSARSEKIDQSLQKYDHPRCRWHILFGTKSELHNLYHARTASDFEDTWTALVNEYGLQEENAYLQKAQMLIDDETKPNDSQEIDTDRKDVKREVEAPKLIISRHSDDKFSS

SEQ ID NO: 182707 - protein, 101 aa, Oryza sativa
  Clone ID: PAT_MRT4530_7986C.1.pep
HGSTVFNWRVFAADSWLIIPHTMQLVKKAPREGCAYMCIQDPILTLWVSPLGRRRVSILPCCSPMMCCSKCIIAFCKRRGLRGSSMNHEGDEFGGIHCPCP

SEQ ID NO: 182708 - protein, 170 aa, Oryza sativa
  Clone ID: PAT_MRT4530_79870C.1.pep
SCPTAINRVPDPVRSRPVGVGSGSGSASASDKCTHLARYPTVRAALGQPGRGPPHRHRPGREGWSAAIPESRRLLAPSEQEGSGGAVRGDQAGTDAGIHRLVGPLHSLPTSRRTVDAAQPEPPQSARCITFAGVRFARPAEGGYADTERLRRRDAAACLLVLLLLPQGTK

SEQ ID NO: 182709 - protein, 96 aa, Oryza sativa
  unsure (1)..(96): unsure at all Xaa locations
  Clone ID: PAT_MRT4530_79871C.1.pep
INCLAGIIKSPWCFTMSNGRCPKTSQKPDKISGTNKRKSSLYAPTLGVQXQGVAELPGLLQHEEAVSQQRRQQAQAENENVNLIKXKKLVHVMPFI

SEQ ID NO: 182710 - protein, 117 aa, Oryza sativa
  Clone ID: PAT_MRT4530_79872C.1.pep
LGVLVVVCRRRCVDIIVVAAWKGFPLEYISNGTSRASSSVKQTSRVAPPRGSRLRAIDSDEDQSSPLLALRLPFWWIIFTVAPHHPLPAVLGWQLLAVANETTPPDWSHPGAVLLML

SEQ ID NO: 182711 - protein, 65 aa, Oryza sativa
  Clone ID: PAT_MRT4530_79873C.1.pep
YRIHINCHLISASLSLRACLLRVLENSPDSGATLRRPILYAYGWIDMPERQPPGQRSNQTSSECP

SEQ ID NO: 182712 - protein, 104 aa, Oryza sativa
  Clone ID: PAT_MRT4530_79874C.1.pep
VDWSSIKVRLPLERTRAAASRIPRACRITSAVIDEMAVLSVIPEIATRMYLCHSALMSAQWSFVAHRLIYLIAGQALFLFVSNTLTTAADVVLSLYQENIVADR

SEQ ID NO: 182713 - protein, 796 aa, Oryza sativa
  Clone ID: PAT_MRT4530_79875C.1.pep
MSISASPSATSSAEYAEKTSPEKSWTTWYKRVSASKQTHWDEIGIGQALALTIANSVKDEPLIAAATYFWSNTINAFLFNQGPMTPTLIDITMITGLDVTSSANPMSLNTKNQYDFRTKSIGGWSSYVAAYMGQGSVTPREHVAFLLMWLEKFLFCGSSCGPITNWQFVAEALESKRQFPLGKILLGYLYQMLNNALAKIAVGSVVGAADAGAKLSAELLKDCFCSFYEGFQKDARVWFPYEDSVHLDLPSDFRFEDINHERYQKSREVFLAVISPCILPVSIHQGRNIQVSYEFYHLMSSARQLGMGQLPIGLFFADKIQCRGEISSTLMMDRLLNIQGPPLGSIENIELAAFRSKAFDRWWGEWKLHLFHQSASMYMADLFPDIITQTTEFPPPHQSNSGRDIEYAPGLIPNGGGPSRPVIGYHAPKTSNLLQGLIREPANAGKKRKTKASAIYPSAPAPKKKAKSKKTKPTDDLPALDPSIEQALDEEEIGEDVDQAAAGISDTERTPSTSHKQTPPTPSAPVHFSRLQKKKIAVKKKSAATILKPAPPPPPPPPSPVQQSRSDQTPSATGSHHIEGEEQPAAPAIPALADLFSFDMKDYFDETEEDTTSKALAPLSDDVKKTLEDISHWLEASSLDGLVVDCGSIRTRLHEVQALIPEELADVLTPAAYLEQHQFKLEKASKDCPNAKNTKRLKLPSRPIGNSCMKKNPSLINYLRARSSLVLIGLKLKLADLSQAVEEQKARLKSAIKNVAVMTKSLKVIPGTDAQDAQAIEEVEQIRQRAISAIQGYLSQ

SEQ ID NO: 182714 - protein, 481 aa, Oryza sativa
  Clone ID: PAT_MRT4530_79876C.1.pep
MSTAPAASAAAKATISVEYAKSGRSSCKVCSEGIAKGALRLGASARDPRGFDSTKWYHVACFPSSSHPIDPVEKVKGFDSIKEEDREEVRELNKTCKRDHTAVGTTEESSPKKVKASPGVAENVSISVEYAKSGRSTCKGCSESIAAGALRLGASIRDPRGFDSTKWYHIACFPSSTYPAFPVENLKGFDSIENCKRDGNVTDQLNEQNLKKEVVHSMEDSKGTGNNIEGVKSVYKAEMLAGDKRAGPVIPFSVSDIKQNYKDATLPAHWKVFNTVIFREQDDGLQSSAKIAAFDFDGCLAKTSVRIVGADKWSLLYESIPEKLQILYNDGYKLVIFTNESNIERWNKKRQQAVDSKIGRLDKFIERVKVPIQVFIACGLGKGKTFPDDPFRKPNTGMWWLMREHFNSGVTVDMDKSFYVGDAAGRENDHSDADKEFAKMNSLGLAYLRTESWVHCGNGMKQAIGLKFHVPEEYFGEAANI

SEQ ID NO: 182715 - protein, 108 aa, Oryza sativa
  unsure (1)..(108): unsure at all Xaa locations
  Clone ID: PAT_MRT4530_79877C.1.pep
TALSPPPPPGTSPSXLPGKSAACRRKSSPGSLRKXSPPXRSPPPXTXPPPPXPACPTPPPCSPXXPTXPXSSTPRASCAGTRPPRXTPWXRRPGGRSRRRRRRPDGKQ

SEQ ID NO: 182716 - protein, 38 aa, Oryza sativa
  Clone ID: PAT_MRT4530_79878C.1.pep
LVGLLDPIAPPSFLCTPSSNARLCAFINTTICPPHQLA

SEQ ID NO: 182717 - protein, 583 aa, Oryza sativa
  Clone ID: PAT_MRT4530_79879C.1.pep
MDGLAAPSPSHSGATSGGGASHRKRKLPPSSLSDATADEDDDTTAPSSPSTSPSSPSRPSSPSSSHSDDDDDDSLHTFTAARLDGAPPSSSGRPPKPESSTVSAAAAAAAAAAAPKPDSASAAAGDGKEDPKGLFTDNIQTSGAYSAREEGLKREEEAGRLKFLCYSNDGVDEHMIWLVGLKNIFARQLPNMPKEYIVRLVMDRTHKSMMVIRNNIVVGGITYRPYTSQKFGEIAFCAITADEQVKGYGTRLMNHLKQHARDADGLTHFLTYADNNAVGYFVKQGFTKEITLDKERWQGYIKDYDGGILMECRIDQKLPYVDLATMIRRQRQAIDEKIRELSNCHIVYSGIDFQKKEAGIPRRTMKPEDIQGLREAGWTPDQWGHSKSRSAFSPDYSTYRQQLTNLMRSLLKASLLSSQIFLYDMQPFGLTSLDKPVLCLLPFEFFAPFLFQAYFLKPDQLDGLFNGSMIEMATFYKFNIQIFLNMNEHPDAWPFKEPVDSRDVPDYYDIIKDPIDLKTMSKRVESEQYYVTLEMFVADMKRMFSNAKTYNSPDTIYYKCASRLESFFSNKVASQLAQASTKN

SEQ ID NO: 182718 - protein, 89 aa, Oryza sativa
  unsure (1)..(89): unsure at all Xaa locations
  Clone ID: PAT_MRT4530_7987C.1.pep
TNFNALIWKAWAPRKYKIFAWLIIXNRVWTSDRLQTRGWPNGSIYPLCRQTQEMAIHLLAECRYTRRIWKTLAGXVACDQLHPNQWQQA

SEQ ID NO: 182719 - protein, 195 aa, Oryza sativa
  unsure (1)..(195): unsure at all Xaa locations
  Clone ID: PAT_MRT4530_79880C.1.pep
RPTTHPPDRTTNPPPPPPSPPTNTPKPPQQNHQQPTPPDNIITPTPTHLPPXQLTTNPPTRLPAPLSCSPHYTTNNPQPPNSPPTQPHAPPRHPPQRPTPPHSLQPXPTPHPATPPLPTTPPPPTPIHSPPRPHPGRHTPFPSPVPPSPMLPPQSXPYPYALPPKTPEIKLLWRPKPPNPANGSLPPKKSSLPFR

SEQ ID NO: 182720 - protein, 66 aa, Oryza sativa
  Clone ID: PAT_MRT4530_79881C.1.pep
PWGQQNMLYVLTQKYKQDFAERFTWGKQTGCDHSLNNEITRINSINPLMKPPDHINRFFPYIHPGL

SEQ ID NO: 182721 - protein, 85 aa, Oryza sativa
  Clone ID: PAT_MRT4530_79882C.1.pep
MTRTTCHWHHRRDTTDTEVEAARRNRGGLRAWLARLVPHLCAWSLTATALPTAHSLVGRFKDQVTVSREIYDGVPPQRVWGQAGW

SEQ ID NO: 182722 - protein, 152 aa, Oryza sativa
  unsure (1)..(152): unsure at all Xaa locations
  Clone ID: PAT_MRT4530_79883C.1.pep
MKLLKRMDYPARRSSEERKSFAVEVGGERGAPPPSSGGSAVSRRGRCGPTRGCSRRPAATPGTHERHQPSGWAGSRAAAHPRCERRRRKVVGVSLAYLDLFIFLEIAKIWXDTYGIRIRAYPIRIRNRCRIRYGYATMQAYQVGCDIYTPTR

SEQ ID NO: 182723 - protein, 119 aa, Oryza sativa
  Clone ID: PAT_MRT4530_79884C.1.pep
GVKPQPAFGKLKRPPGRPPGFAKRRKLLGRRPPGPAKPQKLPGRRPPGLARRVAFSPRRLFSSSSVAPVSAEPIMQALAAANTAVLDGFNTQVEALRAERAELEAAWARVEEGRRSVDA

SEQ ID NO: 182724 - protein, 198 aa, Oryza sativa
  Clone ID: PAT_MRT4530_79885C.1.pep
AKDMLLPFSNSTGEESYQSRDLEKASQQVAKPLYDIKVQPSTLLPKQIGNMYTASLYAALASVLYNKHASLDDQRIVMFSYGSGLTSTMFSLKLNNGQDPFSLSNIASVLNATEKLESRHMTLPEKFVETLKLMEHRYGAKDFETCKDTSLLPPGTFYLTRVDSMYRRFYERKADEEIAAAKAKYSNGHATNGYANGH

SEQ ID NO: 182725 - protein, 145 aa, Oryza sativa
  Clone ID: PAT_MRT4530_79886C.1.pep
MARGSAPLDGSVLPPSRIVSERQAGLPRHFMPESATGREIVTLGEFPPGTEDGARAQVRDAADHIVHSFEGSAPRLAFALNSDEEGDDGGVGDSGDEAGDPGASDLTKGSCPGPSPQKARVGASAWGDPRVETGQAGSVVTEGYG

SEQ ID NO: 182726 - protein, 1064 aa, Oryza sativa
  Clone ID: PAT_MRT4530_79887C.1.pep
MGSVSGIDDFAFPPGQAFRFGSLNFITNDFGKISLLNLDSNQSGRDQVPVPFGIPNSAEAYSKIISPESASNHSDEIQSTPPRPDQDDGSYPSILMKLPDDLAAIFTAKTSPTRRSWRAPASAPIQSRSREVGVILQPLGTVLTEELDGYLSSPGVSSRPTEILDYDDFGYHYDHGDHDNFDDSYEDNYTPLFFGVFMADNETEEQRRAQEADQDRARQEAEPITLLDTLLKEDALNQADHVVNILNQTKTMIAASVPANSASTRTPTGSRVPHLRSQDYHQPSLSIAGAGSSRRSRGHDERSVRSPPERYRERRVERPHSPHRRRPIDLRDTINQRRAARGYHSPDRYDDDVDGVAAFTSDLRRVDCPAGFKPTGIEKYDGTTNPESWLTVYELRDHFIANFQGTFERPGTHFDLYNIIQKSGESLRDYIRRFSEQRNKISDITNDVIIAAFTKGIRHEDLVGKFGRKPPKTVKQMFEKANEYAKAEDAITASKQSGTTWKSKKDAPTAYHAILGRPALAKFMAVPHYTYMMMKMPGPRGVISLRSDIKQAVTCDKESCEMAQTHEITLAREEIRLAATTASEGEVPATKLSKIEKGDDKTKKISLDPSDPTKTAVIGTELDCIPREVIEHSLHVKEDAKPIKQRLRRFAQDRKDAIKEELTKLLAAGFIKEVLHPDWMANPVLVRKKTGQWHMKLSHYFQSHSVTVVTSFPLGDILHNREANGRIAKWALELMSLDISFKPRTSIKSQALADFLAEWTECQEDMPEEKMEYWTMHFDGSKRLIGTGAGVVLISPTGERLSYVLWIHFSASHNVAEYEALLHGLRIAISLGIRRLIVRGDSQLVVNQVMKEWSCLDDNMTAYRQEIVRTCEGCQFFARQIHLPAQELQTIPLSWPFAVWGLDMVGPFKKAVGGYTHIFVAIDKFSKWIEAKPVITITADKARDFFINIVHRFGVPNRIITDNGTQFTGGVFKDFCEDFGIKICYASVAHPMSNGQVERANGMVLKGIKAQVFDRLRPYVGKWVDQLPSILWSLRTTPSRATGQSPFFLVYGAEAMLPSEVEFE

SEQ ID NO: 182727 - protein, 66 aa, Oryza sativa
  Clone ID: PAT_MRT4530_79888C.1.pep
AMAFGDPGLLSDMQIGRWLMSRDNALARDSAVSVVGGRVKQEVSLRLQNVECGEVDLELEWIALNQ

SEQ ID NO: 182728 - protein, 133 aa, Oryza sativa
  Clone ID: PAT_MRT4530_79889C.1.pep
MARGSAPLDGSVLPPSRIVSERQAGLPRHFMPESATGREIISLGEGRPAPHYPGRSVFFLPFAMAGLVPPFSSFFMDVLEFYDLQMAHLTPNAVVTLAIFARADPGCRRSYRPQLRGFGPSARVRPRLRRGGR

SEQ ID NO: 182729 - protein, 76 aa, Oryza sativa
  Clone ID: PAT_MRT4530_7988C.1.pep
YIVAGLLHRSRPCSSHCLLRCCRFCFLPPIPSPESLPSSPITPSPSPIPPSVPSPTYVPPPPPSPSPSPVSPPPSH

SEQ ID NO: 182730 - protein, 1314 aa, Oryza sativa
  Clone ID: PAT_MRT4530_79890C.1.pep
MGSVSGIDDFVFPPGQAFRFGSLNFITNDLGKISLLDSDSNQSGRDQVSAPFGIPNSAEAYSKIISPESASNHSDEIQSTPPRPNQDDGSYPSILMRLPDDLAAVFTAKTSPTRRSRRAPASIPVQSRSREIGVILQPLGTVSTEELDGYLSSPGVSSRPTEILDYDDFGYHCDHGDFNDFDDSYKDNYTPLFFGNAVATITLLDTLLKEDRLNQADHVFNILNQTKTMIAASVPANSASTRTPTGSRVPHLRSQDYHQPSLSIIGTGSSRRSRGHDERSVHSPPERHRERRAERPRSPPRQRPVDLRDMINQRRAARGHRYSPDHYDDDVDGVAAFTNDLRQVDWPVSFKSTGIEKYNGTTNPESWLTVYGLAIRAAGGDSKAMANYLPVALADSARSWLHGLPRGTIGSWAELRDHFIANFQGTFERPDTQFDLYNIVQKSGESLRDYIRRFSEQRNKISDITDDVIIAAFTKRICHDDLVDKFGRKPPKTVKQMFEKANEYAKAEDAITASKQSGTAWKSKKDTPTAGGSGSNNHKDRKHKPEELVATTSPSSRQRSCVNTFDKIMNSQCPHHPNSNHVAKDCFVYKQFAEQYAKTACKPSDGDQGTSKKKDDEDDAPTGFQDHRKELNHIFGGPLAYESKRKQKLTEREINVVQPNTPQYLRWSEIVIKFDRSDHPDRVVHPGQYPLVLDPVVRNVKLRRTLIDGGSALNILFAKILDDMQIPRTELKPSNAPFHGVIPGLSATPIGQITLPVTFSTRENFRTENVCFEVADFETAYHAILRRPALAKFMAVPHYTYMMMKMPGPRGVISLRSDIKQAVTCDKESCEMAQTREITLAREEIRLATTTASEGEESALITFLQNNKDIFAWKLSNMPGIPREVIEHSLHVKEDAKPIKQRLRRFAQDRKDAIKEELTKLLAAGFIKEVLHPDWLANPILVVDSMAGCELLSFLDCYSGYHQIRLKESDCLKTSFITPFGAYCYITMPFGLKNAGETYQRMIQRCLSTQIGRNVEAYVDDVVVKTKQKDDLIADLEETFASIRAFRMKLNPEKCIFGVPSGKLLGFMVSQRSIQANPEKINAILNMKPPSSQKDVQKLTGCMAALSRFVSRLGERGMPFFKLLKKTDNFQWGPEAQKAFEDFKKLLTTPPVLASPHPQEPLLLYVSATSQVVSMVLVVEREEEGHIHKVQRPIYFVSEVLADSKTRYPQVQNTQFTGGVFKDFCEDFGIKICYASVAHPMSNGQVERANGMILQGIKARVFDRLRPYAGKWAEQLPSVLWSLRTTPSRATGQTPFFLVYGAEAMLPSESATWF

SEQ ID NO: 182731 - protein, 73 aa, Oryza sativa
  Clone ID: PAT_MRT4530_79891C.1.pep
ASSLVHLAPLLIRFRAFICPCRRPFNQLLKLALKNLCLSPPSGFVCTPPPRPLFLYVVPLLWANVWFQLGGLS

SEQ ID NO: 182732 - protein, 568 aa, Oryza sativa
  Clone ID: PAT_MRT4530_79892C.1.pep
MPGIPREVIEHSLHVKEDAKPIKQRLRRFAQDRKDAIKEELTKLLAAGFIKEVLHPDWLANPVLVRKKTGQWRMCVDYTDLNKSCPKDPFGLPRIDQVVDLTAGCELLSFLDCYSGYHQIRLKESDCLKTSFITPFGAYCYITMPFGLKNAGATYQRMIQRCFSIQIGHNIEAYVDDVVVKTKQKDDLIADLEETFTSIRAFKMKLNPEKCIFGVPSGKLLGFMVSQRGIQANPEKINAILNMKPPSSQKDVQKLTGCMAALSRFVSRLGEWGMPFFKLMKKSDNFQWGPEAQKAFEDFKKLLTTPPVLASPPVSDADKIVRICEGYQFFARQIHLPAQELQTIPLSWPFAVWGLDMVGPFKRAIGGYTHLFVVIDKFSKWIEAKPVITITADKARDFFINIVHRFGVPNRIITDNDTQFTSGAFKDFCEDFSIKICYASVAHPMSNGQVERANGMILQGIKARVFDRLHPYAGKWVDQLPSVLWSLRTTPSRATGQSPFFLVYGAEAMLPSEVEFESLRFRNFNEEGYEEGRVDDINRLEEAREAALIQSTRYLQGLHRYHNRNVRS

SEQ ID NO: 182733 - protein, 65 aa, Oryza sativa
  Clone ID: PAT_MRT4530_79893C.1.pep
MQSMMMTQRDEEIEDFKSRWRRRCLSICCGYGERRQLRQDARPVTGVAGAVMARGAAHDGDYGER

SEQ ID NO: 182734 - protein, 68 aa, Oryza sativa
  unsure (1)..(68): unsure at all Xaa locations
  Clone ID: PAT_MRT4530_79894C.1.pep
LDPVVRNVKLRRSLIDGGSALNILFAKTLXPVTFGTRENFRTENICFEVADFETAYQAILRRLALPKF

SEQ ID NO: 182735 - protein, 272 aa, Oryza sativa
  unsure (1)..(272): unsure at all Xaa locations
  Clone ID: PAT_MRT4530_79895C.1.pep
LREAEEAAREAARARQAEEAAREEAGPRQAEATTSSETTRETDRQEAADRLREAEEAAQMAVRARQAEEAAREEARRRQAEATTTXPESGTSIGGPSRAASSPRRLFPTPSVAPLNAEPLLQALAIANTTVLDGLSAQVEARRHVSELEARRKVLAEIAKEVEEERGXALIATTVMNEAQDTLRRSASRGVAAHEPACSEEESALRLREDALTERERALEEAEAAAQRLADSLSLREAAREEQARRNLEGVRAERAALNQRAADLEAQAKEH

SEQ ID NO: 182736 - protein, 71 aa, Oryza sativa
  Clone ID: PAT_MRT4530_79896C.1.pep
INFLLISSNSSPSSSSSSSSQSTMTPKRSKILLSSFSHVPSSSSSSSSSQSTSPRASEQSSIASSSFSFSS

SEQ ID NO: 182737 - protein, 215 aa, Oryza sativa
  Clone ID: PAT_MRT4530_79897C.1.pep
MAWLTGGGDLLSARSGRRGGSGGGGALPYARSGGGKKLVDSSITEHFNVKLYACPNLAFSLDFITNDFGKISLLDSGSNQSGRGQVSIPFGIPNSAEIYSKIISTESAQNHSDEIQSTPTRSDQDDGAYPPILMKLPNDLVAVFTTRASSPRSVKPEKQKNNACDKKPNDADWRRSAKHKSENGYSVSKRSASRLQRRLRIGNSAPWRPGSEHEN

SEQ ID NO: 182738 - protein, 264 aa, Oryza sativa
  Clone ID: PAT_MRT4530_79898C.1.pep
DIELSKEINESFKQSSQARTKLPSGIEMSVHVLTTGYWPTYPPMDVKLPHELNVYQDIFKEFYLSKYSGRRLMWQNSLGHCVLKAEFPKGKKELAVSLFQSVVLMLFNDAQKLSFLDIKESTGIEDKELRRTLQSLACGKVRVLQKMPKGRDVEDKDEFVFNEEFSAPLYRIKVNAIQMKETVEENTSTTERVFQDRQYQVDAAIVRIMKTRKTLSHTLLITELFQQLKFPIKPSDIKKRIESLIDREYLERDRSNPQIYNYLA

SEQ ID NO: 182739 - protein, 384 aa, Oryza sativa
  unsure (1)..(384): unsure at all Xaa locations
  Clone ID: PAT_MRT4530_79899C.1.pep
NSGANILTIMQEVRASGERAPRGHDGAGGSRRGEQSTPGGGRASGPRDGGPGGXAAQEAVRVRQAEEAAQEEARLRRAGKSAREAEATRARQAAVLDGLGAQMEVLQAERAELDAAWARVEEGRRSVEAMVEAGRKAYRRHASELEARRWELAEIAREVEEERERERRATENEAASRRREVALEARATALEERARARERDLADRETAIAIREATLAAHEAACAEEESALRLREDALTERERALEEAEAAAQRLADSLSLHEAAREEQARRNLEGARAERAALDQRAAELEARAKELDARARSGGAAAGDGDGGGGVCSRRRRRGGAVAVLPAVAARRRSRGGRCGRSSGGGVGSPPPSLPDLAGGGRGEAAGGGNGVERQRRRR

SEQ ID NO: 182740 - protein, 42 aa, Oryza sativa
  Clone ID: PAT_MRT4530_7989C.1.pep
RMAPTLAVRCLRYPQSLSLGDRLIRPCTGISACGHLSKPMYA

SEQ ID NO: 182741 - protein, 585 aa, Oryza sativa
  Clone ID: PAT_MRT4530_798C.1.pep
MSSSDQDDHDEDAPLFRASSGDDDDHPHPRRRSSPVGEVPVAQSIIKAASNVCFSLFVLAVLVVTVVAVTYQPPDPWLQSSAAITTSLSRVLPNSTFLLPDDSLLPTGEDFNSSSSTPSAPRRDDPDQATATATAAAVNGTCDPDAPLNCSDPRVLAAVKAFNAKAFFRKSIVFLSYEAPVPGPKPGECDVAWRFRNRREKSWRRYRDYRRFVLVPGDGCALDINRVGKFRSGTNAARPPRQKGSKNRNPRVAPPPVDAEINDTIPIVGSEAEFRRGKYLYYMRGGDHCKSMNQFIWSFLCGLGEAKFLNRTFVMDLNMCLSGAHTNNGKDEDGKDFRYYFDFEHLKESVSVVEEGDFLKDWKRWDKKKGPGRISVRKVPSYKVTPMQLKRDKSNIIWRLFDGQEPENYWYRVCEGRAAKVIQRPWYAIWKSKRLMNIVTEIAGRMDWDYDGLHVIRGWKAQNKQMYPNLDADTSPEALVDKVPKLIKQPMRNLYIATNEPFYNYFDKLRSYFHVHLLDDYKELWSNTSEWYNETTTLSGGRPVPFDAYMRVIVDTEVFYRAKTQVETFNNLTRDCKDGINTCNL

SEQ ID NO: 182742 - protein, 347 aa, Oryza sativa
  Clone ID: PAT_MRT4530_79900C.1.pep
MATHALRAAEARVWRGGLRATETWEWRRQALERRRRRATTGDSSKGAGPRQKATHHHWPGHLAAPPRDRTTPSPSTVAGIVLRARSCTSSPHRLNPRSSSGSGVYGSGGGGRTHVEKRAVRTTSPPHPPAHGHRHDTDATAGLKGNPYAVGVDAVMEFPGNPWYGPDRVIYLRPLSESGYRWPYGPTPDGLAQGTTIWPVPARSCLGCSLGTIAFILERVKHKNFRCHSKTYTQNRLRLVMSSCQKVVHVKIDVWSLDSESKSRIVRFHDASSLPNNPLTGDTGTLRSRCFDMFALHVALAQPNAQPVAKPGVHHSTFPQYAGKTIIDFIGFGTVNSRPVTTRLISR

SEQ ID NO: 182743 - protein, 1301 aa, Oryza sativa
  Clone ID: PAT_MRT4530_79901C.1.pep
MGFVSDIDDFVFPPRQAFRFGSLDFITNDLVKISLLDSDSNQSGRSQISAPFGIPNSAKIYPKIVSTESASNHSNEIQSTPTRLDQDDGAYPPILMKLPDDLAAVFTTRASSPRRSRRDPASTPIQLSTREVGIILQPLSTVSTEQLDGYLSSPGVDSRPTEIIEYNDFGCRYDYRNLDDFDEDFEDNYTPLYFGIFMADNEMEEQLATITLLDTLLKEDALNQANHVVNILNQTKIMIAVSVPVNSASVRTPTGSRVPPLRSQDYHQPSLSVVGAGSSRRSRGHDERSVHSPPERHRERRVERPRSPHRRRPVDLRDIINQRRAARGYVPHHSPDRYDDDVDGVAAFTSELRRVDWPAGFKPTGIEKYDGTTNPESWLTVYGLAIHAAGGDSKAMTNYLPVALADSARSWLHELPRGTIGSWAELRDHFIANFQGIFERPSTQFDLYNVVQKSRESLRDYIRRFSEQRNKISDITDDVIIAAFTKGIRHDDLVGKFGRKPPRTVKQMFEKANEYAKAEDAITASKQSGTTWKPKKDTPTTGGSGSTNHKDRKPEELVATTTPSSRQHSRVNTFDKIMNSQCPHHPNSNHAAKDCFVYQQFAEQYAKNARKASDGDQSTSKKKDDEDNAPTGFQDHRKELNHIFGGPLAYESKRKQKLTEREINAVQPDTPQYLRWSETTIKFDRSDHPDRVVHPGRYPLVLDPVVRNVKLRRSLIDGGSALNILFAKTLDDMQIPRTELKPSNVPFHGVIPGLSTTPLGQIILPVTFGTRENFRTENICFKVADFETAYHAILGRPALAKFMAVPHYTYMMMKMPGPRGVISLRSDIKQAVTCDKESCEMAQTCEITLAREEIQLAASTASEGEESALITFLQNNKDIFVWKPSDMPGIPREDRKDAIKEELTKLLAAGFIKEVLHPDWLANPVLVRKKTGQWRMCVDYTDLNKSCPKDPFGLPRVDQPRTSIKSQALADFVAEWTECQEDMPVEKMEYWTMHFDGSKRLSGTGAGVILISPTGERLSYVLWIHFSAFHNVAEYEALLHGLRIAISLGIRRLIVCGDSQSVINQVMKEWSCLDDNMTAYRQEVRKLEDKFDGLELTHVLRHNNEATDRLANFGSKREAAPSDVFVEHLYEPSVPRKETIEATDTQDISMIEVDWREPLIRFLTKQELPQDKDEAERISRCSRLYASVAITLPHEPSLARLTGKELQTIPLSWPFAVWGLDMVGPFKKVVGGYTHLFVAVDKFSKWIEAKPVITITTDKARDFFINIVHQFGVPNRIITDNDTQFTGGVFKDFCEDFGIKI

SEQ ID NO: 182744 - protein, 367 aa, Oryza sativa
  Clone ID: PAT_MRT4530_79902C.1.pep
MGKVPHAMRAAKLPLAVLAKPTHASASQPPAPPRPSNPRHRKTPAKASKTPAPATAAAPPPVEKRPIKTASDLAAAIRAAADADVDAAVDLARSAARTIPLPPHSLSLLLRRLARHRSVAAARGLLAELHPSPASPPPRPALLALSDAVCRRGEPREIAQLLPVLADHGVKADAPVYNALMKAHCAASDPAGVLGVLRRMKDDGVEPDLVTYNTLVFGLARAGMVTKARTYLDAMAAAGHFPDVITYTSLMNGMCVKGDAMGALALLEEMEAKGCEPNERTYNTLLMGLCKNKKLDKAVDVYKSMVGAAMKLEAPAYATFVRALCRAGRIPDAYEVFDYGIESKSFAEVTLYTELENSLKWLHRMKS

SEQ ID NO: 182745 - protein, 80 aa, Oryza sativa
  Clone ID: PAT_MRT4530_79903C.1.pep
MQGMWDQVLLLELSGVGAVPFLCISSLLAAAKGVKGVKEDKYFSEAALRLWELALFFCLKMDWIVAKTRFEPLERVLWVE

SEQ ID NO: 182746 - protein, 843 aa, Oryza sativa
  Clone ID: PAT_MRT4530_79904C.1.pep
MPTRCAHPSSAHTISPRHFPSLSNRTITISSCSIQQQANKLARICAYAHIKKHHNSPAATTMKKKWMRGRTHVEQRAVRTPSPPHPPAHGHRRGTDAAAGLKGDPYAVGVNAVMEFPGNPWYSPDRVIYLRLLSAFTLTLLVNKPNSKTPAVNLLHASRHHYAGIRAVRHCSVYTALSQDQICTNPPDSNTFGLTAAPSVRPSARRRRRHTAMSSCEARRAHAVLIPQPAQGHVTPMLHLAKALHARGFFVTYVNSEYNHRRLLRSSGPGALAGAAGFRFEAVPDGMPESGNDDVTQDIAALCVSTTRHSAEPFRELLVRLNSTPGTPPVSCVIADGVMSFAQRVAEEMGILALVFWTTSACGFMGYLHFAELIRRGYVPLKGTKLLMTITTSPMLDAAEIFPCLNESDLTNGYLDTPIDWIPGMRGIRLKDVPSFIRTTDPDDVMLNFDGGEAQNARKARGLILNTYDALEQDVVDALRREFPRVYTVGPLPAFAKAAAGEVGAIGGNLWKEDTGCLRWLDAQQPGSVVYVNFGSITVMSPAHLAEFAWGLACCGRPFLWVIRPDLVSGEKAMLPEEFVGETKERGVLASWCPQELVLSHPSVGLFLTHCGWNSTLESICAGVPMICWPFFAEQPTNCRYVCDKWGVGMEIDSNVSRTEVARLVREAMEGERGKAMRVNAMVWKEKAKEATEEGEPAASYIIILAPGDLRYSATTPVDTHEQLAVTVSTHAAVVAKERLGRLDGYTHLVRMRTCTDITGFYRKSYFQNYEKSSTFHPGCYQPGGFDDGAVIGCSSLVLGLSSGNWLIANFVDFNQTPYKRFPPWYTVRIIQVNCIGVYKIVV

SEQ ID NO: 182747 - protein, 640 aa, Oryza sativa
  Clone ID: PAT_MRT4530_79905C.1.pep
MEPPFFLLLLLLVVSSSSPSAALLSAKGVNNEVQALIVIKNLLKDPHGVLKSWDQNSVDPCSWAMITCSPDFLVTGLEAPSQHLSGLLSPSIGNLTNLETVLLQNNNITGPIPAEIGRLENLKTLDLSSNSFYGEIPSSVGHLESLQYLRLNNNTLSGPFPSASANLSHLVFLDLSYNNLSGPIPESLARTYNIVGNPLICDANREQDCYGTAPMPMSYSLNGSRGGALPPAARDRGHKFAVAFGSTAGCMGLLLLAAGFLFWWRHRRNRQILFDVDEQQIENVNLGNVKRFSFRELQAATEGFSGKNILGKGGFGNVYRGQLPDGTLVAVKRLKDGNAAGGEAQFQTEVEMISLALHRNLLRLYGFCMTATERLLVYPFMSNGSVASRLKAKPALEWGTRRRIAVGAARGLVYLHEQCDPKIIHRDVKAANVLLDEACEAVVGDFGLAKLLDHRESHVTTAVRGTVGHIAPEYLSTGQSSDRTDVFGFGILLLELVTGQTALEFGKSSNHKGAMLDWVKKMQSEKKVEVLVDKGLGGGYDRVEVEEMVQVALLCTQYLPAHRPRMSDVVRMLEGDGLADRWEKASGHSTAAADSLSHSHRTSDPAPPAADFAAAFGRCFSDLTDDSSLLVQAVELSGPR

SEQ ID NO: 182748 - protein, 666 aa, Oryza sativa
  Clone ID: PAT_MRT4530_79906C.1.pep
MLIMLGLGLVPAGAAAALAVALVCLAAAAWWTVERAPRRLERALRAQGVGGGRYQLLLGGDVAENGRLNREAWSRPLPLGCHRIAPRVLPLLWNAVRDHGIAANYLGVPGDATHFTLLSSGFIPEKGGTSAPSTQVMVVPESNGLTLSDEEYDGLVEQSKRRASDSDQPILQRAEKMKAERNLDNQKTTVPRVMIPDPELVREVFNKFDQFGKPKMIRVGKLLATGVVSYEGEKWAKHRRILNHAFHHEKIKVTMILYEVLRLYPPVVLLNRRTFKETNLGGIKFPADMNLILPILFIHHDPEIWGKDASEFNPGRFADGISNASKYHDASFFPFGWGPRICIGQSFALLEAKMALSMILQRFSLELSPSYIHAPYIFIVTCDNSARSRCLGMHADAKQRCMSMGKNIPLVGNDDRHWSDDGGGTRAELHGLLADGDPRVASGGGAGVARRPASDGDAGVAAAGTGAATAAGGNRRQQQGSWATTESRAPPLAAASSSAPTRWDSPISLDGRLAGIVLRARSRTSSPHRLNPRSSSGSGVYGSGGGGGRAITISSCSIQQQANKLACIRAYAHIKKHHNSAAATTTKKKWMRGRTHVEQRAVRTTSLPHPPAHGHRHGADETACLKGNAYAVGVDAVMEFPGNPSYGPDRVIYLRPLSGEFPGYYG

SEQ ID NO: 182749 - protein, 127 aa, Oryza sativa
  Clone ID: PAT_MRT4530_79907C.1.pep
LVMYGRQTLPGLIKDGMSALSRYYLNNFHDGVRQDALDLISGYYTVSKGISSPFQNGGFESATYLPVASAIIVGGITATTFTLSQVGRNAQHFITSIICAGLTAGVVALVKANGKQFCSKPRLCGLI

SEQ ID NO: 182750 - protein, 83 aa, Oryza sativa
  Clone ID: PAT_MRT4530_79908C.1.pep
MALAGRATGNSGGSCIHVDVYTFFSSHGFKASSNGDVDVACLKRSAKAPRPVPSIGSPIMQCSTNTSAFMHCACNISMVGSKH

SEQ ID NO: 182751 - protein, 74 aa, Oryza sativa
  Clone ID: PAT_MRT4530_79909C.1.pep
MWDTTGAEGAHVKAASVARSRNVASTRGGRVVRGGRPYTAASVEVGAVTSSVPHFTADSVRRQDGPITLTLTPA

SEQ ID NO: 182752 - protein, 88 aa, Oryza sativa
  Clone ID: PAT_MRT4530_7990C.1.pep
CISLSTLSASVMHKLRPQPAWDRTCTAAAASGLLWELDMRSELGAFELGKQAEAVECSVDVLLDALTARRLRLGRSITRKQRHNRNCI

SEQ ID NO: 182753 - protein, 321 aa, Oryza sativa
  Clone ID: PAT_MRT4530_79910C.1.pep
MMAVTNGVIHASSREPLFSFGVIADVQYADIPDGRSFLGVPRYYRHSISVLQRAVSTWNKQHNIKFSINFGDIIDGYCPKDKSLWAVQKVLDEFEKFDGPTYHMFGNHCLYNLPRGKLVSLLKMPTDSDRAYYDFSPCPEYRFVVLDAYDFSALGWPRDHPVTAEAMKFLEEKNPNSDKNSPDGLVGVDRRFVMFNGGVGKEQLSWLNDVLQDASARRQNVILCSHLPMDPGSASFAALMWNYDEVMAIVRQYKCVKACFAGHDHKGGHSVDSHGVHHRTLEAALECPPGTSAFGHIEVYPDKLLLVGSDKMADTEMCFEP

SEQ ID NO: 182754 - protein, 103 aa, Oryza sativa
  unsure (1)..(103): unsure at all Xaa locations
  Clone ID: PAT_MRT4530_79911C.1.pep
MMAVTNGVIHASSREPLFSFGVIADVQYADIPDGRSFLGVPRYYRHSISVLQRAVSTWNKQYNIKFSINFGDIIDGYCQXQSLXAVQKVLDEFEKFDXPTLHM

SEQ ID NO: 182755 - protein, 55 aa, Oryza sativa
  unsure (1)..(55): unsure at all Xaa locations
  Clone ID: PAT_MRT4530_79912C.1.pep
VARXAERGTRTPRHGVNYNSAFHIVKFLIVACXFEQFFAXCSYLLAMFITHRLKL

SEQ ID NO: 182756 - protein, 172 aa, Oryza sativa
  unsure (1)..(172): unsure at all Xaa locations
  Clone ID: PAT_MRT4530_79913C.1.pep
ADVIKRGGADRRAPRVSGSKKREGAPASGPHGSAAQGGRSTVDRDHAGCPPPVHETDDPDRSGGRSDGXAVARHSSARHKARRRTAHKPAANGRSGGTAKAGGARVKGRKGRGEASAGLGSAPRPTGRPRRGGGEARPPTAVTGGARSGGDGRMVAAHGRSAATHVRRAAAC

SEQ ID NO: 182757 - protein, 130 aa, Oryza sativa
  Clone ID: PAT_MRT4530_79914C.1.pep
FSSKFDLLSLHRDLMDAWSVGAGREDTELQKDPRGHQIGAVAVAAKRWIGVRQRARLRRRRRWCHAAAGEARRLVVAAAAWAQRPALSILVDLLRPLIIFQIGVFLFSSLFYTFDMYNRCSERDVYMDHG

SEQ ID NO: 182758 - protein, 2325 aa, Oryza sativa
  Clone ID: PAT_MRT4530_79915C.1.pep
MVAVGVSYVSLLNAVASHCRLPWVSYLWEVDGDGVLLAGVELSLPDEQLGCGTVSKFFWVAAVQPSAVSHEMVAQQAVRFLQVKYGFAVHNYNFHMLLSYRKIAASAVDVAITAAAHLARLEARYGPTDLPCENVLKQCNSLWFTFVREDHFFCEWLPVCVPIFFAMSGKAKSCVQRARESRLRRHASLGQGFLQAPVFGSVGSVPLRLSSDAVHTGPSSIHADVAQGSVPSGPSQQATSHRSNANRQLPIEINTISGNPIGNVKSPKPTLEDILPLPKDYIASLKALYPERSYYGGPSHECPYCGAVFSFQERVKKGTVLSQRKIIYNLCCRSGKISLPELKKPPDFLARLLKFDGDARSKRFIRQIRSYNSMFAFTSLGANVDKTINNRSAPCVFKINGVVHHRIGSLLPRHGAAPKFAQLYIYDPENETSNRMNIFERDSNAVDDPDPEIVIELTSMLDSHNDLVKAFRFARDRLKDHGDEKISLRLLGCDARDEIQYNLPTSGEIAGIVVGDYSNGKKYVLPTSFTGGRRYMVQNYQDAMAICRVFGVPDLFVTFTCNSKWQEIYDALLFELGQVPSDRSDMIVRVFNMKVNEFISDIREGKTFGPVLAGSTEFSAPIVDGFISAEIPDVFTDPLGYALVDEFMIHGPCGNQNKSCPCMKKGECSKHFPKSFQDETIMDDFGFTIYKRRNNGRYVLKNGVKLDNRWVVPYNMELLKKYQAHINVKWCNKSNMIKYLFKYVTKGADRSKAYFEVNNKPTGQLSDSNGAAKDDTLNKTTNSNHTPRNEIQEYIDARFLSTCESLWRAFEFDIHYRVPSVERLTVHLPNQNFVRYKKGAQSYVDVRTYEGIVYATFREACELRGLLESDNEWLLSLLMKEMQTTFSNSGGNIDDYDLPRPAIYSDDIVRNRMIEEELALDSAILATEANSIIPKLNADQRTIFDTVMKHVNSSKPGFFFVYGHGGTGKTFLWNALISKIRSEKKIVLAIASSGVASLLLPRGRTAHSRFKIPIDIDENSICTIKRGTMLAELIQKTSLIIWDEAPMTHRKCFEALDRSLRDLLSEHTPSNSRLPFGGKVVVLGGDFRQILPVIRKGSRASIVDASITNLPLWHHVTLLKLNINMRLLQSDLCEQNRQDLETFANWILCLGDGKVPATKKIDETEATWVDIPEDLLIKTSGDKIKAIIDEVFLDFPNKSTSRAGLRILIEDEDEMVTTLISKLEPGLGNPTIRLRVSRFWEFRDQNDENILYHLGLVLVDGTGASIAAQIMPPLDELFAPAITEGKVYDLTFYRVRQCTSQYRPVGNMQSIALTKWSTLEECTDVPENFPNYVYSLTPYDQLRGRVNRKDSFTDAIGIITEITSVTPIQTRTKDGESLKRSIYIRDAEECFFVSIQGNYEPIKYTDLPAPSQAANNAEQKTVIEIKDLHPFKFKMNRILGGANNHTLALLQSPSASQASSLPASMALSPTPSVGLSDAQTGPASPSTAISKHKDLEIESASKTTTEVQDEEEIEDEDVDHLSLTQKAPSSSTKQSTSKSYKKRPRPSPGTGAAKKLFKDNPGNDAGGRDKTGFGLDVVENNALLLFLPNSYSPPPLPVSKNKFYSLLRLPLQKRMEAQQGRRPNRTQPEPSSYGTKRLLLATKFSSREEISQLLADVIYQDAVVVKVLGAGNPNTTKVSAMVGFVCDCQVDDFALLPFRHRMYIVIFMDSDKQYERSQKAFSQKSFTFQTTRLAFEPFKMNLHSVPNPLRQRVILALEGVPPESWNKSAMKELLDGSCMVEELYAEHHIEDLSVFKLAAWTTDCNLIPKLMDWNIEAVEKDQQSSEYAWKHNADLSTILIHIEKHFDYTDEDSESETDGEILKQYERNNPRLPIVKTFQWVSRQIDTDTGPLEGGSPAMPPRRLPTELGIFWNCDGFKDPKKHKFVSDLTKEHQLDFIALSETVNKEFSIAALNNLCAGKDFLWHCKPPRGRSGGLLLGINLLNSDIGLIDEGDIYIKFHLRNKADNFKWALVLVYGPAQNEFKEQFLAELVNMCSHETLPILIGGDFNIIRSPNEKNNNNYDDRWPFLFNAIIDGLCLREIQMTVTINIVELSWLLRDGFVDMVKEVWSGVDEGNTPMERWQAKIHRLRQHLRGWAKHTSGLYKKEKKQILDKLEALDKKAETVLRSQEEVDIRWFFRSRLSVILREEEIKWYQRAKTKDISEGDSNTKYFHLVANGKHRKTRIYQLQEGDHLISGDANLKSHITTYYKGLFGPPDESDLQFDENYVADIPQVSYLENEALTKEFSENEVKDAIFQMEHNKAPGPDGFPAEFYKFSGMSLNLTF

SEQ ID NO: 182759 - protein, 818 aa, Oryza sativa
  Clone ID: PAT_MRT4530_79916C.1.pep
MELSFKVESDIGAGDPVPLDMDNFGDGDGKRNDDGENEKDMGNKSGPGVSDSEGLTASDEDFDGLDEETVLVEQENLVEKISAIPEALISPSRKSQRRASDSDQLVLERAERLKAEKNLEKPHAKGELDDQFDDNTLLQHLCGEIMEEVMDLSGNSGNIQSTLDSMVPSSNSISNVNMCSHETLPILIGGDFNIIRSPNEKNNDNYDDRWPFLFNAIIDELCLREIQMTGRNFTWANNLAHPTYEKLDRVLVSTEWEQKYPLSSVVALDRDISDHTPLLLNTKSSSFSNAQHSFKFELGWLLRDGFVDMVKEVWSGVDEGNTPMERWQAKIRRLRQHLRGWAKHTSGLYKKEKKQILDKLEALDKKAETVLLSQEEVDIRWFFRSRLSVILREEEIKWYQRAKTKDILEGDSNTKYFHLVANGKHRKTRIYQLQEGDHLIRGDANLKSHITTYYKGLFGPPDESDLQFDENYVADIPQVSYLENEALTKEFSENEVKDAIFQMEHNKAPGPDGFPAEFYHVFWNVIKFDLLELFKDFHSGSLPLYSLNFGTIILLPKCAKALKIQQYRPICLLNVSFKIFTKVATNRIMDVAQKVISPSQTAFIPGRNIMEGVVILHETLHELHRKDKSGVIFKIDFEKAYDKVKWPFVQQTLRMKGFSPRWCEWIASFVQGGHVGIKVNDQIGNCFQTYKGLRQGDPLSPILFNIVADMLTLLIKRAKEAGLLNGVIPHFVDDGLSILQYANDTIIFLEHDLQQAKNLKLILSVFEKLSGLKINFHKSELFCFGQTKECYEQYYDIFGCHFQGNSLAPVLGTTTKLF

SEQ ID NO: 182760 - protein, 290 aa, Oryza sativa
  Clone ID: PAT_MRT4530_79917C.1.pep
MATATLHIDGDDVILDVGHLAGQASGDNGDAVDNALMRLPCALNAVGVLTGTMAAAAARSGGGVGRDVDGRGLPTARGELDGARLPGVMMHHDNPVHRGTQGDHSSSPLCICVSRQATADGHRQPPHAARVVPVRAGFGGGVWRSPASSERASQRREDGTGPGEEGSAAACSGCVQFAKQSGAWLRWRLEQPGGKETIEGGSSDPVSDTTTVKEGSFPNPIFICCWDHMMQKYPTLVLCYATIRFKMIDDRLRLCSFPHFPNPPLSFSTRTLFKLLNGLFAAGTFYMKVV

SEQ ID NO: 182761 - protein, 463 aa, Oryza sativa
  Clone ID: PAT_MRT4530_79918C.1.pep
MARSGGELVVVEEDDEYAKLVRRMNPPSVVIDNDSCDSATVIRVDRVKKHGILLEAVQVLVDLNLVITKAYISSDGNWFMDVFNVTDQDGNKVQNKEVTDCIKKCLESEDYLVLPASSPAGGAAPSEETTCIELTGTDRPGLLSEVCAVLASLRCNIVNAEVWTHDRRAAAVIQITDEATGLPVRDGGRLSQLQELLGNVMQGDGDGGGDSRKGSTAVSLGAANAERRLHRLMLDDGDAGRCGEERGGVAAAKAKAKVVVMDCTERRYTVVILRCRDRPRLLFDTLCALTDLHYVVFHGTVDAEGGSAKEAYQEYYVRHVDGHPVRCDAERLRLVRCLEAAVERRASDGLELEVKTEDRAGLLSEITRVFRENSLSIIRAVITTKDGEADDTFYVSDAYGNPVDGKAMEALGEQLGHAVLRVKSNGRAAINRAEDSGGGGAAAIIGNLLKGSFQGFRLIRSYS

SEQ ID NO: 182762 - protein, 762 aa, Oryza sativa
  Clone ID: PAT_MRT4530_79919C.1.pep
MAQESCDLNKDEAEILKPSSSSSPSPSPTTASPSPPTAQMTEPPPPQSTPPTPPAAAAAASAAAAPQFSAKNCEGILIEVSKKRKLAEATATDANAVVVAAVAEPLSPVLFVNRCNVCRKRVVLVYGPAQNELKDQFLEELVNMCSHETIPILIGGDFNILRSPNDKSNNNYDDRWPFLFNAVIDGLCLREIQLSGGLVWVDEGNTPMERWQAKIRRLRQHLRGWAKHTSGLCKKEKKQILNKLDALDKKAETVVLSQEEVDLRWFLRNRLSAILREEEIKWYQRAKTKDIMDGDSNTKYFHLMANGKHRKTRIYQLQDGDQLIRGDANLKSHITTYYKGLFGPPNESDLQFDDNYIAGIPQVSHLENEALTKEFSENEIKEAIFQMEHNKTPGPDGFPAEFYQVFWNVIKFDFLQLFKDFHSGSLPLYSLNFGTIILLPKCAEAMKIQQYRPICLLNVSFKIFTKVATNRLMDFAQKVISPTQTAFIPGRNIMEGVVILHETLHELHRKDKSGVIFKIDFEKAYDKVKWSFLQQTLRMKGFSPRWCEWIASFVQGGHVGIKVNDQIGNCFQTFKGLRKGDPLSPILFNIVADMLTLLIKRAKEAGLLNGVIPHLVDDGLSILQYADDTIIFLEHDLQQAKNLKLILSVFEKLSGLKINFHKSELFCFGQAKECYEQYSDIFGCKLGAFPFKYLGIPMHFRKLSNKDWKLIEERIEKKLSSWKGKHLSVGGDDHKKKYRLTRWDVVCQPKDQGGLGIHNLEE

SEQ ID NO: 182763 - protein, 236 aa, Oryza sativa
  Clone ID: PAT_MRT4530_7991C.1.pep
MGPRASQRVACALSMCWAHQFSLMGLDVIGPWWIERRRREKEREKRRRRRSPAARRGTRSPEMDIISQLQEQLNEMAMVAVNTFGTLQRDAPPVRLSNNYPDPLNPAAAAAANPNPDDPAQPQPGAAAAAAAGAPAAQAQAPPAQAQPPALDLAEHPKAMSHALVLAAKKFDALVSALPLSSEEDQLKRIKELQAENEVVGTELQKQLEAAELELKQVEALFNEATDHCINLKKPE

SEQ ID NO: 182764 - protein, 448 aa, Oryza sativa
  Clone ID: PAT_MRT4530_79920C.1.pep
MRLFQIADICVHVEKAIRHNDGISFAWKLESLNRVQFVVERVLISFYLKSYFTSRISGDANLKSHITTYYKGLFGPLDESDLQFDENYVTDIPQVSQLENEALTKDFTENEVKDAIFQMEHNKAPGPDGFPAEFYQVFWNVIKFDLLELFKDFHSGSFPLYSLNFGTIILLPKCVKAMKIQQYRPICLLNVSFKIFTKIATNRTMDIAQKVISPTQTAFIPGRNIMEGVLILHETLHELHRKDKSGVIFKIDFEKAYDKVKWPFVQQKTLRMKGFSPRWCEWIASFVQGGHVGIKVNDQIGNCFQTYKGLRQGDPLSPILFNIVADMLTLLIKRAKEAGLLNGVIPHFVDDGLSILQYANDTIIFLEHDLQQAKNLKLILSVFEKLSGLKINFHKRSFLIKIGNLLKRELRKSLVVGKVIFRVTHWLRFWAQLQMCEDDRELIEGCMS

SEQ ID NO: 182765 - protein, 226 aa, Oryza sativa
  Clone ID: PAT_MRT4530_79921C.1.pep
MPPPPPPLLLAAAVLASAAAALADPPPPPSPTPWPERFHAVLFTNLTQTSGGGKLQMTDLYYDWPGGRNLNLVAGQLSGDPVYDVEWTNGTSYYFDSASCRTLLFPVGILPPDWLAAGAAYLGREAVDGFDCHVWTKVDFIWYYEDVVTHRPVRWNFYTGMQQHVMSFEVGGALEDSKWQAPAYCFNDQEAATNSDTANDNEDGEVDAMSSLLKFFRAQQTAVAAV

SEQ ID NO: 182766 - protein, 132 aa, Oryza sativa
  Clone ID: PAT_MRT4530_79922C.1.pep
TGQSHTSVSGRGPISPVANNATSLPDTVHHTNSLIQGRRPLAIPPATASAASHRRHRLLPASPLLCLHRLLPLHKPRSPSTHPTRRSRPSCMVEVEARGIDSAPVLRLSPQATDLETVRSASRRRLSRTQPI

SEQ ID NO: 182767 - protein, 1324 aa, Oryza sativa
  unsure (1)..(1324): unsure at all Xaa locations
  Clone ID: PAT_MRT4530_79923C.1.pep
MAPPAGAFGPPGGLYPGGVPAAGLPLGGGGQGATATSVSASLVLPAGLTPSGHVGKIVGTSAVNSVGVIPSFGRTSASGSTGLAANTSGSVSGSVAVGGTLVAAAKTGDVIASVTPAVGAEPVQQGLLVCATDSEKGKSKADTKGLGKPYCYRCLTKGHTLQECSSKFYCEICESVDHIATRCPVFRSAVKPTAQLCGYGGDGLGFFHIPLPAGQRIRHDPRAALVKISNGQMTVKAVVSELERLIPGKWRWVVHDNGDNTFHTIFPSAAELNRMVEWGKVHTKVGEAQMEIIERGVGNEVKYVIPKVWVQCKGLPSGLREYLIIWAVGSILGITKAVDMLFTRRYEIARLQVLVLDPSLIPDVVDVAIGDHLYELSFKVESDIGAGDPVPLDMDNFGDGDGKRNDDGENDKDMGKKSGLGVSDVSMATDSNLTERGGPSFTSSQLSLIPESEGLTASDEDFDGLDEETVLVEQEKLVGKISAIPEALISPSRKSKRRASDSDQLVLERAERLKAEKNLEKPHAKGVIPSNKNVILNNVIEDLKCVEKNRLSEHISSSVNQIPHVIVEGIFWNCDGFKDPKKHKFVSDLTKEHQLDFIALSETVKKEFSTAALNNLCAGKDFLWHCKPPRGRSGGLLLGINLLNSDIGLIDEGVFYIKFHLRNKADNFKWALVLVYGPAQNEFKDQFLAELVNMCSHETLPILIGGDFNIIRSPNEKNNDNYDDRWPFLFNAIIDGLCLREIQMTGRNFTWANNLGHPTYEKLDRVLVSTEWEQKYPLSSVVALNRDISDHTPLLLNTKSSSFSNAQHSFKFELGWLLRDGFVDMVKEVWSGVDEGNTPMERWQAKIRRLRQHLRGWAKHTSGLYKKEKKHILDKLEALDKKAETVLLSQEEVDIRWFFRSRLSVILREEEIKWYQRAKTKDILEGDSNTKYFHLVANGKHRKTRIYQLQEGDHLISGDANLKSHITTCYKGLFGPPNESDLQLDENNIADIPQVSHFENEALTKEFTENEVKDAIFQMEHNKAPGPDGFPAEFYQIFWNVIKFNLLELFKDFHSGSLPLYSLNFGTMILLPKCVEAMKIQQYRPICLLIVSFKIFTKVAINIIMDVAQKVITPTXIAFIPGRNIMKGVVILHETLHELHRKDKNSVIFKIDFEKAYDKVKWPFVQQTLRMKGFSPRWCEWIASFIQGGHVGIKVNDQIGNCFQTYNGLRQGDPLSHILFNIVADMFTLLIKRAKKAGLLNGVIPHLVDDGLSILQYADDTIIFLDHDLQLAKNLKLILYVFEKLSSLKINFHKRSFLINIGKLLKRELRKSLVVGKLIFRATH

SEQ ID NO: 182768 - protein, 584 aa, Oryza sativa
  unsure (1)..(584): unsure at all Xaa locations
  Clone ID: PAT_MRT4530_79924C.1.pep
MPPPPPEPEPEPVVIHAWSAPRSLSTSLMYSFAQRDDMEVLDEPLYANFLRVTGVDRPYREELLSNMDPDGNKVISEVIFGPGKRKYRYCKHIAKQRLPNLSSDLMKKGKHFILIRNPLNILPSFDKVVPPSFFELGIAELVSIYSELCELGSPPPVIDADDLQRDPEAVLSGLCEDLGIPYQPQMLQWEAGPKDFDGIWAPWWYRSVHKSTGFSMPRRYPLIIPSNFLQVVFFTIVLNMLWFLQTFPFALYDLLEQSLPFYNVLKRHVSKTIGSPQPTLPDPPLPVPENKKILVWVGDELLPRDSAKVSVFDSVVQGGDAVWEGLRIYDGKVFKLDEHLDRLFDSAKAMAFSNVPSRDWIKDAIFRTLNANGMFNNAHIRLTLTRGKKVTSGMSPAFNLYGCTLIXEWKPPVYDNSHGIKLVTATTRRNSPNSIDSKIHHNNLINNILAKIEGNLAQAEDAIMLDKDGFVSETNATNIFMVKKGIVLTPHAEYCLPGITRATVMDLVVKESLVLHERRISLSEFHAADEVWTTGTMGEITPVVMIDGREIGDGKIGPVTRQIQNAYKVITAGSGVTIPRNADE

SEQ ID NO: 182769 - protein, 389 aa, Oryza sativa
  unsure (1)..(389): unsure at all Xaa locations
  Clone ID: PAT_MRT4530_79925C.1.pep
MAVWAASAGFDWIRIGILGEGGDEAGRKTGPFGSPDESDLQFDENYVADIPQVSYLENEALTKEFSENEVKDAIFQMEHNKTPGPDGFPAEFYQVFWNVIKFDLLELFKDFHSGSLPLYLLNFGTIILLPKCAEALKIQQYRPICLLNVSFKIFTKVATNRIMDVSQKRAKEAGLLNGVIPHLVDDGLSILQYADDTIIFLEHDLQQAKNLKLILSVFEKLSGLKINFHKSELFCFGQAKEYYDQYXNIFGCKLGFFLFKYLGISMHFRKLSNKDWKVIEQRIEXKKLSSWKGKHLSVGGRLVLINSVLSSLAMFMISFFEIRKGVLQKIDYYRSRFFXWQGDDHKXKYRLTRWDIICQPXAPRGRGGLWIHNLEIHNKCLLSKLLFIN

SEQ ID NO: 182770 - protein, 394 aa, Oryza sativa
  Clone ID: PAT_MRT4530_79926C.1.pep
PKLEALDKKAETVLLSQEEVDIRWFFRSRLSVILREEEIKWYQRAKTKDILEGDSNTKYFHLVANGKHRKTRIYQLQEGDHLISGDANLKSHITTCYKGLFGPPDESDLQFDENYVADIPQVSYLENEALTKEFSENEVKDAIFQMEHNKAPGPDGFPAEFYQVFWNVIKFDLLELFKDFHSGSLPLYSLNFGTIILLPKCAEALKIQQYRPICLLNVSFKIFTKVATNRIMDVAQKIKRAKEAGLLNGVIPHLVDDGLSILQYADDTIIFLEHDLQQAKNLKLILSVFEKLSGLKINFHKSELFCFGQAKECYEQYYDIFGCHFQGNSLAPVLAQLQRCDEDEEFLKVAFMENMSKLPSWWGYVYASLLLIHTLYVDWAFSTNQKSLGKLVNG

SEQ ID NO: 182771 - protein, 322 aa, Oryza sativa
  Clone ID: PAT_MRT4530_79927C.1.pep
MRSFHFVVVLALAVAISSPLAAAHLRQNYYASICPNLENIVRGSVQRSMQQSPIAAPATLRLFFHDCAVRGCDASVMIINPNGDDEWRNPDDQTLKPEGFTTVIAAKAAVDSDPQCRNRVSCADILALATRDSVFLSGGPDYAVELGRFDGRVSTRNSVNLPHGNFNLDQLTGYFGSLGLSPTDMVALSGGHTIGAASCSFFGYRLGGDPTMDPNFAAMLRGSCGSSGFAFLDAATPLRFDNAFYQNLRAGRGLLGSDQTLYSDPRSRGLVDRYAANQGAFFNDFVAAMTKLGRVGVKSPATGGEIRRDCRFPSWFCLTWYI

SEQ ID NO: 182772 - protein, 1439 aa, Oryza sativa
  unsure (1)..(1439): unsure at all Xaa locations
  Clone ID: PAT_MRT4530_79928C.1.pep
MFEAGGGNYIHACQEVARIAIGELRDRYSDQLADTEYRYHPRQPQGSDRGSYLETERIENDATTRHLVEMLWAMDETRAETVLAAQDREDRNRGKICKLEDKVDRLEKELAALKGEAPPQKARIRLTARKRALFVPRYQMAPKVRVAEKEVTLALADPPVVNMVLTRSNGNSPNINNNNNNNGENPTLAQVLAQQAQLMNMMMQQLQNQQNQGNNHAPPQNKLAEFLRVRPPTFSSTTSPVEPGDWLHAIEKKLDLLQCTDQEKVSFASHQLHGPASEWWDHFRLNRTTVEPITWLEFTAAFRKMHIPSGVLSLKKKEFRSLTQGSRSVTEYLHEFNRLARYAPEDVRTDKQRQERFLEGLNDELSYPLMTGDYHDFQKLVDKAIRQEDNQRPHLTLGPQSLPQGGSSSVVRPQRQFFNNNAGNNIRNQAPRPVAAPTQQQPAKREQGSKPGVCFNCGDPGHYSDKCPKPRRVKVVPAQSNSTAPALKARVNHVAAAEAQGAPDVILESKDLDVILGMDWLARYKGVIDCANRKVTLTSNDGQVVIVHALSSESLRSSLNQMTLEEIPIVREYPDVFPDDLPGMPPKRDIEFRIDLVLGTIPIHKRPYRMAANELAEVKRQVDDLLQKGYIRPSSSPWGAPVIFVEKKDHTQRMCVDYRALNDVTIKNKYPLPRIDDLFDQLKGATVFSKIDLRSGYHQLRIKEEDIPKTAFTTRYGLFECTVISFGLTNAPAFFMNLMNKVFMEYLDKCVVVFIDDILIYSRTKEEHEEHLRLALKKLREHQLYAKFSKCEFWLSEVKFLGHVISAGGVAVDPSNVESVTNWKQPKTVSEIRSFLGLAGYYRRFIENFSKIAKPMTRLLQKDVKYKWSEEYEQSFQELKNRLILAPILILPDPKKSFQVYCDASKIGLGCVLMQDGKVVAYASRQLRPHEKNYPTHDLELTAVVHALKIWRHYLFGTRTEVYTDHKSLKYIFTQPDLNMRQRRWLELIKDYDMGIHYHPGKANVVADALSRKGYCNATEGRLPLELCKEFERLNLGIVSRGFVAALEAKPTLIDQVREAQINDPDIQEIKKNMRRGKAIGFLEDEQGTVWLGERICVPDNKDLKDAILREAHDTLYSIHPGSTKMYQDLKERFWWASMKREIAEYVAVCDVCQRVKAEHQKPAGLLQPLKIPEWKWEEIDGQTERVNKILEDMLRACALDFGGSWDKNLPYAEFSYNNSYQASLQMAPYEALYGRKCRTPLLWDQTGERQVFGMDILREAEEKVKIIQERLRVAQSRHKSYADNRRRDLSFEEGDHVYLRVTPLRGVHRFHTKGKLAPRFVGPYKIVSRRGEVAYQLELPQSLAGVHNVFHVSQLKKCLRVPTEEANLEXIEVQEDLTYVENPIRILEIDERRPRNRVIHFCKVQWSNLSEEESTWEREGELNRGFEFDSDRSLSSEP

SEQ ID NO: 182773 - protein, 114 aa, Oryza sativa
  Clone ID: PAT_MRT4530_79929C.1.pep
MAPVISSVVAATPVSAGGDAAAASAPPAVEPPAAPACQLKLTPVLVEHPGLSIELTIRAVVRPISPNCESKPPPVGPLEPESDPHDTFQDPKNDPRGGNKRLPVRTIYFIRLII

SEQ ID NO: 182774 - protein, 91 aa, Oryza sativa
  Clone ID: PAT_MRT4530_7992C.1.pep
GKTCFRYILNCVHGMFPDKPQPRVSPTGAYVTCFDARHLHLSSNSSPQHLNDDGDNLLSVCGAVTLAPVSARRHRALAEARVDSKKGGEGG

SEQ ID NO: 182775 - protein, 657 aa, Oryza sativa
  Clone ID: PAT_MRT4530_79930C.1.pep
MARGSALLDGSVLPPSRIVSERHAGLPRRFMPESATGREIVMLGEGRPAPDYPGRSVFFLPFAMAGLVPPFSSFFMDVLDFYDLQMAHLTPNAVMTLAIFAHLCEMFIGVRPSLRLFRWFFTVQSVSPPSVVGGCYFQPRGPVLNRYIPCALRKKWDDWKSDWFYTPLANEARLRLPSQPPAQVSSWRAPVDLGDDYDAVLDRLAGLRSQGLTGAMVYGDYLRRRIAPLQRRARGAWEYTGSEDYMRTHQGVRWDWAPEDFKIVVQRVLNLSSVEASLIPQGILPLCSDPDRASILTIMMGVGASEEETPKGHDGAGESRRGEQSTPGGGRASGPRAGGSGSSRPADAQGKRKLGGTPPPSPPRGGGAVRASSRHPEGAAPTSQPEGERKKKRLRKMGETEPSRGNLISPPRWSFNRPPRRFVPLSLRPSFFYPKSKFSLTHLVRLLVFSFASTMSRHVPPAIPSPASPRPKIRRPQRNGGENLTGERPQIAFGKLKRPPGRPLGLAMQRIPLGKRPPGLAKPKRLLRRRPPGLVRLRRWRLPRQLTTKLRARRLGPLPRATLRRQPPGRLATRPRADRLGSDLEKALCPKVPPYLSGQGPPFISQGHTTCPFLRRAPGEQPYRSPSIYEEKNSPVWRGRDGACGIPLRYKRRTLPN

SEQ ID NO: 182776 - protein, 154 aa, Oryza sativa
  Clone ID: PAT_MRT4530_79931C.1.pep
LEEKLDAARGVLDAAAARERRAAENEAASRQREEALEARATALEERARAEAACAEEESALRFRENALTERGRALKEAEAVAQRLADSLFLREAAREEQAHRNLEGVRAERAALDQRAAELEARAKKHRRAAGRAGLVRRGGRGPSLGERSRARH

SEQ ID NO: 182777 - protein, 1339 aa, Oryza sativa
  Clone ID: PAT_MRT4530_79932C.1.pep
MKLPDDLAAVFTTRASSPRRSRRDPASAPTQPSSREVGVILQPLDMVSTEQLDGYLSSPGVDSRPTEIIEFLKIATRLSTSASSWLTTRRKNNVKPEKRKNNACNKKPNDVDWKRSAKHKSENGYSVSNRSANGLQKRLRTGDSAPWMPGDEHENLSGSKTSRERRRPVDLRDTINQRRAARGYVPHHSPDRYDNDVDGVAAFTSDLRRVDWPASFKPTGIEKYDGTTNPESWLTIYGLAIHAGIFERPGTQFDLYNVVQKSRESLRDYIRRFSEQHNKISDITNNVIIAAFTKGIRHKLLVGKFGRKPPRTVKQMFEKANEYAKAEDAVTASKQSGTTWKPKKDTPTTGGSGSTNHKDRKRKPEELVATTIPSSRQRSCVNTFDKIMNSQSPHHPNSNHAAKDCFVYKQFAEQYAKNACKTTDGDQGTSKKKDDEDDAPTDFQDHRKELNHIFGGPLAYESKRKQKLIEREINAVQPNTPQYLQWSETTIKFDRSDHPDRVVHPGRYPQVLHPMDRNVKLRRSLIDGGNALNILFTKTLDDMQIPRTELKPSNAPFHGVILGLSATPLGQITLPVTFGTRENFRTENICFEVADFETAYYAILGRPALAKFMAVPHYTYMMMKMPGPRGVISLWSDIKQAVTCDKESCEMAQTREITLAREETRLAASTASEGEVPATKMPKSGENDAKTKKIPLDPSDPTKTAIIGTELDYIFAWKPSDMPGIPREDRKDAIKEELTKLLAAGFIKEVLHPDWLANPVLVRKKTGQWRMCVDYTDLNKSCPKYPFGLPRIDQVVDSTADCELLSFLDCYSGYHQIRLKISDCLKTSFITPFGAYCHITMPFGLKNAGATYQRMIQRCFSTQIGRNVEAYVDDVVVKTKQKDDLITDLEETFASICAFRMKLNPEKCIFGVPSGKLLGFMVSHRGIQANPEKINAILNMKPPSSQKDVQKLTGCMTALSWFVSQLGERGMPFFKLLKKTDNFQWGPEAQKAFEDFKKLLTTPPVLASPHPQEPLLLYVSATSQVVMKEWSYLDDNMTAYLQEVRKLEDKFDGLELTHVLRHNNEAANRLANFGSKREAAPSYVFVEHLYEPTVPRKEIIEATDTQDVSMIEADWREPLIRFLTKQELPQDKDEAERISRRSRLYVIHETELYKKSPSGILQRFVDKFSKWIEAKPVITITADKARDFFINIVHRFGVPNRIITDNGTQFTRGVFKDFYEDFGIKICYASVAHPMSNGQVERAHGMVLQEIKARVFDRLHPYAGQWVEQLPSVLWSLRTTPSRATGQSPFFLVYGAEAMLPSEVEFESLRFRNFREERYGEDRVDDLNRLEEAREAALI

SEQ ID NO: 182778 - protein, 960 aa, Oryza sativa
  Clone ID: PAT_MRT4530_79933C.1.pep
MAEIIVLFVIKKIGIAVAGETLKLAKPLLANKTELKKAELVTALPVNMKLIKDELEVINAFLKELGMNGCKGEVVETWVRQVRRLAHDMEDVVDEFMYVIGKNKERESRAYVKKIIKKPKPLFSLDEIATKADRINRQLMELSKRLGRWTQPILSGGSIPATKYDTEQQQLYLPGHDYSITDAELVGIDKNRQTLIESLCLEDCSLRIIAVWGMGGLGKSTLVNNVYKKEATVSNFNYRAWLSISQSCRVLDIWRNMLKELCGKESREFDAENMSSTELKVELTKILDQKRYLIILDDVWLATDFLKIREVLVDNGLGSRVIITTRIEEVASIAENGCKISLEPLDNHDAWLLFCRKAFPKIEDHICPPELEQCGMDIIDKCDGLPLALVAIGSLLSFKSKNNKDWRLFYNQLISEVHNNENLNRVEKILNLSYKHLPNHLKYCFLYCAMFPEDYLIHRKRLIRLWISEGFIEQKGACSLEDVAEGYLAELVQRSMLQVVACNSFDRVQCLRMHDIVRELAIFQLKKESFCTIYDDTHGVAQVGLDSRRVSVLRCNNDIRSSIDPSRLHTFIAFDTTMALSSWSSFIFSESKYLNVLDLSGLPIETIPYSVGELFNLRFLCLNDTNVKEFPKSVTKLSNLQTLSLERTQLLNFPRGFSNLKKLRHLLVWKLVDATYKSLNNWESMEPFEGLWDLKELHYLNEVRATKAFVSNLGNLSQLRSLCITYVRSSHCVQLCNSLSKMQHLTRLNIRARNEDELLLLDDFTLSNPLEKLELVGQLSEGTLESPFFSIHGYKLLQIELSWCKLTVNPVARLAEFSDLTELRLTRVYTGPWLYFPANWFPKLKKAVLWDLQQVKQIFIQEGALANLHYLHIDSLMELRDIPVGIEFLSSVKEAYFTRMHSDFVRNLRTGKISHIPKVHWSTQGVSTDLTGLANLPGASNMTNTNPEWRILGGSGWVFI

SEQ ID NO: 182779 - protein, 85 aa, Oryza sativa
  unsure (1)..(85): unsure at all Xaa locations
  Clone ID: PAT_MRT4530_79934C.1.pep
LESKLGAHVGPPRTWVGPKKFFRGQKVVFPKSQKVLKPPPRFCKKPLGKLQIQKKGFPFSFPXXKKKKKKKKKKNPQKKKTPKKK

SEQ ID NO: 182780 - protein, 1139 aa, Oryza sativa
  Clone ID: PAT_MRT4530_79935C.1.pep
MANYLPVALADSAWSWLHGLPHGTIRSWAVLRDHFIANFQGTFECPDITDDIIIATFTKGICHELLVGKFGHKPLKTVKQMFEKANEYAKAEDAVTASKQSGSTWKPKKDAPTTGGSGSANRKDRKQQYAKNARKLTDGDQSTSKKKDDEDDAPTETAIKFDRSVHPDRVVHPGWYPLVLDPVVRNVKLQRSLIDGGSALNILFAMTLDDMQIPWTELKPSTAPFHRVIPGLSSTPLGQITLPVTFGTRENFRTENICFEVADFETAYLAILGWPALAKFMAVPHYTYMMIKILGPRGVISLRSDIKQVVSCDKESYEMAQTREITLAQEEIRLAASTATEGEVPAPKKALITFLQNNKDIFAWKPSDMPGIPREDRKDAIKEELTKLLAAGFIKEVLHPDWLVNPVLVRKKTGQCRYHQIRLNEFDCLKTSFITPFGAYCYITIPFGLKNAGATYQHMIQRKLSHYFQGHLVTVVTPFPLSDILHNREANGRIAKWTFTKRTSSPRRPRQNSASTPIQPSSKEVSVILQPLGTVSTDQLESYFSSPGVDSRPTEIIEYDEFGYRYDNRDLDDFDESFEDNYTPLYFDVFMADNETEEQRQARETEARRVQQEAERRRLEEERQAQEQERLQCEQQEHERATKEAEDRRQRALDAGRRARDLIGQQDVEGTAVFCSPQQNAVAAITLLDTILKEDALNQADHVVNILNQTKTMIAASVPVNSRSVRTPTGSRVPHLRSQDYHQPSLSIAGAGSNRRSRGHNERSPGFKPTGIKKYDGTTNPESWLTVYGLAIRAAGGDSKAMANYLPVALADSARSWLHWLPCGTIGSWAELHDHFIANFQGTFERPGTQFDLYNGIRHEDLVGKFGRKPPKTVKQMFEKANEYAKAEDAIIASKQSGPTWKPKKDAPTMGGGGSNNHKDRKSKPEELGATTTHTSRQRSRVNTFDKIMNSQCPHHPNSNHTAKDCFVYKQFAEQYAKNARKTSDGDQSTSKKKDDNDDASTGFQDHRKELNHIFGGPLAYESKRKQKLTEWEINAVQPDTPQYLRWSETTIKFDRSDRPDRVVHPGGYPLVLDPVVRNVKLRRSLIDGGSALNILFDKTLDDMLMNPEFLSTLKGAPHMGPTWVGVPNEVTSPQAHDR

SEQ ID NO: 182781 - protein, 121 aa, Oryza sativa
  unsure (1)..(121): unsure at all Xaa locations
  Clone ID: PAT_MRT4530_79936C.1.pep
LTAHNRRHNYSNSFTLIRCVQLYPQDTAPRHVSVRCHXHHGIPERGHDRAIRITSSNQAHHTSGFAPTPQQAAGSPLSCLGEFGSSKGRHRSHSITPXLAWMRQLEESYNTSTAVAYAGLW

SEQ ID NO: 182782 - protein, 115 aa, Oryza sativa
  Clone ID: PAT_MRT4530_79937C.1.pep
SEGEVPATKIPKSGESEAKTKKIPLDPSNPTKTADRKDTIKEELPKLLAAGFIKEVLHPDWLANSILIGRNVEAYLDDVVVKTKQKDDLITDLEETFASIRAFRMKLNPEKCIFG

SEQ ID NO: 182783 - protein, 1484 aa, Oryza sativa
  Clone ID: PAT_MRT4530_79938C.1.pep
MGFVSGIDDFVFPPEQAFQFGSLDFITNDIGRISLLDSESNQSGRGQIVEHDDFGYHYDYRNLDNFAEGFEDNYMPLYFGIFMADNETEEKRQAQEVEEQRQNAVAAITLLDTLLKEDALNQANHVVNILNQTKTMIAASVPINSASVRTPTGSRVPPLRSRDYHQPSLSVVDAGTSRRSRDHDERSVHSPPDRHRERRAERPRSPYRRHPIDLCETINQRRAARGYNPHHSPDRYDDGVDGVATFTSDLHRVDWAAGFKPTGIEKYDGTTNPESWLTVYSLAIRAAGGDSKAMANYLLVALADSARSWLHGLPRGMIGSWAELRDHFIANFQGTFERPGTQFDLYNVVQKSGESLRDYIRCFSEQRNKISDITDDVIITAFTKGIRHDLLVGKFGRKPPRTVKQMFEKANEYAKAEDAVTVSKQSGTTWKPKKDTLTTGGSGSTNHKDRKRKPEELVATTTPSSRQHSRVNTFDKIMNSQCPHPPNSNHAAKDCFVYKHALNILFTKTLDNMQIPRTELKPSNAPIHGVIPRLSSTPLGQITLPVTFGTRENFRTENICFEVADFETAYHTILGRPALAKFMTVPHYTYMMMKMPGPRGVISLRSDIKQAVTCNKESCEIAQTREITLAREEIRLAASTATEGEVPTTKMSKGGEGDAKTKKIPLDPFDPTKTAESALITFLQNNKDIFAWKPSDMPRIPREVKHSLHVKEDAKPIKQRLRRFSQDRKDAIKEELTKLLAAGFIKEVLHPDWLANPVLVWKKTGQWRMCVDYTNLNKSCPKDPFGVPRIDQVVNSTAGCELLSFLDCYTGYHQIRLKESDCLKTSFITPFGAYCYITMPFGLKNAGATYQRMIQRCFSTQIGRNVEAYVDDVVVKTKQKDDLITDLEETFAGIRAFRMKLNPEKCIFGVSSGKLLGFMKDVQKLTRCMAALSRFVSRLGERGKPFFKLLKKTDNFQRGPEAQKAFEDFNKLLTTPPVLASPDPQEPLLLYVSATSQVVSTVLVVEREEEGHVQKVQRPIYFVSEVLADFKIRYPQVTRFGDILHTREANGRIAKWALELMSLDLSFKPRTSIKSQALADFIAKWTECQEDTPTEKMEYWTMHFDGSKRLSGTGAGVVLISMTGERLNYVLWIHFSASHNVAEYEALLHGLRIAISLGIRRLIVRGDSQLIVNQVMKEWSCLDDNMTAYRQEEGRQLLRDIHSGICGNYAAARPIVGKAYRQGFFWPTAVSDADKIVRTCECCQFFARQTHLPAQELQTIPLSWLFAVWGLDMVGPYKKAIGGYTHLFVAVDKFSKWIEAKPVVTITANKARDFFINIVHRFSVPNRIITNNGTQFTGGVFKDFCEDFGIKICYASVAHPMSNGQVERANGMVLQGIKAQVFDQLHPYVGKWVEQLPSVLWSLRTTPSRATRQSPFFLVYGAEAMLPSEVEFESLRFRNFSEECYGEDRVDDLNRLEEAREASLIQSARYLQGMRRYHNRNVRS

SEQ ID NO: 182784 - protein, 312 aa, Oryza sativa
  unsure (1)..(312): unsure at all Xaa locations
  Clone ID: PAT_MRT4530_79939C.1.pep
MAGCLEHAAHHDTNMSNTAIIPSTELVNYYRFIAQLNPLWHQPRGRGGADKRAPPVGDSREAGAPWTKSTHALVRGRTTWQTRGXPRGHPRGAAQGGHVDGLDRLGRPIGRPRAGAARQRGRAAAGEQGGGGRPESGGARPDGRRLRAAAALDAVAHTGGGRDGRGAHXEGGDGEAKAGRRPTTRIGGGASRVGVGDGAPTTPDRGGGTAEGQQDLGKGMAGLGGHEKTPGGVNHRPKERKTAGAHRCAMEVEFQQDXGDGERWPRNSLSLQSRGRRRRGLAMTKAAGRRGCSRHTEVVARVDGGGVVAVAI

SEQ ID NO: 182785 - protein, 47 aa, Oryza sativa
  Clone ID: PAT_MRT4530_7993C.1.pep
LSPKKSYDMYSSEVLTHDRKGDWWAYRKRPHSTFPSHRVYIGYELPG

SEQ ID NO: 182786 - protein, 1460 aa, Oryza sativa
  unsure (1)..(1460): unsure at all Xaa locations
  Clone ID: PAT_MRT4530_79940C.1.pep
MGSVSGIDDFVFPPGQAFRFGNLDFINNVFGKIFSLDSDSNQSGRDQVSAPFGIPNSAKIYPKLILIESASNHSDEIPSTPTTPDRDDGAYPPILMKLPDDLAASXTTRASPPRRPRRNSASTPILPSSREVGVILQPLGTVSTDQLEGYFSSPCVDSRPTEIVEYDEFSYRYDNRDLDDFDESFEDNYTPLYFSVFMADNETEEQRQARETEARRVQQEAERRRLEEERQAQEQERLQREQQEREWAAKEAEDRRQRALDAGRXARDLIGQQDVEGTAVFRTPQQNVVAXITLLDTLLKEDALNQADQVVNILNQTKTMIATSVPVNSGSVRMSTGSRVPHLRSHDYHQPSLSIAGAGSNRRSRGHDERSVHSPPERXTGGDSKAVATYLPVALADSARSWLHGLPRGTIGSWAELRDHFIANFQGTFXPGTQFDLYNVIQKSGESLRDYIRHFSEQRNKISDITDDVIIAAFTKGIRHEDLVGKFGRKPPKTVKQMFEKANEYAKAEDSIIASKQSGPTWKPKKDVPTTGGVGSNNHKDRKHPVVRNIKLRRSLIDGGSALNILFAKTLDDMQIPRTELKPSNAPFHGVILGLSATPLGRITLPVTFGTRENFRTENVCFEVADFETAYHAILGRPALAKFMAVPHYTYMMMQMPGPRGVISLRSDIKQAVTCDKESGEMAQTREIAVAREDIRLAATTASEGEVATTKISKTGESEAKTKKIPLDPSDPTKTAVIGAELDYIFAWKPSDMPGNPREVIEHSLHVKEDAKPIKQRLRRFAQDRKDTIKEELTKLLAAGFIKDVLHPDWLANPVLVRKKTGQWRMCVDYTDLNKSCPKYPFGLPRMDQIRLKESDCLKTSFITPFGAYCYITMPFGLKNAGATYQRMIQRRFSTQIGRNVEAYVDDVVVKTKQKDDLITDLEETFASIRAFRMKLNPKKCTFRVPSGKLLGFMVSHRGIQANLEKVNAILNMKPPSSQKDVQKLTGCMAALSRFVSRLGERGMPFFKLLKKTDNFQWGPEAQKAFEDFKKLLTTPPVLASPHPQEPLLLYVSATSQVVSTVLVIEREEEGHVQKVQRPIYFVSEVLADSKTRYPQVQKLLYGVLITVRKLSHYFQADFVAEWTECQEDTLEEKMEYWTMHFDGSKRLSGTGAGVVLISPTGERLSYVLWIHFSTSHNVAEYEALLHGLWIAISLGIRRLIVRGDSQLVVNQVMKEWSCLDDNMIAYRQEVRKLEDKFDGLKLTHVLRHNNEAADRLANFGSKREAAPSDVFVEHLYEPTVPRRETAEATDTQDIAMVEADWREPLIQFLTNQELPQDKDEAERISRRSRLYIIHETELYKKSPSGIVQRCCQFFAQQTHLLAQELQTIPLSWPFAVWGLDMVGPFIKAVGGYTHLFVAIDKFSKWIEAKLVITITADKARDFFINIVHRFGVPNRXQFTGGVFKDFSENFGIKICYASV

SEQ ID NO: 182787 - protein, 116 aa, Oryza sativa
  unsure (1)..(116): unsure at all Xaa locations
  Clone ID: PAT_MRT4530_79941C.1.pep
MQPPPPPSRPGARPPXASSPLSPPPSWAPAQPPLPSPPLGKPAQPASHHHHTSSPLSPPPSWAPAQLPLPSPPLGKPTQPGRLPQLAACRLPNKRGRRPCRYHPRNHTISNGPLRR

SEQ ID NO: 182788 - protein, 2013 aa, Oryza sativa
  unsure (1)..(2013): unsure at all Xaa locations
  Clone ID: PAT_MRT4530_79942C.1.pep
MMRASRHSSLAGAGVGTPGVSTSVPARFIPDKDDRFVTGLTPVTSSADNRDPTLRLLPAEWREIPGCQASDDAGPHSKTSCDLASRRRRKPVFFLEDRPSSSFVCAKLLPLSPMAERAVTHNLSPSASGDDGEQNPRRRARTPPPPSRRSLRREEALEGVERSATSPPTSDGEGWRDGERRLLVYGDGSTPQGVLQAAGALLRHPPVVPDPETPARRWLDDVADLVMTAQQRLGAGGRSSATKTSGAATAGFVSSRRKARRAAAVTRRSSAIPSSTPPTQEDVRRGPDARLSIERRRNGRRAAHATEGASSSGAPLRFGRGGQPPVPPVGGVGCRAFVASLRNVRWPPRFRPTITEKYDGSVNPAEFLQVYMTGIEAAGGDDKVMANFFPMALKGQARGWLMNLPPASVHSWEDLCQQFTMNFQGTYPRPGEEADLHAVQRREDESLRLGGVRHNRMLEKIASKEPQTTAELFQLADRVARKEEAWTWNSTGSGVAASAAPGSVARLGRRDRRRKKKSAHSDDEGHVLAVEGASRATRKGRPASDKKKEAGAPSXSARPASGAPCTTPPSTTSRTAXAVKSLAERTRKWEEERRQERREGKAPAAPSGNRRSEAKQKAPAEDIDDGDDDQGFQEPGATIATVDGGACAHASRRSLKAMKRELLAAAPTHEATRRARWSEVALTFDQTDHPPCVARGGQIAMVVSPTVCNVKLGRVLIDGGAALNILSPAAFDAIKAPGMVLRPSQPIIGVTPGHTWPLGHIDLPVTFGGSANFRTERVDFDVADLSLPYNAVLGRPALVKFMAAVHYAYLQMKMPGPGGPITVHGDLKVALACMEQRADHLAAASKPEGGNERLSTSVPAAPRQRMITCDEVPVKEEDALVSFLRANADIFAWRPADMPGVLREVIEHRLAVRPGARPVRQKVRRQAPERQAFIREEVARLLEAGFIREVIHPEWLANPVVVPKANGKLRMCIDYTDLNKACPKDPYPLPRIDQIVDSTAGQIGRNVEAYVDDLVVKTRNQETLLSDLAETFESLRSARIKLNPDKCVFGVPVGKLLGFLVSARGIEANPEKIRAIERMRPPSKLRDALPLFKLLKRSGPFTWTEEAERALTQLKAYLSSPPVLVAPEPDEPLLLYLAATPQVDGPGATAGRPRLSPSDPEVVDTEAECAPRGLSDEERPGDAAPGEEDRPRRKVQRPVYFVSEALRDAKTRYPQAQKMLYAILMASRKLRHYFQAHRVTVVTSYPLGQILHNREGTGRVVKWAIELSEFDLRFEPRHAIKSQALADFVAEWTPAPEPISVPEASSGPSQLPHTAYWVMQFDGSLSLQGAGAGVTLTSPSGDVLRYLVRLDFRATNNMAEYEGLLAGLRVAAGLGIRRLLVLGDSQLVVNQVCKEYRCSDPQMDAYVRQVRRMERHFDGIELRHVPRRDNAVADELSRLASSRAQTPPGAFEERLAQPSARPDPLGETDAPERPPRPVGVQASGPEGSAPSSPRLIAWITEIQAYLADKTLPEDREGSERVQRISKRYVLVEGTLYRRAANGVLLKCIPREQGVELLADIHEGECGAHSASRTLVGKAFRQGFYWPTALNDAVDLVRRCRACQFHAKQTHQPAQALQTIPLSWPFAVWGLDILGPFRRAPGGFEYLYVAVDKFTKWPEAYPVIKIDKHSALKFIRGITARFGDECPRGRVDAHHKFAATIGDAHQQLHYKPDYSLTGLVATAPIHLVPRLLTCGLLSPSCGQGLEDKDEEGASHSPRTKGIIQYFTRQVKQHTEGLDTDLQVTNEKIGQLETAQISTNTKLTGLEIAVARIDTSLAALVRHFDALNAGGNGGGNDDDIDGEYVEDNLEDEYIADTEQDDRDARDRRRLHNNRRGMGGRRRRERDCPSKRVLVVKNDGEYSSASDFDDDTLALLAADHADNEPPEEHIGAAFADHYESLIVQRVLSAQMEKAEQNQRHTWSVRLLTGRPRRPPFAGSAGGPGFGPLRSVIPYSCVLVDLHFRRKQARRGNMAVC

SEQ ID NO: 182789 - protein, 69 aa, Oryza sativa
  Clone ID: PAT_MRT4530_79943C.1.pep
METRVRVDPKPSTNFRRSRKIRSNLMGRIGSWIVRAWDYLPEVEGGNVRGGPTTPHVSWVEERQAERRE

SEQ ID NO: 182790 - protein, 1588 aa, Oryza sativa
  unsure (1)..(1588): unsure at all Xaa locations
  Clone ID: PAT_MRT4530_79944C.1.pep
MGFVSGINDFVFPPGQASRFGSLDFITNDFGKISLLDSDSNQSGRGQISAPFGIPNSAEVYPKIISTELASNHSDKIQSTSTRPDQDDGAYSPILMKLPDDLAAVFTTRASSPRKPGRNPASAPAQPSSREVGVILQPLGTVSMEQLDGYLSSPGVDSRPTEIMEYDDFGYRYDYRNLDDFDEGFEDNYTPLYFGIFMVDNETEEQCKAREAEELRVQQEAERRRLEEERQAQERERLQREQQERERAAKEAEDRRQRALDAGRRARELIGQQDVEGTTVFRTPQQNAVAAITLLDTLLKEDALNQANHVVNILNQTKTMIAASVPVNFXSVRTPTGSRIPPLRSQDHHQPSLSVVGAGSSRRSRXRRAARGYAPHHSPDRDDDDMDGVAAFTSDLRRVDWPGGFKPTGIEKYDGTTNPESWLTVYGLAIHAAGGDSKAMGTFERPGTQFDLYNVIQKTVKQMFEKANEYAKAEDAITASKHSGTTWKPKKDMPTTGGSGSTNHKDRKRKPKELVATTTPSSRQQQYAKNTCKTSDGDQSTSKKKDDEDDAPTGFQDHRKELNHIFGGPLAYESKRKQKLTEREINVVQPDTPQYLRWSETTIKFDRSDHPDRVVHPGRYPCALNILFAKTLDDMQIPRTELKPSNAPFHGVIPGLSATPLGQITLPVTFGTRENFRTKNICFEVADFETAYHAILRCPTLAKFMAVPHNTYIMMKMPSPRGVISLRSDIKQAVTCDKESCEMAQTREITLAREEIRLAASTSSEGEVPATKMSKSGESDAKTKKIPLDPSDPTKTADRKDAIKEELTKLLTASFIKEVLHADWLANPVLVQKKTGQWRMCVDYTDLNKSCPKDPFGLPRIEQESDCLKTSFVTPFGAYCYITIPFGLKNAGATYQRMIQRCFSTQIGRKVEAYVDDVVIKTKQKDDLIMDLEETFASIRAFRMKLNPEKGIQANPEKINAILNMKPPSSQKDVQKLTGCMAVLSRFVSRLGERGMPFFKLLKKTDNFQCGPEAQKAFEDFKTLLTTPPVLASPHPQEPLLLYVSATSQVVSTVLVAEREEEGHVQKVQRPIYFVSEVLADSKTRYPQALDGRHELDTKAFIFQELLFWVWEKLSKTEYNHPEGRGRVDRVHGSGAHAAASRSTVDRAHPGSHRPAPWAPRVSRTRGRGWLTAGPHVAATTVQPAGGGARAPMVAGGGHRHGGAAAERGEGKGEKRRRSTAHPESTATTKEAAGAEEGGGAARVDGDDGALAVGELGEVVDGVGGDAEKPKKATPRRETVPASGEGRPEVVGDGGERGRRRELDSGGKTVRQVAETGRDIDDNMTAYRQEVRKLEDKFDGLELTHVLRHNNEAADILANFCSKREVAPSDMFVEHLYEPTVPRKETIEAADTQDVSVIEANWREPLIRFLTNQELPQDKDEAERISRQCRLYXICGNHAAARTIVGKDYRQGXQTIPLSWPFAVWGLDMVGPFKKAVGGYTYLFVAIDKFSKWIEAKLVITITANKARDFFINIMHQFGVSNRIITDNGTQFTGGVFKDFCEDFGNKICYASVAHPMSNGQVERANGMSGYGPVAVFPSLWSGSDVAK

SEQ ID NO: 182791 - protein, 218 aa, Oryza sativa
  Clone ID: PAT_MRT4530_79945C.1.pep
MACDVGMKTTSSRGRVSGSPSCAITPEGGGGGALAGALCVVEDCRGGHSRHVGGGGKECEICLFLVRHEQLWWSGATRGKLPLASELIWWVGAAGGGRGEGKCNGAPCVQYDYRERAPLLPGACPAPSCRLESGRWLWLECPFSLHQRRGFTFVHPCSAGMKAGRGLNAGLGVAPPLDLGALKVGAATADGQEAAEGDVGNCGRRSSMGAAGWGAGGS

SEQ ID NO: 182792 - protein, 221 aa, Oryza sativa
  unsure (1)..(221): unsure at all Xaa locations
  Clone ID: PAT_MRT4530_79946C.1.pep
MSVPDKFQGFQSPSAEHWTDFQKNSFEPRPFGDXDVDIKXECCGVCASDRHTISGDWGACPYPLAVGHEVVGKVLRVGDKVTLAKVGDRVGAGAQVWSCMDCRQCKNDNETYCKDQIDAYGADYLDTGFKTQGGYSPHSRVHEYWVYPIPEALSSTQAAPMLCAGITVYSPLKRLGAGPGXKVGIVGYRVVSGHYGVIFAKALGVPKSGPSPAREPKEEDA

SEQ ID NO: 182793 - protein, 704 aa, Oryza sativa
  Clone ID: PAT_MRT4530_79947C.1.pep
MADLYQSSSDAAALKKLHTEEAVPPKQIMAREAGGLHRGSAFLRPFPLFYELRWMEPNRVSGCCGFRLRDGMKAKYIPLQCHSSRSQWRSRWFYLEIKELDPVLVVPEVQPERSEDWTSKPPITPSLQAFVDAVFLVMQRVKEVLISAASTADEPPAPLCDKLAAEKAAAINALPLTDVVGLLVDHQAFASLKDKVADEVANISSVPAVAGGSGTKRKPWARSSAPSSSRQKFAGSENEVIVRHLTQDLGSLAPPLKRRVLKLPAGKKALAVSVQSGSETAMSGSPAAIIPRVEVAPVVVESVGPTTAPVAASPPGVANWSDIVAECHRLLESTSRAVGAQMDHVVARGTAADGRVVQLEAQLEVAHEDLQKMKEIVAGNEMQRQGLEKKMNDTHDILFSLRDSLRRSFTSLHQLALSCGMESSIPTHPDETSLTSALSELAGEMEAIPSRHAAHVAEEISNGIHTGACYVLACVKLALPGVDLKEILSKGAVDATRENVMSSVSDLGESILPFTRSKLSPSCIVIFVQTLLLSYGQSDFLYFAPFVDLPRFFVFRSCVDSEDVQQGGCPDVARIDLPSSSDAPAPAIVNDGEHPLHPLPFVDLDDVLAERDRRIAYWRTKFEVAELERSLVVVKKDQAVEALRGCEVWLNSYLKSCYSAMADVCRQLKVNRAEPEESTAGYLSWMRGACAQLEGIGQQIDISL

SEQ ID NO: 182794 - protein, 189 aa, Oryza sativa
  Clone ID: PAT_MRT4530_79948C.1.pep
MEDAKALRRLLNDTDLDLVSDRERQAYYMLSDREYAHMREYAPELLKKIGMDGYFRAIWKAIGWQRFAMTKEESRAGGAYRDTRSMARNERESSSSSTPMQIYEVGWEPIGDAPGWTQAPRHSIEVSSWASTREDRWHAPHDIQWGDNQPPRSSGIPSSPSVWRSSSSCWNLGEITRRMNTLDVQTGEM

SEQ ID NO: 182795 - protein, 95 aa, Oryza sativa
  Clone ID: PAT_MRT4530_79949C.1.pep
TSGPPSHSHLKSLAWLDANGRMVYTFGPFFTHPADSNHPFHGQHLTFSFHFISYILLLQHLRTTNLLLQESCMHIQNLKAVEPLPSTSPLNSSHR

SEQ ID NO: 182796 - protein, 83 aa, Oryza sativa
  Clone ID: PAT_MRT4530_7994C.1.pep
PRRRQRAGGGRGAEAGDRRGRRRQWAAGGRGEEPRPEVTMRRAVSEAAQRATVASSSSLSSSLFFCAEVLPAAASPGRRNRGK

SEQ ID NO: 182797 - protein, 50 aa, Oryza sativa
  unsure (1)..(50): unsure at all Xaa locations
  Clone ID: PAT_MRT4530_79950C.1.pep
FFFFFFFFFFFFFFFFFFFFFSFXVFTSRKFAFTQSYPNRHISCTTIYAS

SEQ ID NO: 182798 - protein, 1409 aa, Oryza sativa
  Clone ID: PAT_MRT4530_79951C.1.pep
MPLLLLRAGAGAKPPLSFSVPPPPGDVRISSRPPTTATRCSSSSSPKLSSATVQFRSDSDPWNQPTVDDDGDFDLKGRKAIPGIHVPRQRYIAVSKPALLDALLSLFPSQPPTPSPTSAAAADFKRFARCLDALLHAEHKEMLEEMRTYYMLTHNHHQHTAAADDDDDDQSVLNGNANTTAGFFGITDNGTLLLTRSLGLRTLLGLSPDPDSHNRIAFATHFQRSFMNLLRNAQFEELSAQDLLLTYALNTDYLLTLPIYVDWKKAAESNAIIFRRGYATERQKGLLLVEKLDYLQSKLLQNIFFGFSKPLRKLGKWLNEALKRSTGNEGFQIWIEKLKVWLKEQTYAENSLSLIENSSWDKLRSDQLPDADLPIWIAAQRAVSRYEGILSPVGPRGRLLRRLLAWTGLIPSLPEATIKSDIDTKDLEGYVRPNFLPRITLANIWAPASRESCNNNLWEITKASFGVLFGKSTLQEPAFQELILLYTDEADQSKEREKSDMMPLQLKIFERIPIPDLPVVFPHKKLSFRILDTVRLDIATVIGLLAYVVNYKFESLASSPSAFLLDIVAFTALAILVFRVALGYKQTRDRYQLLVNKTLYEKTLASGFGSVYFLLDASEQQQLFQKGFSLNECFVQYKEALLAYGMLLCRKKYQVSSRVSIRDTCEQFMYEKFKAKIEMPIDKAMETLLRLGLVIELPTDGGSRVIALPCSDAYEILKSRWDSLLEHKTEQDIVISRYCYEGADEEDCIIEMDGRCLYSSIELLIESAGCSSVAAVGVMAKEQSGSPKPRQPVFQRMRVTLTIGVIGLCVASYILGAWQGTSTTSIHPSIIYTKSQCGESILRTSSNSSGRSSSDARLDFQAHHQVSFNESSLVAEKFPPCQLKYSEYTPCQDPRRARKFPKTMMQYRERHCPRKEELFRCLIPAPPKYKNPFKWPQCRDFAWYDNIPHRELSIEKAVQNWIQVEGKRFRFPGGGTMFPHGADAYIDDINALISLTDGNIRTALDTGCGVASWGAYLIKRNIITMSFAPRDSHEAQVQFALERGVPAMIGVISTERIPYPARSFDMAHCSRCLIPWNKFDGIYLIEVDRVIRPGGYWILSGPPIHWKKYFKGWERTEEDLKQEQDEIEDLAKRLCWKKVVEKDDLAIWQKPINHIECVNSRKIYETPQICKSNDVDSAWYKKMETCISPLPDVNSEDEVAGGALEKWPKRAFAVPPRISRGSVSGLTTEKFQEDNKVWAERADYYKKLIPPLTKGRYRNVMDMNAGMGGFAAALMKYPLWVMNVVPSGSAHDTLGIIYERGFIGTYQDWCEAFSTYPRTYDFIHADKIFSFYQDRCDVTYILLEMDRILRPEGTVIFRDTVEVLVKIQSITEGMRWKSQIMDHESGPFNPEKILVAVKTYWTGQPTQKQ

SEQ ID NO: 182799 - protein, 223 aa, Oryza sativa
  Clone ID: PAT_MRT4530_79952C.1.pep
MENEVGCECQLCGGRRGVVFCGAHGGRLCLQCDRALHQAHGGAGDHPRAPLCDSCNAAAAELRLNDGATLCGPCAYPYAYAYPYTYTYVYTGCPTPLEMMRLLHAAPPPPPATCSLQQRGEGEELLPTLLSATATPNTATAAPMAMPPPPLQHHTTTSLIMMIRNIHKREERNRAKLRFSKQIKYACRKAGADARKRVKGRFAKASSSSSSSSSSSSSIDHRL

SEQ ID NO: 182800 - protein, 167 aa, Oryza sativa
  unsure (1)..(167): unsure at all Xaa locations
  Clone ID: PAT_MRT4530_79953C.1.pep
PQKKSPDKGGPWDCPQKILDPRKKKKQTGLPPGKKKKARKKTPPPKKVQRDQKKGAGIPVPSREGNQVPGGREPTPQLKGKGYTERPAWGNPIPVYTAGTLEXITAEVLKPAGKSKKAQRVRRFPRPHLMVPNRGDKGVSPPIKGPIAGGGVIPQIPKSLFNKAPKE

SEQ ID NO: 182801 - protein, 934 aa, Oryza sativa
  unsure (1)..(934): unsure at all Xaa locations
  Clone ID: PAT_MRT4530_79954C.1.pep
MACSEDNDEEGAFHSPRTKGIIKYFTRQVKXHKEGLDADLQVTNEKNGQLESTQIATNIKLTGLETSIACINTSLAALVRHFDDLNARGNGRRNEDGIEDEYXADTKQDDRDALDRXQLRNNHRGMGGHRQRKVRNNDDVFFSKIKFKIPPIDGKYDPDAYLSWEIVVDQKFAWHDFPENSKVTSXFTDFSSVWXIEHGKKNPNNMPQTWDAFKRVMRAXSAPYFACDLLNRLQQLRQGVKSIGEYYQELQMGMLRCNLEETEDAAMARFLGGLNGEIYDIVDYKDYTNMTRLFHLACKAEREVQVNLHYXAGTTSPAGRTPSSSSTPTPSRAAPPPSSNKPRGPPASSTTKAVXLAASASSIASTGKTRDVQCHHCKGFGHMQRDYPSKHVLVVKNDGEYLSTSDFDEDTLALLAADHANNEEPPEEHIRANDAEHYENLIVQRVLSAQMEKAEQNHXHIVQTMYVIKERSCCMIIDGGNCHNXASSEMVEKLAHSTKPHPHPXYIQWLNNSGKAKVTKLVRVNFAIGNYHDVVECDVVPMQACRGEIGSGWVGSHPSRILTHILQSESGQIRIVSNTDTNSDNIWHKYEMDXCTKTYIRYRLRMFIWISSQKNIPIYPYIFIXRDYIRPLVSYNQRASNVILRKGNESSASVFNFTTVSSGLPTAGALGCGEPTGAVAMAETRRGVQATEDRRHERCGASMDAAAAWRQRCVAXRSCVAMLPMCSVHAWVRLPGWWLVGHLGLVAGSIVFSKVDLRSRCHQIHMKLGDEWKTAFKTKFRXYEWLVMPFGLTNAPSTFIRLTNEVLRAFIGKFVVVYFDDLLIYNKSMGEHLHHLRDVFNTLRDARLFGNLEKCTFCTDRVSLLVYVVTLQGIEVDQAKVEAIQECPVPITITQVRSXFLGLARSYHCFVKDFSTIVAPLNELTKKNVATIWN

SEQ ID NO: 182802 - protein, 218 aa, Oryza sativa
  Clone ID: PAT_MRT4530_79955C.1.pep
MSSTGLSRGRRCTIASRLNASAEAAVAATSSSRGEKQKAAVARRVEYYDEEDARGEARYDVFINHRGVDTKRTVARLFYDRLVAAGVRAFLDNQSMRPGDRLDERISEAISQCGVAVAIFSPHYCDSEYCLRELALLVESRKKIIPVFYNIKPSDLVLPQAVVESVAHHPRDIERFKFALREVKNTVGLTYDTATGDLAELVTSAATAVLENIDKHED

SEQ ID NO: 182803 - protein, 82 aa, Oryza sativa
  unsure (1)..(82): unsure at all Xaa locations
  Clone ID: PAT_MRT4530_79956C.1.pep
ASAHASAHASCLCTIAPIAIGGMGXTNIRGGGSFYCSSINPAVSFSXXLGRWAWESHWVYWVGPLICRGLACVIYEVLCIFH

SEQ ID NO: 182804 - protein, 1254 aa, Oryza sativa
  Clone ID: PAT_MRT4530_79957C.1.pep
MAGLSTGAGAPVVKLYHEKSMIMPDVSRVLACLYEKNIEFETVKDSYKDILRLQASRSVPVPFYDGPTFLQESRAICRYIAETYEQRGYPFLLGKDVLERASIEQWLRHEEHAFDPPSRALFCHLAFPVQDDDDDDINTEKRKLEEVLEVYEQRLGESEFLAGNKFTLADLVHLPNTHHLVTSEFAYLYDSRKNVQRWWDTISNRQSWKQVLKDMNRVEEEYQMELEQQEEQWQTELPQTSVGHTIRLDPRQTTSTESRTVLVPPPSAGMISTSFSSQREQPLPSETIRQDKPSPRKESNFFTTTEKTPSTPRSRAPTTQKQPSSTFFTPSTTPKIPQRTDTDISSSKDAPYQTKPSETTSKEAHDKSHLSGFFKARSHTDETATPTKHSPQEDSKTSTKIPKTRDISEAVGPNSPISTKAPHEIDERASVDPRFDKPAPYTKPTTNIPQTSSGRPSAQRDLGTSPGTEADKTSSDLGGGVQSPYAQGRAEQVKKTSSDQRGSETAQPAQPRGIQQFTKDARQADQNRIAASPRQQPSESQEDTHNIMSEDERFSTKRLRKMMEESEKEAQEVKSQPTDFRPSKEETPSIYKNPSDVQDRTILDDRKSGRSPSAGTRAPDYPTSAAERRVASQPKEGMPYDDRGATKPQKSPSINEQEKIPVVPSQAPPASSGKASESLKEVSPDDGLAQVSTINQWRQTSAPPPTKLAAPDAPRNVGLAKTEGVDKRTQPSTTKETPRNDRNVLATGQGADRGVGNEQYDKNSIDERAPQMTPRQAAPSVTQRASASIQERISGARGASDDMFGKTSSADQSNTPAIPKQTTVQGATPDVRGTSYADREMKLPADEKATANKQKPVSSSQQTIEPIRGGTPTSYGSTDDDLAKTSRANERQTPPSKAQAPASNRQSASTALQGGTPDARGENTAVKPSVTSPTGMPTSSRRQEPTPSVTSPTGVPTSPRRQEPTPDTQRRRAADQMPSQAPLPSSFSTRNKENGISEAGQTNTVAPDGLPGPGVPKDAGPQVAGPSVVKSQKNMNEAYNDGPSTQQLPNDQYRSQPREAKEEQGADAALINEIGKAQKDDLLANPNQSSTGRVQPTSTEETSKQQLQSGLNKPISSKDGKETVSYGSSATSREMLPSIPDKSMRVQQPQGDKSSYSSISQEDNVKQGSQAALQGSGNEQPKKRDLLANADEKIRGTTGEALQKSDEGRISSNTEQMKSNRNNSKPDGSTEPTSFDGNEGNLPESQRRGSSSNP

SEQ ID NO: 182805 - protein, 126 aa, Oryza sativa
  Clone ID: PAT_MRT4530_79958C.1.pep
VLDGFPIAIEGKLRKECPEISEFLKEFYGGVPNCVRLGPYLAEGLVLHIWAATVPRTTGRVRDRCALPVVSRRTPHHTPCHASMGALAAEAAPGHAATCTSIIAVSIARRLSILRGNGRHATRRHP

SEQ ID NO: 182806 - protein, 111 aa, Oryza sativa
  Clone ID: PAT_MRT4530_79959C.1.pep
LGSFLTKSSASTCSPHPSPSTHGDDAPVESIAEEVLEEPVQCLETVIENTQEQPELEGIELIREFDSEVHVVVDPTLRIPIEKFHPDIRSEVRRAYLLKGPTQPKITFPRK

SEQ ID NO: 182807 - protein, 210 aa, Oryza sativa
  Clone ID: PAT_MRT4530_7995C.1.pep
MPAGRGRRLAALRLRRAALAWEKRGEMSGGAGVSHPPLLIFLSCNTITPSSAQPSNRSETDLQALLCFKQSITNDPTGAFSSWNISLHFCRWNGVTCGRTSPAHVVSINLTSMKLSGVLPACMGNLTSLQTLVLDRNNLEGTIPESLARSLSLIELNLSRNFLSGQIPASLFNGSSKLVIHEYLHGNTIWAGYRIPNMYRISYLYLGFVS

SEQ ID NO: 182808 - protein, 326 aa, Oryza sativa
  Clone ID: PAT_MRT4530_79960C.1.pep
METAMMLVHVAAWPGAASAARAPMLAWHGVWCGVRRETTGRAHRSRTLPVVRGTVAAQMCSTRPSARSTGPMSRLVATFSFFCASSLPKSKPSIIADDSGSHSWYHARVSPQSSSSPTIVLHWLNVGHELPPLGIYWAKASVVVEEELKWRWRWRWWHLHRGHNRLYRVINRTVLILIAVGFDDRCILQGQLRAEFRKGACQRDAPVEPSCQTLLPPPAELELHHGPAAATGFWYSNSGADRALYATPITLLDGFSTQFTFTVTTLNTDSIGGGLAFVLASVHRVSATSDVAVEFDTLMDVQFGNANGNHVGLDLGSMVSSAAAAW

SEQ ID NO: 182809 - protein, 707 aa, Oryza sativa
  Clone ID: PAT_MRT4530_79961C.1.pep
MPAIMLCSCSGDQSKFEEMPRSPESLATRDYSATGSSSRIGNRESTPDDNQEARALLGRLEHQRGNFDAALQVLQGIDIRSLMPRMTTAIADSVKPRGPPRSRKKTSQVNGMLMHMSMHSVSLLLEAILLKAKSLEGLGRVTDAAEECRTIIDIVESAWPYGVPEGTSEECKLIDIFHSALEYLPKLWMRSGCCEEAIIAYRRALAKPWNLDSQRSANLQKDLAVTLLYCGAQVKFTQEFDQHKPATPRNNMEEAILLLLILTKKLALQEIKWDPDLVNHLMFALSLSGHYEILASHLEMLLPGTYNRSERWYILALCYSAAGMDDSALNIIRNGFNVLERKGKPHIPSLLLGAKLCCKNPKRASEGIKFADKAMKSFRKHDFHFVSVVNHLLGVCYGPFARSSTSHAEKLRLQDEALRLLQDAAAMAKYSPEIMYSLAWENAMQRKLNAAVESATECVEMVMGSLVSAWKLLILVLSAQQNLKEAEAVANIAIDEAEKEDQMGILRLKAHIQASRGQFKSAVESFRSLLAIIQAKKEIWKQTPYDKVKSLQNLEMEAWLDLASIYTKLESWHDSNVCLDKAKSISSFSPKCCHVRGLILQAQSLHQEALTAFSLSLSIDPDYVPSMVCMAGILTILGGKSLSIARTFLRNALRLEPTSHQAWLRLGLVLKSEGSLLEAADCFQAAYELQELSPIQDFSEHLPIMLQ

SEQ ID NO: 182810 - protein, 89 aa, Oryza sativa
  Clone ID: PAT_MRT4530_79962C.1.pep
IHLTKLSFYCISVYNSWNYIYVCVKLRATSLSRQSLTGNDESFSSSAINCSIFLLSYRHVHASLIIHFESLSFAIIMTLGSRRCLFLVS

SEQ ID NO: 182811 - protein, 62 aa, Oryza sativa
  Clone ID: PAT_MRT4530_79963C.1.pep
MGVCKISCYDLPPQLSQNPGFDTNTCTLPYFVTSELPHTPTDLPLNLLTPQPIPPMGTQLLE

SEQ ID NO: 182812 - protein, 737 aa, Oryza sativa
  Clone ID: PAT_MRT4530_79964C.1.pep
MLEKIKGQLMSRFYNKQKEAEKWEGPFCPKIDVISKHCDCRRWDLTGIPCCHAIDCIREERLSEQDFLPFCYSIEAFKSVYANNIMPCSDRANWEKMNGPQVLPPVYEKKVGRPKKTRRKHPTEVQGKNGLKLNKHGVIIHCSYCHEPNHNKKGCPMRKKGIKPKIQIRKKKDVAPGSQVPSITQEMMGTQPGTSTGLLNEVNDNMLSVIMAESSQPSQITQQQGPLPDSAFIQQNQPSTRPVVLTTATKEGRAKITRQRRRHEVLQRRRQISLSKKKFYSHMMGTRSTVPYSGEYKRRPSLKKPWGPRPVLGYHPSWPRRCTWLPPTIALPLQLVASRRRLAAVELTAERPNPRRIGDFGGFGDVARDATLATIPLTWPFSCWGLDILRPFPRGQGGYKFLFMAIDKFTKWIEVTPTGEIKADNAIKFIKGIFCRYGLTHHIITDDDSQFTSANFQDYCIGLGVKIYFASVSHPQSNGQVERANGIVLQGIKTRVYDRLMSHDKKWVEELPSVLWAVRTTPTSSNKETPFFLVYGSEAMLPTELQHQSTRVQKYSDEEQKEQRSDDALRRYHEKRIRAHTLSIGDYILRRVQSQVGRNKLSSKWEGPYTITQVLRPGAFKIADDRLPRRHLELKPILMSLYAILARPLRNLRELRLGTPRADKALLDHAETNDHVKGTRVLSSENDSPTTRLGARESVWLRIQKPPGRPTPIYGVENLLGKRRHQLHKTVDLRGVL

SEQ ID NO: 182813 - protein, 176 aa, Oryza sativa
  Clone ID: PAT_MRT4530_79965C.1.pep
MAAETGIQLDSFSLGGPAEYLASDGERDVLMVRFLRSIAAFLADGTCQMQVNDGLRSVVDLVGGGGGGRSMQRLATPSATISTTRQGFHAMCPIIRLAAAVSNLSITKVMDAKRGVIHVVDLSGEAQRLDANLQFHPTQSSIMALSGIGSRLSVIAGQPLAAGESIACNDGDVACE

SEQ ID NO: 182814 - protein, 298 aa, Oryza sativa
  unsure (1)..(298): unsure at all Xaa locations
  Clone ID: PAT_MRT4530_79966C.1.pep
QLPAQALQTIPLAWSFSCWGLDILGPFPXDNGYKFLFIMVDKFTKWIEATPTGEIKADNAIKFIKGIFCRYGLPHRIITDNDSQFISADFLDYCIGLGVKICFASVSYPQSNGQVERANGIVLQGIKTRVYDRLMSHDKKWVEELPSVLWAVRTTPTTSNKETPFFLVYGSEAMLPTELQHQSTRVQKYSDKEQEEQRSDDVNLLEEHRERVTVRAASYQQALRRYHEKRIRALTLSIGDYVLRWVQSQAGRNKLSPKWEGPYTITQVLWPCAFKIADDDGRELANSWNIDQLRKFYV

SEQ ID NO: 182815 - protein, 919 aa, Oryza sativa
  Clone ID: PAT_MRT4530_79967C.1.pep
SGRSQISAPFGIPNSAKIYPKIVSTESASNHSNEIQSTPTRLDQDDGAYPPILMKLPDDLAAVFTTRASSPRRSRRDPASTPIQLSTREVGIILQPLSTVSTEQLDGYLSSPGVDSRPTEIIEYNDFGCRYDYRNLDDFDEDFEDNYTPLYFGIFMADNEMEEQLATITLLDTLLKEDALNQANHVVNILNQTKIMIAVSVPVNSASVRTPTGSRVPPLRSQDYHQPSLSVVGAGSSRRSRGHDERSVHSPPERHRERRVERPRSPHRRRPVDLRDIINQRRAARGYVPHHSPDRYDDDVDGVAAFTSELRRVDWPAGFKPTGIEKYDGTTNPESWLTVYADSARSWLHELPRGTIGSWAELRDHFIANFQGIFERPSTQFDLYNVVQKSRESLRDYIRRFSEQRNKISDITDDVIIAAFTKGIRHDDLVGKFGRKPPRTVKQMFEKANEYAKAEDAITASKQSGTTWKPKKDTPTTGGSGSTNHKDRKPEELVATTTPSSRQHSRVNTFDKIMNSQCPHHPNSNHAAKDCFVYQQFAEQYAKNARKASDGDQSTSKKKDDEDNAPTGFQDHRKELNHIFGGPLAYESKRKQKLTEREINAVQPDTPQYLRWSETTIKFDRSDHPDRVVHPGRYPLVLDPVVRNVKLRRSLIDGGSALNILFAKTLDDMQIPRTELKPSNVPFHGVIPGLSTTPLGQIILPVTFGTRENFRTENICFKVADFETAYHAILGRPALAKFMAVPHYTYMMMKMPGPRGVISLRSDIKQAVTCDKESCEMAQTCEITLAREEIQLAASTASEGEVPATKMPKSGESDTKTKKIPLDPSDPTKTADRKDAIKEELTKLLAAGFIKEVLHPDWLANPVLVRKKTGQWRMMKLNPEKCIFGVPSGKLLGFMVSHRGIQANPEKINAILNMKPLSS

SEQ ID NO: 182816 - protein, 926 aa, Oryza sativa
  unsure (1)..(926): unsure at all Xaa locations
  Clone ID: PAT_MRT4530_79968C.1.pep
SKLGGKKSTNPEEFIQVYSIVLYAAGADDNTLANYLPAALKGYARSWLVHLPAYSISSWVDLWQQFIANFKGTYKRHAIEDDLHALTQNPGESLRDCVRRFNECRNTIPKITDASVIYAFKTGVRDRYTTQELATRRIMTARKLFGIVDRCAHADDALRRKNDKPKTGGEKKLAKDAPESSKKKSRRSGKRKAQMEILAAEYADPPKHPDPQGDDTKKIWCPIHKSDKHSLETCFVFKKALAKQLALEKGKRVCVVEKAAEAATQDSDSAYPDSDLHVSHIFGGSTAYSXKREYNKVERVVCLTWQGAAPKMKWSEXKIEFSEADHPKIAVTLGRYPIVVEPTIRNIKVARVLIDGGSSIXPTDQPFHGITPQSSSKPLGMITLPVTSSQANNFRTEQITFDVAEFDTAYNAIIGRTALAKFMAASHYTYQVLKMPEPKGTITIQGNTKLAVQCDKRSLDMVENTPNPPTIAEPPKKVSKTNKTPKPDGAIKIVPLSSANPDKTINNSDVFAWXPSDMRGVPREVIEHKLMVRPDAKPVKQKLQRIAPDRKQAIREELDKLLKAGFIREVLHPEWLANLVMVRKANGKWRMCVNFTDLNKACPKDHFPLPRIDQLVDSTAGCELLSFLDTYSGYHRSXMAKEDEEKTAFITPFGVFCYVKMPFGLITVGNTFQRTVQGALNDQLGNNVEAYVDDIVVKTKTSDSLIDDLRETXNNLRRYRLMLNPEKCTFGVPSGKLLGFLVSGRGIEENPKKIKAIENMKLPTRLKEVQKLTRCMAALSRFVARMGEQGQPFFALLKKQEKFVWTQEAEDAFIALKRYLSNPPALVAPQPNEELFLYIAATRLPAQALQTITLTWPFSCWGLDIIGPFPRGQGGYRFLFVAIDKFTKWIEATPTGEIKADNAIKFIKGIFCRYGLPDRIITNNGS

SEQ ID NO: 182817 - protein, 1549 aa, Oryza sativa
  Clone ID: PAT_MRT4530_79969C.1.pep
MGFVSGIDDFVFPPEQAFQFGSLDFITNDIGRISLLDSESNQSRRDPAPAPILSSSREVGVILQPLGTVSTEQLDGYLSSPGVDSRPIEIVEHDDFGYHYDYRNLDNFAEGFEDNYMPLYFGIFMADNETEEKRQAQEVEEQRVRQEAERRRLEEERQAQERDGCSQNAVAAITLLDTLLKEDALNQANHVVNILNQTKTMIAASVPINSASVRTPTGSRVPPLRSRDYHQPSLSVVDAGTSRRSRDHDERSVHSPPDRHRERRAERPRSPYRRHPIDLCETINQRRAARGYNPHHSPDRYDDGVDGVATFTSDLHRVDWAAGFKPTGIEKYDGTTNPESWLTVYSLAIRAAGGDSKAMANYLLVALADSARSWLHGLPRGMIGSWAELRDHFIANFQGTFERPGTQFDLYNVVQKSGESLRDYIRCFSEQRNKISDITDDVIITAFTKGIRHDLLVGKFGRKPPRTVKQMFEKANEYAKAEDAVTVSKQSGTTWKPKKDTLTTGGSGSTNHKDRKRKPEELVATTTPSSRQHSRVNTFDKIMNSQCPHPPNSNHAAKDCFVYKHALNILFTKTLDNMQIPRTELKPSNAPIHGVIPRLSSTPLGQITLPVTFGTRENFRTENICFEVADFETAYHTILGRPALAKFMTVPHYTYMMMKMPGPRGVISLRSDIKQAVTCNKESCEIAQTREITLAREEIRLAASTATEGEVPTTKMSKGGEGDAKTKKIPLDPFDPTKTAESALITFLQNNKDIFAWKPSDMPRIPREVKHSLHVKEDAKPIKQRLRRFSQDRKDAIKEELTKLLAAGFIKEVLHPDWLANPVLVWKKTGQWRMCVDYTNLNKSCPKDPFGVPRIDQVVNSTAGCELLSFLDCYTGYHQIRLKESDCLKTSFITPFGAYCYITMPFGLKNAGATYQRMIQRCFSTQIGRNVEAYVDDVVVKTKQKDDLITDLEETFAGIRAFRMKLNPEKCIFGVSSGKLLGFMKDVQKLTRCMAALSRFVSRLGERGKPFFKLLKKTDNFQRGPEAQKAFEDFNKLLTTPPVLASPDPQEPLLLYVSATSQVVSTVLVVEREEEGHVQKVQRPIYFVSEVLADFKIRYPQVTRFGDILHTREANGRIAKWALELMSLDLSFKPRTSIKSQALADFIAKWTECQEDTPTEKMEYWTMHFDGSKRLSGTGAGVVLISMTGERLNYVLWIHFSASHNVAEYEALLHGLRIAISLGIRRLIVRGDSQLIVNQVMKEWSCLDDNMTAYRQEEGRQLLRDIHSGICGNYAAARPIVGKAYRQGFFWPTAVSDADKIVRTCECCQFFARQTHLPAQELQTIPLSWLFAVWGLDMVGPYKKAIGGYTHLFVAVDKFSKWIEAKPVVTITANKARDFFINIVHRFSVPNRIITNNGTQFTGGVFKDFCEDFGIKICYASVAHPMSNGQVERANGMVLQGIKAQVFDQLHPYVGKWVEQLPSVLWSLRTTPSRATRQSPFFLVYGAEAMLPSEVEFESLRFRNFSEECYGEDRVDDLNRLEEAREASLIQSARYLQGMRRYHNRNVRS

SEQ ID NO: 182818 - protein, 43 aa, Oryza sativa
  Clone ID: PAT_MRT4530_7996C.1.pep
YLQLIVPNNPIIPSKKISAVTKFCATTCIKIHHGINIVQMQYF

SEQ ID NO: 182819 - protein, 366 aa, Oryza sativa
  Clone ID: PAT_MRT4530_79970C.1.pep
LAPGLEWYIPGLEIELCSRDGCSEWLGLYNREAEEAFIALKRYLSNPPILVAPQPNEELFLYIAATPYSVLANFVADWTMPENRLDSQTDSETWTMAFDGALYSQGAGEGFILTSPSGDQFKHAIHLNLKATNNTAEYEGLLAGIRAAAALGVKRLIVKGDSELVVNQVHKDYKCSSPELSKYLAGEKRCEACQFHSKHTRLPAQALQTIPLTWPFSCWGLDILGPFPRGQGGYRFLFCIKGIFCIITDNGSQFISVDFQDYCIGLGVNICFASVSHPQSNGQVERANGIVLQGIKTRVYDRLMSHDKKWVEELPSVLWVVRTTPITSNNETPFFLVYGSEAMLPTELRHQSTRVQKYSDKDQEGQ

SEQ ID NO: 182820 - protein, 440 aa, Oryza sativa
  Clone ID: PAT_MRT4530_79971C.1.pep
MAAGSEGGIFMGKEARSVWGAECRSAEAVERGEGTARALPALAAKRGSGGKGALPLPHWGGVAGKARRAGVSGSACTAQEAKRRPRGNGPRGEWAEGGPMKRGRKGSRPSGNQPEGKGGSIIEGYTTEEVIEFCIDYMAETDPIGVPASHHEGRLAGLGTTGRKRIVPDQASYAQAHFAVLQHMAEETPYFEEHLAKVRQENMGRSDMWINREHSTRFNEWFKNHIARSTDGPSEIIRYQCVASCPSWDVDTWQGYDINRYTFYTVKQDDKSTMQNSGVRIDAYQDQAGSNTYYGRIEEIWEMNYRSFKVPLFRCSWVNIRTGVKVDREGFTLVDLAKVGYADEPFVLAKQVEQIFYIQDPANKKLHVVRDGKRRIVGVDNVVDEEEYNQNLHTAAAASSLSLSISVPTAASSSWMLPPPGRRRLLLLDVAASSSAAAYP

SEQ ID NO: 182821 - protein, 1581 aa, Oryza sativa
  Clone ID: PAT_MRT4530_79972C.1.pep
MGFISGIDDFAFPPGQAFQFGSLNFITNDFGKISLLDSDSNQSGRDQVPVPFGIPNSAEAYSKIISPESASNHSGEIQSTLPRPDQDDGSYPSILMKLPDDLAAVFTAKTSPIRRSRRAPASAPIQSRSREVGVILQPLGTVSTKELDGYLSSPGVSSRLTEILDYDDFGYHYDHGDLDNFDDSYEDNYMPLFFGVFMADNETEEQRQAREVDQDRARQEAERRRLEEERQRQERERLQREQQDHERIAKEAEDRRQRALESGRRARELIGQQDVDGTAVFRTPQQNVVAAITLLDTLLKEDALNQADHVVNILNQTKTMIAASVPANSASTRTLTGSRILHFRSHDYYQPSLSITGTGSSRRSRGHDERSVHTPPERHRERRVERPRSPPHQRPVDLRDTINQRRAARGHRHSPNRHDDDVDRVAAFTNDLRRVDWPAGFKPTGNEKYDDTTNPESWLTVYGLAIRAAGGDSKAMANYLPVALADSARSWLHGLPRGTIGSWAELRGSGSNNYKDRKRKPEELVATISPSSRQRSRVNTFDKIMNSQCPHHPNSNHVAKDCFVYKQFTEQYVKNARKPSDGDQGTSKKKDDEDDAPTGFQDHRKELNHIFGGPLAYESKRKQKLTEREINAVQLNTPQYLRWSEIALKFDRSDHPDQVVHPGRYPLVLDPVVRNVKLRRTLIDGGSALNILFAKTLDDMQIPRTELKPSNAPFHGVIPGLSATPLGQITLPVTFGTRENFRTENVCFEVADFETAYHAILGRPALAKFMAVPHYTYMMMKMPGPRGVISQRSDIKQAVTCDKESCKMAQTHETTLAREEIRLAATTASEGEVPATKLTKTEESDAKTKKIPLDPSDPDKTADRKDAIKEELTKLLAAGFIKEVLHPDWLANPVLVRKKTGQWRMCVDYTDLNKSCPKDPFRLPRIDQVVDSTAGCELLSFLDCYSGYHQIRLKESDCLKTSFITPFGAYCYITMPFGLKNAGATYQRMIQRCFSTQIGRNVEAYVDDVVVKTKQKDDLIADLEETFTSIRAFKMKLNPEKCIFGVPSGKLLGFMVSQRGIQANPEKINAILNMKPPSSQKDVQKLTGCMAALSRFVSRLGERGMLFFKLLKKTDNFQWGPEAQKAFEDFKRLLTTPPVLASPHPQEPLLLYVSATSQVPRTSIKSQALADFLAEWTECQENMLEKKMEYWTMHFDGSKRLTGTGAGVVLISPTGERLSYVLWIHFSASHNVAEYEALLHGLRIALSLGIRRLIVRGDSQLVVNQVMKEWSCLDDNMTAYRQEAELYKKSPSGILQRCVSLEEARQLLKDIHSGICGNHAAARTIVSKAYWQGFFWPTAVSDADKFVRTCEGCQFFARQTHLPAQELQTIPLSWPFAVWGLDMVGSFKRAVGGYTHLFVAINKFSKWIEAKPVITITADKARDFFINIVHRFGVPNRIITDNGTQFTGGAFKDFCEDFGIKICYASVAHPMSNGQVERANGMILQGIKARVFDRLRPYAGKWVDQLPSVLWSLRTTPSRATDQSPFFLVYCAEAMLPSEVEFESLRFRNFNEEGYEEGRVDDINRLEEAREAALIQSTRYL

SEQ ID NO: 182822 - protein, 397 aa, Oryza sativa
  unsure (1)..(397): unsure at all Xaa locations
  Clone ID: PAT_MRT4530_79973C.1.pep
HVIKIIRDREIPEDDTEAEKITRQAKIYSPNGVLLKCISSNDGKHLLLNIHEEICGSHAGGWTLVGKAFRQGFFWPTTLKDACDMVQRCEAYQFHSKHXKIPAQALQTIPLTWPFSCXGLDILGPFPRGQGGYKFLFVAIDKFTKWIEATPTGEIKADNAIKFIKGMFCRYRLPHLIITNNSSQFISAEFQDYCIGLGVKICFASVSHPQSNGXVERANGRVLHRIKTRVYDRLMSHDKKWVEELPSVLWAVRTTPTTSNKETPFFLVYGLEAMLPTELQHQSTRVHKYSDEEQEQRSDDVNLLEEHRERVAVRAASYHQALRRYHEKHIRARTLSICDYVLRRVQSQVGRNKLSPKWEGPYTITQVLQPGAFKIADGDGRELVNSWNIDQLRKFYL

SEQ ID NO: 182823 - protein, 175 aa, Oryza sativa
  Clone ID: PAT_MRT4530_79974C.1.pep
MTGGSQGLVAAPMASSSSASACTRRNKVPLILCPSCENKTVVKRTSKTVSNLDRIFYTCPDHEKDGSGYNFWFWEEGYMKYLKKNGLIAGEEAADVNAQVAASLKNAGQLDETEVPREDDDELKQTLITAVSIGRELVVVLKNIGQNNRSCGRLVLLNESRIWQWTLLLSDLTGL

SEQ ID NO: 182824 - protein, 903 aa, Oryza sativa
  Clone ID: PAT_MRT4530_79975C.1.pep
MAGLVPPFSIFFMDILEFYDLQMAHLTPNAIMTLAIFAHLCEMFIGVRPSLRLFRWFFTVQPVSPPTVVGGCYFQPRGQVLNRYIPCVLRKKWDDWKSDWFYTPLADEARLRLPSQPPAQASSWRAAVDLGDGYDAVLDRLAGLRSQGLTGAMVFGDYLRRRIAPLQRRARGAWEYTGPEDYMRTHQGRKWDWDPEDFRMVVQRVLNLSSVEASLIPQGVLPLCCDPERAKILAIMQVVGASGERAPRGHDGAGGSRRGEQSTPGGGRASGPRDGGPGGSRPADARGKRKQEARSRRAPPRHSKSGRSEAEETATAEARRREADRREAADRLREAEEAAQEAVRVRQAEEAAREEARLRRAWESVREAEAARAHQAACQTPDPTPPEATMTSEATHDEAAGAPLGPDPSGDAWDEPASGDAPESGTSIGGPSRAAPTPRGLSPLPSAAPLSAEPLLQALAAANSTVLDGLSAQMEALQAERAELDAAWARVEEGRRSVEAMVEAGRKAHRRHASQLEARRRDLAEIAREVEEERETALIATAVLDEARDDLRLQYGSRAAELEEKLDAARGVLDAAAARERRAAENEAASRQREEALEARATALEERARALDAKERDLADREAAVATREATLAAHEAACAEEESALRLREDALTERGRALEEAEATAQRLADSLFLREAAREEQARRNLEGARAERAALDQRAAELEARAKELDARAHSGGAAAGHGDLAARLAAAEHTIAELQGALDSSAGEVEALRLASEVGPGMLRDAVSRLDRAGRQAGLWGGRYAKYAANQGGLAQRLSEMAGALERLPEELEETIKSSSRDLTRGAVELVLASYQARDPDFSPWAALEEFPPGTEDGARAGLVPRSQPQTARVGASAWGDPRVETGQAGSTVTEGYG

SEQ ID NO: 182825 - protein, 354 aa, Oryza sativa
  Clone ID: PAT_MRT4530_79976C.1.pep
MRFRSRFIPYFCYRFPPKSASALTLNPINDLPNFVVNNGAEVEKITRQAKIYCMIGNDLYKKAPNGVLLKCISFDDGKHLLLDIHEGICGSHTSGRTLVGKAFRQGFFWPTALKDACDMVQRCEACQFHSKHTKLPVQALQTIPLTWPFSCWGLDILRPFPRGQGGYKFLFMAIDKFTKWIEVTPTGEIKADNAIKFIKGIFCRYGLTHHIITDDDSQFTSANFQDYCIGLGVKIYFASVSHPQSNGQVERANGIVLQGIKTRVYDRLMSHDKKWVEELPSVLWAVRTTPTSSNKETPFFLVYGSEAMLPTELQHQSTRVQKYSDEEQKEQRSDDVNLLEEHRERVAIRAASYQ

SEQ ID NO: 182826 - protein, 990 aa, Oryza sativa
  unsure (1)..(990): unsure at all Xaa locations
  Clone ID: PAT_MRT4530_79977C.1.pep
MARGSAPLEGSVLPPSRIVSERQAGLPRRFMPESATGREVVALGEGRPARITRGDVLELYDLQMAHLTPNAVMTLAIFAHLCEMFIGVRPSLRLFRWFFTVQPVSPPSVVGGCYFQPRGPVLNRYIPCVLRKKWDDWKSDWFYTPLADEARLRLPSQPPAQASSWRAPVDLGDGYNAVLDRLAGLRSQGLTGAMVFGDYLRRRIAPLQRCARGAWEYTGPEDIMRTHQGRKWDWDPEDFRMVVQRVLNLSSMEASLIPQGVLPLCCDPERANILTIMQEVGASGERAPRGHDGAGGSRRGEQPTPGGGRASGPRDRGPGGSRPADARGKRKQEDTPSPSPPRGGGAVRANSRRPEGAVPTSQPEGERKKKRLRKMGGXTEPCRGNLISPQGGRLADXPRSEIPSRPSRHSKSGRSEAEETATAEARRRGVDRREAADCLREAEEAAQEAVRARQAEEAAWEEARLRRAEESVRETEAARERRAACQAPDSTPPEATTTSEAAHDKAAGAPLGPDPSGDAWGEPASGNAPESGTSIGGPSRAAPTPRRLSPLPSAAPLSAEPLLQALAAANTTVLDGLSAQMEVLQAERAEVDAAWARVEEGRRSVEAMVEAGRKAHRRHASELEARRRDLAEIAREVKEERETALIATAVFNAARDDLCLQYGSRAAELEKKLDASRQREEALEARATVLEERARALDTKERELAGREAAVAIREATLAAHEAACAEEESALRLREDELTGRERALEEAEAATQRREEQARLNLEGARAERAALDQRAAEFEARAKELDARARSGGAAAGDGDLAARLAATEHTITELQGALDSSAGEVEALRLAGEVGPGMLRDAVSRLDRAGRQAGLWGGRTAKYAANQGGLAQRLSEMAGTLQRLPEELEETIKSSSRDLARGAVELVLASYQARDPDFSPWAALEEFPPGTEDGARARVRDAADHIVHSFEGTAPRLAFALDSDEEGGDDGADDSDDEADGPGASE

SEQ ID NO: 182827 - protein, 115 aa, Oryza sativa
  Clone ID: PAT_MRT4530_79978C.1.pep
MTGGSQGLVAAPMASSSPASACTRRKKVPLILCPSCENKTVVKRTSKTASNPDRIFYTCPDHEKDGSGCNFWFWEERYMKYLKKNGLIAGEEAAHVNAQVAASLKNAGQLDETKV

SEQ ID NO: 182828 - protein, 616 aa, Oryza sativa
  unsure (1)..(616): unsure at all Xaa locations
  Clone ID: PAT_MRT4530_79979C.1.pep
AAASNPSCVHGPASSSNAKQVDDGSWENEIEYDPGLRKEIDDYHPSKRDIVRRKYLQKGPCQPCLFTFPVTKISGKDRKFIEEWFDEFGSWLEYNKAKDRECCFRDRNKKEDGYKAFVVDGWNGWHRKSRLKEHVSGVGSLHNQAMKNCDALLQRAQHIDIHMQVQSEATKNAYFVRLNGSINVARXVVKLGLPFRGHDESSDSYNKGNFLEFRDFLAEHDVALGKVXGEKNASKNCLMIAPEIQKDIVDCFAKEILHSILEELGHDVFCLLIDESIDSSCKEQMAVVLRYVDKCGIVKERFVAVVHVRETTASYLKASIDALMADFNLSLSQVRGQGYDGASNMRGEYNGLQSLVMREXSAYYVHCFAHQLQLVVVAIVSMISTLLNVVGGSAKRQDMVRDINDEHVSKALGCGLLQSGKGLNQEQCLQRPXDTRWSSPYKTLKILVDMFPTIVEVLEFVEEDDRDRANRDQAAGLLVYFXSFDFVFYLHLMLTVLIITNTLSLALQWKDQDIVNAVKCVRSTRGHLDDLRRHGWEKLESDVYNFCDKYDLTKLEMGEVYINPKKPRQKTGITNKHHYEVDCFNNVIDWLLQELDNRFNETTSELLVCIAKLSKF

SEQ ID NO: 182829 - protein, 89 aa, Oryza sativa
  Clone ID: PAT_MRT4530_7997C.1.pep
MRRRKRGGGGGRGLLTSLLAADADADSGGGRVAAAKAKAKAKAAAVERVRAARGDRLIAAFGGVRDTWGWGRGEVGGSEAGGTQRLSPG

SEQ ID NO: 182830 - protein, 71 aa, Oryza sativa
  Clone ID: PAT_MRT4530_79980C.1.pep
KLNVRLGLPRLVLHLHVGPVGRFHSSPLPNPSLRPPSQAQRIGISNRRPTYRPAIIEGRPASPKTSTHRAR

SEQ ID NO: 182831 - protein, 423 aa, Oryza sativa
  unsure (1)..(423): unsure at all Xaa locations
  Clone ID: PAT_MRT4530_79981C.1.pep
MAQTRGITLAREEIRLATSTASEKEVPATKISKSGESDAKTKKIPLDPSDPTKTAEDAKPIKQRLRRFAQDRKDVIKEELTKLLAAGFIKEVLHPDWLANPVLVRKKTGQWRMCVDYTDFNKSCPKDPFGFPRIDQVVDSTAGCELLSFLDCYSGYHQIRLKESDCLKTSFITPFGAYCYITMPFGLKNAGATYQRMIQRCFSTQIGRNVEAYVDDVVVKTKQKDDLITDLEETFASIRAFRMKLNPEKCIFGVPSGKLLGFMVSHRGIQANPEKLNAILNMKPPSSQKDVQKLTGCMAALSRKLSHYFQGHSVTVVTSFPLGDILHNREENGRIAKWALELMSLDISFKPQTSIKSQALPDXSSPSGLSAKKTCPRRRXSIGPCXFDESKRLSGTGAGLWPTPTKLCEHVRVVNFSPNKLIY

SEQ ID NO: 182832 - protein, 304 aa, Oryza sativa
  Clone ID: PAT_MRT4530_79982C.1.pep
MPSVHIAKRMFLGSFENSWRRYEHAFSSCGGVLYILIQHFFSCDIRRLLLSMLGPAVAEGPSAILVGTEEDGVFIVELESLCVRKICFATVSHPRSNGQVERADNIVLQGIKTRVHDRLMSHDKKWVEELPSVLWAMRTTPTTSNKEKPFFLVYGSEAMLPTELRHQSTRVQKYSNEEQEEQRSDDVNLLEEHRERVAIRSASYQQALRRYHEKRIRAHTLSIGDYVLQRVQSQAGCNKLSPKWEGPYTITQVLRPGAFKIADSDGHELANSWNMDQLRQGSRSLILRERFSDKAGARESEWLK

SEQ ID NO: 182833 - protein, 1024 aa, Oryza sativa
  Clone ID: PAT_MRT4530_79983C.1.pep
MGKPEARSGWRNAAAAAWVLVAVACAAYMHWHLRRETMDRAEERLVSMCEERARMLQEQFGVTVNHVHALAILISTFHFEKFPSAIDQDTFAKYTARTSFERPLLNGVAYAQRIFHHEREMFENQQGWIMKTMKRQAAPPQDEYAPVIFSQDTVSYLARIDMMSGEEDRENILRARATGKAVLTNPFRLLGSNHLGVVLTFAVYRPGLAADASVEERVEATAGCLVVVVSSNQIPTNRYLGGAFDVESLVENLLSKLAGNQDIVVNVYDVTNASEPMAMYGPQSPDGKVSLFHVSTLDFGDPFRAHEMRCRLVASFSWHKFVGCFLLGSCTNSGNLSRYRQKPPLPWSAITNPLGTFVIWMLVGYIICAAWSRYDKVSEDCRKMEELKTQAEAADVAKSQFLATVSHEIRTPMNGVLVVQRSKILPFDVGMLDMLLGTDLSMTQKDYAQTAQMCGRALITLINDVLDRAKIEAGKLELEAVPFDLRSLMDDVISLFSSKSREKCIELAVFVCDDVPKVVIGDPWRYRQILTNLVGNAVKFTERGHVFVRVCLAENSKVEANQVLNGTMNGKDGKVETTANGAFNTLSGFQAADERNNWDYFKLLLSDKEPHMDELECDRSYQNDCDCVTLMISIEDTGVGIPLHAQDRVFTPFMQADSSTSRNYGGTGIGLSISKCLAELMGGQISFTSRPFVGSTFTFSAVLKRSCKDTSSDSKRSLSEALPTAFKGMKAILVDGRPVRGAVTRYHLNRLGIVVKVVNNLSMGLQTLAGQNGVKESREKLSMLFIESDIWRPETDILLLNRLHELKNNGQVHELPKLVLLVTSEADKDRYGSAFDIVMYKPIRASTIASCLQQLLKVVMPERKDNQNRPSFLRSLLIGKNILIVDDNKVNLRVAAAALKKYGAKVHCVESGKDAVSLLQQPHCFDACFMDVQMPEMDGFEATRQIRQMEVKANEERKALDLMEGSTFVESHLPVLAMTADVIQATYEECIKSGMDGYVSKPFDEEQLYQAVSRLVVGTKESAV

SEQ ID NO: 182834 - protein, 562 aa, Oryza sativa
  Clone ID: PAT_MRT4530_79984C.1.pep
MGFVSGIDDFAFPPGQAFRFGSLNFITNDFGKISLLDSDSNQSGRNQVLVPFGIPNSAEAYSKIISPESALNHSDEIQSTLPRPDQDDGSYPSILMKLPDDLAVVFTAKTSPTRRSRRAPASAPIQSRSREVDIILQPLGTVSTKDLDGYLSSPGVSSRPTEILDYDDFGYHYDHGDLDNFDDSYEDNYTPLFFGVFMADNETEEHRQAREADQDRARQEAEPVFRTPQQNAVTAITLLDTLLKEDALNQADHVVNILNQTKTMIAASVPANSASTRTPTGSRVPHFRSHDYHQPTLSIIGTGSSHRSRGHDERFVHSPPERHRERRVERPRSPPHQRPVDLCNTINQRRAARAGFKPTGIKKYDGTTNPESWLTVYGLAIRAAGGDSKAMVNYLPVALADSARSWLHGLSRGTIGSWAELRDHFIANFQGTFERPGTQFDLYNVVQKSGESLRDYIRRFSEQRNKISDITDDVIIAHLKGQSVVTRISLWLSTNSPSGLRLNRSSRSQQIKLEIFSSILCIGLGYLIGSLLIMALNSLAEHLKTFVKTSALKFVMPPWHTL

SEQ ID NO: 182835 - protein, 700 aa, Oryza sativa
  Clone ID: PAT_MRT4530_79985C.1.pep
MGFVSGIDDFVFPPGQAFWFGSLDFITNDFGKIVATGKIAFSRTLVRHPRGRAADGRAHLAAARARPKAAIAGTADGRRHDRAPMVTAGDHRRGGAAPERAERRGKRKGRSTAHPETRGRRRRRTERRNAAARFGMTRATVLRRSAGEAERRTGRDAAESAAAAALGHGRGGGRGGRKAMTVILQPLGTVSTEELDGYLSSPGVSSRPTEILEYDDFGYRYDYANFDDSYKNDYSVNNKIANGLQMRLRIDDSAPWNPGNEHETSLGNKKSTGQRVIGAGSTRRSRGHDERSIHSPLERHRERRVERPRSPHPGFKPTGIEKYGGTTNPESWLTIYVLAIRAAGGDNKAMANYLPVALADSARSWLHKLPCGTIGSWAELRDHFITNFQCTFECPGTQFDLYNSGTTWKPKKDTPTTGGSGSTNHKDRKRKPEKLVATTTPSSRQRSRVNTFDKIMNSQCPHHPNSNHAAKDCFVYKQFAEQYTKNARKTIDGDQSTSKKKDDEDDAPTGFQDHRKELNHIFGGPLAYESKREQKLTKREINAVQPDTPQYLRWSDTTIKFDHSDHPDRQVHPRRYPLVLDPVVRNVKLRRSLIDGGRLSATPLGQITLPVTFGSQENFRTENVCFEVADFVTAYHAILGRPALAKFMAIPHYTYMMMKMLGPRGVISLRSDIKQAVTCDKESCEMAQTREITLSKKKSD

SEQ ID NO: 182836 - protein, 334 aa, Oryza sativa
  Clone ID: PAT_MRT4530_79986C.1.pep
MEHEQLVQASTELMHHSLGYVRSMALGCAAKLGVADAIHRAGGRATLHDLHAALSLHPTKLPFLRRVMRVLVASGVFAQVKEEEDHYRLTPVSSLLVTAGRTLLPFVLLQHSPLCVTPATSMAEWLKTGEEETAFEMAHGAGLWGACRRAPELGDFFNDAMAADSAFIMDAAIRGARQVFDKITSLVDVAGGTGAAARAVAAAFPHIKCTVLDLPHFVAGDMMDFIPQADALLLKFVLHDWSDEDCVKILKRCKEAIPSKDKGGKVIIIDVVVGSSSQAMCYGTQLLFDLTISMLTPGMERDEKEWFKIFNEAGFTEYKISPVLGIRSIIEVFP

SEQ ID NO: 182837 - protein, 130 aa, Oryza sativa
  Clone ID: PAT_MRT4530_79987C.1.pep
MIPPAEQHEAKRLKTCRLKIHGAHVTSSDGRRIAQSSQSSSTVSNKMLVNNSGLGQNRRSPTEPTKHMQRCIPSTPAAFLIDRLARYTKLNLPRVQHRARFTLSVNASREGIIEPLAAVGHAEFNGLKPR

SEQ ID NO: 182838 - protein, 1055 aa, Oryza sativa
  Clone ID: PAT_MRT4530_79988C.1.pep
MARGSALLDGSVLPPSRIVSERHAGLPRRFMPESATGREIVMLGEGRPAPDYPGRSVFFLPFAMAGLVPPFSSFFMDVLEFYDLQMAHLTPNAVMTLAIFAHLCEMFIGVRPTLRLFRWFFTVQSVSPPSVVGGCYFQPRGPVLNRYIPCALRKKWDDWKSDWCYTPLANEARLRLPSQPPAQVSSWRAPVDLGDGYDAVLDRLAGLRSQGLTGAMVYGDYLRRRIAPLQRRARGAWEYFGSEDYMRTHQGARWDWAPEDFKIVVQRVLNLSSVEASLIPQGILPLCSDPDRASILTIMMGVGASEEETPKGHDGAGESRRGDQSTPGGGRASGPRVGGSGSSRPADAQGKRKLGGTPPPSPPRGGGAVRASSRRPEGAAPTSQPEGERKKKRLRKMGETEPSRGNLISPPKWSFNRPPRSDVPSRSSRHPKSGQSEAEDPAAAEARRRESDRREAADRLREAEEAAREAARARQAEDTAREEAARARQAEEAAKEEAARVRQAEAMASSEAAHDKAAGASLGPTPSGDAQATASGAARDEAAGASPGPTSPGDAQDQTGPGDIPEPSASSGGPSRVAFSPRRLFSSSSVAPLSAEPLLQALAAANTAVLDGFNAQVEALRAERAELEAAWARVEEGRRSVDVMVEVGRKAHRRHVSELEARKAALAEIAREVEEERGAALIATTVMIEAQDTLRLQHGSWEAELKKKLDAAQGVLDAAAARERLATEIEAASRRREEALEARAMALKEHAGAVEKGLTVREAAAAIREATLAVHEAACAEEESALRLHEDALAERERALEEAEAAAQRLADSLSLREAAQEEQARRNLECVRAERAALEQRAADLEAREKELDARARIGGAAAGESDLAARLAAAEHTVADMQRALDSSAGEAEALRLAGEIGPGMLWDAVSRLDRAGRQAGLWKGQTMTHPTNLEGLAPHLTKMAWALQQLPEELEKTIKSSSRDLAQEAVELVLASYQARDPNFSPWMALDEFLPGTEDDARARVRDAADHIVHSFEGSAPRLAFAPNSDEEGDASGADDGDDEAGDPGASE

SEQ ID NO: 182839 - protein, 407 aa, Oryza sativa
  unsure (1)..(407): unsure at all Xaa locations
  Clone ID: PAT_MRT4530_79989C.1.pep
MAFSSTAAAASTAFVSGHRRRGGACHLLSSSFLIAFPRPVAARGSAGAAAAPRRVGAVTVRAQAAAGAGKKSVLIVNTNGGGHAVIGFYLAKDLLAAGHAVTVLTVGDEGSDKMKKPPFSRFSELTSAGATTVWGDPADVGAAVGGGASFDVVLDNNGKDLDAVKPVVDWAKAAGVAQFLFVSSAGIYTPSDEPPHVEGDAVKENAGHVSVEKYIAEQFGSWASFRPQYMIGSGNNKDCEEWFFDSCGCPQPAPPAPLPGAKRRTARLGXWRGATRRTARSMGGGWCGAADGIGMGCDTAGAWGGSVEVGDPSXTQPKILHYDPANVXSDSKKAFPFRNMHFYAEPRXAKEVLGWRSSTNLPEDLKEXRFAEYANNGSELGWSWTWSRQRISEDASCSIGLLDQVHG

SEQ ID NO: 182840 - protein, 269 aa, Oryza sativa
  Clone ID: PAT_MRT4530_7998C.1.pep
MAMIMLPAASAAAAASVLALLVLTSLQPRAARAQVASSPWAAPAPWPGELDCTGALLNLSSCLTYVEYRSTLTRPDKGCCGALAGVVDGEAACLCGLVGGYGAYGVRVDAVRALALPTICRVDAPPPRLCAALGVPVAEPPGGAVPEESGLSGGMPANAPSTAATGSSGGGEFFRDIAHGLDRVIAASSVRHARCHPRPRSVAAVRVCHAIGSQRCVYNTHTASRGTAWYGGAAPAAGGPSLSTRGGQQGDRLVGLSSFVCFFSYLPGN

SEQ ID NO: 182841 - protein, 690 aa, Oryza sativa
  Clone ID: PAT_MRT4530_79990C.1.pep
MPAPPPLPALLTGLARRGATSPAAAAARQLHAHLLIRGLPLPARAAVALVASSSSPRHARAVFDSVPAASANVYLWTATISAYARHASSSSSHALEVAGEAVALFALMLWSGPRPNAFTVTSVIKCCSKVRAVHEGLQVHAFLAKAGLGCSSVHVGAALLDLYGNIGLVGDARRVFDEMPVKNVVVGNTMVACNVRAGDMGAAREVFDGMAERDPISWNTLMSGYLHLGDTATVRELFDEMTVRNVNSWNTMIAACSEEGSLADTVKVFNRMRATGFEPDAATMAVLMSACAQLGSLTIAGQVHGLLQKSCVEMNCHVQNSLIDMYAKCGCISQAQFLFTETYPKDTVSYNVMIIAFAQHGHARDALDLFNAMVDSGLQPDAVTFLGVLSACAHAGLVEYGKNYFELMKTTYAVQQSPDHYACVVDLYGRAGLIEEAHCFVKTMPVKPHAGVWGALLNACRKHCHVDVGEIAAKELIRIEPKNPGNYVLLRNTLARGQQWDAVEDVQLSMRRKVIDKTAGCSWVEVDSVVHEFLAGDFYHPKFDEIYTILEHLLPVICILTDCVLRMFRGARFPHCYIWKERHYLIVPEWCDDILVTNSCCCQIVTLDVKRISNLLSSLCSAAFLGHQASLSNYSASGLDDFGSFDLFTQTCDTFWIPIFDVGSGISSEALLNVVENKEKYRKSRQKEKA

SEQ ID NO: 182842 - protein, 827 aa, Oryza sativa
  Clone ID: PAT_MRT4530_79991C.1.pep
MARGSAPLDGSVLPPSRIVSERQAGLPRRFMPESATGREIVSLGEGRPAPRYPGRSVFFLPFAMAGLVPPFSSFFMDVLEFYDLQMAHLTPNAVMTLAIFAHLCEMFIGVRPSLRLFRWFFTVQPVSPPSVVGGCYFQPRGPVLNRYIPCVLRKKWDDWKSDWFYTPLADEARLRLPSQPPAQASNWRAPVDLGDGYDAILDRLAGLRSQGLTGAMVFGDYLRRRIAPLQRRARGAWEYTGSEDCMRTHQGVRWDWAPEDFKIVVQRVLNLSSVEASLIPQGVLPLCCDPDRASILTIMQAVGASEERAPRGHDGAGGSRRGEQSTPGGGRASGPRVGGPGSGRPADARGKRKQEGTPPPSPPRGGGAARASSRRPEGATPTSQPEGERKKKRPRKMGGTEPSRGNLISPPRWSFNRPPRSEIPSRPSRHSKSGQSEAEDPATTEARRRESDRREAADRLREAEEAAREAARARQTEEAVREEAGLRQAEATTSSEATRETDRQEAADRLREAEEAAQVAVRARQAEEAAREEARLRQAEAATTSEAARDEAAGASLGPNPSGDAQDKPGRGDIPESGTSIGGPSRAASSPRRLFPTPSVAPLSAEPLLQALAVANTTAKNYLFEDARARSGGAAAGESDLTARLAAAEHTIADLQGALDSSAGEVEALRLAGEVGPGMLRDAVSRLDRAGRQVGLWGGRTAKYAANQGGLAQRLSEIAGTLQRLPEELERTIKSSSRDLARGAVELVLASYQARDPDFSPWTALDEFPPGTEDGARAQVRDAADHIVHSFEDLAPRLAFALNSDEEDDDGGVGDSGDEAGDPGASE

SEQ ID NO: 182843 - protein, 147 aa, Oryza sativa
  Clone ID: PAT_MRT4530_79992C.1.pep
ASHFFFEPTSVSPYGFVVNNKLLFEEDCHDEPPVHRLLNSHEACVGVSQPVEQDKVAFQRKRHCWPTSISDDRRQKRIIHILKKHSFVLMVELHKWLERVEKENRKIFDRKTLIHTLDKLQQEGTCKCIKVNVPVVTNYAGSRSILM

SEQ ID NO: 182844 - protein, 416 aa, Oryza sativa
  Clone ID: PAT_MRT4530_79993C.1.pep
MAFSSTAAAASTAFVSGHRRRGGACHLLSSSFLIAFPRAVAARRCGEAAAAPRRVGAVTVRAQAAAGAGKKSVLIVNTNGGGHAVIGFYLAKDLLAAGHAVTVLTVGDEGSDKMKKPPFSRFSVGNIMGVRGLTAAMVNEWMQLIMQELTSAGATTVWGDPADVGAAVGGGASFDVVLDNNGKDLDAVKPVVDWAKAAGVAQFLFVSSAGIYTPSDEPPHVEGDAVKESAGHVGVEKYIAEQFGSWASFRPQYMIGSGNNKDCEEWFFDRIVRGRPVPIPGSGMQVTNISHVRDLASMVALAVESPGAAAGRIFNCVSDRAVTFNGLVKMCAAAAGAQPEILHYDPAAVGVDAKKAFPFRNMHFYAEPRAAKEVLGWRSSTNLPEDLKERFAEYASSGRGQKEMSFDLDDKIIAAA

SEQ ID NO: 182845 - protein, 645 aa, Oryza sativa
  Clone ID: PAT_MRT4530_79994C.1.pep
MSTSANPSDAPAAEYIEHLSHQVAIPNITDEYQFFLGPIGNLDPIEFINGETNRIPFRFTNPNLGLWKNTFKSWPSPKKSWPAWSIGGWTSYVAKNMGTGPIYTREHVAFLMMWLEKFLFCGPSCDPIANWQHIAEILVEKKQFPLGKYLLGYMYQTLNTTITKMASGLSIGTGGPWWLLQIWLNLHTWMIANRPLLTDVSFPRGEITLALMMDRLLNIPGPPLGTIDQIKLRMLRSTTFDRWWIEWKKHLFHQSASMYLIDLFPKAVPQATESSPPHHSKSGVEIKYAPGFLANSGGLSPPVIGYHAPKTSTLLHGLLRLPIAPDAGKKRKTKSAAAPSINPDVEEFLEGEELEEAVNEAAENLSEIGEKTPLADPPAPQITPSPPVRHTYKPRKKLASKKPPAPAPSPPRPATPIPKSSVHTPLTAGSHHVEEEEEVASAPAIPFLDQEEDTTSKALAPLADDVKSILLDISTMLEGSLETLVASCGSVRDRFLKIHDRIPDELADAITPAAYLEQHRLKLEKAKQRIADRRERKDLEATIRASRTSINEEKAKLNGLEAGPSSIQANIDRLQARKIELLAELEQCNAQIAIEEQKIVDMPKATEDQRSKLKASIKHLANLTKSLKIIPGIDAADAQIIDEVD

SEQ ID NO: 182846 - protein, 141 aa, Oryza sativa
  unsure (1)..(141): unsure at all Xaa locations
  Clone ID: PAT_MRT4530_79995C.1.pep
STCNQRLINNNHRKRVGMLIRGHVAHVWLSCYSAYSFLFYSLVCLGLSGCFPRATQIFISFCFGYCLLGYSILVLIWLLTCGYLEAIYALCSLLCLLFVLFCLVLLLYFVXWLYLLDIXXVLVGRLYLXIGSLICFWLFYC

SEQ ID NO: 182847 - protein, 326 aa, Oryza sativa
  Clone ID: PAT_MRT4530_79996C.1.pep
MITMDLMGGYGRVDEQVAIQEAAAAGLRGMEHLILQLSQTGTSERSPAPAQEQQQQVDCREITDMTVSKFKKVISMLNRTGHARFRRGPVVAQSSGPAASEPAPVRSSPSAVSRPMTLDFTKAASGYGKDAGFSVSGISAASSSFLSSVTGDGSVSNGRGGGSSSLMLPPPPATSCGKPPLSSAAAAMSAGAGHKRKCHDHAHSENVAGGKYGSTGGRCHCSKRRKHRVKRTIRVPAISSKVADIPADDFSWRKYGQKPIKGSPFPRGYYKCSTLRGCPARKHVERDPTDPSMLIVTYEGEHRHSPSAAGQDHPPAPPPPLALPLA

SEQ ID NO: 182848 - protein, 88 aa, Oryza sativa
  Clone ID: PAT_MRT4530_79997C.1.pep
GSPGCRTFGTRLGAVGFLGDSRRMNVAITRARRHATVVCDTSTICHSTFLARLLRHIRRYGQVKHVVPGSLDGVSGLGFSQPTLPSIS

SEQ ID NO: 182849 - protein, 132 aa, Oryza sativa
  unsure (1)..(132): unsure at all Xaa locations
  Clone ID: PAT_MRT4530_79998C.1.pep
RASSLLRQLAKGGCAARRLKLRKYYGSLLLIAAPGSKAYGYAINQLKNCTVKCQKLNGKYLCSYQGLSVEFXVQSYXSLDGPFVLVWINNMPWAADSIMAALGAKVIEFFAVTIVSPVMFCPYSILCISNLS

SEQ ID NO: 182850 - protein, 50 aa, Oryza sativa
  Clone ID: PAT_MRT4530_79999C.1.pep
QQQPQPQQKPAKANLGRPADDHRHRQLHGRHGSPTGRRTFLSYFQCCIKA

SEQ ID NO: 182851 - protein, 677 aa, Oryza sativa
  Clone ID: PAT_MRT4530_7999C.1.pep
MANARNAAAASPPPPSSSSSYSSSASDGEILRSLHRLARDLAAAEAPAPFLETVFAAVSRRAKLLAAVFDDLLRCGRLPRSASLCLREVLLVLQRFKAVVADCSARSRMRLLLQADEVAARVRELQHDLATLLDLLPVPELGLADDVVDLLALASRQCRRSSPSADAAEHELKTGVLALIQEVEREIVPERERLEGILEEVGINDPACCSDEIETLEREIGDRVAERWTSAMIALVGLLRYAKCVLFTAATPRPMDTKVDVDDDDDDDDAEPPSPPPDFRCPISLDLMRDPVVSASGQTYDRESITRWFGSGKSTCPKTGQVLANLELVPNKALKNLISRWCRENGVAMESSEPSKPEPAPVVTANKAALEAARMTASFLVKKLSVSFSPAAANRVVHEIRQLARSGNDTRAFIGEAGAVPLLVPLLHSDDTATQLNAVTALLNLSILDANKKRIMHAEGAVEAICHAMGSGATWRAKENAAATVLSLASVHSYRRRLGRNPRVVERVVHLVRTGPSSTKKDAIAALLCLSGERENVGKLVEAGAAEAALSAISEEETAVAVLASLAKRGGAEAIVNIDGAVVRLVAELRRGTEWSRECAAAALVLLCRRVGAAVVAQVMSVSGVEWAIWELMATGTERARRKAASLGRACRRWAAAEQTAEYPATSDVTTTAITAS

SEQ ID NO: 182852 - protein, 60 aa, Oryza sativa
  unsure (1)..(60): unsure at all Xaa locations
  Clone ID: PAT_MRT4530_799C.1.pep
MSFLSSKICFKVLRNGLEKPSIDFADXLTYAEPETVVLLLKFSNSGAVLNVTIEKIQGGN

SEQ ID NO: 182853 - protein, 191 aa, Oryza sativa
  Clone ID: PAT_MRT4530_79C.1.pep
MASKYRGYYHDEASSAAGGGGGGGGGDGYRREKQVRKKRLTAQKRKEIKEAFDLFDTDGSGTIDPKELNVAMRALGFEMTPEQIHQMIAEVDKDGSGTIDFDEFVHMMTDKMGERDAREELNKAFKIIDKDNNGKISDVDIQRLAIETGEPFTLDEVREMIEAADENGDGEVDHEEFLKMMKRIGFGAGFF

SEQ ID NO: 182854 - protein, 360 aa, Oryza sativa
  Clone ID: PAT_MRT4530_7C.1.pep
MGEKRSAADSGIADADEHAGGGGGGKRSCIESTDNYEVTCWLRKGAFGAVIRARHRATGRDVAIKFLRRHRCGMGGKAVGEDALLREALYLARCSHHPSIVHYHGLALEPRSGMWGLVMEHVGPSLSSVLRERHGGGGGPPFTEEEVRRVMRQLLSGVQRLHDRHVVHRDIKPGNILVGDGGVVKLCDLGLAMDTAARKPPYQKAGSPGYKAPEMLLGKPDYGELVDAWSAGCVMGELLAGVPLFRGHSETDELLRIFRLLGAPCRQTWPSYPSLPLFGAERLSRDGFEVLNGLLTCNPDARLSAAEALRLPWFNATVDGIAAADETKIGQPAASPRQEPPPLASFAAIPCGDYGTGFAG

SEQ ID NO: 182855 - protein, 60 aa, Oryza sativa
  Clone ID: PAT_MRT4530_80000C.1.pep
MGFKLLSLSRARRQADTNVGYERMQMHVVGLAGTVCIRSQPGTAKRPRRSPFDEECEAAR

SEQ ID NO: 182856 - protein, 728 aa, Oryza sativa
  Clone ID: PAT_MRT4530_80001C.1.pep
MAPGDGWGEGWQPTRCLAAASDGEKGACIGDDATAMCRCNLVTESHPNTLRIVALERKMLSGGERRRIIDQSIQNERLRYWGGRHEADLCMLSPAATAVAAVRATAGSPAAVRGMHARILKEGLAHHPPNPAALVSAYAKSRLLPDALHLFDETPRRDIYIYSSLLTAVSHSASPELALPILRCMLSADALHPDHFVISSVASVFARLRSRRLGRQLHAHFVVSPYNGDDVVKSSLVDMYCKCGSPDDGRKVFDSMSAKNSVVWTALVSGYASNGRSEEALQLFRSMPGRNLFAWTALISGLVNTGESVGAVELFVEMRRDGVRIDDAFVLSIVIGGSADLAAFVLGRQLHGSTMRLGFLSNMIVGNALIDMYSKCSDILSAREVFEGITFRDVISWTTMVVGEAQHGRAEEALALYDRMVLAGAKPNEVTFVGLIYACSHAGLVQKGRQLFESMKNEYGITPRLQHYTCYLDLLSRSGHLLEAEELMTTMPYEPDEATWGALLSACTKYKDAEMCIRISDKLLELRPKDSSTYILLSNVYAVNGKWDSVAKVRKCMIGLEIRKEPGYSWIEAGREFRLFHAGEVPLDVREEIMVFLEEMVLEMRKRGYVPDTSSVMHDLEESEKEHHLFLHSERLAVAFGLIKSPPGSVIRVVKNLRVENALVVNSGRRSADVQLCFQSSRTLEATMDRVSSILLSWEDLSSGREDILLVYVVLALWTYGNAIAIHA

SEQ ID NO: 182857 - protein, 293 aa, Oryza sativa
  Clone ID: PAT_MRT4530_80002C.1.pep
GCRLSPAATAVAAVRATAGSPAAVRGMHARILKEGLAHHPPNPAALVSAYAKSRLLPDALHLFDETPRRDIYIYSSLLTAVSHSASPELALPILRCMLSADALHPDHFVISSVASVFARLRSRRLGRQLHAHFVASPYNGDDVVKSSLVDMYCKCGSPDDGRKVFDSMSAKNSVVWTALVSGYASNGRSEEALQLFRSMPGRNLFAWTALISGLVNTGESVGAVELFVEMRRDGVRIDDAFVLSIVIGASADLAAFVLGRQLHGSAMRLGFLSNMIVGNALIDMYSKCSDILS

SEQ ID NO: 182858 - protein, 68 aa, Oryza sativa
  Clone ID: PAT_MRT4530_80003C.1.pep
MVACSLRRAAETLAEEMVTSGARWVSFSFSDVRAAGFGHGGGTSPAVSLGSAGVGSTNDSLVTAGGVF

SEQ ID NO: 182859 - protein, 147 aa, Oryza sativa
  unsure (1)..(147): unsure at all Xaa locations
  Clone ID: PAT_MRT4530_80004C.1.pep
KVHDWIGDRKEPGYSWIEAGREFRLFHAGEVPLDVREEIMVFLEEMVLEMRKRGYVPDTSSVMHDLEESEKEHHLFLHSERLAVAFGLIKSPPGSVIRVVKNLRVCVDCHTVMKLISEITHRKIVVRDSSRFHHFXKGGKCSCSEFW

SEQ ID NO: 182860 - protein, 41 aa, Oryza sativa
  Clone ID: PAT_MRT4530_80005C.1.pep
HPSGSQMRFRKRYHPHLCSGCCGTRPHRRGKRQGMTPPTHT

SEQ ID NO: 182861 - protein, 153 aa, Oryza sativa
  Clone ID: PAT_MRT4530_80006C.1.pep
ITFRDVISWTTMVVGEAQHGRAEEALALYDRMVLAGAKPNEVTFVGLIYACSHAGLVQKGRQLFESMKNEYGITPRLQHYTCYLDLLSRSGHLLEAEELMTTMPYEPDEATWGALLSACTKYKDAEMCIRISDKLLELRPKDSSTYILVSNVY

SEQ ID NO: 182862 - protein, 52 aa, Oryza sativa
  Clone ID: PAT_MRT4530_80007C.1.pep
IKSKQRSVVSQILYGLIMTFFLPLVVFDIHANLRFLHGIKAKCCYMYQGSKP

SEQ ID NO: 182863 - protein, 462 aa, Oryza sativa
  Clone ID: PAT_MRT4530_80008C.1.pep
MGSMEPFNRLVRLAARAFYDDISMKGDNQPKTSRGDNRGMAVVVLDALTRRQWVREEDLAKALKLHSKQLRRILRFFEEEKLVTRDHRKESAKGAKIYSAAAAAAGDGQSITKEGEEKVKMHTHSYCCLDYAQICDVVRYRIHRMKKKLKDELDSRNTIQHYICPNCKKRYSAFDALQLISYTDEYFHCENCNGELVAESDKLASEEMGDGDDNARKRRREKLKDMQQRIDEQLKPLQAQLNRVKDLPAPEFGSLQSWERANIGAFGTADPSAADSSRNPQGQYGTPMPYLGETKVEVALSGTGVKDEGAESGTNGNGLKVLPPWMIKQGMNLTKEQRGETSNSSNLDEKSEVKDEKKQDSKEDEKSIQDEYIKAYYEALRKRQDEEEAKRKIQQEGDTFASASHSERQVGMKSKREDDDEGVEWEEEQPAGNTAETYKLADLNVEAQESGDEEDEIDWEEG

SEQ ID NO: 182864 - protein, 111 aa, Oryza sativa
  Clone ID: PAT_MRT4530_80009C.1.pep
EITCSFHKLENFVCELLDFQSPACSIAPRGHLKSSELYSATDIHGCFLCLLHCDFFKEHSRGGSAVKFYISDFGLFLYFLAPFFLHILIFSCVIFFCGASILEICFFFFTF

SEQ ID NO: 182865 - protein, 46 aa, Oryza sativa
  Clone ID: PAT_MRT4530_8000C.1.pep
VDVELTDIRSGAFFASWSMSGGSSVVGPRIDVDMPCSTQESSPKYP

SEQ ID NO: 182866 - protein, 60 aa, Oryza sativa
  Clone ID: PAT_MRT4530_80010C.1.pep
EYLRSFGPGIEVSSRIFFFHQLYICLSSNLQTNMGFFLKDINKKKRGVSGSLGHLSFSKQ

SEQ ID NO: 182867 - protein, 426 aa, Oryza sativa
  Clone ID: PAT_MRT4530_80011C.1.pep
MGWGEPPAPQQRKAAGGGGLKLLLSVLLVGLALRLLVNPSAYLLLSSSSTTTTAAVALGQGDDAVLAGGGSLPSNGSCDLFHGKWVPDSSGPDYTNNSCRFIETPQNCMTNGRPDSGYLYWRWKPYGCEMSRFEGEKFLEAMRGKHWALIGDSILRNHVQSLLCLLAKVEEPTQVYHDKTFKSRKWHFALHNITVSLIWAPFLVEAEIFEDDDGVSTSELQLHLDILDSNWTRQWNSFDYVVISTGQWFPKTAVYWENGAVTGCHYCQDKSVAELTFEYAFRKSLRKTFQFITSSPHKPVVFYRTWSPSHFENGEWSSGGTCKRTVPFKPGETGDRESDMKMWRIEREEFAKAVVHDRHNNAGRLKLLDTFELSLQRPDGHPGPYRTYHPFEKATSAKVQNDCLHWCLPGPIDAWNDIIMQMLAIN

SEQ ID NO: 182868 - protein, 87 aa, Oryza sativa
  Clone ID: PAT_MRT4530_80012C.1.pep
PSVFLAKTVLKMAPINGAKTVLWDNKKGSLKVGKKGDMVFVNPLIWSMVPGHDCIANIVFGMRTKNIDFLMCTGRWFFREKKFVIFN

SEQ ID NO: 182869 - protein, 306 aa, Oryza sativa
  Clone ID: PAT_MRT4530_80013C.1.pep
MAVDLGVMKSPRSGGVDDSEASARRDGTCVLDIRLANADMHAGNILTCRDEQGHGLSLVTIDNGYCLPESCRQPFSEEMVEYIRSLDAEEDIAILRFHGWDMSGKCERILCVTTMLLKKGVDTGLAAFHMRSILCRDGARRSPDVIDGRRWRLRSKAAAHTLASLVGRHRGANADLVRRRRRRSGFSLGAVRPARAVRPPGRPLLHALSCRSQKKNEAGPPRLQITTTAWTGSAASIRSRHRTRGHCGHLDTRARRPTAAAPLESRDDSPLPSGGTGPLPSGGGGGSGGFASSTLGQETEQCGVKN

SEQ ID NO: 182870 - protein, 1706 aa, Oryza sativa
  Clone ID: PAT_MRT4530_80014C.1.pep
MARGSALLDGSVLPPSRIVSERHAGLPRRFMPESATGREIVMLGEGRPAPDYPGRSIFFLPFAMAGLVPPFSSFFMDVLEFYDLQMAHLTPNAVMTLAIFAHLCEMFIGAGPPAALADGWGPPVIAFLPPRPPPRPCPSAAAAANPAAPVRPACNQEGGIIPRNPLSRFPLFSLSLSLGFVRIKPVIVAGAINGGRDLRARFPLSPAALSPSRRYKNVARAPLFRFRRSPLALAVGIVLAPCSSLSAVAAVLRFAAAVAPDFLPTRRHLPRHRRIAVDPVRASTSPADRRSTVVIVFPNRAAAFFRFGRHSRRRRCPGVSRRPPFAFPLSSSLSGATPPRRWSPAATIGARVRAAPVGRAGEAALGRALAAAKWARPSAARARGANEGYTSCGSVVEMSYGGGLVPNARGSVLPACPGYPGRSEASCEAGVKVLENPSQNLSHPLNWNNPAGATNVQVPTVQQQCKLSEFLKTESPTFAIAVDPKEASEWLRTIEKKLGLIQCTDQERVGFATHQLVGPASEWWDSYEASRPEGHTITWNEFSSVFRRSHVPAGMITLRKREFRYLKQGDLTVTEYLHEFYRLARYAPEDVETDEEKQEKFLQGLKDELAVQLLLEDYENFEKLVDKAMQLESEHNRMTNCKRRIVNIPVFPGGNQRQRTEPLQITGSSVVHQEFLPQEDERNVDNNNIIHQDIDDSINEGTQNGNPSNFDSEKDSKGDSNNGTTDANVSKDFQPPIPTPKIVHSRSVTCVTTPAIMQEEDKSLVLWSLEQTPYLRAPLADGWGPPVIAFLPRAAGAPSLAPPPPRIPRSRRPRAIKRGELFPSPNARDPRRRPPPAACARSTVDRAADAWAPTPVDPLFRWFFTVQSVSPPSVVGGCYFQPRGPVLNRYIPYVLRKKWDDWKSDWFYTPLANEARLRLPSQPPAQVSSWRAPVDLGEDYDAVLDRLAGLRSQGLTGAMVYGDYLRRRIAPLQRRARCAWEYTGPEDYMRTHQGARWDWAPEDFKIVVQRVLNLSSVEASRIPQEILPLCSDPDRASILTIMMGVGASEERAPNGHDGAGERRRGEQSAPGGGRASGPRVGGSGSSRPADAQGKRKLGGTPPPSPPRGGGAARASSRRPEGAAPTSQPERERKKKRLRKTGETEPCRGNLISPPRWSFNRPPRSDVPSHSSRHPKSGQSEAEDPAAAEERRRESDRREAADRLREAEEAAREAARIRQAEEAAREEAARARQAEATAAAGASTGPTPSGNPQATASGEARDEAAGTSPGPTSPGDAQDQTGPGDIPEPSTSSGGPSRIAFSPRRLFSSSSVAPLSAEPILQALAAANTAVLDGFSAQVEALRAERAELEAAWARVEEGRRSVDAMVEVGRKAHRRHVSELEARKAALTEIAREVEEERAAALIATTTMIEAQDALRLQNASREAELKEKLDAAQGVLDSAAARERRVTEAEAASRRREESLEARAMALEEHAGAMEKGLTDREAAAALREATLAAHEAACAEEECALRLREDALAERERALEEAEATTKRLADSLSLREAAQEEQARRNLECVRAERAALEQRAADLEAQEKELDARAHIGGAAAGESDLAARLAAAEHTVADMQRALDSSIGEAEALRLAGEMGPSAWIAPARDPNFSPWMALEEFPPGTEDDARARVRDAADHIVNGFEGSAPRLAFAPNSDEEGNTSSADDGGDEAVDSGASE

SEQ ID NO: 182871 - protein, 183 aa, Oryza sativa
  Clone ID: PAT_MRT4530_80015C.1.pep
MGLRLRLRGELVRRVYGRGSRLDEEAVATPLWRWCHGPRSGVDDAEASARRDGICVLDIRLANAGRHAGNILTCRDEQGHGLSLVPIDHGYCLPESFEDCTFEWLCWPQCRQPFSEEMVEYIRSLDAEEDIAILRFHGWDMSGKCERILCVTTMLLKKGVDTGLAAFHMRSILCRDGARRSPE

SEQ ID NO: 182872 - protein, 1274 aa, Oryza sativa
  Clone ID: PAT_MRT4530_80016C.1.pep
MGSVSGIDDFAFPPGQAFRFGSLNFMTNDLGRISLLDSDSNQSGRDQVPALFGIPNSAEAYSKIISPKSASNHSDEIQSTPPRPDQEDGHLPTRRSRRDPASAPIQSSSREVGVILQPLGTVSTEELDGYLSSPGVSSRPTEILDYDDFGYHYDHGNFDDFDDSYEDNYTPLFFGIFMADNETEEQRRAREVEEERTRQETERRRLEEERQRQERERLQPRELIGQKEVEGTAVFRTPQQNAVAAITLLDTLLKEDALNQADHVVNILNQTKTMIAASVLVNSGSVRMPTGSRVPHLRSHDYHQPSLSIIGTGSSRRSRGHDERSVHSPPECHRERRVEQPRSPPRQRPVDLRDMINQRRAARGHRHSPDRYDDDVDGVVAFTNDLRRVESRKLRDHFIANFQGTFERPDTQFDLYNVIQKSGESLRDYIRCFSEQRNKISDITDDVIIAAFTKGIRHEDLVDKFGRKSPRTGRISLHGNHPICLVFLERKDAIKEELTKLLAAGFIKEVLHPDWLANPVLVRKKTGQWRMCVDYTDLNKSCPKDPFGLPRIEQVVDSTAGCELLSFLDCYSGYHQIRLKESDCMKTSFITPFGAYCYITMPFGLKNAGATYQCMIQRCFSTQIGRNVEAYVDDVVVKTKQKDDLIADLEEIFASIRAFRMKLNPEKCIFGVPSGKLLGFMVSRRGIQANPEKINAILNMKPPSSQKDVQKLIGCMAALSRFVSRLGERGMPFFKLLKKTDNFQWGPEAQKALEDFKKLLTTPPVLASPHPQEPLLLYVSATSQVVLADSKTIYPQVQKLLYGVLITVRKLSHYFQSHSVMVVTSFLLGDILHNREANGRIAKWALELMSLDISFKPRTSIKSQALADFLAEWNECQEDMPEKKMEYWTMHFDGSRRLTGTGAGVVLISPTGERLSYVLWIHFSASHNMAEYEALLHGLRIAISLGIRRLIVRGDSQLVVNQVMKEWSCLDDNMTAYRQEELQTIPLSWPFAVWGLDMVGPFKKAVGGYTHLFVAVDKFSKWIEAKLVITITAEKAKDFFINIVHRFGVPNRIITDNDTQFTGGVFKDFCEDFGIKICYASVAHPMSNGQVERANGVVLQGIKARVFDRLRPYAGMWVEQLPSILWSLRTTPSWATGQSPFFLVYGAEAMLPSKVEFESLRFRNFREERYEEDQADDINRLEEAREAALIQSARYLQGLCRYHNRNVRSRAFLVGDLVLRKIQTTQDRHKLSPLWEGPFIIAEVTRPGSYRLKREDGTLINNSWNIEHLHHFYA

SEQ ID NO: 182873 - protein, 667 aa, Oryza sativa
  Clone ID: PAT_MRT4530_80017C.1.pep
MALFVSAGEDVASVHVGVGQPDVQHAGPISPSAGLTIVDSSTPGTAATAGGGVATTSSSRRGFAQGSSVWQQRIRAKRRDSNNWYQSQFMPKILRFNKMAIVEHSASRSMREGIVSLPYPVLTSTNYSTWAIKMEANMEAQGIWDAIEPAADEAVDIKKDKQARACLFGAVPEDVLQQIAKKKTAKEVWESLKTRFLGVERVKKARVQTLKSDFKALHMKDTESIDEFAGKISGLANKLSDLGVTMDDDEQVKKLLDSVPDKFLHVIAAIEQFSDLDSMPFDEAIGRLKAYEERIRKRDDKNGEHLLFTSGDTSGGRSRVKKPDRSKTMCYYCQELGHFAYECPEKKKKKEIALLAAASSFAQGSSVWQQRIRAKRRDSNNWYQSQFMPKILRFNKMAIVEHSASRSMREGGVSLPYPVLTSTNYSTWAIKMEANMEAQGIWDAIEPAADEAVEKKKDKQARACLFGAVPEEVLQQIAKKKTAKEAWESLKTRFLGVERVKKARVQTLKSEFKALRMKDTETIDEFAGKISGLANAMSGLGATMTDDELVKKLLDSVPEKFLHIIAAIEQFCDLDTMPFEEAIGRLKAFEERIRKHSDNYGEQLLLTTRNTDDGAGRARSKRFDKSKVMCYHCQELGHFAFECPAKKKNKEIALLATASSDDEPTLL

SEQ ID NO: 182874 - protein, 208 aa, Oryza sativa
  Clone ID: PAT_MRT4530_80018C.1.pep
MSGGGAPPGAPGMMTPGDGNSVGMFSSDRIGGFGYGVGVSVGILLLITTITLASYFCTRAPVTAADAAAAAGSSRRHRGGGGGGGGGGGGAGHEHDDVELGIDEATLKGYPEVVYGQPRKEAAKAASAAATKKGGATTCSCCSICLDNYGDGDVLRMLPECGHLFHRECVDPWLRQHPTCPVCRTSPLPSPLPTPLAEVTPLAMARPS

SEQ ID NO: 182875 - protein, 857 aa, Oryza sativa
  Clone ID: PAT_MRT4530_80019C.1.pep
MARGSAPLEGSVLPPSRIVSERQAGLPRRFMPESATGREVVALGEGRPAPHYPGRSVFFLSFAMAGLVPLFSSFFMDVLELYDLQMAHLTPNAVMTLAIFAHLCEMFIGVRPSLRLFRWFFTVQPVSPPSVVGGCYFQPRGPVLNRYIPCVLRKKWDDWKSDWFYTPLADEARLRLPSQPPAQASSWRAPVDLGDGYDAVLDRLAGLRSQGLTGAMVFGDYLRRRIAPLQRRARGAWEYTGSEDYMRTHQGGRWDWAPEDFKMVVQRVLNLSSVEASLIPQGVLPLCSDPERANILTIMQAVGASGERAPRGHDGAGGSRRGEQSTPGGGRASGPRDGGPGGSRPADARGKRKQEDTPSPSPPRGGGAVRASSRRPEGAVPTSQPEGERKKKRLRKMGGTEPCRGNLISPPRWSFSRPPRSEIPSRPPRHSKSDRSEAEETATAEARRREAVRREAADHLREAEEAAQEAVRVRQVEEATREEASLHRAGKSAREAEATRARQAACQAPDPTPPEATTTSEATHDEAAGAPLGPDPSGDVRDEPASGDAPESGTSIGGPSRTAPTPRRLSPLPSAAPLNTEPLLQALAAVNTTVLDGLGAQMEVLQAERAELDAAWARVEEGRRSVEAMVEAGRKAYRRHASELEARRRELAEIAREVEEERETALIATVVLNEARDDLRLQYGSRGALDSSAGEVEALRLAGEVGPGMLRDAVSRLDRAGRQAGLWGERTAKYAANQGGLAQRLSEMAGTLQRLPEDLEDTIKSSSRDLARGAVELVLASYQARDPDFSPWAALDEFPPGTEDDARAQVRDAADHIVHSFEGTAPRLAFALDSDEEGGDGAVDDSDHEAGDPGASK

SEQ ID NO: 182876 - protein, 56 aa, Oryza sativa
  Clone ID: PAT_MRT4530_8001C.1.pep
MMSLSCLLLSVAERLDEFHASGTRNQNYMAMYSSIYGGITTNPSAMVIPIDDHMVH

SEQ ID NO: 182877 - protein, 164 aa, Oryza sativa
  Clone ID: PAT_MRT4530_80020C.1.pep
MMHTRKQPPTSLYMQQPPPSKPHPAAGLLLHAAAVAIPKATHSTPCHPTFARSRHRRPLSTRNGRHRPGSHAQQSSLLYHATTPPPTSHYTQLLPPPPPPQRHAPQSPLPTTLCTPQPSLSPKPYAAATAALPVRVGAVTPSLSEPPSTTLYTPQPPLPPSLSA

SEQ ID NO: 182878 - protein, 360 aa, Oryza sativa
  Clone ID: PAT_MRT4530_80021C.1.pep
MHQKRQRDEKELFALGEEKNKSGSEETAIICYPHWSSAGGRAGQGTPGATLPGAVRLLPLFRNGGAGPAVATREATLAAHEAACAEEESALRLREDELTERGRALEEAEAAAQRLADSLFLREAAREEQARRNLEGARAERAALDQRAAELEARAKELDARAHSGGAAAGDGDLAARLAAAEHTIAELQGALDSSAGEVEALRLAGEVGPDILRDAVSRLDRAGRQAGLWGGRCAKYAANQGGLAQRLSEMAGVLERLPEELEETIKLSSRDLARGAVELVLASYQARDPDFSPWAALEEFPPGTEDGARAQVRDAADHIVHSFEGTAPRLAFALDSDEEGGDDGADDSDDEAGDPGASE

SEQ ID NO: 182879 - protein, 133 aa, Oryza sativa
  unsure (1)..(133): unsure at all Xaa locations
  Clone ID: PAT_MRT4530_80022C.1.pep
ERALSQXDMANEHLRSIFPSFKELPGSGNALERVLALELELAEALQAKKKTDILFQSSFLKQHNDEAAVFQSFRDINELIQDTIELKRRQVAVESELKDMQGRYSELSVQFAEVEGERQKLEMNLKNRSPMRS

SEQ ID NO: 182880 - protein, 1450 aa, Oryza sativa
  unsure (1)..(1450): unsure at all Xaa locations
  Clone ID: PAT_MRT4530_80023C.1.pep
MGSVSGIDDFVFPPGQVFRFGSLDFITNDFGKISLLDSDSNQSGRGRISAPFGIPNSAEVYPKIISPKLAPNHSDEIQSTSTRPDQDDGSYPPILMRLPDDLAAVFTTKASPTRRPRRGPASAQIQSSSREVGVILQPLGTVLTEELDGYLSSPAXEDDYTPLFFGVFMADNETAEXRRAREAEEERTRQEAERRRLEEEQQRQEQEXLQREQQDRERAAKEAEDRRQRALESGRRAXRNKISDITDDVIIAAFTKGIRHEDLVGKFGHKPPRTVKQMFEKAIEYAKAEDAISASKQSGTTWKPKKDTPTTGGSGSTSHKDRKRKPEELVATTAPSSRQRSRINTFDKIMNSQCPHHPNSNHVAKDCFVYKQFAEQYAENTHKSIDGDQSTSKKKDDEDDASTGFQDYCKELNHIFGGPLAYESKRKQKLTEREINAVQPNTPQYLRWSETTIKFDRSDHPDRVVHPGRNPLVLDPVIRNVKLRRSLIDGGSAVNILFAKTLDDMQIPREELSATLLGQITLPVTFGTRENYRTENICFEVADFETAYHAILGRPALAXMPGPRGVISLRSDIKQAVTCXSQTHEIALSREEIRLAASTAGEGEVPATKMPKSGESDAKTKKIPLDPSDPTKTAVIGAELDCIFAWKPSDMPGIPREVNEHSLHVKEDVKPIKQRLRRFAQDRKDAIKEELTKLLAAGFIKEVLHPDWLANLVLVRKKTGQWRMCVDYTDLNKSCPKDPFGLPRIDQFFRLKESNCLKTPFITPFGAYCYITMPFGLKNAGATYQRMIQRCFSTQIGLNVEAYVDDVVVKTKQKDDLIADLEETFASIRAFKMKLNPEKCIFGVPSGKLLGFMVSHRGIQANPEKINDILNMKPPSSQKDVQKLTGCMAALSRFVSRLGERGMPFFKLLKKADNFQWGPEAKKAFEDFKKLLTTPPVLASPHPQEPLLLYVSATSQVVSTVLVVEREEEGHVQKVQRPIYFVSEVLADSNARYPQVQKLLYGALITVRKLSHYFQGHSVTVVTSFPLGDILHNREANGRIAKWALELMSLDISFKPRTSIKSQALADFVAEWTECQEDIPEEKVEYWTMHFDGLKRLSGSGAGVVLISPIGERFSYVLWIHFSASHNVAEYEVLLHGLSIAISLGIRRLIVRGDSQLVVNQVMKEWPCLDDNMAAYRQEVRKLEDKFDGLELTHVLQHNNEAADRLANFGSNREAAPSDVFVEHLYEPTVRRKEIIEATDTQDVSMIEADWREPLIRFLTMQELPSDKDEAERISWCSRLYVIHETELYKKSPSGILQRCVSLEEGRQLLKDIHSGICGNHAAARTIVGKAYRQGFFWSTAVSDADKIVRTCEVWGLDMVGPFKKAVGGYTHLFVAVDKFSKWIEAKPVIKITADKARDFFINIVHRFGVPNRIITENGTQFTGGVFKDFCEDFGIKVCYASVAHPMSNG

SEQ ID NO: 182881 - protein, 918 aa, Oryza sativa
  unsure (1)..(918): unsure at all Xaa locations
  Clone ID: PAT_MRT4530_80024C.1.pep
MGFVSGIDDFVFPPGQAFQFGSLDFITNDFGKISLLDSDSNQSGRGQISTYSPGIDSRPSEIVEYDDFGYRYDYXHLDDFDEGFERQLHTPLFGIFMADNETEEERKAREAEELRXNRKPNDADWKRSAKHKSENGYNVSHRNANGLQKRLRTGDNVPWMPGDKHRNLLGNKTSRGQRRPVDLRDTINQRRAARGYAPHHSPDRYDDDVDGVAAFTSDLRRVDWPAGFKPIGIEKYDGTTNPESWLTVYGLAIXNYLPVALADSARSWLHGXTFERPGTQFDLYNVIQKSRESLRDYIRRFSEQRNKISDITDDVIIAAFTKGVRHTDLVGKFGRKPPRTVKQMFEKANEYAKAEDAITTSKQSGTTWKPKKDTPTTGGSGSTNHKDRKRKPEELVATTTPSSRQRSHVNTFDKIMNSQCPHHPNSNHAAKDCFVYKQFAEQYAKNAHKASDGDQSTSKKKDEKAKADRTEINAAQPDTPQYLRWSETTIKFDRSDHPXEWSTRDGTPCTRENFRTENXHVILGRPALAKFMAVPHYTYMMMKMPGPRGDISLRSDIKQAVTCDKESCEMAQTREITLAREEIRLATSTASEGEVPATKMPKSGEGDAKTKKIPLDSSDPTKTAVIGAELDLVIEHSLLVKEDAKPIKQRLRRFAQDRKDAIKEELTKLLAAGFIKEVLHPDWLANPVLVRKKTGQWRMCVDYTDLNKSCPKDPFALPRIDQVVSTVLVVEREEEGHVQKVQRPIYFVSKVLADSKTRYPQVQKLLYGVLMTVSKLPHYFQGHSVTVVTSFPLGDILHNREANGRIAKWALELMSLDISFMPRTSIKSQALADFVTEWTECQEDMCHAQKFTNQNFEAECALNPCLGPARVILDDSDEINFGKTLPTRKIFSSGVGEKRARLSTTNCIQQVIPEEELN

SEQ ID NO: 182882 - protein, 114 aa, Oryza sativa
  Clone ID: PAT_MRT4530_80025C.1.pep
MGAKAQSNAQIWRGETRKRHNGALARSLGAVDRVTKVEQWRVGAAEIERDGRHGDHQGVTVAGGGRKKWEVAPVGSHGETTVGLNDEEVMGDVTSTQDGSSISRHNRHNWWIRW

SEQ ID NO: 182883 - protein, 1882 aa, Oryza sativa
  unsure (1)..(1882): unsure at all Xaa locations
  Clone ID: PAT_MRT4530_80026C.1.pep
MEEVKALMFAAGVDAAESSHIGHDPRLQSWAGFARAEAVLQGFLIDFAKECSGCWFNQAGGRIGASRLGFILLIFSSGPQQQCVAGIYSPDVTTGYKQGSEVANRKASGSSSQTDKDYIQSLKAIDKSINNGNAPYVFKINGVVHHRICTLLPSRGAPPKFAQLYIYDSDNEIQNRLNIFENDCDNADRPDPEIVSALTRMFDTNNELVKNFRYARDRLSEHEGIVDAIDRGVTNGDSVGKRQILPASFTGGRRYMVMNYQDAMAICRVYGSPDLFVTFTCNFKWQEIAETIRFEPGQQPSDRADVIVRVFNMKVNDFITDIRETSVIDGFICAEIPDYDTDRLGYELVNSLIAQLNIDQKKIFDTITSSISANKPGFFFVSGHGGTRKTFLWNAMIAKLRSQNKIVLAVASSGVASLLLPRGRTAHSRFKIPIDIDETSICNIKRGTMLPDLLIESALIIWDEAPMTRRHCFEALDRTLRNILSETCPTNSIIPFGGKPVVLGGDFRQILPVVPKGSRLAVINASITNLDLWKHVTLLSMNINMRLLNPTLPENTIIELHEFSTWVLAVGNGTLPMIAKEGEAQPSWIIIPDDLLVVTDGDKIVAIVNEVYPDFLASYKNPTYLSSRAIVCPANAVVDEINNYTIDLLPGESRIYLSCDTISKCSEQIPDFDLLPMAYVLISDLMYGDTDKRIKARVSRQWDYHDLNDETKIYHTDLVLLDEKGNSIHVQIYPPAMIKLRTLLQEGKVYYFDSFSVRYANRTYRPVTNPLMISFTKWTTLEECIDAFDDFPAITFSLTPFQDAPSLVDRNAFYVDIMGVITEIGATDTLRPKSRNTETLKRTMQIWDARKKWAIVFRDSFTTDMTSTQSCESMNNVFKKRFHRKLGLSELLVECDKVAASLREIELHAYFKSRNLNPVTCIPNLPMLKTVADSLLTVMPGPRGVISLRSDIKQAVTCDKESCEMAQTREITLARKDIRLAATMASEGEVPATKLSKTEEGDDKTKKIPLDPSDPTKTAVIGAELDYIFAWKPSDMPGIPREVIEHSLHVKEDAKPFKQRLXRFAQDRKDAIKEELTKLLAAGFIKEVLHPDWLANPILVWKKTGQWRMCVDYTDLNKSCPQDPFGLPRIDQNAGATYQRMIQRCFSAQIGRNVEAYVDDVVVKTKQKGDLITDLEETFASIRAFKMKLNLEKCIFGVPSGKLLGFMVSQRGIQANPEKINAILNMKPPSSQKDVQKLTGCMAALSRFVSRLGERGMPFFKLLKKTDNFQWGPEAQKAFEDFKKLLTTPPVLASPHPQEPLLLYVSATSQVVSTVLVVEREEECHIQKVQRPIYFVSEVLADSKTRYPQVQKLLYGVLITVRKLSHYFQSHSVTVVTSFPLGDILHNREANGRTAKWVLELMSLDISFKPRTSIKSQALADFLAEWTECQEDMPEEKMEYWTMHFDGSKRLTGTGARVVLISPTGERLSYALWIHFSASHNMAEYEALLHGLRIAISLGIRRLIVRGDSQLVVNQVMKEWSCLDDNMTAYRQEVRKLENKFNGLELTHVLRHNNEAADRLANFGSKQEAAPSDVFVEHLYEPIVPRKETVEAMDIQGPFAVWGLDMVGPFKRAVGGYTHLFVAIDKFSKWIEAKPVITITADKARDFFINIVHRFGVPNRIITDNGTQFTGGEFKDFCEDFGIKICYASVAHPMSNGQVERANGMILQGIKAQVFDRLRPYAGKWVDQLQSVLWSLRTTPSRATVQSPFFLVYGAEAMLPSEVEFESLRFRNFNEEGYEEGRVDDINRLEEAREAVLIRSTRYLQGLRRYHNRNVRSRAFLVGDLVLRKIQTTQDRHKLSPLWEGPFIIAEVTRPGSYRLKREDGTLINNSWNIEHLRRFYA

SEQ ID NO: 182884 - protein, 121 aa, Oryza sativa
  unsure (1)..(121): unsure at all Xaa locations
  Clone ID: PAT_MRT4530_80027C.1.pep
MDSLGAFAIPMALMAVQPGPQMTALAAATSTAMAAXAPWPTDMPGSSIPDAIXNLLHHEHSVASATFKANSGRVLSPXTMNFNYYDYRTLTRIDAPSLDAFNRLTPAQNALKNRMLSPTST

SEQ ID NO: 182885 - protein, 1309 aa, Oryza sativa
  unsure (1)..(1309): unsure at all Xaa locations
  Clone ID: PAT_MRT4530_80028C.1.pep
MGFVSGIDDFVFPPGQAFRFGSLNFFTNDFGKISLLDSDSNQSGRDQPLGTVSTKQLDGYLSSPGVDSRPTEIVEYDDFGYRYDYRNLDDFDEGYEDNYTPXLYFGIFMADNETEKQRQAREEEEQXPITLLDTLLKEDALNQANHVVNILNQTKTMIAASVPVNSASVRTPTGSRVPPLQSQDYHQPSLSVVGAGTSRRSRDHDEQSVHSPPDRHRERRAECPRSPHRRRPIDLRETINQRRAARGYIPHHSPDRYDDDVDGVAAFTSDLRRVDWPAGFKPTGIEKYDGTTNPETWLTVYSLAIRAAGGDIKAMANYLPVALADSARSWLHGLPRGTIGSWAELRDHFIANFQGTFERPGTQFDLYNIVQKSGESLRDYIRRFSEQRNKISDITDDVIIAAFTKGIHHDLLVGKFGRKPPRTVKQMFEKANEYAKAEDAVTASKQSGTTWKPKKDTPTTGGSGSTNHKDRKRKPEELVATTTPSSRQCSRVNTFDKIMNSQCPHHPNSNHAAKDCFVYKQFAEQYAKNARKSTYRDQSTSKKKDDEDDAPTGFQDPRKELNHIFGGPLAYESKPKQKLTEREINAVQPDTPQYLRWSETTIKFDRSDHPDRVVHPGRYPLVLDPVVCNIKLRRSLIDGGTALNILFAKTLDDMQIPRTELKPTYHAILGRPALAKFMAVPHYTYMMMKMPGPRGVISLRSDIKQAVTCDKESCEIAQTREIALAREEIRLAASTATEGEVSATKMSKGGEGDAKTEKIPLDPSDPTKTAVIGAKEVIEHSLHVKEDAKPIEQRLRHFAQDRKDAIKEELTKLLAAGFIKEVLHPDWLANPVLVRKKTGQWRMCVDYTDLNKSCPKDPFGLPRIDQVVDSTAGCELLSFLDCYSGYHQIRLKESDCLKTSFITPFGAYCYIAMPFGLKNAGATYQRMIQRCFSTQIGRNVEAYVDDVVVKTKQKDDLITDLEETFASIRAFRMKLNPEKCIFGVQLGKLLGFMVSHRGIRANPEKINAIINMKPSSSQKDVQTLTGCMAAFTRFVSRLGERGMPFFKLLKKTDNFQWGPEAQKAFENFKKLLTTPPVLASPHPQEPLLLYVSATSKVVSTVLVVECEEEGHLQKVQRPIYFVNEVLADSKTRYPQSQALADFVAEWTKCQEDTPAEKIEYWTMHFYGSKRLSGTRAGVVLISPTGERLSYILWIHFSASHNVAEYEALLHGLRIAISLGIRRLIVCGDSQLVVNQVMKEWSCLDDNMTAYRQEVRKLEDKFDGLELTHVLRHNNEAADRLANFGSKREAAPSDVXVEHFYEPTVPRKEI

SEQ ID NO: 182886 - protein, 490 aa, Oryza sativa
  Clone ID: PAT_MRT4530_80029C.1.pep
MFMAVPHYTYMMMKMPGPRGVISLRSDIKQAVTCDKESYEMAQTRYHQIRLKESDYLKTSFITPFGAYCYITMPFGLKNAGATYQRMIQRCFSTQIGRNIEAYVDDVVAKTKQKDDLITDLEETFASIRAFRMKLNPEKCIFGVPSGKLLGFMVSHRGIQANPEKINAILNMKPPSSQKDVQKLTGYMAALSRFVSRLGERGMPFFKLLKKTDNFQWGPEAQKAFEDFKNLLTTPLVLASPHPQEPLLLYVSATSQVVSTVLVVEREEEGHVQKVQRPIYFVSEVLADSKTRYLQPRTSIKSQALADFVAEWTECQEDMPEEKMEYWTMHFDESKRLSGTGAGVVQISPTGERLSYILWIHFSASHNVAEYEALLHGLRIAISLGILRLIVRGDSQLVVNQVMKEWSYLDDNMTAYWQEVRKLEDKFDGLELTHVLRHNNEAADRLANFGSKREAAPSDVFVEHLYEPTVPRKETIQATDTQDVSMIEAD

SEQ ID NO: 182887 - protein, 47 aa, Oryza sativa
  Clone ID: PAT_MRT4530_8002C.1.pep
MEIGATAVAGDGRRGSGARPTDGCGESREAKAVSGMHVFGAANINSS

SEQ ID NO: 182888 - protein, 1136 aa, Oryza sativa
  unsure (1)..(1136): unsure at all Xaa locations
  Clone ID: PAT_MRT4530_80030C.1.pep
MGFVSGIDDFAFPPGQAFRFGSLNFITNDFGKISLLDSDSNQSGRDQVVVPFGIPNSAKAYSKIIPPKSASNHSDEIQSTLPRSDQDDGSYPPILMKLPDDLAAIFTVKTSPTRRSRRAPASAPIRSRSREXSTEELDGYLSSPGVSSRPTEILDYDDFGHHYDHGDLDNFDDSYEDNYTPLFFGVFMADNETEEQHQAXEADQDRARQEAERRRLEEERQRQERERLQXAEDRRQRALESGWRVRELIGQQDVDGTAVFRTPQQNVVAAITLLDTVLKEDAFNQADHVVNILNQTKTMIAASVPANSASTRTPTGSRVPHIRSQDYHQPSLSIAGAGSSRRSRGHDERSVRSPPERYRERRVELPHSPHRRRPIDLRDTINQRRAARGHHSPDRYDDDVDGVAAFTSDLRRVDWPAGFKPAGIEKYDGTTNPESWLTVYGLAICAAGGDSKAMANYLPMALADSARSWLHGLPRGTIGSWAELRDHFIANFQGTFERPGTQFDLYNVIQKPGESLRDYIRRFSDKRNKISDITDDVIIAAFTKGIRHDDLVGKFGRKPPRTVKQMFEKANEYAKGEDAITASKQSGTTWKPKKDTPTAGGSGSNNHKDRKQIAIKFDRSDHPDRVVHPGRYPLVLDPVVRNVKLRRTLIDGGSALNILFAKTLDDMQIARTELKLSNTPFHGVIPGLSATPLGQITLPVTFGTRENFRTENVCFEVADFETAYHAILGRPALAKFMAVPHYTYMMMKMPGPRGPRTSIKSQALADFLAEWTECQEDMLEKKMEYWTMHFDGSKRLIGTGAGVVLISPTGERLSYVLWIHFSASHNVAEYEALLHGLRIAISLVIRRLIVRGDSQLVVNQVMKEWSCLDDNMTAYRQEVRKLENKFDGLELTHVLRHNNEAADKLANFGSKREAAPSDVFVEHLYEPTVPRKETIEAMDTQGVSMIETDWREPFIKFLTKQELPQDKNEAERISRRSRLYIIHEAELYKKSPSGILQRCVPLEEGRQLLKDIHSGICGNHAAARTIVGKAYRQGFFWPTAVSDADKIVWTCEGCQFFARQIHLPAQELQTIPLSWPFAVWGLDMVGPFKRIVGGYTHLFVAIDKFSKWIEAKQVITITTDKARDFFHQHCASVWGT

SEQ ID NO: 182889 - protein, 38 aa, Oryza sativa
  Clone ID: PAT_MRT4530_80031C.1.pep
MPHGRSGSAQPPAASGLSVERRTPTCRLQLCSACSCSA

SEQ ID NO: 182890 - protein, 817 aa, Oryza sativa
  Clone ID: PAT_MRT4530_80032C.1.pep
MAHLLLHGTLEATILEADHLSNPTRATGAAPGIFRKFVEGFEDSLGLGKGATRLYATIDLGRARVGRTRVVDDEPVNPRWYEVFHIYCAHFAADVVFSVKAAQPIGATLIGRAYLPVRELLSGEAIERRLDILDAGRRRISHGPTIHVRLQFRDVAGDRHGWGRGVSGARYPGVPYTFFSQRPGCRVTLYQDAHVPDAFAPRIPLAGGGYYRQGRCWEDVFDAISNAKHLIYLTGWSVYTEITLIRDGTRQRPGGDATLGELLKRKASEGVRVLLLVWDDRTSVESLGMKWGFMSTHDAETADYFRGTDVRCVLCPRNPDAGRSAIMGAQIAYMITHHQKTVIVDHDMPVPRGGGSRRIVSFVGGLDLCDGRYDTQFHSLFRTLDTAHHSDFHQPNLDGAAVTKGGPREPWHDIHSKIEGPAAWDVLYNFEQRWRKQGGDKDLLLDLKAMADLIIPPSPVMFPDDGEAWSVQLFRSIDGGACFGFPSTPEAAARSGLVSGKNNTIDRSIQDAYIHAIRRAKNFIYIENQYFLGSSFAWKADGIRPEDIEALHLIPREISLKIVNKIEAGERFAVYVVLPMWPEGPPASGSVQAILDWQRRTMEMMYYDIAVALEAKRINADPRDYLTFFCLGNREVKLNGEYEPAGRPLDGTDYAKAQKARRFMIYVHSKMMIVDDEYIIVGSANINQRSMDGGRDSEIAMGAFQPCHLNTKGLVARGQIHGFRMSLWYEHLGMLHDNFLNPESLECVQRVNKMADKYWDLYASDELNDDLPGHLLTYPIKKHFSHVIALLQRNLPVRVSPSQMLLVAPNFGADLGE

SEQ ID NO: 182891 - protein, 54 aa, Oryza sativa
  unsure (1)..(54): unsure at all Xaa locations
  Clone ID: PAT_MRT4530_80033C.1.pep
HLXINHPPKNTTHRDNFKKFLRFPPKQPKTIPAYKLLTPQTIFLTVQNLKNSSP

SEQ ID NO: 182892 - protein, 132 aa, Oryza sativa
  unsure (1)..(132): unsure at all Xaa locations
  Clone ID: PAT_MRT4530_80034C.1.pep
PWMGAETPKIAMGAFQXPCHPXTPKGLVARGQIXHGFRMSLWYEHLGMLHDNFXLNPESLECVQRVNKMADKYWDLYASDELNDDLPGHLLTYPVRVTKEGTVTELPGAKFFPDTQAPVIGTKGNLPPFLTT

SEQ ID NO: 182893 - protein, 185 aa, Oryza sativa
  Clone ID: PAT_MRT4530_80035C.1.pep
MGKLVALSFVVLLSVGLANASRVARYASAGGGGSGEGGGGGSDGGSGWGSGSGSGYGQAGGDGSYASGGGEGGGGGGGENGGSGYGSGSGSGYGQAGGSGPYGGGYAQGGGGGQGGGGGQNGGSGYGSGSGSGYGQAGGYGPYGGGYAQAGGQGGGGGGGQSGPGGSGYGSGSGSGSGSAYGGHP

SEQ ID NO: 182894 - protein, 179 aa, Oryza sativa
  unsure (1)..(179): unsure at all Xaa locations
  Clone ID: PAT_MRT4530_80036C.1.pep
ATEEKEKERERKRWXSQGSAGGGAAASSGVAVTITTAPMTETEDDMAVAEEEEVAAASAETEEHVQRILLAIDAFTRQQVSEMLEAGRALFKNLAADFEDRLCSIHKXRGWRGGRRRSGSCAPATPPTSRHAPSSTTPSSTSSPPSATTTPEPCSAPSSSTQVNSSSSLISVSSVTNFT

SEQ ID NO: 182895 - protein, 63 aa, Oryza sativa
  Clone ID: PAT_MRT4530_80037C.1.pep
KLAFVSQDSGCLKKSLAPYVKVFPKPGLGFLVCKVFCCKPVLLFFFPAQKKKVCIDPMVCIVF

SEQ ID NO: 182896 - protein, 68 aa, Oryza sativa
  Clone ID: PAT_MRT4530_80038C.1.pep
TNKILPYKGGPAPTEVTEGKRTWGEERGHLLGDGTFERSVGGLNERGRFVATSPGGGQRWVRNPGGGP

SEQ ID NO: 182897 - protein, 150 aa, Oryza sativa
  Clone ID: PAT_MRT4530_80039C.1.pep
MARPEVETAVQLGAVDPVPLWPDLASRPTSTFDRRGGRRDGGESGGERCDACAPVGVGWGRCGDGAGSCSASCPRPAVLGMARRRKARPAASARWCWPHTQPWPDGRRREAVEVLHEEEASGGDRVVSGGGWPPMVTSVAYGSTQEAVRQ

SEQ ID NO: 182898 - protein, 1021 aa, Oryza sativa
  unsure (1)..(1021): unsure at all Xaa locations
  Clone ID: PAT_MRT4530_8003C.1.pep
MKTPPPKVQQSRIPIRDKDKEQGVTPISDRFVGVIDIDPHEPSVLHLIEDYGSSTTSTPREVLAIDDVGTSARTNAEAENQVTTPAQHIRAVNAILRETPYDPILNDDLAHWTERLRESMTNLSNAFEEAAAAAHPEQPPTSVANGENPERRESPHRATPPPRGTGDLRDHLNGRREARRTRDNENRSRRHVSSQRHDNEDRGGRSSEDQDRDKRRSRTADRHPRRTYDSRQSTAPSAGCRAFGRSLRDARWPERFRPGAIEKYDGSTDXEEFLQVYSTVLYAAGAGDNALVNYLPTALKGSARSWLMHLXPYSISSWADLWHKFVANFQGTYKRHAIEDDLHALTQNPGESLRDYVRRFNECRNTIPEITDASVIRAFKSGVRDRYTTQELATRRVTTTRRLFEIVNQCAHADDALRRKNDKPKTGGEKKPAKYAPESSKKKNRKSGKRKAQSEVLATEYADPPKRPDPQGSDTKKAWCPIHKSDRHSLEDCLVFKKSLAKHMASEKCKRVRVVEKDIEVPTQESDSAYPDSDLHVSHIFEGSTAYSSKRDYKKAEREVCSTWQGAAPKMKCSINILFASTLDAMGILRSELMPTDQPFHGITPQSSSKPLGKITLPVTFSQANNFQTEQITFDVAEFDTAYNAIIGRTALAKFIAASHYAYQVLKMTGLKGTITIQGNAKLVVQCYKRSLDMVEHTPSPPATAEPPKKQSDMLGVPREVIEHKLMVRPDAKPVKQKLRRFTPDRKQAIREELDKLLKAGFIREVLHPEWLANPVRVRKANEKWRMCVDFTDLNKACPKDHFPLPRIDQLVDSTAGCELLSFLDAYSDYHQISMAKEDEEKTTFITPFGVICYIKMPFGLITAGNTFQHTVQGALSDQLGNNVEAYVDDIVVKTKTSDSLIDDLRETFDNLRRYRLMVNPEKCTFGVPSGKLLGFLVSSKGIEANPEKIKAIEDMESPTRLKEVQKLTGCMAALSRFVARMGERGQPFFALLKKQDKFVWTQEAEEAFIALNSSMQFTST

SEQ ID NO: 182899 - protein, 172 aa, Oryza sativa
  Clone ID: PAT_MRT4530_80040C.1.pep
MAAYMGGWWAAAARQGGSIARSRDGDGENGPSAAVEVEAAAEGGSEKPKAERVICANCPHRPSRSARPPPPSANVRSRGGWKGGGAIVRYNHGGGGDDVNVRGGDSSAAMKGDRRQRWSTDPAKRPTARGDVMSARGLLVVTELSVVLGTVVTLLGPVNLPSTSGRRSARHW

SEQ ID NO: 182900 - protein, 195 aa, Oryza sativa
  Clone ID: PAT_MRT4530_80041C.1.pep
MAAYMGGWWAAAARQGGSIARSRDGDGENGPSAAVEDTSCMTTGDGGGEFGRSVVEAEAERVICANCPHRPSRSARPPPPSANVRSRGGWKGGGAIVRYNHGGGGDDVNVRGGDSSAAMKQNDNLAKPNCRFPPNQVLAGQFKRYADTLSPVYSLHAAPHHLSSRQRQQRRDKRGMRMVDGSMRNEDARGERELA

SEQ ID NO: 182901 - protein, 90 aa, Oryza sativa
  Clone ID: PAT_MRT4530_80042C.1.pep
ADINKTTPYISIQHYGRKTSAGCDMRNCRRILSPSAYRDRNLAFALAVDLSRVPTTKLFPGQLQRESPGDLYVLVPEGMNRERTRCSKVY

SEQ ID NO: 182902 - protein, 117 aa, Oryza sativa
  Clone ID: PAT_MRT4530_80043C.1.pep
SGIHPLPTPQSSSRRSNFAMSAKYISSLPSLLAELGDNFSFSFFLMLRIAASTSTVLSWQGLTSTNSCFSFGIVAGAKGSPIIGIGPSNEQIRPLKLIWRDTKIYQFIHNRKFSHES

SEQ ID NO: 182903 - protein, 107 aa, Oryza sativa
  Clone ID: PAT_MRT4530_80044C.1.pep
MIFPYLRGSSLPWNGSVASSTSCHYSCASQMPSKKKPAAETRLSRAAAPAVTGTRLSLPPSPRSHFLLRGGQQGSVGRRPVVDGDGSGTESGEGASVDTTSSSSGTS

SEQ ID NO: 182904 - protein, 85 aa, Oryza sativa
  unsure (1)..(85): unsure at all Xaa locations
  Clone ID: PAT_MRT4530_80045C.1.pep
NKFFFFFFFLFFYNFXXYFFXTQTPVTLYLTTRHAHASLHLDSRACRADISSELCALQGIFTCSVTCASMAYFMMRNYFSRVYFS

SEQ ID NO: 182905 - protein, 158 aa, Oryza sativa
  Clone ID: PAT_MRT4530_80046C.1.pep
MAPPSLPILLVLLSLSSSLSSSSAAAAGRWTDAHATFYGGADASGTMGGACGYGNTYGQGYGTDTAALSAIISIRGELFETFKNRGFCPRPQDTKMMLEFCQQTSNEKLPQDISDQALMENFMESVRPNVASSKGTCNIFFSRILLYFPYAEESNSSS

SEQ ID NO: 182906 - protein, 574 aa, Oryza sativa
  Clone ID: PAT_MRT4530_80047C.1.pep
MAPPSLPILLVLLSLSSSLSSSSAAAAGRWTDAHATFYGGADASGTMGGACGYGNTYGQGYGTDTAALSAVMFGDGLSCGACFELRCGGGGGGDRRGCLPPAAGKSIVVTATDLCPANHALPGDRGGWCNPPLHHFDLSQPAFLRIARFQSGIVPVYCEVDKFKEGLTENSDKSLHTLFAVLNTVFSKLEVSLQNVCEGHTLLFALDGSPSELLFERLPEIDYDNSEWTEASSTDAICFIYQNLQKLDNLVCSQLSRHKKPRHMTIYWLPYTCGALGLSACSLWLLRHSSLMGSSDIDNWVQSAKESIAGFWDVHVEKPVGYFLFMSFYYLSYAFLNDASIISIRGELFETFKNRGFCPRPQDTKMMLEFCQQTSNEKLPQDISDQALMENFMERYEKEWTHPVKNLFGGELAYAMLIQLQKRTVDIKQAMLELDQILKGNAINFAILAALPAFGVSLLLLTVVQAWIMNDQGAEGRGRIARRQRRLLLLDAERKLMEFKNCMINGMEEEACCKFGLTLYNLDRLYRAVESHAEETGEWSRLREDILDLAKPKMSMTDKLVVLSRLKGTYDCFP

SEQ ID NO: 182907 - protein, 157 aa, Oryza sativa
  Clone ID: PAT_MRT4530_80048C.1.pep
MSNSGKEQRRMDRFIVILFSSTCRNGSSVDVVDGGGKSGKKPQGGGGEGGGAADHHRQHVAHIGWDGSTNTTTSLRSWNRAAPRSSSSSTTTASTSSALAAPATSRRSRRRRGLGCAAPVLPSAAARANSHRPFLLRPQLPEPCLHRRAAPFSPAGR

SEQ ID NO: 182908 - protein, 87 aa, Oryza sativa
  unsure (1)..(87): unsure at all Xaa locations
  Clone ID: PAT_MRT4530_80049C.1.pep
YCMKEYSSXILHESNKRNHWVVVKNKKKEXNCWGLVVHLILLTNFTRRLSIEYCIVHTMLKSEDKARWVPRQDGTTEWYHTRHLSYL

SEQ ID NO: 182909 - protein, 125 aa, Oryza sativa
  unsure (1)..(125): unsure at all Xaa locations
  Clone ID: PAT_MRT4530_8004C.1.pep
IWLTAHNRGHGYSNSFTLIRGVQLYPQDTALRHVSMXPTCHHDIPERGRDRTIRITPSSQAHHTSGFTPVXQRATGSPCSCLGESGSRIGRRRAHPNSITPTLAWMRQLEKSYTTSLAVAHAGLW

SEQ ID NO: 182910 - protein, 64 aa, Oryza sativa
  Clone ID: PAT_MRT4530_80050C.1.pep
LTGLQLLPHVLIARVHYRLHKRLLLALPIGSNIEMCRVAARCEGEERVGDRGLHGYVMDARGIL

SEQ ID NO: 182911 - protein, 45 aa, Oryza sativa
  Clone ID: PAT_MRT4530_80051C.1.pep
LKTVLSRLHTHTPQTTSAHYSATYTSFSQIYMNTGVCWSIIIEQV

SEQ ID NO: 182912 - protein, 1421 aa, Oryza sativa
  unsure (1)..(1421): unsure at all Xaa locations
  Clone ID: PAT_MRT4530_80052C.1.pep
MGSVSGIDDFAFPPEQAFKFGSLNFITNDFGKISLLDSDSNQSGRDQAPVPFGIPNSVEAYSKIISPESASNHSDEIQSTLPRPDQDDGSYPSILMKLHDDLAAVFTVKTSPTRRSRRAPALAPIRSRSREVGVILCHAQKFTSPTILNNHTRLYRSNSKPGAKQIITRGMDSPATPTDFSPLLSLVPRNESCYTEGCDILQPLGTVSTEELDGYLSSPGVSSRPTEILDYDDFGYHYDHGDLDNFDDSYEDNYTPLFFGVFMADNETEEQRQAREADQDRARQEAERRRLEEERQRQERERLQREQQDRERIAKEAEDRRQRALESGRRARELIGQQDVDGTAVFRTPQQNTVAAITLLNTLLKEDALNQADHVVNILNQTKTMIAASVPANSASTRTPTGSRVPHLRSQDYHQPSLSIAGAGSSRRSRGHDERERRVERPHSPHRRRPIDLRDTINQRHAARGHHSPDRDDDDVDGVAAFTSDLRRVDWPAGFKPSGIEKYDGTTNLESWLTVYGLAIRAARGDSKAMANYLPVALADSAWSWLHGLPRGTIGSWAELRDHFIANFQGTFERPGTHFDLYNIVQKSGESLRDYIRRFSEQGNKISDITDDVIIAAFTKGIRHEDLVGKFGCKPPKTVKQIFEKANEYAKAEDAITVSKQSGTTWKPKKDTPTGGGSGSNNHKDRKRKPEELVATTSPSSRQRSRVNTFDKIMNSQCPHHPNSNHVAKDCFVNKQFAEQYVKNARKPSNGDQGTSKKKDDEDDAPTGFQDHRKELNHIFGGPLAYESKRKQKLTEWEINANNKDIFAWKPSDMPGIPREVIEHSLHVKEDAKPIKQRLRRFAQDRKDAIKEELTKLLAAGFIKEVLHPDWLANPVLVRKKTGQWRMCVDYTDLNKSCPKDPFGLPRINQVVDSTASCELLSFLDCYSGYHQIRLKESDCLKTSFIMPFGAYCYITMPFGLKNAGATYQRMIQRCFSTQIGRNVEAYVDDVVVKTKQKDDLIVDLEETFTSIRAFKMKLNPEKCIFGVPSGKLLGFMVSQRGIQANPEKINAILNMKPPSSQKDVQKLTGCMVALSRFVSRLGERGMPFFKLLKKTDNFQWGPEAQKAFEDFKKLLTTPPVLASPHPQEPLLLYVSATSQVPRTSIKSQALADFLAEWTECQEDMPEEKMEYWTMHFDGSKRLIGTGAGVVLISPTGERLSYVLWIHFSASHNMAEYEALLHGLRIAISLEVRKLEDKFDGLELTHILRHNNEEADRLANFGSKREAAPSDVFVEHLYEPTVPRKETIGAMDTQGVSIIETDWREPHIKFLSKQELPQDKNEAERISRRSRLYIIHKTELYKKSPSGILQRCVSLEEGRQLLKDIHSSICGNHAATRTIVGKAYRQGFFWPTAVSDADKIVRTCEGCQXLPDKFICQPKSC

SEQ ID NO: 182913 - protein, 177 aa, Oryza sativa
  Clone ID: PAT_MRT4530_80053C.1.pep
GGAHLSALVVSLLLCPSLSSSFAPLSLSEQKAAASGGQGAEAGGGRGRRRLWAAGEEPRTRRTRRRGSARSAPMAAAAERARAAGRGARWRQDPPSHRPGAHDELVRPGDTGGVHGVAEARLPPSHRRAHPRRQLRASAPPPYGVRPLARRRRPERTRRRPRGCHGRHPRSRCSTRA

SEQ ID NO: 182914 - protein, 66 aa, Oryza sativa
  Clone ID: PAT_MRT4530_80054C.1.pep
SSAVMPCYPLYESESKNPILSFFHITLYLRASPGTSPSHPSTHIAPSFPIRSLHWRKNRIRLNCRI

SEQ ID NO: 182915 - protein, 113 aa, Oryza sativa
  Clone ID: PAT_MRT4530_80055C.1.pep
MAAAAEDVEFVDYDRDEEEEEDAMDEDDRGGGRGGRALPVPHIVSQGVMRSRGRLLGRSTSVLASNRDRFDSLADAGNPGHGPQRCFVVVCLWQACLFSPMSLMALEEIRPLY

SEQ ID NO: 182916 - protein, 112 aa, Oryza sativa
  Clone ID: PAT_MRT4530_80056C.1.pep
KKKFFFLKKVFTGGPNFNFKGPPPKKNIFLNPGKGFWHLFLGRGLTRGNKKNFFPKILSPGGPFFPKFFFEGVSQILRDNHPFLRGKFISPPKGGPLFKKKKRWPPLSKFFV

SEQ ID NO: 182917 - protein, 705 aa, Oryza sativa
  Clone ID: PAT_MRT4530_80057C.1.pep
MITASVPDPAAGAGITANDLSTRLLTGTGSVGLNIPAPHVACIPSIFAKLSTSAVRQEATSPTIHQIVTTTTWMEINAVQPDTPQYLRWSETVIKFDRSDHPDRVVHPGRYPLVLDPVVRNVKLRRSLIDGGSALNILFAKTLDDMQIPRAELKPSNALFHGVIPRLSSTPLGQITLPVTFGTRENFRTENICFEVADFEIAYHAILGRPALAKFMAVPHYTYMMMKMPGPRGVISLWSDIKQAVTCDKESCEMAQTREITLAREEIRLAASTATEGEVPATKMPKSGEGDAKTKKIPLDPSDLTKTAVIGAELDCFIKEVLHPDWLANPVLVRKKTGQWCMCVDCTDLNKSCPKDPFGLPRIDQESDCLKTSFITPFGAYCYITMPFGLKNAGATYQHMIQRCFSTHIGHNVEAYVNDVVVKTKQKDNLITDLEETFASIRAFRMKLNPEKGIQANPEKINAILNMKLPSSQEDVQKLTGCMAALSREVLADSKTRYPQVQKLLYDFVAKWTECQEDTSAEKMEYWTMHFDGSKRLSGTGAGVMKEWSCLDDNMIAYRQETHLPAQELQTIPLSWPFAVWGLDMVGPFKKAIGGYTHLFVAVDKFSKWIEAKPVITITTDKAGDFFINIVHWFGVPNRIITDNGTQFTGGVFKHFCEDFGIKIYYASIVHPMSNGQVERTNARSAMEKTEWMISTDWRKPVKQP

SEQ ID NO: 182918 - protein, 1227 aa, Oryza sativa
  Clone ID: PAT_MRT4530_80058C.1.pep
MGFVSGIDDFVFPPGQAFRFGSLDFITNNFGKISLLDSDSNQSGRGQVTAPFGIPNSAEIYPKIISTELATNHSNEIQYTPTRPDQDDGAYPPILMKLPDDLAAVFTTRASSPRRPRRDPAPAPIQSSSREVGVIIQPLGTVSTEQLDGYLSSPGVDSRPTEIVEYDDFGYRYDYHNLDDFDEGFEDNYTRLYFGIFMADNETEEQRQAREAEEQRVRQEAERRRLEEERQAQERERLQREQQERERAAKEAEDRRQRALEAERRARELIGQQDVEGRAVFRTPKQNAVATITLVDTLLKEDALNQANHVINILNQTKTMIAASVPVNSASVRTPTGSRVPPLRSQDYHQPSFSVVGAGSSRRSRDHGERCSKKPMSMQRSKMPSPHPSSRAPLGSRRKIRRLQEAVEVPITRIASDRKDAIKEELTKLLAAGFIKEALHPDWLANPVLVWKKTGQWRICVDYTGLNKSRPKDPFGLPRIDQVVYSTAGCELLSFLDCYSRYHQIRLKESDCLKTSFITPFGAYCYITMPFGLKNAGATYQRMIQRCFSTQIGRNVEAYVDDIVVKTKQKDDLITDLEETFASIRTFRMKLNPKKCIFGVPSGKLLGFMVSHRGIQANPEKINAILNMKPPSSQKDVQKLTGCMAALSRFVSRLSERGMPFFKLLKKTDNFQWGPEAQKAFEDFKKLLTTPPVLASPHLQEPLLLYVSATFQVVSTVLVVEREEEGHVQKVQRPIYFVSEVLADSKTRYPQVQKLLYGVLITVRKLSHYFQGHSVTVVTLFPPGDILHNHEANGRIAKWALELMSLDISFKPRTSIKSQALADFVAEWTEFQEDTPAEKMEYWTMHFDGSKRLSGTGAGVVLISPTGERLSYVLWIHFSASHNVAEYEALLRGLKIAISLGIRRLIVRGDSQLVVNQVMKEWSCLDDNMTAYRHEVRKLEDKFDGLELTHVLRHNNEAADRLANFGSKREAAPSDVFVEHLYEPTVPRKEIVEATDTQEAYRQGFFWPTAVSDADKIMRTCEGCQFLARQTHLPAQELQTIPLSWPFAVWGLDMIGPFKKAISGYTHLFVAIDKFSKWIEAKPVATITADKARDFFINIVLWFGVPNRIITNNGTQFTGGVFKDFCEDFGIKICYASVAHPMSNGQVERANGMVLQGIKARVFDRLHPYAAKWVEQLPSVLWSLRTTPSRATGQSSFFLVYGAEAMLPSEVEFESLRFCNFSEEHYG

SEQ ID NO: 182919 - protein, 1419 aa, Oryza sativa
  unsure (1)..(1419): unsure at all Xaa locations
  Clone ID: PAT_MRT4530_80059C.1.pep
MGSVSGIDDFAFPPGQAFRFGSLNFITNDFGKISLLDSDSNQSGRDQVPAPFGIPNSAEAYSKTISPELVSNHSDEIQSTPQRPDQDDGSYPSILMRLPDDLAAVFTAKASPTRRSRQAPASAPIQSRSREVGVILQPLGTVSTEELDGYLSSPGVSSRLIEVLDYDDFGYHYDYGDFDNFDDSYEDNYTPIFFGVFMADNEMEEQRRAREAEEERXDKKLNVADWRKNDSDKSENDYSVSNKIASELQRRLKIDGSAPWNLGDERESSSGNKTSMEQRFFAPPSRTRLQQSLSSTPSSRKXALNQADHVVNILNQTKTMIAASVPANSASTRTLTGSRVPHLRSQDYHQPSLSIAGAGSSRRSRGHDERSESWLTVYGLKSGESLRDYIRRFFEQRNKISDITDDVIIAAFIKGIRHEDLVGKFGRKPPKTVKQMFEKANEYAKAEDAITASKQSGTTWKPKKDTPTVGGSGSNNHKDRKRKPEELVATTSPFSLQRSRVNTFDKIMNSQCPHHPNSNHVAKDCFVYKQFAEQYVKNARKPSDGDQVTSKKKDDENDAPTGFQDHRKELNHIFGGPLAYESKRKQKLTEREINAVQPNTPQYLRWSEIAIKFDRSDHPXEWSTRGGSPWYXDPMVRNVKLRRTLIDGGSALNILFAKTLDDMQIPCTELKPSNAPFHGVIPGLSATPLSQITLPNNKDIFAWKPSDMPGIPREVIEHSLHVKEDAKPIKQRLRRFAQDRKDAIKEELTKLLVAGFIKEVLHPDWLANLVLVRKKTGQWRMCVDYTDLNKSYPKDPFGLPRIDQVVDSMAGCELLSFLDCYSGYHQIRLKESDCLKTSFITPFGAYCYITMPFGLKNAGATYQRMIQRCFSSQIGRNVEAYVDDVVVKTKQKDNLIADLEETFASIRAFRMKMNPEKCIFGVPSGKLLGFMPRTSIKSQALADFVAEWTECQEDTPAEKMEYWTMHFDGSKRLSGTGAGVVLISPTGERLSYMLWIHFSASHDVADYEALLHGLRIAISLGIRRLIVRGDSQLVVNQVMKEWSCFDDNMTAYRQEVRKLEDKFDGLELTHVLRHNNEAADRLANFGSKREAAPSDVFVEHLYEPTVPRKETTEATDTQETHLPAQELQTIPLSWPFAVWGLDMVRPFKKATGGYTHLFVAIDKFSKWIKAKPVITITADKARDFFINIVHRFGVPNRIITDNSTQFTGGVFKDFCEDFGIKICYASVAHPMSNGQVKRATGMVLQGIKARIFDRLRPYAVKRVDQLPSVLWSLRTTPGRATGQSSFFLVYGAEAMLPSEVEFESLRFRNFREERYEENRVDDLNRLEEARETALIQSARYLQGMRRYHNRNVQSRAFLVGDLVLRKIQTTRDRHKLSPLWEGPFIISEVTRPGSYRLKREDGTHIDNSWNIEHLRRFYA

SEQ ID NO: 182920 - protein, 161 aa, Oryza sativa
  unsure (1)..(161): unsure at all Xaa locations
  Clone ID: PAT_MRT4530_8005C.1.pep
SKTDGRDRSVHDRSTTNGPDDVSGDVTTGGGGSAARTAHARRRTAALRHERRAPTGSGRHDGLTGDQSDGGRSTDGDGDEEEAAKLFGSTAATMLRRSPTVAKRQTRTATTWRPRXRPSRATATSGTAAAHGWSDGGDDGARAHGARAFPTTRGEGKGGGG

SEQ ID NO: 182921 - protein, 72 aa, Oryza sativa
  Clone ID: PAT_MRT4530_80060C.1.pep
ASLIPRPRPQSLQRPIIFLAPLRMYIYNSSATGLQQTLSHMVRRAVRITSQHCNSGSVSTSYHYLHPSDYLC

SEQ ID NO: 182922 - protein, 91 aa, Oryza sativa
  unsure (1)..(91): unsure at all Xaa locations
  Clone ID: PAT_MRT4530_80061C.1.pep
MEIQYEFNSDRDPSRSSTGFGGPSDGSYIFVRGVTGGGIASPWEYSEKNARGGEGRAGAIDYFLYIDARYFVRIPSTSXRLFPLRSASSDN

SEQ ID NO: 182923 - protein, 1541 aa, Oryza sativa
  Clone ID: PAT_MRT4530_80062C.1.pep
MGSVSGIDDFVFPPGQAFRFGSLDFITNDFGKISLLDSDSNQSGRDRVSAPFGIPNSAEIYPKLISIESAPKHSDEIPSTSTPPDQDDGAYSPILMKLPDDLAAVFTTRTSSPCRPRRDPASAPIRPSSKEVGVILQPLGTVSTDQLEGYFSSPGVNSRLTEIVEYDEFGYRYDNRDLDDFDESFEDNYTPLYFGVFMADNETEEQRQAREAEARRNAVAAITLLDTLLKEDALNQADHVVNILNQTKTMIAASVPLHGLPRGTIGSWAELRDHFIANYQGTFERPDTQFDLYNVIQKSGESLRDYIRRFSEQRNKISDITDDVIIAAFTKGIRHEDLVDKFRCKPPRTVKQMFDKANEYTKAEDAIIVSRQSGTTWKPKKDAPTTGEGGSNNHKDHKRKPEEPFATTTQSSRQRSRVNTFDKIMNSQCPHHPNSNHAAKDCFVYRQFAEQYAKNARKASAGDQSTSKKKNDDDDALTGFQDHRKELNHIFGGPLAYESKRKQKLTEREINAVQPDTPQYLRWSETTIKFDRSDHLDRVVHPRRYPLVLDPVVRNIKLRRSLIDGGSALNILFAKTLDDMQIPRTELKPSNAPFHGVIPGLSATPLGQITLPVTFGTRENFRTENICFEVADFETAYHAILGRPALAKFMAVPHYTYMMMKMPGPRGIISLRSDIKQAVTCDKESCEMAQTHEIAIAREDIRLAATTASEGEVPTTKISKSGESEAKTKKIPLDPFDPTKTAESALITFLQNNKDIFAWKPSDMPGIPREVIEHSLLVKEDAKPIKQRLRRFAQDRKDAIKEELTKLLAAGFIKEVLHPDWLANPVLVRKKTGQWCMCVDYTDLNKSCPKDPFGLPRIDQIVDSTAGCELLSFLDCYSGYHQIRLKESDCLKTSFITPFGAYCYITMPFGLKNAGATYQRMIQRCFSTQIGRNVEAYVDDVVVKTKQKDHLITDLEETFASIRAFRIKLNPEKCTFGVPSGKLLGFMVSHRGIQANLEKINAILNMKPPSSQKDVQKLTGCMAALSRRLIVHGYSQLVVNQVMKEWSCLDDNMTTYRQEVRKLEDKFDGLELTHVLRHNNETADRLANFGSKHEAAPSDVFVEHLYEPTIPRKETVEATDAQDIAMIEADWREPLIQFLTKQELPQDKDEAERISRRSRLYIIHEAEQYKKSPSGILQRCVSLEEGRQLLKDIHSGICGNHASARTIVGKAYRQGFFWPTAVSDADKIVRTCEGCQFFARQTHLPAQELQTIPLSWPFAVWGRDMVGPFKKAVGGYTHLFVAVDKFSKWIEAKPVITITADKARDFFINIVRRFGVPNRIITDNGTQFTGGVFKDFCEDFDIKICYASVAHPMSNGQVERANGMVLQGIKARVFDRLNPYAGKWVEQLPSILWSLCTTLSRATGQSPFFLVYGAEAMLPSEVEFESLRFRNFREERYGEDRVDDLNQLEEAREAALIQSARYLQGLRRYHNRNVRSRAFLVGDLVLRKIQTTRDRHKLSLLWEGSFIISEVTRPGSYRLKCEDGTPIDNSWNIKHLRRFYA

SEQ ID NO: 182924 - protein, 1173 aa, Oryza sativa
  unsure (1)..(1173): unsure at all Xaa locations
  Clone ID: PAT_MRT4530_80063C.1.pep
LGFKPVGERPGPRAIRYEDNYTPLFFGVFMADNETEEQRQAREADQDRARQEAERRRLEEERQRQERERLQREQQDRERIAKEAEDRRQRALESGRRARELIGLQDVDGTAPTPQAPAPRLGAPSRTASLSTSPASRRPSRHXNQRRAARGHRHSPNRYDDDVDGVAAFTNDLRGVDWPASFKPTGIEKYDGTTNPESWLTIYGLAIRAAGGDNKAMANYLPVALADSARSWLHGLPRGTIGSWAELRDHFIANFQGTFERPSTQFDLYNVVQKTVKQMFEKANEYAKAEDAITASKQSGTTWKPKKDTPTAGGSGSNNHKDRKRKPEELVATTSPSSRQRSRVNTFDKIMNSQCPHHPNSNHVAKDCFVYKQLAEQYVKNARKPSDGDQGTSKKKDDEDDAPTGFQDHRKELNHILGGPLAYESKRKQKLTEREINAVQPNTPQYLRWSEIAIKFDRSDHPDRVVHPGRYPLVLDPVVRNVKLRRTLIDGGSALNILFVKTLDDMQIPRTELKPSNAPFHGVIPGLSATPLGQITLPVTFGTRENFRTENVCFEVADFETAYHAILGGPALAKFMAVPHYTYMMIKMPGPRGVISLRSDIKQAVTCDKESCEMAQTHETTLAREEIRLAATMGSEEEVPATKLTKTEESDAKMKKIPLDPSDPDKTAVIGVELDYAKPIKQRLRRFAQDRKDAIKEELTKLLAAGFIKEVLHPDWLANPVLIGRNVEAYVDDVVVKTKQNDDLIADLEETFASIRASRMKLNPEKCIFGVPSGKLLGFMVSQRGIQANPEKINAILNMKPPSSQKDVQKLTGCMAVLSQFVSQLGERGMPFFKLLKKTDNFQWGPEAQKAFEDFKKLLTTPPVLASPHPQEPLLLYVSATSQFVSTVLVVEREEEGHIQKVQRPIYFVSEVLADSKTRYPQVMKEWSCLDDNMTAYRQERCVSLEEGRQLLKDIHSGICGNHAAARTIVGKAYRQGFFWPTAVSDADKIVRTCEGCQFFAGQTHLPAQELQTIPLSWPFAVWGLDMVGPFKRAVGGYTHLFVAIDKFSKWIEAKPVITITVDKARDFFINIVHRFGVPNRIITDNGTQFTGRAFKDFCEDFGIKICYASVAHPMSNGQVERANGMILQGIKARVCDRLRPYAGKWKQCCQVKWNLNHYNFGTSTRRAMKRAE

SEQ ID NO: 182925 - protein, 528 aa, Oryza sativa
  unsure (1)..(528): unsure at all Xaa locations
  Clone ID: PAT_MRT4530_80064C.1.pep
MGRRSYIEGQNPRCCHNLLAAKSGGHDTTITPLELSPRHQVAAIINPSPSNLLLPGVCRETRPCPLSPPTWPSLLPLTVEAAAQGTDPMAPEVKPSKSYEYHQNNILRYLPKCTLDYIVDAAEEFSMPHVCPSSYNDFLAMVAMKPGRLLPPNPRSDRSVTGHHCDRSRTGVLPPSRIVSERQAGLPRRFMPESATSREVVVLGEGRPAPHYPGRSVFFLSFAMAGLVPPFSSFFMDILEFYDLQMAHLTPNAVMTLAIFPHLCEMFIGVRPSLRLFRWFFTVQPVPPPSVVGGCYFQPRGQVLHRYIPCVLRKKWDDWKSDWFYTPLADEARLRLPSQPPAQASSWRATVDLGDGYDAVLDRLAGLRSEGLTGAMVFGDYLRRRIAPLQRRARGAWEYSGPEDFMRTHQGRTWDWDPEDFKMVVQRVLNLSSVEASLIPQGVLPLCCDPERANILTIMQAVGASGEQALRGHDGAGGSXQGEQSTPGGGRASGPHDGGLGGSCHAQKFPNRISSRMCIKIPVQDRPG

SEQ ID NO: 182926 - protein, 104 aa, Oryza sativa
  Clone ID: PAT_MRT4530_80065C.1.pep
MALRHHHQHPPPPPELQLLPASTTAPLAAAFLSNSTGSSSHEQHVTTLRRRRGRRRDDDDGAALRDDDDGVVLRDDDNSGGAATMAGDGGVAMTTMMGAALRRR

SEQ ID NO: 182927 - protein, 1396 aa, Oryza sativa
  Clone ID: PAT_MRT4530_80066C.1.pep
MGFVSGIDDFAFPPGQAFRFGSLNFITNDFGKISLLDSDSNQLGRDQGTFERPGTQFDLYNVVQKSGESLRDYIRRFSEQRNKISDITDDVIIAAFTKGIRHEDLVGKFGRKPPRTVKQMFEKANEYAKAEDVITASKQSGTTWKPKKDTPTAGGSGSNNHKDRKRKPEELVATTSPSSRQHPRVNTFDKIMNSQCPHHPNSNHVAKDCFIYKQFAEQYVKNARKPADGDQGTSKKKDDENDAPTDFQDHRKELNHIFGGPLAYESKRKQKLTEREINAVQPNMPQYLRWSETAIKFDRSDHPDRVVHPGRYPLVLDPVVRNVKLRRTLIDGGSALNILFAKTLDDMQIPRTELKPSNTPFHGVIPGLSATPLGQITLRVTFGTRENFRTENVCFEVADFETAYHAILGRPALAKFMAVPHYTYMMMKMPGPRGIISLRSDIKQAVTCDKESCEMAQTHETTLAHEEIRLAATTASEGEVPATKLTKTEESDAKTKKIPLDPSDPDKTTNNKDIFAWKPSDMPGIPREVIEHSLHVKEDAKPIKQRLRRFAQDMKDAIKEELTKLLAAGFIKEVLHPDWLANPVLVRKKTGQWRMCVDYTDLNKSCPKDPFGLPRIDQIGRNVEAYVDDVVVKTKQKDDLIADLEENFASIRAFKMKLNPEKCIFGVPSGKLLGFIVSQRGIQANPEKINAILNMKPPNSQKDVQKLTGCMAALSRFVSRLGERGMPFFKLLKKTDNFQWGSEAQKAFEDFKKSLTTPPVLASPHPQEPLLLYVSATSQVVSTVLVVEREEEGHIQKVQRPIYFVSEVLADSKTRYPQVQKLLYGVLITVRKLSHYFQSHPVTVVTSFPLGDILHNREANGRIAKWALELMSLDISFKPRTSIKSQALADFLAEWTECQEDMPEEKMEYWTMHFDGSKRLTGTRAGVVLISPTGERLSYVLWIHFSASHNVAEYEALLHGLRIAISLGIRRLIVRGDSQLVVNQVRKLEDKFDGLELTHVLRHNNEAADRLANFGSKREAAPSDVFVEHLYEPTVPIKEAIEAMDTQGVSVIEADWRKPLIKFLTKQELPQDKNEAERISRRSRLYIIHEAELYKKSPSGILQRCVSLEEGRQLLKDIHSGICGNHAAARTIVGKAYRQGFFWPTAVSDADKIVRTCEGCQFFARQTHLPAQELQTIPLSWPFAVWGLDMVGPFKRAVGGYTHLFVAIDKFSKWIEAKPVITITADKARDFFINIVHRFGVPNRIITDNGTQFTGGAFKDFCEYFGIKICYASVAQPMSNEQVERANGMILQGIKARVFDRLRPYAGKWVDQLPSVLWSLRTTPSRATGQSPFFLVYGAEAMLLSEVEFESLRFRNFNEESHEEGRVDDINRLEEAREAALIQSTRYLQGLRRYHN

SEQ ID NO: 182928 - protein, 1110 aa, Oryza sativa
  Clone ID: PAT_MRT4530_80067C.1.pep
MDRQWMYADRRSKEFIDDVHYFLRVAEANRQRGFICCPCNKCKNQKEYSASRTIHFHLFESGFMPSYNCWTSHGEQGVEMEEDKLEDDNIPDFAQYVGFEGNQTGEEERDANSGSRISGCDNADGNAKEDCESEKGAHKLDKMLEDHRTSLYPGCEQGHKKLDTTLEFLQWKAKNRVSDKAFGNLLKLVKNILPEGNKLPETTYEAKKIVCPLGLEVQKIHACPNDCILYRGEEYENLEACPVCKALRYKIRRDNPEEVDGQLTKKRIPAKVMWYFPIILRLRRLFRNKRNARMMRWHAEERQQDGMLRHPADGSQWRNIDRKFKDFGKDARNIRFGPKQPGNDIDVYLRPLVEDLKLLWKKEGVPMWDEDKQEEFNLRALLFITINDWPALSNLSGQSNKEYKACTHCMDETESTYLKHCRKVVYMGHRRFLAANHPVWKKGKHFEHKADHRTKPKHRSGKTVFAMVKDLKVVFGKGPGSQPIESEDGHALMWKQNSIFWELPYWEFLDVRHAIDVMHLTKNLCVNLLGFLGVYGKSKDTLEARNDLKHMEQRGDLHPEPKEKGSHYLSPASYTLSKAEKESMFECLESIKVPSGYSTNIKRIISTKEKKFTNQKCHDCHVLMTQLLPVIIRGILPDNVRETITKLCTFMNAISQKVIDPDILEALQNDVVQCLVSFELIFLPSFFNIMTHLLCHLVKEISILGPVYIHNMFPFERYMGVLKKYVHNRACPEASIAKGYGTEEVIEFCVEFIEDIHPIRVPESRHEGRLRGKGTLGRKAIMTVDNNLFCKAHFTVLQQSSLVAPYIEEHLALVRARNIGKSDAWITRHHIDTFPAWLRQHLMGNESINQQLAFLARGPSGSIATFQGYEINGYTFYTRAQDMKSTNQNSVVRVNAMGHDGTIGTYYGAIEDIWELDYGPLKVPLFRCQWVRLTGEGVMIDDSGMTTVDLNKVGYSDEPFVLANDVTQVFYVKDMSSKGKKGRGPDEPKRHVVLPGKRKIVGVEDKTDEDYDQLDGQPPFTVTIDPSILLSNEDTPYSRSDHKEGTIVRRNRAPPSLQSSPSLGEVAIVVAPPPLLSTARTPPSSSSRRSPPLLPRRRRRPLIFRRRFGH

SEQ ID NO: 182929 - protein, 627 aa, Oryza sativa
  Clone ID: PAT_MRT4530_80068C.1.pep
MDISRTNEGYTSCGPVVEMSWHRAGVLLLGAQSCLPVPEVPAVGATYQRMIQRCFPTQIGRNVVAYVDDVVIQTKQKDDLITDLEETFASIYAFRMKLNPEKCIFGVPSGKLLGFMVSHRGIQANPEKINAILNMKPPSSQKDVQKLTGCMAALSRHNNEAADRLANFGSKREAAPSDVFVEHLYKPTVPRKETIEATDTQDITVSDADKIVRTCEVCQFFARQTHLPAVNKFSKWIEAKPVITITADKARDFFINIVHRFGVPNRIITDNDTQFIGGVFKDFCEDFGIKICYASVAHPMSNGQVEHANAEAMLPSEVEFESLRFCNFSEKRYGEDRVDDLNRLEEAREAALIQSARWPKVVVLESLNYINGYLIGSFLRVIDEVKGGFFARPVRKAINGVNVNLRFKVGVLKLGDPVPQIMLSFPGKLLSFVQLVSGGLKGARRGSPSPSPSSATLPRARRAARRAPLCLPSAVAAAPRAVAARRVAAVAVAVDVLSPLARPIAASRPEPPRAVAIVACRRAPPSHCRCRTASPSRPVALEPRAARRRPRLEPAPSPSCRRHPRALHRPVAITSPVAIVSPSPRAKPRAVPSSPRVSRRSHATRRVARLKPRTAARRIAAPSPAPP

SEQ ID NO: 182930 - protein, 1041 aa, Oryza sativa
  unsure (1)..(1041): unsure at all Xaa locations
  Clone ID: PAT_MRT4530_80069C.1.pep
MDRQWMYADRRSKEFIDGVHYFLRVAEANRQRGFICCPCNKCKNQKEYSASRTIHFHLFESGFMPSYNCWTSHGEQGVEMEEDEVEDDNIPDFAXYVGFEGNQTGEEEIAADGNDVADDLGQMLQDAREDCESEKEAHKLDKMLEDHRTSLYLGCEQGHKKLDTTLELLQWKAKNGVSDKAFGDLLKLVKNILPGGNKLPETTYEAKKIVCPLGLEVHKIHACPNDCILYRGEEYENLEACPVCKALRYKIRRDDPGEVDGQLTKKRIPAKVMWYFPIIPRLRRLFRNKGNARMLRWHAEEHQQDGMLRHPADGSQWRNIDRKFKEFGKDARNIRFGPKQPGNDIDVYLRPLVEDLKQLWKKEGVPVWDEDKQEEFNLRALLFVTINDWPALSNLSGQSNKGYKACTHCMDETESTYLKHCRKVVYMGHRRFLAANHPVRKKGKHFEHKADHRTNPKHRSGKTVFAMVKDLKVVFGKGPGSQHIESEDGHAAMWKKNSXFWELPYWEFLDVXYGKSKDTLEARNDLKHMEQRGDLHLEPKEKGSHYLSPASYTLSKAEKESMFECLESIKVPSGYSTNIKRIISTKEKKFINLKSHDCHVLMTQLLPVVIRGILPDNVRATITKLCAFMNAISQKVIDPDRLEALQNEVVQCLVSFELIFPPSFFNIMTHLLCHLVKEIRILGPMYLHNMFPFERYMGVLKKYVRNRARPEASIAKGYGTEEVIEFYVEFIEDLRPIGVPESRHEGRLRGKGTLGRKAIMTVDNNLFRKAHFTVLQHSSLVAPYIEEHLALVRARNIGKSDAWITRHHIDTFPAWLRQHLMGNESINQQLAFLARGPSGSIATFQGYEINGYTFYTRAQDMKSTNQNSAVRVDAMGHDGTTATYYGAIEDIWELDYGPLKVPLFRCQWVRLTGGGVMIDDSGMTTVDLNKVGYSDEPFVLANDVTQVFFVKDMSSKGKKGRGPDEPKRQVVLPGKRKIVGVEDKTDEHYDQLDGQPPFTVTIDPSILLSNEDTPYSRSDHKEGTIVRRKYVRSTVTADVMP

SEQ ID NO: 182931 - protein, 155 aa, Oryza sativa
  unsure (1)..(155): unsure at all Xaa locations
  Clone ID: PAT_MRT4530_8006C.1.pep
QPHPRERAADGRAPRSGHSARPKAATXARPAGGGARAPMVASGGHRHGGPAADRGEGKGEKRRRSTAHPRSTATTKKAAGAEEGSGAARVDGVDGVLAVGGLGEGVDGVDGGAAQPEEATPGRETVPASGEGQPEVVGDEGERGRRRELASGRET

SEQ ID NO: 182932 - protein, 352 aa, Oryza sativa
  Clone ID: PAT_MRT4530_80070C.1.pep
MREMGEKRRRGHLNPAGFAGGLHDHEEKKNEEHKLDMSGMSMDALPHLTMSLGQVTILDLSNNNLESIPESIIARLLNVVVLDVRSNQLKSLPNSIGCLSKLKVLNVSGNLLESLPNTIEECRALEELHANFNELTKLPDTLGFELHSLRKLSVNSNKLAQLPSSTSHMTALRALDARLNCLRALPDGLENLANLEALNVSQNFQFLRELPYAVGLLASLRELDVSYNSIAALPDSMGCLTKLARFSAVGNPLVSPPMDVVEQGLDAMRAYLTARMNGGDGKRKKKAWLPKLVKYSTFTARMTPGRTRVHENTEGLLMSDYRSLNGIASPRFLTMLSPRRLFSPRRNSPKHC

SEQ ID NO: 182933 - protein, 203 aa, Oryza sativa
  unsure (1)..(203): unsure at all Xaa locations
  Clone ID: PAT_MRT4530_80071C.1.pep
RQKRERIQREQQDRERVAKEAEDRRQRALEXAITLLDTLLKEDALNQADHVVNILNQTKTMIAASVPANSASTRTPTGXHDERSIHSPPERHRERRVERPRSPPHQRPVDLRDTIXSAVQHEPTGIEKYDGTTNPESWLTVYGLAIHAAGGDSKAMANYLLVALADSARSCLHGLPRGTIGSWVELRDHFIANFQGTFERPGT

SEQ ID NO: 182934 - protein, 1090 aa, Oryza sativa
  unsure (1)..(1090): unsure at all Xaa locations
  Clone ID: PAT_MRT4530_80072C.1.pep
MWRRRARLAIPTCLPAPGSRAIARRAMFCTLFCLQNLIMDRQWMYADRRSKEFIDGVHYFLRVAETNRQRGFIYCPCNKCKNQKKYSASRTIHFHLFESGFMPSYNCWTSHGEQGVEMEEDEVEDDNIPDFAQYVGFEGNQTGEDERDADGNDVADNLGQMLQDAKEDCESEKGAHKLDKMLEDHRTSLYPGCEQGHKKLDTTLEFLQWKAKNGVSDKAFGDLLKLVKNILPEGNKLPETTYEAKKIVCPLGLEVQKIHACPNDCILYRGEEYENLEACPVCKALRYKIRQDDSGEVDGQLTKKRIPAKVMNKGNARMMRWHAEERQQDGMLRHPADGSQWRNIDRKFKEFGKDARNIRFGLSTDGMNPFGEMSSGHSPWPVPMCIYTLPPCLCVKRKYIMMPIIIQGPKQPGNDIDVYLRSLVEDLKQLWKKEGVPVWDEDKQEEFNLRALLFVTINDWPALSNLFGQSNKGYKACTHYMDETESTYLKHYRKVVYMGHRRFLAANHPVRKKGKHFEHKADHRTKPKHRNGKTVFAMVKDLKVVFGKGPGSQPIESENGVYGKSKDTLEARNDLKHMEQRDDLHPEPKEKGSHYLSPASYTLSKAEKESMFECLESIKVPSGYSTNIKRIISTKEKKFTNXKSHDCHVLMTQLLPVVIRGILPDNVWATITKLCAFMNAISQKVIDPDRLEALQNDVVQCLVSFELIFPPLFFNIMTHLLCHLVKEISILGPVYLHNMFPFERYMGVLKKYVRNRARPEASIAKGYGTEEVIEFCVEFIEDLHPIGVPESRHEGRLRGKGTLGRKAIMTVDNNLFRKAHFTVLQKSSFVAPYIEEHLALVRARNIGKSDAWITWHDIDTFPAWLRQHLMGNESINQQLAFLARGPSGSIATFQGYEINGYTFYTRAQDMKSMNQNSVVRVDAMGHDGTTGTYYGTIEDIWELDYGPLKVPLFRCQWVRLTGGGVMIDDSGMTTVDLNKVGYSDEPFVLANDVTQVFFVKDMSSKGKKGRGPDEPKRHVVLPGKRKIVGVEDKTDEDYDQLDGQPPFTVTIDPSILLSNEDTPYSRSDHKEGTIVRRKYVRSTVTADVLP

SEQ ID NO: 182935 - protein, 1034 aa, Oryza sativa
  Clone ID: PAT_MRT4530_80073C.1.pep
MNRQWMYADQRSKEFIDGVHYFLRVAEANRQRGFICCPCNKCKNQKEYSASRTIHFHLFESGFMPSYNCWASHGEQGVEIEEDEVEDDNIPDFAQYVGFEENQTGEEEIAADGNDVADDLGQMLHDAKEDCESEKEAHKLDKMLEGHGTSLYLGCEQGHKKLDTTLEFLQWKAKYGVSDKAFGDLLKLVKNILPGGNKLPETTYEAKKIVYPLGLEVHKIHACPNDCILYRGEEYENLEACPVCKALRYKIRRDDLGEVDGQLTKKRIPAKVMWYFPIIPRLRRLFRNKGNARMLRWHAEERQQDGMLRHPADGSQWRNIDSKFKEFRKDARNIRFGPKQPGNDIDVYLRPLVKDLKQLWKKKGVPVWDEDKQEEFNLRALLLVIINDWPALSNLSGQSNKWYKACTHCMDETESMYLKHCRKVVYMGHRRFLAANHLVRKKGKHFEHKADHRTKPKHRSGKTVFAMVKNLKVVFGKGPESQPIESEDGHAAMWKKNSIFWELPYWEFLDVRHAIDVMHLTKNLCVNLLGFLGVYAKSKDTLEARNDLKHMEQRGDLHPEPKEKGSHYLSPASYTLSKAEKESMFECLESIKVPSGYSTNIKRIISMKEKKFTNLKSHDCHVLMTQLLPVVIRGILPDNVRATITKLCAFMNAISQKVIDPDRLEALQNEVIRILGPVYLHNMFPLERYMDVLKKYVRNGARPEASIAKGYGIEEVIEFCVEFIEDLRPIGVLESLHEGRLRGKGTLERKAIMRVDNNLFRKAHFTVLQHSSLVAPYIEEHLALVRARNIGKSDAWITRHHIDTFPTWLRQHLMGNESINQQLAFQARGPSGSIATFQGYEINGYTFYTRAQDMKSTNQNSVVLVDAMGHDGTTATYYGAIEDIWELDYGPLKVPLFRYQWVRLTGGGVMIDDSGMTTVDLNKVGYSDEPFILANDVTQVFFVKDMSSKGKKGRGPKEPKRQVVLPGKRKIVGVEDKTDEDYDQLDGQPPFTVMIDPSILLSNEDTPYSRSDHKEGTIVRRKYVRSTVTADVMP

SEQ ID NO: 182936 - protein, 970 aa, Oryza sativa
  Clone ID: PAT_MRT4530_80074C.1.pep
MGDMLKSVMRCKRAEWSGWSVPDLRCHHHLLEVTDLRYGGVRLPNRRRGSGRHGAGSGRLGGLVVIVVVGGCTVECRGAAAGGGAVPEQSSPRRSRRTPFLQLPRPGGRRGKGVACGGGGEEERRWVMGGAEGRSGDGPQVEWGGRMRRTSLGSSASQGLRAQWSGWSSSTVAALAGNLFLRRPRLASAGMLWPLHSARPALQLLLLHGFMPSYNCWTSHGEQGVEMEEDEVEDDNIPDFAQYVGFEGNQTGEEERDADGNDVADDLGQMLQDAKEDCESEKGAHKLDKMLEDHRTSLYPGCEQGHKKLDTTLEFLQWKAKNGVSDKAFGDLLKLVKNILPEGNKLPETTYEAKKIVCSLGLEVQKIHACPNDCILYRGEEYENLEACPVCKALRYKIRRDDPGEVDGQLTKKRIPAKVMWYFPIIPRLRCLFRNKGNARMMRWHAEERQQDGMLRHPADGSQWRNIDRKFKEFGKDARNIRFDLSTDGMNPFGEMSSGHSTWPVTMCIYNLPPWLCMKRKYIMMPIIIQGPKQPGNDIDVYLRPLVEDLKLLWKKEGVPVWDNDKQEEFNLRALLFVTSNDWPALSNLSGQSNKGYKACTHCMDETESTYLKHCRKVVYMGHRRFLVANHPVRKKGKHFEHKANHRTKPKHRSGKTVFAMVKDLKVVFGKGPGSQPIESEDGHAAMWKKNSIFWELPNWEFLDVRHAIDVMHLTKNLCVNLLGFLGVHGKSKDTLEARNDLKHMEERGDLQPEPKEKGSHYLSPASYTLSMAEKESMFECLESIKVPSGYPTNIKRIISTKEKKFTNLKSHDCHVLMTQLLPVVIRGILPDNVRATITKICAFMNAISQKRSVFSGLCTYTTCPFERYMGILKKYVRNRARPEASIAKGYGTEEVIEFCVEFIEDLRSIGVPESRHEGRLRGKGTLGRKAIMTVDNDLFRKAHFTVLQQSSLVAPYVEEHLALVRARNI

SEQ ID NO: 182937 - protein, 2550 aa, Oryza sativa
  unsure (1)..(2550): unsure at all Xaa locations
  Clone ID: PAT_MRT4530_80075C.1.pep
MAPPTVLNSGEPDARRRERPHVVFIPSAGMGHLLPFFRFIGALSSHDVDISVVTVLPTVSAAEADHFARLFHDFPSIRRVDFNLLPLDASEFPGADPFLLRWEALRRSMHLLAPAIAGVAPRATAVVTDVTLVSHVNPIAKDLRLQCHVLFISSVTMHWWRNHLSSMDRQWMYADRRSKEFIDGVHYFLRVAEANRKRGFICCPCNKCKNQKEYSASRTIHFHLFESGFMPSYNCWTSHGEQGVEMEEDEVEDDNIPDFAQFVGFEGNQTGEEEIAADGNDVADDLGQMLQDAREDCESEKEAHKLDKMLEDHRTSLYPGCEQGHKKLDTTLELLQWKAKNGVSDKAFGDLLKLVKNILPGGNKLPETTYEAKKIVCPLGLEVHKIHACPNDCILYRGEEYENLEACPVCKALRYKIRRDDPGEVDGQLTKKRIPAKVMWYFPIIPRLRRLFRNKGNARMLRWHAEERQQDGMLRHPADGSQWRNIDRKFKEFGKDARNIRFGLSTDGMNPFGEMSSGHSTWPVTMCIYNLPPWLCMKRKYIMMPIIIQGPKQPGNDIDVYLRPLVEDLKQLWKKEGVPVWDEDKQEEFNLRALLFVTINDWPALSNLSGQSNKGYKACTHCMDETESTYLKHCRKVVYMGHRRFLAANHPVRKKGKHFEHKADHRTKPKHRSGKTVFAMVKDLKVVFGKGPGSQHIESEDGHAAMWKKNSIFWELPYWEFLDVRHAIDVMHLTKNLCVNLLGFLGVYGKSKDTLEARNDLKHMEQRGDLHPEPKEKGSHYLSPASYTLSKAEKESMFECLESIKVPSGYSTNIKRIISTKEKKFTNLKSHDCHVLMTQLLPVVIRGILPDNVRATITKLCAFMNAISQKVIDPDRLDALQNEVVQCLVSFELIFPPSFFNIMTHLLCHLVKEIRILGPMYLHNMFPFERYMGVLKKYVRNRARPEASIAKGYGTEEVIEFCVEFIEDLRPIGVPESRHEGRLRGKGTLGRKAIMTVDNNLFRKAHFTVLQHSSLVAPYIEEHLALVRARNIGKSDVWITRHHIDTFPAWLRQHLMGNESINQQLAFLARGPSGSIATFQGYEINGYTFYTRAQDMKSTNQNSAVRVDAMGHDGTTATYYGAIEDIWELDYGPLKVPLFRCQWVRLTGGGVMIDDSGMTTVDLNKVGYSDEPFVLANDVTQVFFVKDMSSKGKKGRGPDEPKRQVVLPGKRKIVGVEDKTDEDYDQLDGQPPFTVTIDPSILLSNEDTXLLTQRSQGGNNSEEKMADRDEEQIXLLTEEGNVERDAEGNQQGHVERDVEGNQEEEASGSQPSVGQKRARGQRGAAKKLEGRHIITEVEEDGRPSAPAEAAKNYVRHSGWVVRDNVPVSTVYWRRTRARGDHESFVPDSEKEMLWTTMLETFTLPAGTEDKVKRWTLKKMAEQFQSFKGDLYKKYILKGQTPNFDTFPKLRDHWDEFVAYKTGEQGQAMMERNKENAAKKKYHHHLGSGGYSVAMPKWEEMEASLIERGIEPATANWPERSKFWYYAHGGTLNPADGSLVFGVQIREAAQRLTDAVEASSQGTFRPDRDRDELTLALQTPEHPGRTRGKGVIPWKIGFKEDIHTYRSRMRSKRDTEAKIADLEFRVSSYELNMQEEVARKVDERMAAHRSHDPQPTIPPAMVSPSGNRSSCASTGQVGSQSMDAMQTQDESTCPVDDITQRTPCELHIPFKNLSIKVASGMAIPTDPSGTYHCRPIPAGYSKVEVELVEGAYEDLELDYPGGDGETHLRDTSHAIILWRRRYIILPGRQAASRAPSPPAPPSPPHDPAPSPPHAPPAPSPPQAPASTPPQDPALTPPRAPTPTPPQAPLPAPSKSRAPPAAPPAHTRATKKAKVDADKNKDPGYDCTQEELDAYVASEVKRQFKPRSPEKKIPIDPSVRNFFRGMSASAKEAIKLSNYERTLKKASSGKSKPVPQLGEQPKQEIEPLVTGKEMTIEQFITDTGLTTDQLLGVAPIEKAEVKYMYELGKPLVKPELLQSLPTQMYKFHQLYMEMSAAGREMIGARIRDTDFLQGDDILWINFKGIYELYQLDALDVSIMSCWILMEIQRARRRRVFDTGFIDPRRVNVALLDQYPQETEDNLVHLLKAQHYKTFILLPYNTEFHWVLLLFDLEACTVNVYDSMDKKESTFDKVFELIDRAWYRFRHLVRGKWRERLRRKFKFPCAKQKQGNNLCGYYVCEYCHCLANQIITTRELDFIRMRDNLTTHKEFITAVQEQLMGFINEEILNPKGEFYYDGNTIHRNAQADVGDVDVPGVRHLQRSWLPQPLLDLDMLFTKQFIENGREVVKTDGVLINTFDALEPVALAALRDGTVVRGFPPVFAVGPYSSLASEKKAADADQSSALAWLDQQPARSVVYVAFGNRCTVSNDQLREIAAGLEASGCRFLWILKTTVVDRDEAAAGGVRDVLGDGFMERGPAAGVVLGWPGGGDPRGAATLLATSGVGVGMDQWSWDGREGLVTGEEIGGKVKEIMADDAVRERAAKVGEEAAKAVAEGGTSHTSMLEFVAKLKAA

SEQ ID NO: 182938 - protein, 136 aa, Oryza sativa
  Clone ID: PAT_MRT4530_80076C.1.pep
DAVVWLRRFSDGVNCDCQRLEGVLGMIPGAKRMIMGHTIQTEGINAVCGAQAVRVDVGLSRGCGNGLPEVLEINGGGTNVRVITTDPAEAWQYRKQGAEKAAIATAVKEKKGEVKEGLALLVRESHGLKEVQAKAV

SEQ ID NO: 182939 - protein, 418 aa, Oryza sativa
  Clone ID: PAT_MRT4530_80077C.1.pep
MDKMMRTVIAAVVVGLLAAAHTATTAPEQSYGGATATVAPKQPAAGEDVNKALAAETAAAEAEDAAEEEDAAAALVTGFTAGAANSAPGVTAVMKPRPEKADAGQFYQDVPWIPDPNDEGNPPKSLPAAQVLPAKGGAGAAGSSPPSKEVQVDYYATTQPKKPEEPPTVAAVQKDNCVPPAAPKPAVPATPSTSPPSNKEYAPAAPGVVPVNQPSSPAAPAGVVPAPVQPSSPAAPAGVVPAPVQPSSPATAVPKPPSNDPYAPATSNTPAAEEQKDGLNEKAISDIVREHNMFRTREHVPPIVWNATLAKYAQEYADLRRGDCQLEHSHGPYGENMMFGTGKQWTWKKTVDEWSDEKKSYDYKSNSCKAGAMCTHYTAIVWKNTTAVGCGRVVCTSGDTIMVCSYWPPGNYVGVKPY

SEQ ID NO: 182940 - protein, 145 aa, Oryza sativa
  unsure (1)..(145): unsure at all Xaa locations
  Clone ID: PAT_MRT4530_80078C.1.pep
FGRNPSEIKGVLNVELTVGSKTVPTTFFVIDGKGSYSLLLGRDWIHANCCIPSTMHQYLIQWQGNKIEIVPADRSVKVASADLALWEMDGIDXLSGKVWDGDFLKVSNCDIQPNQGHGXSANELEEIDIGPGDRPRQTFINKKLS

SEQ ID NO: 182941 - protein, 434 aa, Oryza sativa
  unsure (1)..(434): unsure at all Xaa locations
  Clone ID: PAT_MRT4530_80079C.1.pep
KRRGGIWIVEXSRMVKTVVGDEAQVKASEETLSASTSPAQVGLVVGKLSASSDRALAYSLIPTPPTDSGAPACSLLRAKPAAKAASSGASSSLDFDVDWLAEHARQVSRMLLGGMTVIGIYIWASEASFKATSPAVLSQVLRAVSQVAPLYGTGVDERLLIHISYSPRRWACRICDMSSGRLRPCDFKYSKLLASLQTFRCTYNFEISFSLCHYGSLMVNACTKECSLEGVAGLLLFAGSVSALAYLGPKESIAEVISDLKLDIITSLRSRLDIILDEADDDSTTNNLENSLSQKATQVVFHELRAPYSFPFPRRILIPWLAGSYICDYLQQSETMEDAMERCKEVMSLEADMGNYSIVEPESASAATLGSFWDVVPGALSKAPSEPGLKEMNSGQNGSRKTHGSSFSILMAFVVLLIAVLVGCIFTLSATLKT

SEQ ID NO: 182942 - protein, 252 aa, Oryza sativa
  unsure (1)..(252): unsure at all Xaa locations
  Clone ID: PAT_MRT4530_8007C.1.pep
MAMTPQLAFSRMPPGFRFQPTDEQLVVDYLQRRTAAQPCVTPDITDIDVYNVDPWQLPAMAMYGSDHDRYFFTMAAREAQARRTTPSGXWKPTGTKKTIFVVAGGHEVPTAVKRRFVFYLGHHQPSGSNNNNKTSWIMHEYRLMNSPRAAVPSSSSVNRLPTDDLTEEMVLCRISNKDLPKPPFIHNSLLQFSSVGLNGDGYNYLILDHLEPPAMEYPNVGIGNVDDAAAGTDDPGDLDEEIDDSMQRNHGG

SEQ ID NO: 182943 - protein, 617 aa, Oryza sativa
  Clone ID: PAT_MRT4530_80080C.1.pep
HAELEFGFLDGIWGRRSELGAQLEEEKKEQAREVKGEEEEGVFCSPYVLRWGERPRVGFGLKRHPSLVSTCSAHEANAAQVDPRERSREKQSGTRVLSLFSPPLSRNGLPLRCSPHRRRRFPTGNPSPPQKRREEKRRGGIWIVERMVKTVVGEEAQLKALEETLSASASPAQVGLVVGKLSASSDRALAYSLIPTPPTDSGAPACSLLRAAPNPKAAKAASSDASSSLDFDVDWVAEHARQVSRMLLGGMTVIGIYIWASEASFKATSPAVLSQVLRAVSQVAPLYGTGVDERLLIHISYSPRRWACRICDMSSGRLRPCDFKYTKLLASLQTFRCTYNFEIRLPVVQAEPFKKVISKAISHLTKQVQNAKALIDGVLFLDDMDNTLEGPHNVEFLVPFKNNLPAEECSLEGVAGLLLFAGSVSALAYLGPKESIAEVISDLKLDIITSLRSRLDIILDEADDDSTTNNLENSLSQKATQVVFHELRVPYSFPFPRRILIPWLAGSYICDYLQQSETTEDAMERCKEVMSLEADMGNYSIVEPESASAATLGSFWDVVPGALSKAPSEPGLKEMNSGQNGSRKTHGSSFSILMAFVVLLIAVLVGCIFTLSATLKT

SEQ ID NO: 182944 - protein, 44 aa, Oryza sativa
  unsure (1)..(44): unsure at all Xaa locations
  Clone ID: PAT_MRT4530_80081C.1.pep
HMLLYLLFNXFLWCLKWMFYFDLFAANATEQLCLKPKKKKKKKK

SEQ ID NO: 182945 - protein, 81 aa, Oryza sativa
  Clone ID: PAT_MRT4530_80082C.1.pep
RPGLKIHSRKMNLMRGIDLKKIAEKMNGASGAELKAVCTEAGMFALRERRVHVNQEDFLMAVAKVMKKDTEKNMSLRKLWK

SEQ ID NO: 182946 - protein, 363 aa, Oryza sativa
  unsure (1)..(363): unsure at all Xaa locations
  Clone ID: PAT_MRT4530_80083C.1.pep
LEARALLVREIEPMGRGAPAKPRKILWACGRTFSPWAPPPSSRRQIRPPPSSQRPNPAGGGHAPPPSTKPARPPRRPLTRAAQGVNPSPRRPLPSSPPSPPPXAPPEPRTPPPPRDWXPCPTPSSIPIPPPPPAPPFPPPICSPPPPPSSSPRPGPPRRPRWHYSSPSTSLPSSPPPPPPPGHVPSPSXAPPVPAAGPVIPXSRVASPAPPPPSATADGARPVEAAPAGAAPEEAARPFPYPXSRPRSPSPPAPPSCSPPGPPGSPRRPPPPGAGLLLPPPXSSADAPSPPSPSSISTSSSSLSPSPWRGPRCGLPAGKKPSPRSVQTSSGEPHMPPXSGSPSLSPPSSSSTRRSSPSTPSEP

SEQ ID NO: 182947 - protein, 531 aa, Oryza sativa
  Clone ID: PAT_MRT4530_80084C.1.pep
MVVVVVAAVLAVAAVVMNMMGGTSMGSNSPMYFCMILNHERFQFSEVLGQLHVASKENSVAGDKRWSKETMLQEVATDIYTSKHGRRMGWGKVDAVQRVEVSMVQHHTHKSTKVAHSRLIRLTPPPTGINGSGGLYSLRRIDLSRHPLFYPTPAAAAAAGPRDLRVQREEEYEFQWPKLNDDDERRRKKKMKRHEAVETLRQLPSIVSMAPSPPTPAGGFGFDCFPLAESESKVVFADHAGRAFLYDADGNRFTGMPSLHAPKGDSPVAVSIAAQGEEESKLYVMENTLRPESSGGGGGGSLFQFEVFDHRKPEPTSPPWEKYWHCDPLPPPPFVFDSGGMVESYAVIGHVIVVSVSDVGTYCFDTASRSWSRAGEWALPFAGKAEYVPELKLWFGIAAKGECSPCAADLSPVARGEPPSPGYIWEDLDLPEEWEPSWGSHLVVLGSGRFCIARFFQLARTDDNIMNDHVEDITFPVFTGLEVLPPAPATATGDGGGSGDHRKEGLRMIKHKSRRYAELDDDGIRSVKSVL

SEQ ID NO: 182948 - protein, 306 aa, Oryza sativa
  Clone ID: PAT_MRT4530_80085C.1.pep
HEGRIDVDSMRAVSMAATHRRHRRTDGRLQHNTVTVTEEAGATIPAANMLAAAASVKLSTAGTATAPKMALFKPLHLPPLFAAAAAAAGPRPLSLSARPLYRQQDPLFLASRVASPAPPPPSATADGARPVEAAPAGAAPEEAARRAKIGVYFATWWALNVIFNIYNKKVLNAVPLPVAHVHALPRRRLRHHARLLGHQDRRGARHRPRFLEGPVSGGDRAHHRARGGDGEHGEGGGVVHPHHQERRAGVQRARLQVLPRRALPGAGLLLPLRQKSQLRPHLNTCITLDLMSIKQENLIQQKANPC

SEQ ID NO: 182949 - protein, 83 aa, Oryza sativa
  unsure (1)..(83): unsure at all Xaa locations
  Clone ID: PAT_MRT4530_80086C.1.pep
METETKALTLLFAVLAKLGGETADETMLQEXEAVKLGGLAPAPAPTNAAATITPRAMTMTGTVSLLTYLAHRDDTLPLRGRNA

SEQ ID NO: 182950 - protein, 58 aa, Oryza sativa
  Clone ID: PAT_MRT4530_80087C.1.pep
KHCAPQNADLTCAYSRSITWSTSQVRETGTHLFFQCAYSRFITWSTSLSFYQMIVLAY

SEQ ID NO: 182951 - protein, 68 aa, Oryza sativa
  Clone ID: PAT_MRT4530_80088C.1.pep
GAPSMGPTFVAIMISCHKKTHLALKALVRPNAIVGTIKKPASTVAHPELILASKYVAEIVYASPNRPG

SEQ ID NO: 182952 - protein, 70 aa, Oryza sativa
  unsure (1)..(70): unsure at all Xaa locations
  Clone ID: PAT_MRT4530_80089C.1.pep
MASSSFSFLLVAALLGLGSWKAIASEPSPLQDFCVADVNSPPRTNGFXVLQNPMNAQWLRTVFQASHSAR

SEQ ID NO: 182953 - protein, 86 aa, Oryza sativa
  Clone ID: PAT_MRT4530_8008C.1.pep
KLLNQETTVNWKTRLELICLMQYMYARVCGCVEGEGEGEGEGGGDRKGNEHDTPASEERAATAPAALPLPEDWRNRSSCICAIGPN

SEQ ID NO: 182954 - protein, 284 aa, Oryza sativa
  Clone ID: PAT_MRT4530_80090C.1.pep
MESAPEKLKLLLGVLALQCCLAGFHIVSRAALNMGISKIVFTVYRNCIALALLIPFAYFLEKKNRPPLTFSLLAQLFFLAFCGITCNQGFYLLGLHYLSPTYASAIQNTVPAITFALAASLRLEQVNINKRYGMAKVIGTVTPVLKKYPARLSMLALTLAFGLVQFLAIAAFWENDIGKWRLHSGEELFTILYAIWCIDRGGALFTAIFQPVQTVMVAIMAAVILGDLLYTGGIIGAVLIVIGLYLVLWGKNEEKKSNSNQPDLSRHLLSEESSRPTTVTSDVP

SEQ ID NO: 182955 - protein, 172 aa, Oryza sativa
  unsure (1)..(172): unsure at all Xaa locations
  Clone ID: PAT_MRT4530_80091C.1.pep
TSITNPHRWRGNGILKDDQPRPARFPPSANRHIQHGAAYPADNHHNNQNTGLLSVTPPPHLPWAKMGFQNWALPHYRLCGXSILNCTLHTGATLVERSHTIRCKIHPVCAHTQPGWXLPNMRNGSSPSSXAPSLGGHPXTDSIFGXVPNLRXPPSNLTAVGPLXTXQATHDA

SEQ ID NO: 182956 - protein, 387 aa, Oryza sativa
  unsure (1)..(387): unsure at all Xaa locations
  Clone ID: PAT_MRT4530_80092C.1.pep
MARGSVPLEGSVLPPSRIVSERQAGLPRRFMPESATGREVVALGEGRLAPHYPGRSVFFLSFAMAGLVPPFSIFFMDILEFYDLQMAHLTPNAIMTLAIFAHLCEMFIGVRPSLRLFRWFFTVQPVSPPTVVGGCYFQPRGQVPNRYIPCVLRKKWDDWKSDWFYTPXLADEVRLRLPSQPPAQASSWRATVDLGDGYDAVLDRLAGLRSQGLTGAMVFGDYLRRRIAPLQRRARGAWEYTGPEDYMRTHQGRKWDWDPEDFRMVVQRVLNLSSVEASLIPQGVLPLCCDPERAKILTIMQVVGASGERAPRGHNGAGGSRRGEQSTPGGGRASGPRDGGPGGSRPADARGKRKQEGTPGDALPTPGRTARRCSITSLGTPGMSAGL

SEQ ID NO: 182957 - protein, 96 aa, Oryza sativa
  Clone ID: PAT_MRT4530_80093C.1.pep
MAHGGGRGRAEGGGGGRADDGIVGRTNGGDRSPPPVRGAVGRRWGDGRMQQEVSSSSYEGGPAAPASSSSSSAEDVVDVHSEDEGRQGHVKGGSTH

SEQ ID NO: 182958 - protein, 858 aa, Oryza sativa
  Clone ID: PAT_MRT4530_80094C.1.pep
MAQGSAPLDGSVLPPSRIVSERQAGLPRRFMPESATGREVVELGEGRPAPHYPGRSVFFLSFAMAGLVPPFSSFFMDVLEFYDLQMAHLTPNAVMTLAIFAHLCEMFIGVRPSLRLFRWFFTVQPDVTYFQPRGPVLSRYIPCVLRKKWDDWKSDWCYTTLADEARLRLPSQPPAQASNWRAPVDLGDGYDAVLDRLAGLRSQGLTGAMVYGDYLRRRIAPLQRRARGAWEYTGSEDYMRTHQGGRWDWAPEDFKMVVQRVLNLSSVEASLIPQGVLPLCSDPDRANILTIMQAVGASEERAPRGHDGAGGSRRGKQSTPGGGHASGPRDGGPGGSRPADARGKRKQEGTPPPSPPRGGGAVRASSKRPEGAVPTPQPEGERKKKRLRKMGGTEPCRGNLISPPRWSFSRPPRSEIPSRPSRHSKSGRSEAEETATAEARRREADRQEAADRLREAEEAAQEAVRVRQAEEAAREEARLRRAEESVREAEALAAANTTVLDGLSAQMEVLQAERAELDAAWARVEEGRRSVEAMVEAGRKAHHRHASELEAHRRNLAEIAREVEEERETALIATAVLDEVRDDLHLQYGSRAAELEKKLDAARGILDAAAARERRAAEIEAASRKREEALEARATALEERARAKERDLADREAAVAIREATLAAHEAACAEEESALRLREDALAERERALKEAEAAAQRLADSLFLRETAQEEQARRNLEGARAERAALDQRAAELEARAKELDARAHSGGAAAGHGDLVARLAAAEHTIAEMQGALDSSAGEVEALRLANKVGPGMLRDAVSRLDRAGRQAGLWGERTANFEGTTPRLAFALDADEEGGDDGADDNDDEAGDPGASE

SEQ ID NO: 182959 - protein, 77 aa, Oryza sativa
  Clone ID: PAT_MRT4530_80095C.1.pep
HRKSHNDRSNEKKKSPEEQYNSNPHLTKHCKNQIATSERVYVWLWSRTLTVHRHVHDCFSKCSNCMLSSRVYPFLAQ

SEQ ID NO: 182960 - protein, 1843 aa, Oryza sativa
  unsure (1)..(1843): unsure at all Xaa locations
  Clone ID: PAT_MRT4530_80096C.1.pep
MGFVSSIDDFVFPPGQAFQFGSLDFITNDFGKISLLDSDSNQSGRGQVSAPFGIPNSAEIYPKIISTELAPNHSDEIQSTPTRSDQGDGAYPPILMKLPDDLAAVFTTRVSSPRRSRLDPAPAPIQSSSREVGVILXPLGTVSMEQLDGYLSSPGVDSRPTEIVEYDDFGYRYDHHKLDNFNEGFEDNYTPLYFGIFRTDNETEEQRQAREAEEQRVRQEAERRRLEEERQAQERERLQREQQEHERAAKEAEDQXQRALEAGRRARELIGQQDVDGTAVFRTPQQNADAAITLLETXLKEDALNQANHVVNILNQTKTMIAASVPVNSASVRTPTGNRVPPLRSQDYHQPSISVVSVGSSRRSRDHDERSAHSPPDRRRERRAERPRSPHRRRPIDLRDTINQRRATRSYVPHHSPDRYDDDMDGVAAFTSDMRRVDWPVGFKPTGIENYDGTTNPESXLTVYSLAICAEGGDSKAMANYLPMALADSTRQRSRVNTFDKIMNSQCLHHPNSNHTAKDCFVYKQFAQXYAKNARKTTDGDQSTSKKKDDEDDAPTGFQDHRKEFNHIFGGPLAYESKRKQKLTEREINAVQPDTPQYLQWSETAIKFDRSNHPDRVVHPGRYRLVLDPVVRNVKLRRSLINGGSALNILFAKTLDDIQIPRTELKPSNAPFHGVIPGLSSTRLGQITLPDTFDTWENFRTENICFEVADFETVYHVIFGRPALAKFMVVPHYTYMMMKMPGPRGVISLRSDIKQAVTCDKESCEMAQTREITLAREKIRLAASTATEXEVPATKMTKSGEGDAKTKKIPLDPSDPTKTVNNNDIFAWKPSDMPGIPXREVIEHSLHVKEDAKPIKQRLHHFAQDRKDAIKEELTKLLAAGFIKEVLHPDWLANPVLVRKKTGXWRMCVDXKSCPKDPFGLPHIYQVVDSTAGCELLSFLDCYSGYHQIRLKESDCLKTSFITPFGAYCYITMPFGLKNAXATYQHMIQRCFXSTQIGRNVEAYVDDVVVKTKXKDDLITDLEETFASIRAFRMKLNPEKCIFGVPSGKFLGFMVSHRGIQANLEKINAILNMKPPSSQKDVQKLTGCMAALSQFVSRLGERGMPFFKLLKKTDNFQWGPEAQKAFEDFKKFLTTPPVLASPHPQEPLLLYVSATSQVVSTVLVVEREEEGHIQKVQRPIYFVSEVLADSKTRYPQVQKLLYGVLITVRKLSHYFQGHSVTVVTSFPSXDILHNREENGRIAKWALELMSFDLSFKPRTSIKSQALADFIAEWTECQEDMPAEKMEYWTMHXAGVVLISPTRERLSYVLWIHFSTSRNVAEYEALLHGLRLAISLGIRRLIVRGDSKLVVNQVMKXWSCLDDNMTAYRXEVRKLEDKFDGLELTHVLRYNNEAADRLVNFGSKREAAPPDVFVEHLYEPTVPREEINEATDARDVSMIEANWRESFIRFLTKQELPQDKDEANRISRRSRHYVVHETELYKKSPSGILQRCVSLEEGRQLLKDIHSGICGNHAAARTIVGKAYWQGFFWPTAVSDADKIVQTCEGYQFFAXRTHLPAQELQTIPLSWPFAVWGLDMVGLFKKAVGGYTHLFVAVDKFSKWIEAKPVIIITVDKARDFFINIVHRFGVPNRIITDNGTQFTSGVFKDFFQDFGIKICYASVAHPMSNGQVERANGIVLQGIKAQVFDRLHPYAGKWVEQLPFVLWSLRTTPSRAMGQSPFFLVYGAEVMLPSEVEFESLQFRNFSEERYEEDQIDDHNWLEKAREAALIQSARYLQGLRHYHNRNVRSRAFLVGDLVLRKIQTTRKGPFIVSEVTQPGSYRLKREDGTHIDNSWNIEHLRRFYA

SEQ ID NO: 182961 - protein, 53 aa, Oryza sativa
  Clone ID: PAT_MRT4530_80097C.1.pep
MSSGPLQPPATFSGGHMPTMGGPSSVPPPIVQSWGTAPGQNVPLVQPGHQPMS

SEQ ID NO: 182962 - protein, 640 aa, Oryza sativa
  unsure (1)..(640): unsure at all Xaa locations
  Clone ID: PAT_MRT4530_80098C.1.pep
MGFVSGIDDFVFPPGQAFRFGSLDFITNDFGKISLLDSDSNQSGRGQVPAPFGIPKSAGIYPKIISAELAPNHSDEIQSTPTRPDQDDGAYPLILMKLRDDLAAVFTKRASSPRRSRRDPAPSPIQSSSREVGVILQPLGTVSTEQLDGYLSSPSVDSRLTEIVEYDDFGYRYDYRNLDDFDEGYEDNYTPLYFGIFMANNETEEQCQARQAEEQRNAVAAITLLDTLLKGDALNQANHVVNILNKTKTMIAASVPISDIIDDVIITAFTKGIRHDLLVGKFGRKPPRIVKQMFEKANEYAKAEDAVTASKQSGTTWKPKKDTPTTGGXGSTNHKDRKLXEQYAKNSRKTTNGDQSTSKKKDDEDDAPTGFQDHRKELNHIFGGPLAYESKRKQKLIEREINAVQPDTPQYLRWSETAIKFDHSDHPDRVVYPGRYPLVLDPVVRNVKLRRSLIDGGSALNILFAKMLDDMQIPRTELKPSNAPFHGVIPGLSSTPLSQITLPVAFGTRENFRTENICFEVVDFETAYHAILGRPALAKFMAVPYYTYMMMKMPGPRGVISLRSDIKQAVTCDKESCEMAQTREITLAREEIRLAASTATEGEVPATKMTKSGESNAKTKKIPLDPSDPTKTVVIGAELV

SEQ ID NO: 182963 - protein, 1608 aa, Oryza sativa
  unsure (1)..(1608): unsure at all Xaa locations
  Clone ID: PAT_MRT4530_80099C.1.pep
YLVSPGSTPTPILFSSPNPLFCLSFSSCRFPTSRPRAPPEGVCSHGPSGLPSSGGGKGNGVAIAGANPWYSGDGSDGSNTTSNSERTVTAEFGIIVHPGGYGDQEVDSRTANHHEADSETDSERTEGASFGKIVGVASSSSPISAISSVSGIDDFVFPPGQAFRFGGLDFITNDFGKISLLDSDPNQSGKNQVSAPFGIPNSAKIYSKLISIKSASNHSDEIPSTPTSPDQDDGAYPPILMKLPDDLAAVFTTRASSPRRPRRKSASTPIMPSSREVGVILQPLGTISTDQLEGYLSSPGVDSRPTEIVEYDEFGYRYDNRDLDDFDESFEDNYTPLFFGVFMADNEMEEQRQAREADARRXSRKLSDADWKRSAKHKSKNGCGENNKIANGLQRRPRTDNNEPWTQDDERSAELNGLVPXPCQRPIDLRDTINQCRATRGHRRTPDRYDDDVDGVAAFTNDMRRVDWPAGFKPTGIEKYDGTTNPESWLTVYGLAIRVAGGDSKAMANYLPVVLADSAWSWLHGLPRGTIGSWAELHDNFIANFQGTFERPGTQFDPYNVIQKSRESLRDYIRHFSEQRNKISDITDDVIITAFTKGICHEELVGKFGRKLPRTVKQMFEKANEYARAEDAIAASKQSGPTWKPKKDVPTTGGGGSNNHKDRKRKPKELVATTTHFSRQRSRVNTFDKIMNSQCPHHPNSXHAAKDCFVYKQFAEQYAKNAQKTSDGGQSXFQDHRKELNHIFGGPLAYESKRKQKLTEWEINVVQTDTPQYLWWSEITIKFDRSDHPDRVVHPGRYPLITLPVTFGTRENFRTENICFEVADFETAYHAILGRPVLAKFMAVPHYTYMMMKMPGPRGVISLRSDIKQAVTCDKESCEMAQTREIAIAREDIRLAATTASEGEVPMAKISKSGESEAKTKKIPLDPSDLTKTAVIGAEKDAIKEELTKLLAAGFIKEVLHPDWLANPVLVRKKTGQWRMCVDYTDLNKSCPKDPFGLPHIDQVVDSTAGCELLNFLDCYSGYHQIRLKESDCLKTSFITPFGAYCYITMTFGLKNAGATYQRMIQRCFTTQIGRNVEAYVDDVVVKTKQKDDLITDLEETFASIRAFRMKLNPEKCTFGVPSGKLLGFMVSHRGIQANPEKVNAILNMKPPSSQKDVQKLTGCMAALSRFVSRLGERGMTFFKLLKKTDNFQCGPEAQKAFEDFKKLLTXPPVLASPHPQEPLLLYISATSQVTRTSIKSQXLADFVAEWTECQEDTPEEKMEYWTMHFDGSKRLSGTGARVVLISPTGERLSYVLWIHFSASHNVAEYEALLHGLRIAISLGIRRLIVRGDSQLVVNLKEWSCLDGNMIAYRQEIEAKPVITITVDKARDFFINIVHRFGVPHRIITDNGTQFTGGVFKDFCEDFGIKICYASVAHPMSNGQVERANGMRLQGIKARVFDRLNPYAGKWVEQLPSVLWSLRTTPSRATGQSPFFLVYGAEAMLPSEVEFESLRFRNFCEERYGDDRVDDLHRLEEAREAALIQSARYLQGLHHYHNRNVRSRAFLVGDLVLRKIQTTRDRHKLSPLWEGPFIISEVTRPGSYRLKREDGTPIDNSWNIEHLRRFYA

SEQ ID NO: 182964 - protein, 325 aa, Oryza sativa
  Clone ID: PAT_MRT4530_8009C.1.pep
MAASAAAADGAADGEKMILLISSDGAKFELSEAAASLSKTLGNMIEDDCATNGAIPLANVASDILAKVVEYCNKHAAATATATAAANASGQEELIRKFDAEFVNIDRKKLFGLINAANFLNMPCLLELTCQRTADLIKDMMPEQVREVFGIENDFTPEEEAEVRNENAWAYEIPAQSAAARARPLPLTAVAVAREGRRRVRRRVAVLVRPFVAAEDRRSVIAAVDPKVPAASSLSPSPSVGLPPPFWSPVSSPCRPLRLGALRLRPSAAVRRRACAARAVQAAEPPPPSVTSLPTSSGPFVVSRRGPDRSRPSILDWFDLGRPFA

SEQ ID NO: 182965 - protein, 48 aa, Oryza sativa
  Clone ID: PAT_MRT4530_800C.1.pep
LNSRQLNRGEVTLLLYIQRGTAYVYTYLATVAASRTLGQEQRTGNRHR

SEQ ID NO: 182966 - protein, 525 aa, Oryza sativa
  Clone ID: PAT_MRT4530_80100C.1.pep
MGHTNLHSVGSRCNVEARLFADDMTGELARRLRLGTSAWRLSSIRRDGARRVTGHLPPPNPRSDRSVTGHTLRPVTDRISERAELHYMRRDALIQPAIYAVSSFSAGVMARGSAPLDGSVLPPSRIVSERQAGLPRRFMPASAAGREVVELGEGRPAPHYPRRSVFFLPFAMAGLVPPFSSFFMDVLEFYDLQMAHLTPNAIMTLAIFAHLCEMFIEVHPSLRLSRWFFTVQPVSPPSVVGGCYFQPRGPALSRYIPCVLRKKWDDWKSDWFYTPLADEARLQLPSQPPAQEKQTRRNLEGASAERAALDQRAAELEARARELDARARSGGAATGDGDLAARLAAAEHTIAELQGALDSSAGEVEALRLAGEVGPGMLRDAVSRLDRAGRQAGLWGGRIAKYAANQGGLAQRLSEMAGTLQRLPEELEETIKSSSRDLARGAVELVLASYQARDPDFSPWAALDEFPPGTEDDARAQVRDAADHIVHSFEGTAPRLAFALDSDVEGGDGGVDDSNDEAGDPGASK

SEQ ID NO: 182967 - protein, 115 aa, Oryza sativa
  unsure (1)..(115): unsure at all Xaa locations
  Clone ID: PAT_MRT4530_80101C.1.pep
MDMASPMLSARAPCSLQGGGLVRSSPDLRSSCPLPVQRNASXHDLMNTASLRTHTRGTSGGARSCPTRSTLHAGIKAFGQLGRTFLQGCNGRGDRYHMDVIDINDTGGAKQAWHL

SEQ ID NO: 182968 - protein, 144 aa, Oryza sativa
  unsure (1)..(144): unsure at all Xaa locations
  Clone ID: PAT_MRT4530_80102C.1.pep
DTHPTVQALIYVRLNRIEALVNGTKPTVGVTLAXGPMERTKIYFXHLPLXALPLSRETDPILEYYSSSPXXASSPLTPGGDGASSCRLVVMVAAPPLAXFPSLSIPXRASFSFXATTPTGSXAEEAFPXAAAGAGGRSSXRGNA

SEQ ID NO: 182969 - protein, 101 aa, Oryza sativa
  unsure (1)..(101): unsure at all Xaa locations
  Clone ID: PAT_MRT4530_80103C.1.pep
TETGIFIQVXAPERSVDNRVAFHLESVPGEIRDSAFISPDSIRRHRRVLAVFIPEVDIRRRVLAYVGFYVVASMSIVLGCFRIGHGMWWILPRFSQLLLDM

SEQ ID NO: 182970 - protein, 71 aa, Oryza sativa
  unsure (1)..(71): unsure at all Xaa locations
  Clone ID: PAT_MRT4530_80104C.1.pep
RFSEQRNKISDITDDVIIAAFTKGIRHEDXSKQSGTTXKPKKDTPTAGESGSNNHKDRKRKPEELVATTSP

SEQ ID NO: 182971 - protein, 1394 aa, Oryza sativa
  Clone ID: PAT_MRT4530_80105C.1.pep
MACCCCCHDLLLAAAAAICFLLLLGLLLAAAACGDYGYPIPTRHAFRFGGLDFITNDFGKISLLDSDSNQSGRGQISAPFGIPNSAEVYSKIISPELASNHSDEIQSTPTRPDQDDGSYPPILMRLPDDLAAVFMTKASPIRRPRRDSALAQIQSSSKEILEYDDFGYHYDYGNFNGFDDGYEDDYTPLFFGVFMADNETAEQRRAREAEEERTRQEAERRRLEEERQQQERERLQREQQDRERVAKEVEDRRQRALESGRRARDLIGQQDVDGTAVFRTPQQNAVAVITLLDTLLKEDALNQADHVVNILNQTKTMIAASIPANSASTRTPTGSRVLPLRSQDYHQPSLSVVGAGSNRRSRGHDERSVHSPPERHRERRVERPRRHPIDLHDTINQRRAARGYAPHRSPDCYDDDVDGVATFTADLRRGTFERPGTQFDLSNVVQKSRESLRDYIRRFSEQRNKISDITDDVIIAAFTKGIHHEDLVGKFGRKPPRTVKQMFEKANEYAKAEDAISTSKQSSTTWKPKKDTPTTGGSGSTHHKDRKRKPEELVATTAPTSRQRSRVNTFDKIMNSQCPHHPNSNHAAKDCFVYKQFAEQYAKNTRKGTDGDQSTSKKKDDEDVAPTDFQDHRKEFNHIFGGPLAYESKRKQNLTEREINAVQPDMPQYLRWSETTIKFDRSDHPDRVVHLGRYPLVADFETAYHAILGRPALAKFMVVPYYTYMMMKMSGPQGVISLRSDIKQAVTCDKESCEMAQTREIALSREEIRLAASTVGEGEVPATKMPKSGESDAKTKKIPLDPSDPTKTADRKDAIKEELTKLLAAGFIKEVLHPDWLANPVLVRKKTGQWRMCVDYTDLNKSCPKDPFGLPRIDQIDRNVEAYVDDVVVKTKQKDGLIADLEETFASIRAFRMKLNPEKCIFGVPLGKLLGFMWGPEAQKAFEDFKKLLTTPPILASPYLQEPLLLYVSATSQVVSTVLVVEHEEEGHVQKVQRPIYFVSEVLADSKTRYPQVQKLLYGILITVRKLSHYFQGHSVTVVTSFPLGDILRNREANGRIAKWALELMSLDISFKPRTSIKSQALADFVAKWTECQEDMPEEKMEYWTMHFDGSKRLSGTGAGVVLISLTGERLSYDRDLFGHSASDRPWNSQLVVNQVMKEWSCLDDNMTAYRQKVRKLEDKFDGLELTHVLQHNNEAADRLANFGSKREAAPSDVFVEHLYEPTVPRKEIIEAADTQDELQTIPLSWPFAVWGLDMVGPFKKAVGGYTHHFVAVDKFSKWIEAKPVITITTDKARDFFINIVHRFRVPNRIITDNGTQFTGGVFKDFCEDFGIKICYASVAHPMSNGQVERANGMVLQGIKARVFDRLCPYAGKWVEQLPSVLWSLRTTRSRATG

SEQ ID NO: 182972 - protein, 2001 aa, Oryza sativa
  unsure (1)..(2001): unsure at all Xaa locations
  Clone ID: PAT_MRT4530_80106C.1.pep
MGFVSGIDDFVFPSGXAFRFGSLDFITNDFGKISLLDSDPNQSGRGQVSAPFGVPNSAEIYPKIISIESASIHSDEIQSTPTRPDQDDGSYPSILMRLPDDLAAVFTTKAFPTRRPRWDPASAPIRSSSREVGVILQPLGTVSTEELDSYLSSLGVSSRPTEILEYDDFGYRYDYTNFDESYEDNYTPLFFGVFMADNETAEQRRAREAEEERTRQEAERRRLEEERQRQEQERLQREQQDRERAAKEAEDQRQRALEPGRLARELIGQDDVDGTTVFRAPQQNAVVAITLLDTLLTEDALNQADHVVNILNXTKTMIAASVPANCASTRTPTGSRVPPLRSQDYHQPSLNVVAEGSNRRSRDHGERSVHSPPDRHRERQAERPRSPHRRRPIDLRETINQRRAARGHNPHHSPDRSDDNVDGVAAFTNDLRXVDWPAGFKPLXIEKYDGTTNPESWLTVYGLAIHAAGGDSKAMANYLPVALADSARSWLHGLPRGTIGSWAELRDHFIANFQGTFERPGTQFDLYNVIQKSGESLQDYIRRFSEQRNKISDITDDVIIAAFTKGICHEDLVGKFGRKPPKTVKQMFEKANEYAKAEDAITASKQSGTTWKPKKDTPTTGGSGSTNHKDRKRKPEELVATTTPSSRQRSRVNTFDNIMNSPCPHHPNSNHAAKDCFVYKQFAEQYAKNARKASDGDQSTSKKKDDEDDAPTGFQDHRKELNHIFGGPLAYESKRKQKLTEREINAVQPDTPQYLWWSETTIKFDHSDHPDRVVHPGRYPLVLDPVVRNVKLRRSLIDGGSALNILFAKTLDDMQIPRTELKLSNAPFHRVIPGLSATPLGQITLPVTFGTRENFRTENICFEVADFETAYHVILGRPALAKFMAVPHYTYMMMKMPGPRGVISLRSDIKQAVTCDKESCEMAHTREITLAREEIRLAASTASEGEVPATKTPKTGESDAKTKKISLDPSDPTKTANNKDIFAWKPSDMPGIPREVIEHSLHVKEDAKPIKQRLRRFAQDRKDAIKEKLTKLLAAGFIKEVLHPDWLANPVLVRKKTGQWRMSVDYTDLNKSCPKDPFGLPHIDQVVDSTADCELLSFLDCYSGYHQIRLKESDCLKTSFITPFGAYCYITMPFGLKNAGATYQRMIQRCFSTQIGRNVEAYVDDVVVKTKXKDDLIADLEETFASIRAFKMKLNPEKCIFGVPSEKLLGFMVSHRGIQANPEKINAILNMKPPSSXKGVQKLTGCMVALSRFVSQLGERGMPFFKLLKKTDNFQWGPEAQKAFEDFKKLLTTPPVLASPHSQEPLLLXVSTTSXVVSTILVVERVEEGHVQKVQRPIYFVSKVLADSKTRYPQVQKLLYGVLITVRKLSHYFQGHSVTVVTSFPLGDILHNHEANGRIAKWALELMSLDISLKPRTSIKSQALADFVVEWTECQEGVPVEKMEYWTMHFDGSKRLSGTGAGVVLISPTGERLSYILWIYFSTSHNMAEYEALLHGLRIAISLGIRHLIVCVDFQLVVNQVMKEWSCLDDNMTAYRQEVRKLEDKFDGLELTHVLRHNNEAADRLANFGSKREAAPFDVFVEHLYEPTVPRKEIIEATVTQDVSMIEADWREPLIRFLPKQELPQDKDEAERISRHSRHYVIHETELYIKSPSGILQRCVSLEEGRQFLKDIHLGICGNHAAARTIVGKAYQQGFFWPTAVSDADKIVRTCEGCQFFARQTHLPAQELQTIPLSWPFVVRGLDMVGPFKKAVGRYTHLFVAVDKFSEWIEAKPVITITVDKARDFFINIVHRFRVPNRIITDNGTQFTGGVFKDFCEDFGIKICYVSVAHPMSNGQVERANGMILQGIKARVFDRLHPYAGKWVEQLPSVLWSMRTTPSRATGQSPFFLLYGAEAMLLFFRVDDLNRLEEVREAALIQSARYLQGMRRYHNRNVRSRAFLVGDLVLRKIQTTRDWHKLSPLWEGPFIISEVTRQGSYRLKREDGTNIDNSWNIEHLRHFYA

SEQ ID NO: 182973 - protein, 490 aa, Oryza sativa
  Clone ID: PAT_MRT4530_80107C.1.pep
MMDLADPNHRLIAGAALLVATLAFIKLLLSSAGGGKKRLPPTIPAAPLVGGLLRFMRGPIPMIREEYARLGSVFTVPILSRKITFLIGPEVSAHFFKGNEAEMSQQEVYKFNVPTFGPGVVFDVDYSVRQEQFRFFTEALRANKLRSYVDQMVVEAEEYFSKWGESGTVDLKYELEHLIILTASRCLLGREVREKLFDDVSSLFHDLDNGMQPVSVIFPYLPIPAHRRRDRARQRLKEIFATIIKSRKASGRAEEDMLQCFIDSKYKSGRSTTEGEITGLLIAALFAGQHTSSITSTWTGAYMLRFKQYFAAAEEEQKEVMKRHGDKIDHDILAEMDVLYRCIKEALRLHPPLIMLLRQSHNDFSVTTKDGKEFDIPKGHIVATSPAFANRLPHIFKNPDSYDPDRYAPGREEDKAAGAFSYISFGGGRHGCLGEPFAYLQIKAIWTHLLRNFEFELVSPFPETNWKAMVVGIKDEVMVNFKRRKLVVDN

SEQ ID NO: 182974 - protein, 141 aa, Oryza sativa
  Clone ID: PAT_MRT4530_80108C.1.pep
PAVPCHIYRSTKKHTNPPVSLTGQLLWRDFFYTVAFGTPNFDQMKGNKICKQIPWTENEELFPAWRDGRTGYPWIDAIMIQLRKWGWMHHLARHSVACFLTRGDLFIHWEKGRDVFERLLIDSDWAINNGNWMGLFWSSFF

SEQ ID NO: 182975 - protein, 1357 aa, Oryza sativa
  Clone ID: PAT_MRT4530_80109C.1.pep
MPAEGGGHGKLTGARGKAGSGSADFDDGGVDGVAVGLANPTAATGRLGGGSSGGERRPEVAKGEPYKRSSCKNEGYLDERAIGKRGGHKNCIWAVHFQPISGKVGEASSSRRLSAMGFVSGIDDFAFPPGQAFRIGSLNFITNDFGKISLLDSDSNQSGRDQSRSREVGVILQPLGTVSTEELDGYLSSPGVSSRTTEILDYDDFGYHYDHGDFDNFDDSYEDNYTPLFFGVFMADNETEEQRRAREADQDRARQEAERRRLEEERQRQERERLQREQQDRERIPKEAKDLRHRALESGRRARELIGQQDVDGIATKTMIAASVPANSASTRTPTGSRVPHHQPSLSVTGTGSSCRSRGHDERYVHSLPELHRERRAERPRSPPCQRPVDLRDMINQRRAARGHHHSPNRYNDDVDGVVAFTNDLRRVDWPVGFKPTGIEKYDGTTNPESWLTVYGLAICTAGGDSRAMANYLPVALADSARSWLHGLPRGTFGSWAELRDHFIANFQGIFERPGTQFDLYNVVQKSGESLRDYIRRFSEQRNKISDITDDVIIAAFTKGIRHEDLVGKFGRKPPRTVKQMFEKANEYAKAEDAITASKQSGTTWKPKKDTPTAGGSGSNNHKDRKHGDQGTSKKKDDEDDAPTGFQDHRKELNHIFGRPLAYESKRKQKLTEREINAVQPNTPQYLRWSETVIKFDRSDHPDRVVHPGRYPLVLDPVVRNVKLRRTLIDGGSALNILFAKTLDDMQIPRTELKPSNAPFHGVIPGLSATPLGQITLLVTFGTRENFRTENVYFEVANFETAYHAILGRPALAKFMAVPHYTYMMMKMSGPRGVISLRSDIKQAVTCDKESCEMAQTHETTLTREEIRLAVTTANEGEVPATKLTKTEESDAKTKKIPLDPSDPDKTANNKDIFAWKPSDMPGIPREVIEHSLHVKEDAKPIMQRLRPFAQDRKDAIKEELTKLLAAGFIKEVLHPDWLANPVLDRKKTGQWRMCVDYTDLNKSCPKDPFGLPRIDQISRNVEAYVDDVVVKSKRKDDLIADLEETFTSIRAFKMKLNTEKCIFEVPSGKLLGFMVSQRGIQANPEKINAILNMKPPSSQKDVQKLTGCMAALSRKLSHYFQSHSVMVVTSFPLEDILHNREANGRIAKWALELMSLDISFKPRTSIKSQALADLLAEWTECQEDMPEEKMEYWTMHFDRSKRLTGTGAGVVLISPTVERLSYVLWIHFSASHNVAEYEALLHGIRIAISLGIRRLIVHGDSQLIVNQVMKEWSCLDDNMTAYRQEVRKLEDKFDGLELTHVLRHNNEAADRLANFGSKREAAPSDVFVEHLYEPTVPRKEAVEAMDTQGISMLEAD

SEQ ID NO: 182976 - protein, 197 aa, Oryza sativa
  unsure (1)..(197): unsure at all Xaa locations
  Clone ID: PAT_MRT4530_8010C.1.pep
MAMTPQLAFSRMPPGFRFQPTDEQLVVDYLQRRTAAQPCVTPDITDIDVYNVDPWQLPAMAMYGSDHDRYFFTMAAREAQARRTTPSGFWKPTGQRKISSXRRGHECPPRQKEFVFYLGHHQPSGSNNNNKTSWIMHEYRLMNSPRAAVPSSSSVNRLPTDDLTEEMVLCRISNKDLPKPPFHPQQLVAVLFSGVEW

SEQ ID NO: 182977 - protein, 30 aa, Oryza sativa
  Clone ID: PAT_MRT4530_80110C.1.pep
TAMFLCLVSNVIYLLTFPQHNFNAFIVLSV

SEQ ID NO: 182978 - protein, 58 aa, Oryza sativa
  Clone ID: PAT_MRT4530_80111C.1.pep
LIGTQTRCQHSRLSGLLAMTLAFPDQTSATEPSEHTTTRSNNNRNTREQYLQRPIQVT

SEQ ID NO: 182979 - protein, 121 aa, Oryza sativa
  unsure (1)..(121): unsure at all Xaa locations
  Clone ID: PAT_MRT4530_80112C.1.pep
KKGPKKGGGPPGGLGPPPPQGWPPXRKGVHLPGAPRRGGKPRQIAPPKKGAQGPSQKGGMGWGPPPPPKPGGPQGVLRGRGPFGGAXGKRKPPPPQVPAIVLRQGAGPSFAQRGKSPSLPL

SEQ ID NO: 182980 - protein, 993 aa, Oryza sativa
  Clone ID: PAT_MRT4530_80113C.1.pep
MLGGGLGGGGGGGGAGGLGLDLSAVIQAAVVGLVLFSAAVVAVRRAASSSQGCQSKHWQSGHKFKCKQMKKSSPADKLSGGGEEDRNKLSGFGPISLVPARRKLNKVIFPYDEFLKLCNWRDLDYLPCGLLNCGNSCFANVVLQCLSCTRPLAAYLLGMDHSRECYKRHEDWCFLCELQCHIQRASESMHPFAPKNILSHLPNIGGNLGFGRQEDAHEFMRFAIDKMQSACLDEFGGEKAVDPSTQETTLIQHIFGGRLQSQVQCTACGMVSNRYENMMDLTVEIHGDADSLEECLDKFTAVEWLDGDNKYKCDGCSDYVKAQKRLTVYQAPNILTITLKRFQSGRFGKLNKRVTFPMKLDLTPYMSSTDGSDQYDLYAVVVHLDMLNASFFGHYICYIKNYRGRWYKIDDCKVMAVDEEEVHAQGAYMLLYSRRTARPRPLIAVEELMKQQQQLKVCPLNGQNHLIQEDVPLEGVPSLKPSEDLEVDFESNNKSLHTMDREPDLDFHVSFDRDKFTNNDIMHPPVSTVSHALDENTRGDSGFPLEESNTMGSVQFGNSTYETSLVHSPAEQCEEPASCIDSVDYMEIDTEAGVKVERWSRPALGDSVGVMGNGTLVPALENGLAGKPIPGFPDKPSRINSFFAEGCQTGDNGAGSSQELNGHCNGEPSCPEQGVLTNGGNTPSPSTQCYENKFATSTNGNYSIGNGDTLSSSNSLHAGKQNAGFTYNGFNPKPYKEPSGSNTYLNNTCNGKPSEDNHNKCAPNLPAKDCQGGMPFLHRGFLLRPCSRGNPGKCDDGLSISNGTSSSFVSSNSKSSNISSSRNGEGGTPFLSPSFRTNHCRESAAMDTSASSVHDLKTSYNISLEQKSIGAAVPSDLIKESWGEDGTTFGTVYQQRATSVDNVSSRHDENGHVILGANNSSYGGENGSNNGILDMNSSSSQRDAASSTMMASEKGIGPKTADQVNYISDALEHDGLRRRLTSNFPDQNGIDAQ

SEQ ID NO: 182981 - protein, 63 aa, Oryza sativa
  Clone ID: PAT_MRT4530_80114C.1.pep
MRVLRSALLAASGRGRGTVVEAVAAKEYGSEKAQPCCAQQAKQLGKISCSVHCFIVLRLTSNG

SEQ ID NO: 182982 - protein, 110 aa, Oryza sativa
  Clone ID: PAT_MRT4530_80115C.1.pep
GGMFKQMRFNKQTNIETSFIVVSNLNIRLQNIWQLHKCLSISQELSGRLMMLTPQPRKESCFGGPSLKSTCHKRGGLMLRPTSNNDQFTGSCRLGTNNGGCEHKPRTLSR

SEQ ID NO: 182983 - protein, 111 aa, Oryza sativa
  Clone ID: PAT_MRT4530_80116C.1.pep
LVQAKKQTFSSFDELLEKSEKPVLVDFYATWCGPCQYMVPILQEVSEKLGDKIQVVKIDTEKYTSIANRYQIEALPTFIIFKNGKPCHRFEGALPANQLIQQIESALEVAK

SEQ ID NO: 182984 - protein, 90 aa, Oryza sativa
  Clone ID: PAT_MRT4530_80117C.1.pep
MTERGAPHRETAQAPLCRFGPLRSPKMTSDKQHTRLLLRSSALPVDAHFNLHLLASDFLAILALKPGMNLTGTDIPTPGVGTPAPARDES

SEQ ID NO: 182985 - protein, 289 aa, Oryza sativa
  Clone ID: PAT_MRT4530_80118C.1.pep
MAMAKELQETSSSSSSSAASTSSCSSAVTDAWSSPARPNAVAGGKRKKEVVGEADEAAGGGAGEEEEEEAEAAAAGKSSAATKKRKRSSDGKHPVYRGVRMRAWGKWVSEIREPRKKSRIWLGTFPTADMAARAHDVAALAIKGRAAHLNFPDLAGVLPRAASASPKDVQAAAALAAAFTTSPSSSPSSSLSADDVAPCVVHADADEQPAAAAKNDDDDGSTTAPVAAAAAAAAADEQQLFDLPDLLFDIQDGPFGFPAMWAPLADVDEVNAELRLEEPLLWDLGVTDA

SEQ ID NO: 182986 - protein, 42 aa, Oryza sativa
  Clone ID: PAT_MRT4530_80119C.1.pep
HDKDKTNHVSYFVARQLFLLEGQIATICKMIPFNHTQKLNQP

SEQ ID NO: 182987 - protein, 47 aa, Oryza sativa
  Clone ID: PAT_MRT4530_8011C.1.pep
LKIRRAWLVSPIYLDLLTSSLRVQCTFTAASSRIHKSKVLSYRITGR

SEQ ID NO: 182988 - protein, 220 aa, Oryza sativa
  Clone ID: PAT_MRT4530_80120C.1.pep
IRGPRHRWGKRRGEGGGAPAVRQRSDVAAAKAAFRHLSEGREGSNSSIADLIVNSYNSCCDEQEEEEKTLELSLGLPGGGWRAACRDKGTTTKHSIAAAAAADDDDGDKSSMLSLGYSTLHARQYTHTHTHTHTYIYIYIYIYMYMYLDTFEYVLIYIFFLCFSVSFLFVFRFFNTYKYRTLYTYIFILFIRTYINFLYIHKYLFILYIYIYTYIYIFIH

SEQ ID NO: 182989 - protein, 48 aa, Oryza sativa
  Clone ID: PAT_MRT4530_80121C.1.pep
MYRAAASLASKARQAGSSARQIGSRLALHRNYAAKDIKFGVEARALML

SEQ ID NO: 182990 - protein, 36 aa, Oryza sativa
  Clone ID: PAT_MRT4530_80122C.1.pep
MAVGLLRSGYYQRVQSGADLDGVDNGLRPSSWAVFM

SEQ ID NO: 182991 - protein, 86 aa, Oryza sativa
  unsure (1)..(86): unsure at all Xaa locations
  Clone ID: PAT_MRT4530_80123C.1.pep
VTTGNNPIDIPYVSVLILVPGGKVHHTQRXMNKSGRLGQIPQALDSRHELDTKTFILQELLFWFGEKXSKIECNHSTQQVTPINAQ

SEQ ID NO: 182992 - protein, 1304 aa, Oryza sativa
  unsure (1)..(1304): unsure at all Xaa locations
  Clone ID: PAT_MRT4530_80124C.1.pep
MKLPDDLAAVFTTRASSPRRPRRKSASTPTLPSSREVGVILRPLGTVSTDQLEGYFGSPGVDSRPTEIVEYDEFGYRYDNRDLDDFDESFEDNYIPLYFGVFMADNETEEQRQARETEAQRVQQEAERRRLEEERQAQEQERLRREQQERERAAKEAEDQRQQALDAGRRARDLIGQQDVEGTAVFRTLQQNAVAAITLFDTLFKEDALNQADHVVNILNQTKTMIAASVPVNSGSVCTPTGSRAPHLRSHDYYQPSLSITGTGSNRRSWGHDERSVHSPPERHRECRVERPRSPPRQRPVDIRDIINQRRAARGHRHSPDRYDDDVDRVAAFTNDLRRVDWPAGFKPTGIEKYDGTTNPESWLTVYGLAIRAAGGDSKAMANYLPVALADSAWSWLHGLPRGTIGSWAELRDHFITNFQGTFERPGTQFDLYNVIQKSGESLRDYIRRFSEQRNKISDITDDVIIVAFTKGIRHEDLVGKFGRKPPKTVKQMFEKANEYAKAKDAIIASKQSGPTWKSKKDVPTTGGGGSNNHKDRKRKPEELVATTTHSSRQRSRVNTFDKIMNSQCPHHPNSNHAAKDCFVYKQFAEQYAKNARKTPDGEQSTSKKKDDDDDPPTGFQDHSKELNHIFGGPLAYESKRKQKLTEREINAVQPDTPQYLRWSEITIKFDRSDHPDRVVHPGRYPLIPRTELNPSNAPFHGVILGLSATPLGQITLPVTFGTRENFRTENVCFEVADFRTAYHAILGRPALAKFMAVPHYTYMMMKMPGPRGVIFLRSDIKQAVTCDKESCEMAQTREIAMAQTRIXRGIQANPEKVNAILNMKPPCSXKHVQKLTGCMAVLSRXRYPQVQKLLYGVLITVRKLSHYFQGHSVTVVTSFPLSDILYNREANGRIAKWALELMSLDISFKPRTSIKSQALADFVAEWTECQEDTPKEKMEYWTMHFDGSKRLSGTRAGVVLISPTGERLSYVLWIHFPASHNVAEYEAPLHGLRIAISLGIRHLIVRGDSQLVVNQVMKEWSCLNDNMIAYRQEAVGGYTHLFVAIDKFSKWIEAKPVITITADKARDFFINIVHRFGVPNQIITDNGTQFTSGVFKDFCEDFGIKICYASVAHPMSNGQVERANGMVLQGIKARVFDRLNPYAGKWVEQLPSVLWSLRTTPSWATGQSPFFLVYGAEAMLPSEVEFESLRFRNFREERYGEDRVDDLHRLEKAREAALIQSARYLQGLRCYHNRNVRSRAFLVGDLVLRKIQTTRDQHKLSPLWEGPFIISEVTRPGSYRLKREDGTPIDNSWNIEHLRRFYA

SEQ ID NO: 182993 - protein, 598 aa, Oryza sativa
  Clone ID: PAT_MRT4530_80125C.1.pep
MARGSALLDDGAPHPQCGNDIGHLCAPVRDVQRGAPIPSAVPVVLHRTVGVAAVGGWWLLLLAREEARLHQATATTTSEAARDEAAGESLGPNPSGDAQDKPGPGDVPESGTSIGEPNRAASSPRRLFPTPSVAPLSAEPLLQALAVANTTVLDGLSAQVEALQAERAELDAAWARVEKGRRSVEAMVEVGRKAHRRHVSELEARRKVLGEIAKEVEEERGAALIATTVMNEAQDTLRLQYGSWEAELGKKLDAAQEVLDAAAARERRAAETEVASRRREEALEARAMALEERAGVVERGLVDREAAVSIREATLAAHEAACAEEESALRLREDALTERERALEEAEAAAQRLADSLSLREAAREEQARHNLEGVRAERAALNQRAAELEAQAKELDARARIGGAATGESDLAVRLAAAEHTIADLQGALDSSTGEVEALRLAGEVGPGMLRDAVSRLDHAGRQAGLWGGRTVKYAANQGGLAQRLSEMAGTLQRLPEELERTIKSSSRDLARGAVELVLASYQARDPDFSPWTALDEFPPGTEDGARAQVRDAADHIVHSFEGSAPRLAFALNSDEEDDDGGAGDSGDKAGDPGASE

SEQ ID NO: 182994 - protein, 47 aa, Oryza sativa
  Clone ID: PAT_MRT4530_80126C.1.pep
MAAEMEKSDCQGHSGGAGVVVGVLVVDLEFVNVLEHHPPLVVAGGGR

SEQ ID NO: 182995 - protein, 604 aa, Oryza sativa
  Clone ID: PAT_MRT4530_80127C.1.pep
MKLPDDLAAVFTTRASSPRRPRQDPASAPVRPSSREVGVILQPLGTVSTDQLDGYLSSPGVDSRPTEIVEYDDFGYRYNNRNLDDFDEGFKDNYTPLYFGVFMADNETEEQHKAREAEELRRCAARGYAPHHSPDRYDDDVDGVAAITSDLRRVDWPADFKPTRIEKYDGTTNPESWLTVYGLAIRAAGGDSKAMANYLPVALADFAWFWLHGLPRGTIRLWAELRDHFIANFQVTFERPGGSGSTNHKDRKRKPEELVATTIPSSRQRSRVNTFDKIMNSQCPHHPNSNHAAKDCFVYKQFAEQYAKNARKASDGDQSTSKKDDDDDAPTGFQDHRKELNHIFGGPLTYESKRKQKLTEWEINTVQLDTPQYLRWSETTIKFDRSDHPDRVVHPGRYPLVLDPVVRNIKLRRSLMDGGNALNILFAKTMDDMQIPRTELKPSNAPFHGVIRGLSATLLGQITLPVTFGTRENFRTENVCFEVADFETAYHAILGCPALAKFMAVPHYTYMMMKMPGPRGVISLWSNIKQAVTCDKERCEMAQTREITLAREEIRLAASTANEGEVPVTKMPKSGESDAKTKKIPLDPSDPTKTAVIGAELDCK

SEQ ID NO: 182996 - protein, 223 aa, Oryza sativa
  Clone ID: PAT_MRT4530_80128C.1.pep
MEKAAANQAGKVLKKGKKKQAKDELDRQKQAEKKRRRLEKALANSAAIISELEKKKQKKREEQQRLDEEGAAIAEAVALHVLIGEDSDEPCHLMLNKHRRCNHWDHSAGFDFAVDAQGADIYPPDGLIQCADHVYAPKGRCIDWGIGQPLPSWGEVKDLQLQAPCYQGMFHQSVACPGFIAAQAVSSLQIGGDSSDITSPSQGATVVNRMLGATNRLNLYREI

SEQ ID NO: 182997 - protein, 796 aa, Oryza sativa
  Clone ID: PAT_MRT4530_80129C.1.pep
MDGVTAAASNAPHPNHKAFRFGSLNFITNDFGKISLLDLDSNQSGRDQVPAPFGIPNSAEAYSKIISPESASNHSDETQSTPPRPDQDDGEVGVILQPLRTVSTEELDGYLSSPGVGSQPTEVLNYDDFGYHYDHSDLDNFDDSFEDNYTPLFFGVFMADNETEEQRRAREADQDCARQEAERRRLEEERHGLSHPQQNAVAAITLLDTLLKEDALNQADHVVKILNQTKTIIAASVPANSASTCTPIGSRVPHLRSQDYHQPSLSIAGAGSSRRSRGHDERSVRSPPERYRERRVERPYSPHRRRPIDLRDTINQHRAARGHHSPDRYDDDVDGVAAFTSDLHRVDWPAGFKPTGIEKYDGTTNPQSWLTVYGLAISAAGGDSKAMANYLPVALADSARSWLHELPRGTIGSWAELRDHFIANFQGTFERPGTHFDLYNIIQKSGESLRDYIRRFSEQRNKISDITDDVIIASFTKGIRHEDLVGKFGRKPPKTVKQMFEKANEYAKAEDAITASKQSGTTWKPKKDTPTAGGSGSNNHKDRKRKPEELVVTTSPSSRQRSRVNTFDKIMNSQCPHHPNSNHVAKDCFIYKQFAEQYVKNARKPSDGDQGTSKKKDDEDDAPTGFQDHRKELNHIFGGPLAYESKRKQKLTEREINAVQPNTPQYLRWSEIAIKFDRSDHPDRVVHLGRYPLVLDPVVRNIKLRRTLIDGGSAFNILFAKTLDDMQIPRTELKPSNAPFHAKFMAVPHYTYMMMKMPGPRGVISLWSDIKQAVTCDKESCEMAQTHEITLAREEI

SEQ ID NO: 182998 - protein, 284 aa, Oryza sativa
  unsure (1)..(284): unsure at all Xaa locations
  Clone ID: PAT_MRT4530_8012C.1.pep
MTSPPAAAARRXRQLGRRKLAGERRHYGTNGGHQQVADGTANSPATKGAAEDQQTATATTKERRRTAAXRRRRCSGGFRRXRSGGQGRRRLGDHDDDLPEXRRRLERRRRTAGATAATAALGHTALELYGRREAKARVAAGRGDTGEPFKGARRRRRRPTAAGDEKETSWLEGKRXDPNRTRFHELPKRFSRXFQRRKGRGDPGDHFPSFDSAGEGKERPDLEVNGGGGALGFRXGRRRLGEDEPHLSASEGARARRRTGPDWAEEREKRGFGPTFGPKPKEDF

SEQ ID NO: 182999 - protein, 660 aa, Oryza sativa
  Clone ID: PAT_MRT4530_80130C.1.pep
MARGSAPLDGSVLPPSRIVSERQAGLPRRFMPESVTGREVVALGEGRPAPHYPGRSVFFLSFAMAGLVPPFSSFFMDILEFYDLQMAHLTPNAVMTLAIFAHLCEMFIGVRPSLRLFRWFFTVQPVSPPSVVGGCYFQPRGQVLNRYIPCVLRKKWDDWKSDWFYTLLADEARLRLPSQPPAQASSWRATVDLGDGYDAILDRLAGLRSQGLTGAMVFGDYLRRRIAPLQRRARGTWEYTASGTSIGGPSRAAPSPRRLSPLPSAAPPSAEPLLQALAAANTTVLDGLSAQMEVLQAERAELDAAWARVEEGRRSVEAMVEAGRKAHRRHASELEARRRDLAEIAREVEEEWETALIATAVLDEVRDDLRLQYGSRAAELEKKLDATRGVLDAVAARERRAAEIEAASRQREEALEARATVLEERARAKERDLADREAAVATREATLAAHEAACAEEESALRLREDALTERERALEEAEAAAQRLADSPSAWQRGRREVEALRLASEVGPGMLRDAVSRLYHAGRQAGLWGGRTAKYAANQGGLAQRLSEMAGVLKRLPEELEETIKSSSRDLARGAVELVLASYQARDPDFSPWATLEEFPPGTEDGTRARVRDAADHIVHSFEGTAPRLAFALDSDEEGGDDGVDDSDDEAGDPGASE

SEQ ID NO: 183000 - protein, 928 aa, Oryza sativa
  unsure (1)..(928): unsure at all Xaa locations
  Clone ID: PAT_MRT4530_80131C.1.pep
MARGSALLDGSVLPPSRIVSERQAGLPRRFMPESATGREIVTLGEGRPAPCYPGRSVFFLPFAMAGLVPPFSSFFMDVLEFYDLQMAHLTPNAVMTLAIFAHLCEMFIGVRPSLRLFRWFFTVQSVSPPSVVGGCYFQPRGPVLNRYIPCVLRKKWDDWKSDXAVGASEERAPRGHDGSGGSRXGEQSTPGGGRASGPRDGGSGGSRPADARGKRKQEGTSSPSPPRGGGAARFSSRRPEGAAPTPQPEGEWKKKRLRKMGGTEPSRGNLISPLRWSFNRPPRSEIPSRPSRHSKSGQSEAENPATTEARRRKSDRREAADRLREAEEAAREVARARQTEEAAREEAGLRQAEATTSSEATRETDRQEAVDRLREAEEADQVAVRARQAEEAAREEARLRQAEATMTSEATRGEAAGASLGPTPSCDAQDKPGPGDIPESGTSIGGPSRMASSSRRLFPTPSVAPLSAEPLLQALAVANTTVLDGLSAQVEALQAERAELDATWARVEEGRRSVEAMVEVGRKAHRRHVSELEARRKVLGEIAKEVEEERGAALIATTVMNEAQDTLRLQYGSWEAELGKKLDVAQGVLDAAAARERRAAETEVASRRREEALEARAMALEERACAVERDLADREAAVAIREATLTAHEAACAEEESALRLREDALTERERALEEAEAAAQRLADSLSLREAVREEQARHNLEGARAERAALNQRAADLEARERELDARARSGGAAAGESDLTARLAAAEHTIADLQGALDSSAGEVEALRLAGEVGPGMLRDAVSRLDRAGRQAGLWGGRTAKYAANQGGLAQRLSEIAGTLQRLPEELERTIKSSSRDLARGAVELVLASYQARDPDFSPWTALDEFPPGTEDGARAQVRDAADHIVHSFEGSAPRLAFALNSDEEDDDGGVGDNGDEAGDPGASE

SEQ ID NO: 183001 - protein, 804 aa, Oryza sativa
  Clone ID: PAT_MRT4530_80132C.1.pep
MASPPPPPPPPKLPVPGRRNILVTSALPYVNNVPHLGNIIGCVLSADVFARYCRLRGYNVIYICGTDEYGTATETKAMEEKCSPKEICDKYHAVHSEVYKWFDIKFDKFGRTSSPQQTEVCQAIFQKLMENNWLTENTMQQLYCDTCQRFLADRLVEGKCPTEGCNYEAARGDQCENCSKLLNPTELIDPKCKVCKNTPRVRDTDHLFLELPLLSDKLVNYINETSVAGMWSQNAIQATNAWLKEGLKPRCITRDLKWGVPVPHEKYKDKVFYVWFDAPIGYVSITASYTPDWEKWWKDPDNVELFQFMGKDNVPFHTVMFPSTLLGTGEKWTMMKTISVTEYLNYEAGKFSKSHGIGVFGNDAKDTNIPPEVWRYYLLTNRPEVSDTLFTWADLQAKLNSELLNNLGNFINRVLSFVAKPAGAGYDSIVPDAPNAESHPLTKALAEKTNKWVEQYLEAMEKVKLKQGLKSAMGISSDGNAYLQESQFWKLYKEDPAACAVVMKTSVGVVYLLACLLEPFMPSFSNEVLLQLNMTPEESLSFCDDKGEIAKAKRPWDFVSAGHKIGKPSPLFKELKDEEVESFRNKFAGSQAERSSKAQADAEAKKVADKLKGTKLSDGGQKKEQKKQSGGSKSKNAEVDVTVAKLDIRVGLIRKAQKHPDADSLYVEEIDVGEEAPRTVVSGLVKFIPLEEMQNRKVCVLCNLKPVAMRGIKSHAMVLAASNEDHTKVELVEPPESAAVGERVTFAGYSGEPEASLNAKSKTWEKLSADLHSNGELVACYKDVPFTTSAGVCKVKSIASGEIR

SEQ ID NO: 183002 - protein, 1267 aa, Oryza sativa
  unsure (1)..(1267): unsure at all Xaa locations
  Clone ID: PAT_MRT4530_80133C.1.pep
MGFVSGIDDFAFPPGQAFRFGSFDFITNDFGKISLLDSDSNQSGRNQVPVPFGIPNSAEAYSKIISPELVSSHSDEIQSVPPRSDQDDGSYPSILMKLPDDLAAVFTAKTSPTRRSRRALASAPIQSRSREVGVILQPLGTVSTEELDGYLSSPGVSSRPTEILDYDDFGYHYDHGDFDNFDDSYEDNYTPLFFGEAEDRQHRAWESGRRARELIGQQDVDGTAVFRTPQQNAVAAITLLDTLLKEDALNQADHVVNILNQTKTMIAASVPVNSASTRTPTGSRVPHHQPSLSVTGTRSSRRSRGHDERSVHSLPERHRERRAERPRSPPRQRPVDLRDMINQCRAARGHRHSPNRYDDDVDGVAAFTNDLRRVDWPVSFKLTGIEKYDGTTNPESWLTVYRLAIRAAGGDSKAMANYLLVALADSARSWLHGLPRGTIGSWAELRDHFIANFQGTFERPDTQFDLYNFVQKSGESLRDYIRRFSEQRNKISDITDNVIIAAFTKGILHEDLVGKFGRKPPRTVKQMFEKANEYAKAEDAITASKQSGTTWKPKKDTSTTGGSGSNNHKDPKHHRKELNHIFGGPLAYESKRKQKLTEREINAVQPNTSQYLRWSETAIKFDCSDHPDRVVHPGRYPLVLDLVVRNVKLQRTLIDGGSALNILFAKTLDDMQIPRTELKPSNAPFHSVIPGLSATPLGQITLLVTFGTRESFRTENVCFEVADFETAYHAILGRPALAKFMAVPHYTYMMMKMPGPRGVISLRSDIKQAVTCDKESCEMSWFGKRQGNVKAYVDDVVVKTKQKDDLIADLEETFTSIRAFKMKLNPEKCIFGVPSGKLLGFMVSQRGIQANPEKINAILNMKPPSSQKDVQKLTGCIAALSRFVSRLGERGMPFFKLLKKTDNFQWGPEAQKAFEDFKELLTTPPVLASPHPQEPLLLYVSATSQVVRKLEDKFDGLELTHVLRHNNEAADRLANFGSKREAAPSDVFVEHLYEPTMPRKETTEAMDTQGEGRQLLKDIHSGICGNHAAARTIVSKAYRQGFFWPTAVSDADEIVRTCEGCQFFAGQTHLPAQELQTIPLSWPFAVWGLEMVGPFKRAVGGYTHLFVAIDKFSKWIEAKPVITITANKARDFFINIVHRFGVPNRIITDNGTQFTGGAFKDFCEDFGIKICYASVAHPMSNGQVESANGMILQGIKARVFDRLLPYAGKWVDQLPSVLWSLRTTPSRATGQSPFFLVYGXKQCCRVKWNLNHYDFGTSTRRAMKRAE

SEQ ID NO: 183003 - protein, 792 aa, Oryza sativa
  Clone ID: PAT_MRT4530_80134C.1.pep
MASPPPPPKLPVPGRRNILVTSALPYVNNVPHLGNIIGCVLSADVFARYCRLRGYNVIYICGTDEYGTATETKAMEEKCSPKEICDKYHAVHSEVYKWFDIKFDKFGRTSSPQQTEVCQAIFQKLMENNWLTENTMQQLYCDTCQRFLADRLVEGKCPTEGCNYEAARGDQCENCSKLLNPTELIDPKCKVCKNTPRVRDTDHLFLELPLLSDKLVNYINETSVAGMWSQNAIQATNAWLKEGLKPRCITRDLKWGVPVPHEKYKDKVFYVWFDAPIGYVSITASYTPDWEKWWKDPDNVELFQFMGKDNVPFHTVMFPSTLLGTGEKWTMMKTISVTEYLNYEAEIDGQGKFSKSHGIGVFGNDAKDTNIPPEVWRYYLLTNRPEVSDTLFTWADLQAKLNSELLNNLGNFINRVLSFVAKPAGAGYDSIVPDAPNAESHPLTKALVEKTNKWVEQYLEAMEKVKLKQGLKSAMGISSDGNAYLQVLLQLNMTPEESLSFCDDKGEIAKAKRPWDFVSAGHKIGKPSPLFKELKDEEVESFRNKFAGSQAERSSKAQADAEAKKVADKLKGTKLSGENDWEQKNRSLQVGNEISRVGNLDYWETDGGQKKEQKKQSGGSKSKNAEVDVTVAKLDIRVGLIRKAQKHPDADSLYVEEIDVGEEAPRTVVSGLVKFIPLEEMQNRKVCVLCNLKPVAMRGIKSHAMVLAASNEDHTKVELVEPPESAAVGERVTFAGYSGEPEASLNAKSKTWEKLSADLHSNGELVACYKDVPFTTSAGVCKVKSIASGEIR

SEQ ID NO: 183004 - protein, 733 aa, Oryza sativa
  Clone ID: PAT_MRT4530_80135C.1.pep
MVGCEHMVLRVVLMTIKDRLDFITNDFGKISFLDSDSNQSGRNQVPVPFGIPNSAEAYSKIISPESVSSHSDEIQSIPPRSDQDDGEVGIILQPLGTVLTEELDGYLSSPGVSSRPTEILDNDDFGYHYDHGDFGNFNDSYEDNYTPLFFGREQQDRERIAKEAEDRRHRALESGRRARELIGQQDVDGRAVFRTPQQNAVAAITLLDTLLKEDALNQADHVVNILNQTKTMIATSVPANSASTRTPTGVTTNDLFTRFPNVTGSAELNGLVLHLASVPSTFVTRSTSAVQHEGTFERPGTQFDLYNVVQKSGESLRDYIRRFSEQRNKISDITDDVIIAAFTKGIRHEDLVGKFGRKPPRTVKQMFEKANEYTKAEDAITASKQSGTTWKPKNDTPTAGGSGSNNHKDRKRKPEELVATTSPSSRQRPRVNTFDKIMNSQCPHHPNSNHMAKDCFVYKQFAEQYVKNARKPADGDQGTSKKKDDEDDAPTGFQDHRKELNHIFGGPLAYESKRKQKLTEWEINAVQPNTPQYLRWSKTAIKFDRSDHPDRVVHPGRYPLVLDPVVRNVKLRRTLIDGGSALNILFAKTLDDMQIPRTELKPSNAPFHAGRVHGGPGARRRLTETNGRDLSVHGRTTGDDDDDVSGDVITGDDSGTHARRRTTAMVFQRSTATAEGRTRSATAWRSRWRLSRATTTTGATAAHGWTNDGDGGAKAHGDRALQMAAGEGESGCG

SEQ ID NO: 183005 - protein, 56 aa, Oryza sativa
  Clone ID: PAT_MRT4530_80136C.1.pep
SPQGSPEWIPPEMVGTNLGFLAWAEPKFLFFRYWSGGWGFPQGFPGELNRKGFLPR

SEQ ID NO: 183006 - protein, 159 aa, Oryza sativa
  Clone ID: PAT_MRT4530_80137C.1.pep
SLVREICPSHYSVGSHTLGTSISSICIMIQLPVNMQLARVLFLFRKVSFWSNKTKASHHPTFQCVLSQTQHAQGHQPLALIQLITTRRPQPFNRCTSSLRSSSFQHGVGRGTRYMVHVWVSTWRQLPCRVGCSPIYGMTFITYKILLLARPFLSCILLL

SEQ ID NO: 183007 - protein, 705 aa, Oryza sativa
  Clone ID: PAT_MRT4530_80138C.1.pep
MGHTNLHSVGSRCNVEARLFADDMTGVRPVTDRSLSSTTRQFSKLHVCPSSYNDFLAMVGMKPGIYLTGTDVPSSGAGTPSPARDNEIPSRPSRHSKSGRSEAEDTATAEARRRETDRREAADRLREAEEAAQEAVRARRAEEAAREEARLRRAEESAREAEAAHARQAACQAPDPTPPEATTTSEATHDEAAGAPLGPDPSGDAQDKPGPGDVPESGTSIGGPSRAASPPRRLSPMPSAAPLSVEPLLQALAAANTTVLDGLSAQMEVLQAERAELDAAWARVEEGRRSVEAMVEAGRKAHRRHTSELEVRRKELAEIAREVEEEREAALIATAVMNEAQDDLRLQYGSWAAELGKKLDAARGVLDAAAARERRAAETEAASRRREEALEARATALEERACVKERDLADREAAVAIREATLAAHEAACAEEESALRLREDALTERERALEEAEAAAQRLADSLSLREAAQEKQTRRNLEGARAERAALDQRAAELEARARELDARARSGGAATGDGDLAARLAAAEHTIAELQGALDSSAGEVEALRLAGEVGPGMLRDAVSRLDRVGRQAGLWGGRIAKYAANQGGLAQRLSEMAGTLQRLPEELEETIKSSSRDLARGAVELVLASYQARDPDFSPWAALDEFPPGTEDDARAQVRDAADHIVHSFEGTAPRLAFALDSDVEGGDGGVDDSDDEAGDPGASK

SEQ ID NO: 183008 - protein, 980 aa, Oryza sativa
  Clone ID: PAT_MRT4530_80139C.1.pep
MAHLIPNVVMTLAIFAHLCEMFIGVRPSLRLFRWFFTVQPVSPPSVVGGCYFQPRGPVLNRYIPCVHRKKWDDWKSDWFYTPLADEARLRLPSQPPAQASSWRAPVDLGDGYDAILDRLAGLRSQGLTGAMVYSDYLRRRIAPLQRRARGAWEYTGSEDCMRTHRGVKWDWVPEDFKVMIQRVLNLSSAEASLIPQGVLPLCSDPDRANILSIMMAVGASEERAPEGHDGVSGSRKGDQSTPGGGCASGPRDGGSGGSRPADARGKRKQEGTSSPSPPRGGGAARVSSRRPEGAAPTPQPEGERKKKRLRKMGGTEPSRGNLISPPRWSFNRPPRSEIPSRPSCQSKSGQSEAENAATTEARRRESDRREAADRLREAEEAARGAARARQAEEAAREEARLRQAEATTSSEATRETDRQEAADRLREAEEAAQVAVRARQAEEAAREEARLRQAEAATTSEAARDEAAAASLGPTPSGDAQDKPGPGNIPESGTSISGPSRAASSPRRLSPTPSVAPLSAEPLLQALAVANTTVLDGLSAQIEALQAERAELDAAWARVEEGRRSVEAMVEVGRKAHHRHVSELEARRKMLGEIAREVEEERGAALIATTVMNEAQDDLRLQYGSWEAELGKKLDAARGVLDAAAARERRAAETEVASRRREETLEARDMALEERARVVERDLADREAAVAIREVTLAAHEAACAEEESALRLREDTLTERERALEEAEATAQRLAESASLREAAQEEQARRNLESARAERAALNQRAAELEAQARELDARARSGGAATGDSDLAARLAATEHTIADLQGALDSSTGEVEALRLAGEIGPSMLRDAVSRLDRAGRQAGLWGGRTVKYAANQGGLAQRLSKMAGTLQRLPEELEGTIKSSSRDLARGAVELVLASYQARDPDFSPWTALDEFPPGTEDGARAQVRDAADHIVHSFEGSAPRLAFAFNSDEEGDDGGVGDSGDEAGDPGASE

SEQ ID NO: 183009 - protein, 224 aa, Oryza sativa
  Clone ID: PAT_MRT4530_8013C.1.pep
ALAAIARSLLQQHTIEQSIGERRRRRGVFSQCLRACKQKWPPSQPHHHHPPLPPRPLSNPTPRALAPTARRPRARPPRRRRPPGRHRSPWSRRCPRPSSRCSTSPPRSARRGTSPGRSCPASPSPRTAPRRCSSGCSGPSSRSRMGPACSRRAPCLPCSGTGTPVGLLPPVPRRQGRAAGSRPCVRGRPPPRWPASTPPWTSPSCWCTTSTSAPWRRASSGPRS

SEQ ID NO: 183010 - protein, 101 aa, Oryza sativa
  Clone ID: PAT_MRT4530_80140C.1.pep
FFSEELCLTINPDECDGYGAAVQVAIWRDVGLVKVQDLLLVNFMLLSLATETSCLDMSDLIPRNRTIATKKEQVFSTYCDNQAVVLIQVYEGERTRTRDNN

SEQ ID NO: 183011 - protein, 661 aa, Oryza sativa
  Clone ID: PAT_MRT4530_80141C.1.pep
MDRRLILSVAVAVALLAPRAAGEPWPVCGQDFGTFTPKSRFFANLQLIAATLPGNASSSPDLYATAVDVGAVPEQVTAAALCRGDVSASSCLGCLTQAFADLPNACGNSREAATYYDRCMVSYSAINFLSGGAGGEDPARIDAYTVNNENKVTSEQGRYNRLVAALVNATADYAAYNSTRRYAAGEADFDAALPKVYSLAQCTPDLSPARCRSCLAKIVAQELWSYKDDIGGRTLSVRCSFRIETKPFLNGTTMVRLPATSAPSPAPPVNATPSAATPGRETKYKVPRLVLIILLPIIAAVNLVVCFCVWRRKRPVITKAKQTNANYYAEADDVDSVDSMLMDISTLRAATGDFAESNKLGEGGFGAVYKGVLPDGNEIAVKRLSKSSTQGVQELKNELALVAKLRHKNLVSFVGVCLDQHERLLVYEFVPNRSLDLILFDTEKREKLDWEKRYRIINGVARGLQYLHEDSQLKVVHRDLKASNILLDANMNPKISNFGLARIFGQDQTQAVTNRVVDTYGYMAPEYMMRGNYSVKSDAFSFGVMVLEIVTGRKNNDFYNNSHQSEDLLNTIWERWMAGTVDEMVDPAMSRYVSASDVRKCVHVALLCVQENPADRPVMSSVVMMLDSETVSLQVPSKPAFFARNGGAKPGVASDESTASV

SEQ ID NO: 183012 - protein, 89 aa, Oryza sativa
  Clone ID: PAT_MRT4530_80142C.1.pep
MGMAASRRWAGGKRGWRRSDRGELLLALSSGDETRTHVYVIRIPTTKYAEYKGDSELTYMHIDPCSCNRRLIDRSINYIHPALLRTAMS

SEQ ID NO: 183013 - protein, 89 aa, Oryza sativa
  Clone ID: PAT_MRT4530_80143C.1.pep
MAGLRAYGAETSTMAIRLSFSPLTPSKRRALEGGAPEHGRTQPLDTLNHGPELMVESPWAKTYFHHARMRWTTVQLADAQSEGPLALGT

SEQ ID NO: 183014 - protein, 307 aa, Oryza sativa
  Clone ID: PAT_MRT4530_80144C.1.pep
MASSSTSSRCLTASVTGTHNLEVTSYSLLEGMGVGKFVSSTTFSVAGYDWNLRFYPDGITDNDRKEGYGAVWMLASVYQISIAKEHAIRRIRFTGNDSFKIECSLTVISESRAEDVSTIPVPPSNLHQHLAGMLHGVEIADVEFSVGGEPFRAHACVLAARSPVFRAELLGPAAARSIKIDDDDDMEPATFKALLHFIYTDHLPNDSGFGKDAAMQRRLLVAADRYGVDRLRAMCGVKLYKSVSVGTVVDSLEFAEKHHCAQLKDACLGFMASPNVLGVVRKTDGFKRLVEGCPWVLKEILDKVPRF

SEQ ID NO: 183015 - protein, 79 aa, Oryza sativa
  Clone ID: PAT_MRT4530_80145C.1.pep
LLHFFFFFVFFILLNKRKYSDYGLYHALVLSQFRPEPLSAGQRRGQTGQYTVGAATTQTNPTLGWKRDYMGTNSKKAGL

SEQ ID NO: 183016 - protein, 137 aa, Oryza sativa
  unsure (1)..(137): unsure at all Xaa locations
  Clone ID: PAT_MRT4530_80146C.1.pep
VRSSLAQXAGLRTVVFLPCKGGVLELGSVVAIRETPEVLRAIQSAMRAVPAPPEDFMRIFGKDLSPGRPSQPMGCDAPWTPRLVVQTTPVRPAKKEVVKAKPAEPPKSLDFSKANVQEQAGGQERRPPPRWSSFCSL

SEQ ID NO: 183017 - protein, 39 aa, Oryza sativa
  Clone ID: PAT_MRT4530_80147C.1.pep
MSVVIILEPFVYTLPKQCWIKYRLQKKKKKAPLRIKLVA

SEQ ID NO: 183018 - protein, 102 aa, Oryza sativa
  Clone ID: PAT_MRT4530_80148C.1.pep
MNSSLMSMWRGMYECHQVQTHMVQQLEYLNNSLSTNPTSNVHRQAALQLEIEVDRWYSAFCSLVKSQRDYVYSLTGWLRLSLFQSYHDPYNKAHQNSDIYSL

SEQ ID NO: 183019 - protein, 137 aa, Oryza sativa
  Clone ID: PAT_MRT4530_80149C.1.pep
MAAASIDGEGGSAPLSSGICRQWFAKMLLHLLCLQDVWSCSSNFEGFWPATVHTRSFSSNLKGSGSATNGSEAISDLFCFLREPCDLFTIWMCAWKKGIGRKYMVLSLMDERHGCELDTDRDGIQNSWENILDFYNG

SEQ ID NO: 183020 - protein, 58 aa, Oryza sativa
  Clone ID: PAT_MRT4530_8014C.1.pep
PRVRFICLRCTFFLSVKKKKRGKGKKKKKEKKKKKKKKKKKKKKKKKKKKKKKRGRPF

SEQ ID NO: 183021 - protein, 95 aa, Oryza sativa
  Clone ID: PAT_MRT4530_80150C.1.pep
DSMATEVPPPRALGRAAASSATGSLIPTTVGLCGRPLCFLRGQIFPLLAPDEPMAGTLSHIVPQGISLRLQGTLLATTIIITITIKYNSNTTWKV

SEQ ID NO: 183022 - protein, 180 aa, Oryza sativa
  unsure (1)..(180): unsure at all Xaa locations
  Clone ID: PAT_MRT4530_80151C.1.pep
MEEEIRCPAVWWLKRRRRHEPARLRWRDGIPRAVMETGGGPLPGAARAEVDAKAGADGIDRRESAAGPARVVARRSPGPHSPTAPSPWAASAVPLPIDADPPPPVVSTASAGGQQGAMTAGSGTRAVGDCSGGGVGGGPLAPASSPXLSPPPSRRRLSPPPRHRTPASPXGLLPTHRLGC

SEQ ID NO: 183023 - protein, 120 aa, Oryza sativa
  unsure (1)..(120): unsure at all Xaa locations
  Clone ID: PAT_MRT4530_80153C.1.pep
GAMDGGLDIPHSDKRFAGFKKDEKQLDSDIHRKYIYGGHVADYMRSMAEEEPEKSKPTLVHAAIRADPTMGQSTKKEPATHRRYNLQKLTYEQRKASLVERLNALNSSACADDDDXEEDD

SEQ ID NO: 183024 - protein, 108 aa, Oryza sativa
  unsure (1)..(108): unsure at all Xaa locations
  Clone ID: PAT_MRT4530_80154C.1.pep
MILGYSAVRVLVFTVHDPIVPALHVHCAAPRSLXFATWVGHVVHGVTPPISPNAFGHVRPRLPIMFRHRRSDREXGRRRRNVLVVTVNLIATADDLVFPAPLVFLMQC

SEQ ID NO: 183025 - protein, 216 aa, Oryza sativa
  Clone ID: PAT_MRT4530_80155C.1.pep
MKITALLVLKPSSSGGGASSSGGGGGSGGPEAVVLANATDVSHFGFFQRGAAREFIVFVARTVAQRTQPGQRQSVQHEEYKVHSHNRNGLCAVAFMDDHYPVRSAFSLLNKVLDEYQKAFGDSWKAATKDATDAAQQWPFLTDALTKFQDPAEADKLMKIQRDLDETKIILHKTIESVLQRGERLDSLVEKSSDLSAASQMFYKQAKKTNQCCTIL

SEQ ID NO: 183026 - protein, 1294 aa, Oryza sativa
  unsure (1)..(1294): unsure at all Xaa locations
  Clone ID: PAT_MRT4530_80156C.1.pep
MGDMEERLMAAVQALTVKVDKVDALGQQLTQIDSKLEKQGARLDAVQSKVDLSMASLGQVQCEQALMTKALKAAATPSSPLLPTPRPTLSQDAASTSTQPPPEVEVPVRSGQPPVRDNSDVQGRRSWVPKMDFPKFDGTDVCVWVDNCETYFALYQITEGFKVSAASLNMIGDAAHWYQAWKQERGWPTWEQLREAVLNEFEINIKRAKMEELLLLTQTGTVSEYRSKFLQLVYHIRLYDPATSGLFLVSRFVMGLKDELRCFVAAQEPETVHQAARVALAFEGAFCNRKVAFKKDVGNVKFGDKGKVPVGDLWKAQQLKEYRRTHGLCFKCGEKYSPAHTCGKTEGAQLKTMEVSSSDDVLTDEILDVVTAFEQLPDDNMLLSLQAVAGTSATHSLQLRALAGNQVVIILVDSGSSHSFINADLCSKLNLSTDPIPVSTVKVANGETLQCEAQVSEFSWWIQGCTFVSSLKVLSMGGHDIVLGMDWLSKFSPMTCNWADRWLEFTYQGKLVKLQGIQSHQLQYLSEVSSDQMMKWQVGNDIWALAVVDCLSSPLCDSAVPASIQDVLQKYSSVFQPSAGLPPHRELDHSIPLVPGAIPVNSRPYRYSPAQKDEIEKQVQEMLESGLISRSCSPFASPVLLVKKKDNTWRFCVDYRRLNAITIKNKFPLPIVDELLDELAGTRFFSKLDLRSGYHQIRMKETDEEKTAFKTHHGHFQFRVMPFGLTNAPATFQCLMNSIFEPYLRKFVLVFMDDILVYSPSLETHAIHLDTVLQVLQQHQLSAKLSKCSFAASQLEYLGHIISADGVATDPEKTRIMRDWPVPTNVTELRGFLGLTGYYRKFVKNYGVIAKPLTVLLQKNAKFIWTDSANSAFLQLKHAMCSTPVLALPDFTKTFVLETDACATGIGAVLSQEGHPIAFYSKALGMANQKLSIYEKEFLAIMMAIDKWRSYLLRGPFTIKTDHQSLCHLDDQILGSELQRKAMTKLIGLQYKFQYKRGVDNKSADALSRVGHLFATVSGPYPKWIQEVVNSYATDADAQQLLTELAVSSPNDKGFMLSGGLIKKHDKIWVGANSGLQSKLIAVFHSSPIGGHSGIHATYHRLKKLFVWTGMKQAVEEFVQQCGVCQQAKHEHCKYPGLLQPLPIPEGSWQDISMDFIEGLPLSKGANTILVVVDRFTKYAHFLSLKNNFIAYQVGXLYLNRVAQLYRIPNSILSDRNRIYTKSCXIVLTXRCGIPLHMNIVYLPKWTDGSSTDNHALHMGLRGAVEKPSINSASYLRLCQFWERPCFHRTVTYS

SEQ ID NO: 183027 - protein, 191 aa, Oryza sativa
  Clone ID: PAT_MRT4530_80158C.1.pep
MTTAMTAGRFGAGRRHGRQARAGAAEADGGGDQAARQGSGAGRRRWRRRDAGDDHEQFRRMNPRVPVFQTGIWNMLPMMLTVPLEEMLREQLLTQSYPYPGKTTRGIQEPPRQSGLRRPSCLRMPSSPRSPSRLRSPSGLRRLSGLRSPSDLRRSLGLRRPQTSDAIGPLNPTRPPKPGRSPGPIKDSEVG

SEQ ID NO: 183028 - protein, 97 aa, Oryza sativa
  Clone ID: PAT_MRT4530_80159C.1.pep
MALRPSRTSSPRYRRRPTHQQEAARMRRRRRVPLRRCCPVGAAARAVFVRGAGAAEAKKGGAASSGNNGRHHHHHNQAMQSAVARERRSCHASSPHR

SEQ ID NO: 183029 - protein, 52 aa, Oryza sativa
  Clone ID: PAT_MRT4530_8015C.1.pep
SFHRHAIEFRRKMWLQNLRFKLMVGGTDAALILFLWLIICGGFKCRPHHMVL

SEQ ID NO: 183030 - protein, 34 aa, Oryza sativa
  Clone ID: PAT_MRT4530_80160C.1.pep
LNIHTSKELMNSMIRTFHKRTELQIYNTNPFLDI

SEQ ID NO: 183031 - protein, 147 aa, Oryza sativa
  Clone ID: PAT_MRT4530_80161C.1.pep
MGKNASRLAVAAVVVFALLLSLRQLEAADDVSVSCSDVVADVTPCLGFLQGDDDHPSGECCDGLSGLVAAAATTEDRQAACECLKSAVSGQFTAVEAAPARDLPADCGLSLPYTFSPDVDCSQSQGHNHAFKQPNNSSTGPQLPPRN

SEQ ID NO: 183032 - protein, 630 aa, Oryza sativa
  Clone ID: PAT_MRT4530_80162C.1.pep
MAMAGAAGRCLMLTRPSPLLRLRLLRAALATTTTTTTAAGASAVTAPTEPETTAREAPSRHELLLERLRQRHLKGVPAATPRPAQREKGRGGGGGGAQELQQKRRVEVVDSFEELGLGEEVMAALGEMGISKPTEIQCVGVPAVLAGTSVVLGSHTGSGKTLAYLLPLVQIEIENTYRLLPINNGVPANQKLLRRDEAMLGMSMKPRRPRAVVLCPTRELTEQVFRVAKSISHHARFRSTMVSGGSRIRPQEDSLNMPVDMVVGTPGRILDHIKDGNMVYGDIKYLVLDEADTMFDQGFGPDIRKFLAPLKNRAAKPGDQGFQTVLVTATMTKAVQKLIDEEFEVAEGLQSQSVDHSSFLVLNMVLEPSLAKGNKVMVFCNTLNSSRAVDHFLTENQISTVNYHGEVPAEERVENLNKFRNEEGDCPTLVCTDLAARGLDLDVDHVIMFDFPSNSIDYLHRTGRTARMGAKGKVTSLVAKKDVTLATRIEEAMKKNESLEALTTNNVRRAAVNPQYTSTKGRPSALKVVNQKGRRGVALQTKSSRIVKDTTSSRRRSPIRSQPRSKSTSSGKAKPVRSAKPSKSSSPSPKVAKSRPRPEGRKGDALNKLGSKLSVVGFRGRSSGKSAQAS

SEQ ID NO: 183033 - protein, 138 aa, Oryza sativa
  unsure (1)..(138): unsure at all Xaa locations
  Clone ID: PAT_MRT4530_80163C.1.pep
WNVNAPSPVEIVPGPAPVPGVRTLGKPVFKGVLRPGPMLILPPPSVVFKKPGPXGFPSLSFQAHANPLVGPPAGENPIFRALPVDVIPKASPQSRGPAPSLXNNRGEELGAFPPRNPPPASLGFSNESGNRAPKLCSN

SEQ ID NO: 183034 - protein, 47 aa, Oryza sativa
  Clone ID: PAT_MRT4530_80164C.1.pep
QPQQTKTSTDTPRNFNRVVEIYSGFADSSSLAASTQTAPFIAHHLQF

SEQ ID NO: 183035 - protein, 1074 aa, Oryza sativa
  Clone ID: PAT_MRT4530_80165C.1.pep
MARGSAPLDGSVLLPSRIVSERQAGLPRRFMPESATGREVVALGEGRPAPHYPGRSVFFLSFAMARLVPPFSNFFMDILEFYDLQMAHLTPNAIMTLAIFAHLCEMFIGVRPSLRLFRWFFTVQPVSPPTIVGGCYFQPRGQVLNRYIPCVLRKKWDDWKSDWFYTPLADEARLRLPSQPPAQASSWRAAVDLGDGYDAVRDRLAGLRSQGLTGAMVFGDYLRRRIAPLQRRARGAWEYTWPEDSMRTHQGRTWDWDPEDFRMVVQRVLNLSSVEASLIPQEVLPLCCDPERANILTIMQEVGASGERALRGHDGAGGSRRGEQSTPGGGRASGPRDGGPGGSRPADARGKRKQEGTPSPSPPRGGGAVRASSRRPEGAVPTSQPEGERKKKRLCKMGGPSHAGGTSSRLRGGRLADLPAGSSLRSPRPYSFSHLPRRVFTHPFLFVFWFFFCLSEIPSRPSRHSKSGRSEAEETATAEARRREADRREAADRLREAEEAAQDAVRVRQAEEAAREEARLRRAGESVREAEAARARQAACQAPDPTPPEATTTSEATHDEAAGAPLGPDPSGDAWDEPASGGAPDSGTSIGGPSRAAPTPRRLSPLPSAAPLSAEPLLQALAATNTTVLDGLSAQMEVLQAERAELDAAWARVEEGRRSVEAMVEAGRKAHRRHTSELEARRRDLAEIAREVEEERETALIATTVLNEARDDLRLQYGSRAAELEKKLDAARGVLDAAAARERRAAENEAASRQREEALEARATALEERARAKERDMADREAAVAIREATLAAHEAACAEEESALRLREDTLTERGRALEEAEAAAQRLADSLFLREAAREEQARRNLEGARAKRAALDQRVAELEARAKELDARAHSGGAAVGDGDLAARLAAAEHSIAELQGALDSSAGEVEALRLAGEVGPGMLRDAVSRLDRAGRQAGLWGGRCAKYAANQGGLAQRLSEMAGTLQRLPEELEETIKSSSRDLARGAVELVLASYQARDPDFSPWAALEEFPPGTEDGARAQVRDAANHIVHSFDGTAPRLAFALDSDEEGGDDGAGDGDDEAGDPGASE

SEQ ID NO: 183036 - protein, 50 aa, Oryza sativa
  Clone ID: PAT_MRT4530_80166C.1.pep
RGTKDTILICCNAQHRTILIQYIHECFQIWSRVYMQLGLGILFLPLIVAH

SEQ ID NO: 183037 - protein, 996 aa, Oryza sativa
  Clone ID: PAT_MRT4530_80167C.1.pep
MARGSAPLDGSVLPPSRIVSERQAGLPRRFMPESATGREVVALGEGRPAPHYPGRSVFFLSFAMAGLVPPFSSFFMDVLELYDLQMAHLTPNAVMTLAIFAHLCEMFIGVRPSLRLFRWFFTVQPVSPPSVVGGCYFQPRGPVLNRYIPCVLRKKWDDWKSDWFYTPLADETRLRLPSQPPAQASSWRAPVDLGDGYDAVLDRLAGLRSQGLTRAMVYGDYLHRQIAPLQRRARGAWEYTGSEDYMRTHQGGRWDWAPEDFKMVVQRVLNLSSVEASLIPQGVLPLCSDPDRANILTIIHPADARGKRKQEGTPSPSPPRGGGAARASSRRLDGAVPTSQPEGERKKKRRRKMGETEPRRGNLISPPRWSFSRPPRSEIPSRSSRHSKSGQSEAEETATAEARRREADRREAADRLREAEEAAQEAVRVRQAEEAAREEAKLRRAEESVREAEVARARQAACQTPDPTPPEATMTSEATHDEVAGAPLGPDPSGDVWDEPASGVAPGSGTSIGGPSRAAPIPRRLSPLPSAAPLNAEPLLQALAAANTTVLDELGAQMEVLLAERTELDAAWARVEEGRRSVEAMVEAGRKAHRRHASELEARRRELAEIAREVEEERETALIATAVLNEARDDLRLQYGSRAAELEKKLDAARGVLDAAAARERRAAENEAVSRRREEALEARAKALEERARARERDLADREAAVAIREATLAAHEAACAEEESTLRLREDALTERERALGEAEAAAQRLADSLSLREAAREEQARRNLEGARAERAALDQRATELEARAKELDARARSGGAAAGDGDLAARLAAAEHTIADLQGVLDSSAGEVEALRLAGEVGPGMLRDAVSRLDRAGRQAGLWGGRTAKYAANQGGLAQRLSEMAGTLQRLPEELEETIKSSSRDLARGAVELVLASYQARDPDFSPWAALDEFPPGTEDDARAQVRDAADHIVHSFEGTAPRLAFALDSDEEGGDGGAGDSGDEAGDPGASE

SEQ ID NO: 183038 - protein, 56 aa, Oryza sativa
  Clone ID: PAT_MRT4530_80168C.1.pep
SPSSLEAFLSPRCLFAVRFRLLSVIALPCASSASARYRASARPCASVLVAFPHSYG

SEQ ID NO: 183039 - protein, 48 aa, Oryza sativa
  Clone ID: PAT_MRT4530_80169C.1.pep
MSEPSLLASAIIGLENAATHAVTPRPRANNQRRLHLLAPRKTTIITKL

SEQ ID NO: 183040 - protein, 133 aa, Oryza sativa
  unsure (1)..(133): unsure at all Xaa locations
  Clone ID: PAT_MRT4530_8016C.1.pep
MVAGGGHRHGGAAAKRGEGKGEKRRRSTAHPRLTATTKKAAGAEEGGGASRVDGVDGVPAVGGLGEGVDGVDGGAAKPEEATPRRETVPASGEGRPEVVGDGGERGQRRELDSGGETVXKGRKRAREARAGFK

SEQ ID NO: 183041 - protein, 1155 aa, Oryza sativa
  unsure (1)..(1155): unsure at all Xaa locations
  Clone ID: PAT_MRT4530_80170C.1.pep
MGSVSGIDDFVFPPGQAFRFGSLDFITNDFGKISLLDSDSNQSGRGQISAPFGTPNSAEVYPKIISAELASNHSYEIQSTRTRPDQDDGSYPPILMRLPDDLAAVFTTKASPTRRPRRDPASASIQSSSREVGVIFQPLGTVSTEELDCYLSSPGVSSRPTEILEYDDFGYRYDYAITLLDTLLKEDALNQADHVVNILNQTKTMIAASVPANSASTRTPTGSRVPPLRSQDYHQPSLSVIGAGSSRRSRGHDERSVHSPPERHRERRVERPRRHPIDLRDTINQRRAARGCAPNHSPDRYDDDVDGVAAFTTDLRRVDWPAGFKPSGIEKYDGTTNPESWLTVYGLAIRAAGGDDLYNVVQKSGESLRDYIRRFSEQRNKISDITDDVIIAAFTKGIRHDDLVGKFGRKPPRTVKQMFEKANEYAKAEDAITASKQSGTTWKLKKNMPNTGGSGSTNHKDRKRKPEELVATTTPSSRQRSRVNTFDKIMNSQYPHHPNSNHAAKDCFVYKQFAEQYAKNARKTADGDQSTSKKKDDEDDAPTGFQDHRKELNHIFGGPLAYESKRKQKLTEREINAVQPDTPQYLRWSETTIKFDRSDHPXEWSTRGGTPWYXDPVVRNVKLRRSLIDGGSALSILFAKTLDNMQIPRTELKPSNAPFHGVIPGLSATPLGQITLPVTFGTRENFRTENVCFEVADFETASHAILGRPALAKFMAVPHYTYMMMKMPGIPREVIEHSLHVKEDAKPIKQQLHRFAQDRKDAIKEELTKLLAAGFIKEVLHPDWLANPVLVRKKTGQWRMCVDYTDLNKSSPKDPFGLPRIDQTSFITPFGAYCYITMPFGLKNAGATYQRMIQRCFSTQIGRNDEAYVDDVIVKTKQKDDLIADLEETFASIRAFRMKLNPKKCIFGVPSGKLLGFMVSHRGIQANPEKINAILNMKPPSSQKDVQKLTGCMAALSRIAISLGIRRLIVRGDSQLVVDQVMKEWSCLDDNMTAYRQEVRKLEDKFDRLELTHVLRHNNEAADRLANFGSKREVAPSDVFVEHLYEPTVPRKETIEATDTQDGCQFFARQTHLPAQELQTILLSWPFAVWGLDMVGPFKKAVGGYTHLFVAVDKFSKWIEAKPVITIMADKARDFFINIVHRFGVPNRIITDNGT

SEQ ID NO: 183042 - protein, 1054 aa, Oryza sativa
  Clone ID: PAT_MRT4530_80171C.1.pep
MARGSALLDGSVLPPSRIVSERQAGLPGRFMPESATGREIVMLGEGRPAPDYPGRSVFFLPFAMAGLVPPFSSFFMDVLEFYDLQMAHLTPNAVMTLAIFAHLCEMFIGVRPSLRLFRWFFTVQSVSPPSVVGGCYFQPRGPVLNRYIPCALRKKWDDWKSDWFYTPLANEARLRLPSQPPAPVSSWRAPVDLGDDYDAVLDRLAGLRSQGLTGAMVYGDYLRRRIAPLQRRARSAWEYTGSEDYMRTHRGVRRDWAPDDFKIVVQRVLNLSSVEASLIPQGLLPLCCDPDRASILTIMMGVGASEEVAPKGHDGAGGSRQEESTPGGGRASGPRVGGSGSNRPTDARGKRKLGGTPPPSPPRGGGAVRASSRRPEGAAPTSQPEGERKKKRLRKMGETEPSRGNLISPPRWSFNRPPRSDVPSRSSRHPKSGQSEAEDPAAAEERRRESDRREAADRLREAEEAARETARARQAEEAAREEAARARQAEEVTREETARARQAEAMASFEAVYDKTAGASLGPTPSGDAQATTSGAACDKAAGASPGPAPSGDAQDQTGPGDIPELSASSGGPSRVAFSPRRLFSSSSATPLSAEPLLQALAAANTAVLDGFSAQVEALRAERAELEAAWARVEEGRRSVDAMVEVGRKAHRRHISELEARKAALAEIAREVEEEREAALVATTAMIEAQDSLRLQHGSWEAELKKKLDAAQGVLDAAAAREQRATEAEAASRRREEALEARAMALEDHAGAVETSLADREAAAAIREATLAAHEAACAEEESALRLREDALAERERALEESEAATQRLADSLSLREAAQEEQARRNLECIRAERAALEQQAANLETREKELDARKRSGGAATGESDLVARLAAAEHNVADMQRALDSSTGEAEALRLSGEIGPGMLWDAVSRLDRAGREAGLWKGQTISRSTNLEGLAPHLRRMAWAVQQLPEELEKTIKSSSRDLAQGAVELVLASYQARDPGFSPWMALEEFPPGTEDDARARVRDAANHIVQSFEGSAPRLAFAPSSDEEGDASGEDDGGDEASDPGALE

SEQ ID NO: 183043 - protein, 961 aa, Oryza sativa
  Clone ID: PAT_MRT4530_80172C.1.pep
MAGLVPPFSSFFMDVLEFYDLQMAHLTPNAVMTLGIFAHLCEMFIGVRPSLRLFRWFFTVQSVSPPSVVGGCYFLPRGPVLNRYIPCVLRKKWDDWKSDWFYTPLADEARLRLPSQPPAQASSWRAPVDLGDGYDAVLDRLAGLRSQGLTGAMVYGDYLRRRIAPLQRRARGAWEYTGSEDYMRTHQGVRWDWAPEDFKILVQRVLNLNSVEASLIPHGILPLCSDPDRASILTIMTAVGASEEQAPKGHDGAGGSRRGDQSTPGGGRASGPRVGGSGSNRPTDARGKRKLGGTPPPSPPRGGGAVRASSRRPEGAAPTSQPEGERKKKRLRKMGETEPSRGNLISPPRWSFNRPPRSDIPSRSSHHPKSGQSEAEDPAAAEARRRESDRREAADRLREAEEAAREAARARQAEDTAREEAARARQAEEAAREEAARATASGMARDEAAGASLGPTPSGDAQDQTGPGDIPEAGTSIGGPSRAASSPRQLFPMPSVAPLSAEPLLQALAAANTAVLDGLSAQVEALQAERAELDAAWARVEEGRHSVEAMVEAGRKAHRRHVSDLEARKTALAEIAREVEEERGAALIATTVMNEAQDSLRLQHGNWEAELKKKLDAAQGVLDAAAAREQRAAETEAALRRREEALEARAMALEERACVAEKDLADHEAAVASREATLVAHESACAEEESALRLREDALAERERALEEAEAEAQRLADSLSLREAALTEQARRNLESVRAERAALEQRAADLEAREKELDARARIGGAAAGESDLAARLADAEHTVADMQRALDSSAGEAEALRLAGEIGPGMLWDAVSRLDRAGRQAGLWKGQTIKPAANLGGLAQRLSKMAGALQQLPEELEKTIKSSSRDLAQGAVELVLASYQARDPNFSPWMALDEFPPGTEDSARAQVRDAADHIVHSFEGSAPQLAFAPNSDEEGDASGADDVEDEAGDPGASE

SEQ ID NO: 183044 - protein, 217 aa, Oryza sativa
  unsure (1)..(217): unsure at all Xaa locations
  Clone ID: PAT_MRT4530_80173C.1.pep
MPRNLGIIPSPSKSSSICSLTLSLSLNSPPPPVVPAPAPAPAPAPAPSSSPVAAPAPAPALAPASASTPAPVLTFALASAFRGVASGSSRWLPSTPSGNNNSSSEAANGNTNLMDSRSRLEEPFXMVNTRTGSRVAGDGSNSEEQTAHVNGVPGNGPPPPLENPTIAQVLHEFNRLARYALKDVRTDAKRKEKFLSGLNDELTNQLISRDYANFEKL

SEQ ID NO: 183045 - protein, 997 aa, Oryza sativa
  Clone ID: PAT_MRT4530_80174C.1.pep
MARGSAPLDGSVLPPSRIVSERQAGMPRRFMPESASGREVVELGEGRPAPHYPGRSVFFLSFAMAGLVPPFSSFFMDVLEFYDLQMAHLTPNAVMTLSIFAHLCEMFIGVRPSLQLFRWFFTAQPVSPPSVVGGCYFQPRGPVLSRYIPCVLRKKWDDWKSDWFYTPLADEARLRLPSQPPAQASSWRAPVDLGDGYDAVLDRLAGLRSQGLTGAMVYGDYLRRRIAPLQRRARGAWEYTGSEDYMRTHQGHKWDWVPEDLRMVVQRVLNLSSVEASLIPQGVLPLCSDPDRANILTIMQAVGASGERAPRGHDGAGGSRRGEQSTPGGGRASGPRDGGPGGSHPTDARGKRKQESTPSPSPPRGGGAVRASSRCPEGAVPTSQPEGERKKKRLRKMGGPSHAGGTSSRPRGGRLAALLAGSSPRQLRPYSFSHLPRRVFTHPFLFVFWFFFCLSEIPSRPLRHSKSGRSEAEETVTAEARRREADRREAADRLREAEEAAQEAVRVLQAEEAAQEKARLRRAEESVREAEAAHARQAACQAPDPTPPEATTTSEATRDEAAGALLGPDPSGDTQDEPASGDAPESGTSIDGPSRAAPTPRRLSPLPSAAPLSAEPLLQALAAANTTVLDGLSTQMEVLQAERAELDAAWARVEEGRRSVEAMVEAGRKAHRRHTSELEARRRDLAEIAREVEEERETALIATAVFNAARDDLRLQYGSRAAELEKKLDASRQREEALEARATVLEERARALDAKEKDLADHEAAVATREATLTAHEAACAEEESALRLREDVLTERERALEEAEAAAQRREEQARPAEHTIAEMQGALDSSAGEVEALRLAGEVGPGMLRDAVSHLDRAGRQAGLWGGRTAKYAANQGGLAQRLSEMAETLQRLPEELEETIKSSSRDLARGAVELVLASYQARDPDFSPWAALDEFPPGTEDVARAQVWDAADHIVHSFKGTAPRLAFALDSDEEGGDGGADDSDDEAGDPGALK

SEQ ID NO: 183046 - protein, 270 aa, Oryza sativa
  unsure (1)..(270): unsure at all Xaa locations
  Clone ID: PAT_MRT4530_80175C.1.pep
MDSRSRLESPSCLLPLQMVNTRTGSRVAGDGSNSEEQTAHVNGVPGNGPPPPLENPTIAQVLANQTQMMTMMMQQVHQXDAIADAAXQNQQCGPPQSKPPXSFSSIRPPTFSSTTDPMEANDWLHAIEKKLNLLXCNDQEKVAFATHXAXGHASSWWDNYLVTRLVGTEVTWAEFCCSFRKAQVPDGIVAQKKREFRALNQGSRTMTEYLHEFNRLARYALKDVRTDAKRKEKFLSGLNDELTNQLISRDYANFEKLVDKAIRQEDQCNK

SEQ ID NO: 183047 - protein, 939 aa, Oryza sativa
  Clone ID: PAT_MRT4530_80176C.1.pep
MARGSAPLDGSVLPPSRIVSERQAGLPRRFMPESATGREVVVLGEGRPAPHYPGRSVFFLPFAMAGLVLPFSSFFMDVLEFYDLQMAHLTPNAVMTLAIFAHLCEMFIGVRPSLRLFRWFFTVQPVSPPSVVGGCYFQPWGPVLNRYIPCVLRKKWDDWKSDWFYTPLADEARLRLPSQPPAQASSWRAPVDLGDGYDAVLDRLADFKVVIQRVLNLSSVEASLIPQGVLPLCSDPERANILTIMQAVGASGERAPRGHDGAGGSRRGEQSTPGGGRASGPRHGGPGGSRPADARGKRKQEDTPSPSPPRGGGAVRASSRRPEGAAPTSQPEGERKKKRLRKMGGTEPCRGNLISPPRWSFSRPPRSEIPSRPSCHSKSGRSEAEETATAEARRREADRREAANRLREAEEAAQEAVRARQAEEAAWEEARLRRAEEPVRETEAAHSRRAACQAPDPTPPEATTTSEAAHDEAAGAPPGPDPSGDVRDEPASGDAPEFGTSIGGPSRAASLPRRLFPTPSAAPLSAEPLLQALAAANTTVLDGLSAQMEVLQAERAELDAAWARVEEGRRSVEAMVEAGRKAHRRHTSELEARRRDLAEIAREVEEERETALIATAVFNTARDDLCLQYGSRAAELEKKLDASRQREEALEARATVLEERARALDTKERELVGREAAVAIREATLVAHEAACAEEESALRLREDELTERERALEEAEAAAQLREEQARLNLEGARAERAALDQRAAEFEARAKELDARAHSGGAAAGDGDLAARLAAAEHTITELQGALDSSAGEVEALHLAGEVGPGMLRDAVSRLDCAGRQAGLWGGRTAKYAANQGGLAQRLSEMAGTLQRLPEELEETIKSSSRDLARGAVALDEFPPGTEDGARAQVRDAADHIVHSFEGTAPRLAFALDSDEEGGDGGADDSDDEAGDPGASA

SEQ ID NO: 183048 - protein, 1012 aa, Oryza sativa
  Clone ID: PAT_MRT4530_80177C.1.pep
MARGSALLDGSVLPPSRMVSEKQAGLPRRFMPESATGREIVMLGEGRPAPDYPGRSVFFLPFAMAGLVPPFSSFFMDVLEFYDLQMAHLTPNAVMTLAIFAHLCEMFIGVRPSLRLFWWFFTVQSVSPPSVVGGCYFLPRGPVLNRYIPCVLRKKWDDWKSDCWRAPVDLGDGYDAVLDRLAGLRSQGLTGAMVYGDYLRRRIAPLQRRARGAWEYTGSEDYMRTHQGVRWDWAPEDFKILVQRVLNLNSVEASLIPHGILPLCSDPDRASILTIMTAVGASEEQAPKGHDGAGGSRRGEQSTPGGGRASGPRVGGSGSNRPTDARGKRKLGGTPPPSPPRGGGVVRPTLIATVFLLSQKQVFSYPSCLSSGFSFRFSDVPSRSSHHPKSGQSEAEDPAVAEARRRESDRREATDRLREAEEAAREAARARQAEDTAREEAARARQAEEAAREEAARARQAEAMATSEAARDEAAGASLGPTSSGDAQATASGVARGEAAGASLGPTPSGDAQDQTGPGDIPESGTSIGEPSRAASSPRQLFPTPSVAPLSAEPLLQALAAANTAVLDGLSSQVEALQAERAELDAAWARVEEGRRSVEAMVEAGRKAHRRHVSDLEARKTALAEIAREVEEERGAALIATTVMNEAQDSLRLQYGSWEAELKKKLDAAQGVLDAAAAREQRATETEAALRRREEALEARAMALEERACVAEKDLADREAAVATREATLAAHESACAEEESALRLREDALTERERALEEAEAAAQRLADSLSLREAALTEQARRNLECVRAERAALDQRAADLEAREKELDSRARSGGAAAGESDLATRLAATELTIADMQRALDSSAGEAEALRLAGEIGPGMLWDAVSRLDRAGRQAGLWKGQAMKYSTNQGGLAQHLSKMAGALQQLPEELEKTIKSSSRDLAQGAVELVLASYQARDPNFSPWMALDEFPPGTEDSARAQVRDAADHIVHSFEGSAPRLAFAPNSDEEGDASGADDSDDEAGDPGASD

SEQ ID NO: 183049 - protein, 868 aa, Oryza sativa
  Clone ID: PAT_MRT4530_80178C.1.pep
MAWGSALLDGSVLPPSRIMAHLTPNAVMILAIFAHLCEMFIGVRPSLRLFRWFFTVQSVSPPSVVGGCYFQPRGPVLNRYIPCALRKKWDDWKSDWFYTPLADEARLRLPSQPPAQASSWRAPVDLGDGYDAVLDRLAGLRSQGLTGAMVYGDYLRRRIAPLQRRARGAWEYTGSEDLMRTHQGVRWDWAPEDFKILVQRVLNLNSVEASLIPQGILPLCSDPDRASILTIMIAVGASEERAPKGHDGAGGSRKGEQSTPGGGRASGSRDRGPGSSRPADARGKRKQGGSPPPSPPRGGGAARASSRRPEGAAPTSQPKGERKKKRPRKMGETEPSRGNLISPPKWSFNRPPRSEIPSRPSRHSKLGQSEAEDPAAAEARRRESDRREAADRLREAEEAAQEAARARQAEETAREEAARARQAEEAAREEAARARQAEEAAREKAGFRQDEAMATSEAARDEAAGASLGPTPSGDAQATTSGAAGNEAAGTSLGPTPSGDAQDQPGPGNIPESGTSIGGPSRVASSPRRLFPTPSIAPLNAEPLLQALAVANTTVLDGLSAQVEALQAERAELDAAWARVEEGRRSVEAMVEVGRKAHRRHVSELETRKKVLAEIAKEVEEERGAALIATTVMNEAQDTLRLQYGSWEAELGKKLDAAQESACVVERDLADREAAVTIREATLAAHEAACAEEESALRLREDALTERERALEGAEAAAQQLADSLSLREAAQEEQARRNLEGARAERAALNQRAAELEARAKELDARARSGGAAAGESDLAARLAAAEHTIADLQGALDSSAEEVEALRLAGEVGPGMLWDAVSRLDRAGRQVGLWRGQTVKYAANQGDGRGSPTAPEELEKTIKSSL

SEQ ID NO: 183050 - protein, 773 aa, Oryza sativa
  Clone ID: PAT_MRT4530_80179C.1.pep
MARGSALLDGSVLPPSRIVSERQAGLPRRFMPESATGREIVTLGEGRPAPDYPGRSVFFLPFAMAGLVPPFSSFFMDVLEFYDLQMVHLTLNAVMTLAIFAHLCEMFIGVRPSLRLFRWFFTVQSVSPPSVVGGCYFQPRGPVLNRYIPCALRKKWDDWKSDWFYTPLADEVRLRLPSQPPAQASSWRAPVDLGDGYDAVLDRLAGLRSQGLTGAMVYGDYLRRRIAPLQRRARGAWEYTGSEDFMRTHLGVRWDWAPEDFKILVQRVLNLNSVEASLIPQGILPLCSDPDRASILSIMMAPEGEREKKRFRKMGETEPSRGNLISPPKWSFNRPPRSEIPSRPSRHSKPGQSEAEDPAAAEARRRESDRREAADRLREAEEAAQEAARARQAEETAREEAARARQAEETAREEAARARQAEEAVREEAARARQAEEAAREKAGFRQDEALATSEAARDEAAGASLGPTPSGDAQATASGAAGDEAAGASLGPTPSGDAQDQPGPGDIPESGTSIGGPSRMASSPRRLFPTPSIAPLNAEPLLQALAAANTTVLDGLSAQVEALQAERAELDAAWARVEEGRRSVEAMVEVGRKAHRRHVSELETRKKVLAEIAKEVEEERGAALIATTVMNEAQDTLRLQYGSWEAELGKKLDAAQGVLDAAAAREQRAAETEAASRRREEALEARAMALEERACVVERDLADREAAVTIREATLAAHEAACAEEELALRLREDALTERERALEGAEAAAQQLADSLSLREAAQEEQARRNL

SEQ ID NO: 183051 - protein, 570 aa, Oryza sativa
  Clone ID: PAT_MRT4530_8017C.1.pep
MAGGGVEDTYGEDRATEDQLITPWSFSVASGYTLLRDPRHNKGLAFSEAERDAHYLRGLLPPSIVSQELQEKKLMHNLRNYTVPLQRYIAMMDLQERNERLFYKLLIDNVEELLPVVYTPTVGEACQKYGSIYRRPQGLYISLKDKGKILEVLKNWPERSIQVIVVTDGERILGLGDLGCQGMGIPVGKLSLYTALGGVRPSACLPITIDVGTNNESLLNDEFYIGLKQRRATGEEYHELLEEFMTAVKQNYGEKVLVQFEDFANHNAFDLLAKYSKSHLVFNDDIQGTASVVLAGLIAALKVVGGTLADHTYLFLGAGEAGTGIAELIALEMSKQTEIPINDCRKKVWLVDSRGLIVESRKESLQHFKQPFAHEHEPVKTLLEAVQSIKPTVLIGTSGVGKTFTQEVVEAMAAFNEKPVIFALSNPTSHSECTAEEAYTWTKGSAVFASGSPFDAVEYEGKTYVPGQSNNAYIFPGFGLGVVISGAIRVHDDMLLAASEALAEQVSEDNFARGLIFPPFTNIRKISAHIAAKVAAKAYELGLASRLPRPDDLVKYAESCMYTPAYRCYR

SEQ ID NO: 183052 - protein, 108 aa, Oryza sativa
  unsure (1)..(108): unsure at all Xaa locations
  Clone ID: PAT_MRT4530_80180C.1.pep
GEDVRRRAGXKAEXAXRRXKXHPSSEXKGRSXTXNIYGSAASPAEXFRQXXTMPEDVVEQKXAEAXAGGNKGTXAATXTATNTGGXAAAEEVMXRVKXADQXTGQGFQ

SEQ ID NO: 183053 - protein, 523 aa, Oryza sativa
  Clone ID: PAT_MRT4530_80181C.1.pep
MHVSKQISEEWMRERANKLKEDVCGLFIMASNGILERMNLVDTIQHLGIDHLFQEEIDSALKDIHENDLASSKLHEVALRFRLLREHGFWVSPDVFNKFKGDHGTFNNELSLADDPRGLLSLYNAAHLFIHGEPELVEAISFARHHLESFNRRNVLKAPLADQVKRALHLPLPRTHRRVEMVSYMFEYGREDGHNPVILELAKLDFNLLQRVHLKELKEISRWWKDVSGYMGINHIRDRVIECYTWSYAVYHEEEMSFARMLFAKIVVIIALLDDTYDVHGYTSIQECRMLNAAIQGWDDSAVLLVPEYLRKFYEFILRCFREFEDQVPSNQKYLIAFSKTELQRLSSYYLEGAEWSHRKHMPSFSEQVALATMTTGTRPLAAGLMVGMSESMTTKQAYEWAVNSTDAIISCGKTGRFMNDIAGFKLGSQNKADMPCSVESYINEHKVTADVAIAKINELVEDEWKTTNQARIDHRDVLPVVQRLINITMAIPLYYSDGIDGFTFGEGIQEVLEKLYVKPIPL

SEQ ID NO: 183054 - protein, 188 aa, Oryza sativa
  Clone ID: PAT_MRT4530_80182C.1.pep
MGGKLCLVAARSAHPSGRSAAVWPVTRTGQCVAGGETSRPGRIREQPTYATPPPSPRGSHRRMQRVARRGGKCTSQGGAVLADVHRWWAAARVDRVRVVDWTGRGVRAQRVRGLGTEESPKTRGEAGSAPGRWFPSRGESLPSCGIRVTNVCTWKRTLLKTRVVSILIYILISYDTTILSKRNDTDFT

SEQ ID NO: 183055 - protein, 61 aa, Oryza sativa
  Clone ID: PAT_MRT4530_80183C.1.pep
FRAEIPTQNSISNKDLGYSLGKSIQYSVITSIEKEYKKEWIYIYIYMADSLCCTPEIYTTL

SEQ ID NO: 183056 - protein, 108 aa, Oryza sativa
  unsure (1)..(108): unsure at all Xaa locations
  Clone ID: PAT_MRT4530_80184C.1.pep
XSIRPEXXPNXPYGGLLHXDDXXXHXXSAHXCMCWMXXXMGSGXTLHXWMSWVYKHXXLXVHLXYNXXXXFSGXRVGXGHFPSAKTTIYGGLXXRXCFCNNQVSACAA

SEQ ID NO: 183057 - protein, 124 aa, Oryza sativa
  Clone ID: PAT_MRT4530_80185C.1.pep
FCFRPHRPPDQGERGREGGKGRGVKRRRKKNTGGKKEEEEEEKKRGKGRIRGFLCGFRQILLRFVVLAARVVVRIKEWKPPPIAHLHAVKERAIKSGDNGGGQRHQQRRQGGGGGGLRTAVAEG

SEQ ID NO: 183058 - protein, 419 aa, Oryza sativa
  Clone ID: PAT_MRT4530_80186C.1.pep
MAGIGPIRQDWEPVVVRKKAPTAAAKKDEKAVNAARRSGAEIETMKKYNAGTNKAASSGTSLNTKRLDDDTESLAHERVSSDLKKNLMQARLDKKMTQAQLAQMINEKPQVIQEYESGLCILYLSIWHSSRCDFSLVTNQLQAAQLRSHNQALQPQCCRKNGSRTGLMYWGERGREGGKGRGVKRRRKKNTGGKKEEEEEEKKRGKGRIRGFLCGFRQILLRFVVLAARVVVRIKKWKPPPIAHLHAVKAIMEMLWWYNNGYKVKMESERSNQGIMEEDSVISNGGREEEVVVANGSGGGVGGTARSSGGGGGKVVQVLQRNFGEVQGILEQNRVLIQEISQNHEARDADGLTRNVALIRELNTNIARVVDLYANLSGSFSRSVTAAASANNTNATNSTSPSAAAAAKASKRSRATDTE

SEQ ID NO: 183059 - protein, 113 aa, Oryza sativa
  unsure (1)..(113): unsure at all Xaa locations
  Clone ID: PAT_MRT4530_80187C.1.pep
PNKMEKNQKRKKSYTDRFGHXRXNSDSLVPQEEPRSKKKKKKSHPQTIPTTSHTKRSPPKPRKAKNKSWREKKRKKEEEEAAASDPSRTALLAAAATLVMLPSATRFLAAAAP

SEQ ID NO: 183060 - protein, 507 aa, Oryza sativa
  Clone ID: PAT_MRT4530_80188C.1.pep
MESFRRFLNPLVLNLQKMELELTCPVCKCATTRTMDGYSCAICKSAYRSQDLRPASHLEAIVNIHRSLSSTVSSMVTQQEAQADIPVAKTSFQGTPESGNRNGAEKSDQSTGLAYGNVDGVKERNPALETRGAADVTAMPTILVQKGPCRSQSSDGPRDLDCDSNDLEGELDNQLLLVLGNVNFVTLPKPLRAPQAFFTGDIANNLEPELARASKIKCSVCGLKGAALGCLVKSCRKSFHVPCAHGISGCRWDDEILDQFEHQTGITVTNGWRTLKVLMAILAGKWVLNINWLKACMEAKEPVPEEPYEISSDVHGSFDGPRMGRLRAMQNVHLEDLITAAGGSILDKADLSSTSLIIYSMEPPQGSDPDTLNEVIRKRKAEAEELAATIGSRAMFTNNSRGPLQAFKSHQSDGHRASSMAFFSSGSRALVEILTGLQSVERPMPVDHTLFEFGSIRYHLQASITDSENIYLSISTPSLSYEASPSSGVLQQRIAGAGGNPDGIAEC

SEQ ID NO: 183061 - protein, 332 aa, Oryza sativa
  Clone ID: PAT_MRT4530_80189C.1.pep
HEAGHEQQRRSWSGKAAAQEQTQAEAVTNAAARTEEKQKQKGGKGKAAAFSFSPLSWIAKLTARSSHGKCGGAKHAPAASMAGPSCRLPKRAAAAAASSSSVVAAVDDVAAGRSSPPRRSPVDVAPRRLSVGNDSAEAVARRLCQQQRRRRRHCSLGGDRDLPPLGHLIPFSLAGSPASQPPENAAAAAAGGATPSDTDAGAKLRTRRHRRRAHRRRRSSLGGSGRRSFSVSGRMPAVRIRPPRAAASAPELERLAVVRRTRDPQRAFRESMVEMIASSGGSIAARPEELERLLACYLALNADEHHDCIVKVFRQVWFEYINLHLHLSRRRR

SEQ ID NO: 183062 - protein, 237 aa, Oryza sativa
  Clone ID: PAT_MRT4530_8018C.1.pep
MPCYKPEYLFGVEGFVQELRTMSFVIGFGNAPFYAQIRHDRHEEKCRVKVTLNSNSEDIPSVMFEAGGRNYIHACQEVARIAIGELRDSYSDQLADTEYRYHPRQPQGSDRGSYLETEGIENDVTTKHLICKLEDKVDHLEKELAALKGEAPPQKARIRLTARKRALFVPRYQLAPKVRVVEKEVAPAQADPPVIIISDEEEESKRNNSKFEWVAIKDEEDEPNEPSIDLRCLEELE

SEQ ID NO: 183063 - protein, 99 aa, Oryza sativa
  Clone ID: PAT_MRT4530_80190C.1.pep
HASAHASAHASAHASADAWVEDLITAAGGSILDKADLSSTSLIIYSMEPPQGSDPDTLNEVIRKRKAEAEELAATIGSRAVPHTCVLDSIASCTVQLTM

SEQ ID NO: 183064 - protein, 99 aa, Oryza sativa
  unsure (1)..(99): unsure at all Xaa locations
  Clone ID: PAT_MRT4530_80191C.1.pep
RKLAASISASATTAVKQQSAAPAAAPNGGGGGGTRVMIIGGDCYCGWATGLYLSXRNYEVCIVDNLCRRXFDLTFGLXTVTPITTIHERVKVWGEQLRK

SEQ ID NO: 183065 - protein, 238 aa, Oryza sativa
  Clone ID: PAT_MRT4530_80192C.1.pep
MESFRRFLNPLVLNLQKMELELTCPVCLKLLNAPTMLPCYHTSCSKCATTRTMDGYSCAICKSAYRSQDLRPASHLEAIVNIHRSLSSTVSSMVTQQEAQADIPVAKTSFQGTPESGNRNGAEKSDQVKSYTPVASKLAYNQSTGLAYGNVDGVKERNPALETRGAADVTAMPTILVQKGPCRSQSSDGPRDLDCDSNDLEGELITSRSSPQSVLKREPNTANDDNREIKRQSPLIRM

SEQ ID NO: 183066 - protein, 60 aa, Oryza sativa
  Clone ID: PAT_MRT4530_80193C.1.pep
IVKVYYFPYYTFLSISKQSSNLTHHKQILNFCIYNPVFPVRPMLLFCFNPNFFLCSNKIS

SEQ ID NO: 183067 - protein, 225 aa, Oryza sativa
  unsure (1)..(225): unsure at all Xaa locations
  Clone ID: PAT_MRT4530_80194C.1.pep
MAAMEAAADAVLAAASRAFCGPAAVFIQIQGCLICLTLGLGWAVAALVRXNEIRRMRRRIVDGNSFAFLCDDVNELEHSVQEKLPRVSVIMPLKGFGEHNLQNWRTQITSLYGGPLEFLFVVESKDDPAYHAVSRLIAEYKDKLEAKVVVAGLSTTCSQKIHNQLIGVEKMHKDSKYVLFLDDDVRLHPGTIGALTKEMEKNPEIFIQTGYPLDLPSGSLGSYCI

SEQ ID NO: 183068 - protein, 125 aa, Oryza sativa
  Clone ID: PAT_MRT4530_80195C.1.pep
MLGFHPPLTTCESTADAPMLHRPPNLSDMWDHCISAPCTEKSIFVCRPLNWNACENFNFRDPAAAAVPRPDPVAVAVGATVAAAGELDGDDGFDGGRLDSDDGCGSGGWVRRRRDDSDNAGSGGG

SEQ ID NO: 183069 - protein, 242 aa, Oryza sativa
  Clone ID: PAT_MRT4530_80196C.1.pep
FTMLRQPSSRCHRSKKLLRPKHILQVVLLVAVSVWLVYQLTRNRRRAVAVEGGGAAMDGEVTRRRLGRKGFIVFAGDASDGDGVRRSIGGRSNVATEAEMERGVTSDQVGDGDRGGEGDVETGEEEEEEDDDGDGYIADDGLPGDEDDDGGDLRHLQADEMDVISFGPHTNSSDSIAAGPLVNGVADDMNRTAVINTSVNDSGVSLNPPVTGSLRYNHRKATGNIEALGGLEPTITNDMEED

SEQ ID NO: 183070 - protein, 1040 aa, Oryza sativa
  Clone ID: PAT_MRT4530_80197C.1.pep
MARGSVPLDGSVLPPSRIVSERQAGLPRRFMPESATGREIVSLGEGCPAPRYPGRSVFFLPFAMAGLVPPFSSFFMDVLEFYDLQMAHLTPNAVMTLAIFAHLCEMFIGVRPSLRLFRWFFTVQPVSPPSVVGGCYFQPRGPVLNRYIPCVLRKKWDDWKSDWFYTPLADEARLRLPSQPPAQASNWRAPVDLGDGYDPVLDRLAGLRSQGLTGAMVFGDYLRRRIAPLQRRARGAWEYTGSEDCMRTHRGVKWDWVPEDFKVMIQRVLNLSSAEASLIPQGVLPLCSDPDRANILSIMMAVGASEERAPKGHDSASGSCKGDQSTPGGGCASGPRDGGSGGSRPADARGKRKQEGTSSPSPPRGGGAARVSSRRPEGAAPTPQPEGERNKKRLRKMGGTEPSQGNLISPPRWSFNRPPRSEIPSRPSRHSKSGQSEAEDPATTEARRRESDRREAADRLREAEEAAREAARARQTEEAAREEAGLRQAEATTSSEATRETDRQEAVDRLREAEEAAQVAVRARQAEEAAREEARLRQAEATTTSEATRDEAAGASLGPTPSCDAQDKPGPGDIPESGTSIGGPSRAASSSRRLFPTPSVAPLSAEPLLQALAVANTMVLDGLSAQVEALQAERAELDAAWARVEEGRLSVEAMVEVGRKAHRRHVSELEARRKVLGEIAKEVEEERGAALIATTVMNEAQDTLRLQYGSWEVELGKKLNAAQGVLDAAAARERRAAETERDLADREAAVAIREVTLAVHEAACAEEESALRLREDALTERERALEEAEAAAQRLADSLSLREAAQEEQARRNLESARAERAALNQRAAELEAQARELDARARSGGAATGDSDLAARLAAAEHTIADLQGALDSSTGEVEALRLAGEIGPSMLRDAVSRLDRAGRQAGLWGGRTVKYAANQGGLAQHLSEMAGTLQRLPEELEGTIKSSSRDLARGAVELVLASYQARDPDFSPWTALDEFPPGTEDGPRAQVRDAADHIVHSFEGSAPRLAFALNSDEEGDDGGVGDSGDEAGDPGASE

SEQ ID NO: 183071 - protein, 107 aa, Oryza sativa
  Clone ID: PAT_MRT4530_80198C.1.pep
RIECMLVARNNLNQRITYKQQFPAQQPSSAPLSNATATSLSLLSVPTENKPQHGRDSVPGSLYSDNHVTSLILSIGFSWARQQRHQSMPHCMTFNFTQGHTGIKHKP

SEQ ID NO: 183072 - protein, 1017 aa, Oryza sativa
  Clone ID: PAT_MRT4530_80199C.1.pep
MARGSALLDGSVLPPSRIVSERQAGLSRRFMPESATGREIVTLGEGRPAPDYPGRSVFFLPFAMAGLVPPFSSFFMDVLEFYDLQMAHLTPNAVMTLAIFAHLCEMFIGVRPSLRLFRWFFTVQSVSPPSVVGGCYFQPRGPVLNRYIPCALRKKWDDWKSDWFYTPLADEARLRLPNQPPAQASSWRAPVDLGDGYDAVLDRLAGLRSQGLTGAMVYGDYLRRRIAPLQRCARGAWEYTGSEDFTRTHQGVRWDWAPEDFKILVQRVLNLNSVEAALIPQGILPLCSDPDRASILTIMMAVGASEERAPKGHDGAGGSRRGEQSTPRGGRASGSRDRGPGSSRPADARGKRKQGGTPPPSPPRGGGAARASNRRPEGAAPTSQPEGERKKKRPRKMWETEPSRGNLISPPKWSFNRPPRSEIPSRPSRHSKSGQSEAEDPAAAEALRRESDRREAADRLREAEEAAQEAARARQAEETAREEAGFRQDEAMATSEAARDEAAGASLGPTPSGDTQATTSGAAGDEAAGASLGPTPSGDAQDQPGPGDIPESGTSIGGPSRVASSPRRLFPTPSIALLNAEPLLQALAAANTTVLDGLSAQVEVLQAERAELDAAWARVEEGRRSVEAMVEVGRKAHRQHVSELETRKKVLAEIAKEVEEERGAALIATTVMNEAQDTLRLQYGSWEAELGKKLDAAQGVLDAAAAREQRAAETEAASRRRKEALEARAMALEERACVAACAEEEFTLRLREDALTERERALEGAEAAAQQLAVNLSLREAAQEEQARRNLEGARAERAVLNQRAAELEARAKELDARARSGGAATGESDLAARLAAAERTIADLQGALDSSAGEVEALRLAGEVGPGMLWDAVSRLDCAGRQVGLWRGRTVKYAANQGGLAQRLSKMAGALQRLPEELEKTIKSSSRNLAQGAVELVLASYQARDPNFSPWMALDELPPGTEDRARAQVRDAADHIVDSFEGSAPRLAFAPNSDEEGNAGGADDSDVEAGDPGASD

SEQ ID NO: 183073 - protein, 1540 aa, Oryza sativa
  unsure (1)..(1540): unsure at all Xaa locations
  Clone ID: PAT_MRT4530_8019C.1.pep
MTGNENVVATNQGDSMSKNPPAKTENGASTTSELEKDSDAAKPCPSDMNREPTKMTSEATRSWCPIHKTKKHTLQACWVFLNVRAEIRACKECGIQRISPTRDVYCPIHKTKTHDLSSCKVFLSAMKAPSPKVQQSYVPIRDNDKEQGATPTSDRFVGVIDIDPHEPSVLRLLEDYGSSTTSVSREVLAIDDVGTSAHANAEAGNQSTTPAQHIRAVQAILRETPYDPVLNDDLERWTERLRELVTNLSNAFEEAATAAHPEQPPXSDANGENPEQRESPQRATPPPRGTGDLRDHINGRQEARRTRDXAFGRSLRDVRWPERFRPVAIEKYDGSTDREEFLQVYSTVLYAAGADDNALANYLPTALKGSARSWLMHLPPYSISSWADLWQQFVANFQGTYKRHAIEDDLHALIQNSGESLREYVRRFNECRNTIPEITDASVIRAFKSGVRDRYTTQELATRRITTTRRLFEIVKRCAHADDALRRKNDKPKTGGEKKPAMDASESSKKKNRKNGKRKAQAKVLAAEYANPPKRPDPQSSDTKKAWCPIHKTDRHSLEDCLVFKKSLEKHIAFEKGKRVRVVEKNEEAVPHESDSAYPDSDLHVSHIFGGSTTYSSKREYKKVEREVCSTWQGAAPKMKWYEQKIEFSEEDHPKTAVIPGRYPIMVEPTIRNIKVARVLIDGGSSINLLFASTLDAMGIPQSELTPTDQPFHGITPQSSSRPLGKITLPVTFGQANNFRTEQITFDVAEFDTTYNAIIGRTALAKFMAASHYAYQVLKMPGPKGTITIQGNAKLVVQCDKRSLDMVEQTPSPSTTTEPPKKPSDMPGVPREVIEHKLMVRPDAKPIRERLRRFAPDRKQAIREELDKLLKAGFIREVLHLEWLANPVMVQKANGKWRMCVDFTDLNKACPKDHFPLPQIDQLVDSTAGCELLSFLDAYSGYHQISMAKEDEEKTTFITPFGVFCYVKMPFGLITTGNTFQRTVQGALSDQLGNNVEAYVDDIIVKTKIDDSLIDDLRETFDNLRRYRLMLNPEKCTFGVPSGKLLGFLVSGRGIEANPEKIKAIENMKSPTRLKEVQKLTGCMVALSSQGAGAGFILTSPYGDQFKHAIHLNFRATNNTAEYEGLLAGIRAAAALGVKRLIVKGDSELVANQVHKDYKCSNPELSKYLAEVRKLEKRFDGIEVRHVYRKDNIEPNDLARRASRREPLEPSTFLDILTKPSVKEEVTKAERAVADIETTDDWRIPLIKFINSEELPEDDTEAEKITRKAKIYXYTWAIPTRTGRLQVPIXVAIDKFTKWIEAVLTGEIKADNAIKFIKGIFCRYRLPHRIITDNGSQFISADFQDYCIGLGVKICFASVSHPQSNGQVERANGIVLQGIKTRVYDRFMSHDKKWVEELPSVLWAVRTTPTTSNKETPFFLMYGSEAMLPGELRHQSTRVQKHSDEDQEEQRDIDVNLLEEHRERVAVRAASYQQALRCYHKKRIRARILSIGDYVLRRVQSQAGRNKLSPKWEGPYTITQVLRPDAFKIADDDGRELANS

SEQ ID NO: 183074 - protein, 116 aa, Oryza sativa
  unsure (1)..(116): unsure at all Xaa locations
  Clone ID: PAT_MRT4530_801C.1.pep
FVPSSLSLSPRALLSVAIAARPPLRRRRRAPSSPSPSPSSXPSSSSPSPXSPSSPSPSPLPPSISPATPPLPSSIPPVMPLPPPSISPVMLPPSIPPSLLSSALVPSPPNCPPSCS

SEQ ID NO: 183075 - protein, 175 aa, Oryza sativa
  unsure (1)..(175): unsure at all Xaa locations
  Clone ID: PAT_MRT4530_80200C.1.pep
MRATHQSPSSCLWCRTGSSGSRSWRRAAHRRRPGRPYHSRGASPRRSSNVPAAAPPGGGAPSSHLRRRRRSRRPCTARSTSSPSPRARRACRTWGPRRRGSPAAAAPPAGTSPTPCRTPTSGRGRRSGGDPSTRCRRPSRRPAAASPGCRXSTPXRRRRPCSARTARGRRRSRGG

SEQ ID NO: 183076 - protein, 165 aa, Oryza sativa
  Clone ID: PAT_MRT4530_80201C.1.pep
LQVNTSPGGTRVGAVSYSSEARRLFNVNDFTSTVDVVKAIEANVNYTSKSKRRSDKRRQTASKTRYRARMARAGAILAEYWGWGGEAEWGLYVFAYKLAQARSRFETESSYSDGDVKDKGTNLPAALETIGVMITETADESGYSSRKRILFIITDGKLSLLVFVK

SEQ ID NO: 183077 - protein, 1055 aa, Oryza sativa
  unsure (1)..(1055): unsure at all Xaa locations
  Clone ID: PAT_MRT4530_80202C.1.pep
MARGSALLDGSVLPPSRIVNERHAGLPRRFMPESATGREIVMLGEGRPAPDYPGRSIFFLPFAMAGLVPPFSHFFMDVLEFYDLQMAHLTPNAVMTLAIFAHLCEMFIGVRPSLQLFRWFFTVQSVSPPSVVGGCYFQPRGPVLNRYIPCVLRKKWDDWKSDWFYTPLADEARLRLPSQPPAQVSSWRAPVDLGEEYDAVLDRLAGLRSQGLTGAMVFGDYLRRRIAPLQRRARSAWEYTGPEDYMRTHQGARWDWAPEDFKIVVQRVLNLSSAEASRLPQEILPLCIDPDRVSILSIMLGVGASEERAPKGHDGAGESRRGKQSAPGGGRASGPRVGGPGSSRPADAQGKRKLGGTPPPSPPRGGGAVRTSGRRPEGAAPTSQPEGERKKKRLRKMGETEPARGNLISPPRWSFNRPPRRFVSLSLQPSFSKKKFFLAHFVRLLAFSSASAMSRRIPPATPSPASPRPKIQWPQRSGGESLTGAKPQTAFGKLKRPPGRPPGFAKRRKLLGRKPPEPAKPKKLPGRRPPGLARLRRQRHLGPLPRAALRXTSSEAARDEAAGASPGPTSPGDAQDQTGPGDIPEPSASSGGPSRVAFSPRRLFSSSSVAPMXSAQVEALRAERAELEAAWARVEEGRRSVDAMVEVGRKAHRRHISELEARKAALAEIAREVEEEREAALVATTAMVEAQDTLRLQHASWEAELKSKLDAAQGVLDSAAARERRATEAEAASRRREEALEARAMALEEHAGAVERGLTDREAATALREATLAAHEAACAEEESALRLREDALAERERALEEAEATTKRLADSLSLREAAQEEQARRNLECVRAERAALEQRAAGLEAREKELDARASIGGAAAGESGLAARLAAAEHTVAEMQRALDSSTGEAEALRLAGEIGPDMLWDAVSRMKRAGRQAGLWGGQTSVPPTNLEGLAPHLNRMAWVLEQLPEELEKTIKASSRDLARGAVELVLASYQARDPNFSPWMALEEFPPGTEDDARARVGDAADHIVNGFEGSAPRLAFAPSSDEEGDASGEDDGGDEASDPGAFE

SEQ ID NO: 183078 - protein, 1126 aa, Oryza sativa
  Clone ID: PAT_MRT4530_80203C.1.pep
MDVDADQVATTSQGMSAAKSEVLTSVGAERRAEDEKLNSDLVSNIATPLNADIQQQPENASLQDEMLGQYTVVADELLQGHGLCWVSDFDAGVPEPATQPNLKRSRASDIDPVVADTLSESESKRMKSANDEEAIDKDSIIQKADDLAVRVEEELFKLFGGVNKKYKEKGRSLLFNLKDKSNPELRERVLSGDITPDRLCSMTAEELASKELSEWRLAKAEELAQMVVLPSTEVDVRRLVRKTHKGEFQVEVEETDGISVEVELGGNLLTQVPSKAPEDQTKSDDKENEDNGAGKNDPQDDLEYVDNEKSDLMQELMVDDLKDTENLPPIPSLDEFMQGLDSEPPFENLSAGTPEEDSDDRDEADTTAESAELPEEEVKVSAAEKIVSEADLPSSQDKSESKLESPKDEVGSNLGPVEQREGKLIKSSPDSVEVKQTTTENVLNRDSTVHNMATTLPMIRESIWEGAIQLTMSSLTNVVAIFKSGEKPPVKEWRSFVEIKGRVKLSAFQEFVEQLPKSRSRAIMVTELCWKEGSHESGRQHLLQTIDSYISDERVGLAEPADGIELYLCPSQGKTVEILSRHLPKEHLESLAVSASSIIGVIVWRRPNVPRMPAHPRHDGSRRPSILKKPQVTGSTPGPRPSLPMSSHGAPPGFPVQRHRHEEDVTDDVPPGFGPGVARDEDDLPEFNFVNSSNPAANVTTTQAYKGRQHVPLTSARPVEQMRELVQKYGKRSSVQARPWDDDDDDDIPEWNPNQLVTQQQPTRQLPVPPTPQQPLPPPPPPPSLQQLHHPYQHQQQQQQQLYHHQNALQPQIPSNSIPQAYLRTQQPLQQLPLMQQQLQPAQAWQQTNAWWPAQGGAAAAAAPASMVQQSQYGVIPNSNNSAQSYGSGSESGSEDDDLDVGIGDVPSELEVKNSGLIPAQSKETERQLSKKEWKKKELAELDTVLAELGISGHAERKPDKQNGGDKNGAPQGPWRGGGYKSEEEITAVYMKEKMKKIASAKKKSGRGGWGCKACCKMEDAARSAKLAGAKKKEKTNSLSIDRLLPSPSSEFRMSTGLICSTWSVWFRLLNALLMNISTISGKICCPYVINIGDLVNGNCVISMQKSYSVNSGFIGANGLTSGYIC

SEQ ID NO: 183079 - protein, 590 aa, Oryza sativa
  unsure (1)..(590): unsure at all Xaa locations
  Clone ID: PAT_MRT4530_80204C.1.pep
SARSRRAPPRHSKSGRSEAEETATAEARRREADRREAADRLREAEEAAQEAVRVRQXPTPPEATTTSEATHDEAAGAPLGPDPSGDAWDGPASGDAPESGTSIGGPSRAAPTPRGLSPLPSAAPLSAEPFLQALAAANSTVLDGLSAQMEALQAERAELDAAWARVEEGRRSVEAMVEAGRKAHRRHASXLEARRRDLAEIAREVEEERETALIATAVLDEARDDLRLQYGSRAAELEEKLDAAREVLDAAAARERRAAENEAASRQREEALEARATALEERPHALDAKERDLADREAAVATREATLATHEAACAEEESALRLREDALTERGRALEEAEAATQRLADSLFLREAAREEQARRNLEGARAERAALDQRATELEARAKELDARAHSGGAAAGHGDLAARLAAAEHTIAELQGALDSSAGEVEALRLASEVGPGMLRDAVSRLDRAGRQAGLWGGRYAKYAANQGGLAQRLSEMAGALERLPEELEETIKSSSRDLARGAVELVLASYQARDPDFSPWAALEEFPLGTEDGARAQVRDAADHIVHSFEGTAPRLAFALDSDEEGGDDGADDSDDEADDPGASE

SEQ ID NO: 183080 - protein, 402 aa, Oryza sativa
  Clone ID: PAT_MRT4530_80205C.1.pep
VNLERHGLVQVGTSSGRDTVRSRRPPSVPADVVVYLSPARVAATKAPRWRHLGRDQVKPTPIKNPIILEIQYLPNLSEPEDPQCEDFEDQAQVAEEDDVDPADEEFFQEMPRQRNHPYILPMDLECTVCMSLGHVINQFLEKKIISRSSTADRQGGHAGRSPSLTLRSSESFLYPSGGGILAGCCKLDLKRFLPGSLRGDASLSAHSIDHRLMAAATHTLNEKVKGDVSSCDTNEHTRDKRRWGPQLSNASSGKGDGGERPRCCRRPSPRSTLLSTIATLNAASTIAKGGELSGARRLDGEARYSTPPPGSPYSTRRPDLVTERAGQWRGEEDEDGSVIDLPPSRFECHLTPSTPFYVAAVGGEGRCGGGEENGRGRRRRMASSSTCRQGEGEIRRVAAIAA

SEQ ID NO: 183081 - protein, 75 aa, Oryza sativa
  Clone ID: PAT_MRT4530_80206C.1.pep
YPTVITARKAMVLGVWVEWHGDRDRTCKTLKFMLVLQPASVRCRVASLFLSFSSAIQCKHESVVYTRTGDVIWIN

SEQ ID NO: 183082 - protein, 1049 aa, Oryza sativa
  Clone ID: PAT_MRT4530_80207C.1.pep
MARGSALLDGSVLPPSRIVGERQAGLPRRFMPESATGREIVMLGEARPAPDYPGRSIFFLPFAMAGLVPPFSSFFMDVLEFYDLQMAHLTPNAVMTLAIFAHLCEMFIGVRPSLRLFRWFFTVQSVSPPSVVGGCYFQPRGPVLNRYIPCALRKKWDDWKSDWFYTPLANEARLRLPSQPPAPVSSWRAPVDLGDDYDAVLDRLAGLRSQGLTGAMVYGDYLRRRIAPLQRRARSAWEYTGSEDYMRTHRGVRWDWAPDDFKIVVQRVLNLSSMEASLIPQGLLPLCCDPDRASILTIMMGVGASEEVAPKGHDGAGGSRQEESTPGGGRASGPRDGGSGSNRPADARGKRKQGGTPPPSPPRGDGAVRASRRRPEGAAPTSQPETERKKKRLRKTGETEPSRGNLISPPRWSFNRPPRSDVPSRSSRHPKSGQSEAEDPAAAEERRRESDRREAADRLREAEEAAREAARVRQAEDTAREEAARARQAEEAAREEAARARQAEEATREETARARQAEAMASSEAVHDKTAGASLGPTPSGDAQATTSGAARDKAVGASPGPAPSGDAQDQTGPGDIPELSASSGGPSRVAFSPRRLFSSSSAAPLSAEPLLQALAAANTAVLDGFSAQVEALRAERAELEAAWARVEEGRRSVDAMVEVGRKAHRRHILELEARKAALAEIAREDSLHLQHGSWEAELKKKLDAAQGVLDAAAAREQRATEAEAASRRREEALEARAMALEDHAGVVEISLADREAAAAIREATLAAHEAACAEEESALRLREDALAERERALEESEAATQRLADSLSLRKTAQEEQARRNLECIRAERAALEQRAANLEAREKELDARERSGGAATGESDLVARLAAAEHTVADMQRALDSSTGEAEALRLSGEIGPGMLWDAVSRLDRAGREAGLWKGQTISRSTNLEGLAPHLRRMAWAVQQLPEELEKTIKSSSRDLAQGAVELVLASYQARDPGFSPWMALEEFPPGTEDDARARVRDAANHIVQSFEGSAPRLAFAPSSDEEGDASGEDDGGDEAGDPGALE

SEQ ID NO: 183083 - protein, 113 aa, Oryza sativa
  Clone ID: PAT_MRT4530_80208C.1.pep
STRPPTRPEELAQMVVLPSTEVDVRRLVRKTHKGEFQVEVEETDGISVEVELGGNLLTQVPSKAPEDQTKSDDKESTDDKTGIQDNDKAPDGTSQDEDNGAGKNDPQDDLEYV

SEQ ID NO: 183084 - protein, 999 aa, Oryza sativa
  unsure (1)..(999): unsure at all Xaa locations
  Clone ID: PAT_MRT4530_80209C.1.pep
MRRKRANGISGSVGARNEGASSLPSGAMARGSALLDGSVLPPSRIVSERQAGLPRRFMPESATGREIVTLGEGRPAPDYPGRFVFFLPFAMAGLVPPFSSFFMDVLEFYDLQMAHLTPNAVMTLAIFAHLCEMFIGVRPSLRLFRWFFTVQSVSPPSVVGGCYFQPRGPVLNRYIPCALRKKWDDWKSDWFYTPLADEARLRLPSQPPAQASSWRAPVDLGDGYDAVLDRLAGLRSQGLTGAMVYGDYLRRRIAPLQRRARGAWEYTGSEDYMRTHQGVRWDWAPEDFKIMVQRVLNLNSMEASLIPQGILPLCSDLDRASILTIMTAVGASEERAPKGHDGAGGSRRGDQSTPGGGRASGSRDGGPGSSRPADARGKRKQGGTPPPSPPRGGGAWSFNRPPRSEIPSRPSRHSKSGQSEAEDPVAAEARRRESDRREAADRLREAEEAAQEAARARQAEETARKEAARARQAEEAAREEAGFRQDEAMATSEAARDKVAGASLGPTPSGDAQATTSGAAGDEAAGASLGPTPSGVAQDQPGPGDIPESGTSIGGPSRVASSPRRLFPTPSIAPLSAEPLLQALAAANTVVLDGFSAQVEALQAERAELDAAWARVEEGRRSVEAMVEVGRKAHRRHVSELEARKKVLAEIAKEVEEERGAALIATTXQRAAETEAASRRREETLEAXMALEERACVVEKDLADREAAVAIREATLAAHESACAEEESALRLREDALTERERALEEAEAAAQRLADSLSLREAAREEQARRNLEGARAEKAALDQRAAELEARAKELDARTRSGGAAAGESDLAARLAAAEHTIADLQGALDSSAGEVEALRLAGEVGPGMLWDAVSRLDRAGRQVGLWRGRTVKYAANQGGLAQRLSKMAGALQRLPEELEKTIKSSSRDLAQGAVELVLASYQARDPDFSPWMALDEFPPGTEDSARAQVRDAADHIVHSFEGSAPRLAFTPNSDEEGDAGGADDSDDEAGDPGASD

SEQ ID NO: 183085 - protein, 51 aa, Oryza sativa
  Clone ID: PAT_MRT4530_8020C.1.pep
MECMVLVFAAGVGGDSDGHAFGKTLVAVLNEDDGNIVKVLCKTLEMKLLEV

SEQ ID NO: 183086 - protein, 956 aa, Oryza sativa
  Clone ID: PAT_MRT4530_80210C.1.pep
MARGSAPLDGSVLPPSRIVSERQAGLPRRFMPESAIGREIVSLGEGCPAPRYPGRSVFFLPFSMAGLVPPFSSFFMDVLEFYDLQMAHLTPNAVMTLAIFTHLCEMFIGVRPSLRLFRWFFTVQPVSPPSVKWDDWKSDWFYTPLADEARLRLRSQPPAQASSWWAPVDLGDGYDAVLDRLAGLRFQGLTGAMVYGDYLHRRIAPLQRRARGAWEYTGSEDFMRTHQGVRWDWAPEDFKIVVQRVLNLSSVEASLIPQGVLPLCSDPDRASILTIMQAVGASEERAPRGHDGAGGSHRGEQSTPGGGRASGPRDGGPGSGRPADARGKRKQEGTPPPSPPRGGGAARASSRRSEGATPTSQPEGERKKKRLRKMGGTEPSRGNLISPPRWSFNRPPRSEIPSRPSRHSKSGQSEAEDPATTEARRRESDRREAADRLREAEEAAREAARARQTEEAAREEAGLRQAEATTSSEATRETDRQEAADRLREAEEAAQVAVRARQAEEAAREEARLRQAEATTTSEATRDEAAGASLGPTPTCDAQDKPGPGDIPESGTSISGPSRAASSSRRLFPTPFVAPLSAEPLLQALAVANTTVLDGLSAQVEALQAERAELDAAWARVEEGRRSVEAMVEVGRKAHRRHVSELEARRKVLGEIAKEVEEERGAALIATTVMNEAQDTLRLQYGSWEAELGKKLDAARGVLDAAAARERRAAETEVASRRREEALEARAMALEERACAVERDLADREAAVAIREATLTAHEAACAEEESALRLREDALTERERALEEAEAAAQRLADSLSLREAAREEQACRNLEGARAERAALNQRAAELEARERELDARARSGGAAAGESDLTARLAAAEHTIADLQGALDSSAGEVEALRLAGEVGPGMFRDAVSRLDRAGRQAGLWGRRTAKYAANQGGLAQRLSEIAGTLQRLPEELERTIKSSSRDLA

SEQ ID NO: 183087 - protein, 313 aa, Oryza sativa
  Clone ID: PAT_MRT4530_80211C.1.pep
MVKETGYYDVLGVSPTATESEIKKAYYMKARQVHPDKNPNDPKAAENFQALGEAYQVLSDPTQRQAYDAHGKSGISTEGIIDPAAIFAMLFGTYGTVMLNTIGYVDSRQAAKELGKKAIFLGVPFVAEWFRDKGHFIKSQVTAAAGAIALMQLQEDLKKYLSAEGHYTEEELEMFMQNHKKVMVDSLWKLNVADIEATLSRVCQMVLQDGSVRREELRARAKGLKTLGKIFQRVKLNNDEGEASDMRNIDNMDDNDGSSPDTSPRREPPYNPIPNPPHAQSPYVEAPQFGGTYYPFNFPMPTAPPGAQRDPIP

SEQ ID NO: 183088 - protein, 1015 aa, Oryza sativa
  Clone ID: PAT_MRT4530_80212C.1.pep
MARGSALLDGSVLPPSRIVSERQAGLSRRFMPESATGREIVTLGEGRPAPDYPGRSVFFLPFAMAGLVPPFSSFFMDVLEFYDLQMAHLTPNAVMTLAIFAHLCEMFIGVRPSLRLFRWFFTVQSVSPPLVVGGCYFQPRGPVLNRYIPCALRKKWDDWKSDWFYTPLADEARLRLPSQPPAQASSWRAPVDLGDGYDAVLDRLAGLRSQGLTGAMVYGDYLRRRIAPLQRRARGAWEYTGSEDFTRTHQGVRWDWAPEDFKILVQRVLNLNSVEAALIPQGILPLCSDPDRASILTIMMAVGASEERAPKGHDGAGGSRRGEQSTPRGGRASGSRDRGPGSSRPADARGKRKQGGTPPPSPPRGGGAARASNRRPEGAAPTSQPEGERKKKRPRKMGETEPSRGNLISPPKWSFNRPPRSEIPSRPSRHSKSGQSEAEDPAAAEALRRESDRREAADRLREAEEAAQEAARARQAEETAREEAGFRQDEAMATSEAARDEAAGASLGPTPSGDAQDQPGQGDIPESGTSIGGPSRVASSPRRLFPTPSIALLNAKPLLQALAAANTTVLDGLSAQVEVLQAERAELDAAWARVEKGRRSVEAMVEVGRKAHRRHVSELETRKKVLAEIAKEVEEERGAALIATTMMNEAQDTLRLQYGSWEAELGKKLDAAQGVLDAAAAREQRAAETEAASRRREEALEARAMALEERACVVERDLADREAAVTIREATLVAHEAACAEEEFTLRLREDALTERERALEGAEAAAQQLAVNLSLREAAQEEQARRNLEGARAERAVLNQRAAELEARAKELDARARSGGAATGESDLAARLAAAERTIADLQGALDSSAGEVEALRLAGEVGPGMLWDAVSRLDCAGRQVGLWRGRTVKYAANQGGLAQRLSKMAGALQRLPEELEKTIKSSSRDLAQGAVELVLASYQARDPNFSPWMALDEFPPGTEDRARAQVRDAADHIVDSFEGSAPRLAFAPNSDEEGNAGGADDSDVEAGDPGASD

SEQ ID NO: 183089 - protein, 26 aa, Oryza sativa
  Clone ID: PAT_MRT4530_80213C.1.pep
WLVGWFQHWLGLINRARYPYLHCELS

SEQ ID NO: 183090 - protein, 1173 aa, Oryza sativa
  unsure (1)..(1173): unsure at all Xaa locations
  Clone ID: PAT_MRT4530_80214C.1.pep
MGSVSGIDDFAFPPGQTFRFGSLNFITNDFGKISLLDSDSNQSGRDQSRHLPLEDLGELRLWPRSDLDPGRLALYSNLLGQSRRKSWMATLAPQASVLDQPRSSTTTTLATTTTTVTSTTSTTAMRITTRPSSSAYSWLTTKRRNSANPEKRTKIAHDKKLNVADWRKSDSDRSENDYSEAEDRRQRALESGRRARELIGQQDVDGTAVFRTLQQNAVAAITLLDTLLKEDALNQADHVVNILNQTKTMIAASVPANSASTRTPTGSRVPHLRSQDYHQPSLSIAGAGSSRRSRGHDERSVHSPPERYRERRVERPHPPHRRRPIDLRDTINQRRAARGHHSPDRYDDNVDGVAAFTSDLRRVDWPAGFKPTGIEKYDSTTNPESWLTVYGLAIRXDSAWSWLHGLPRGTIGSWAELRDHFIANFQGTFERPGTHFDLYNIIQKSGESLRDYIRRFSEXQRNKISDITDDVIIAAFTKGIRHEDLVGKFGRKPPKTVKQMFEKANEYAKAEDAITASKQSGTTWKPKKDTPTAGGSGSNNHKDRKHCFVYKQFAEQYVKNARKTSDGDQGTSKKKDDEDDAPTGFQDHYKEFNHIFGGPLAYESKRKQKLTEREINAVQPNTPQYLRWLEIAIKFDHSDHPDRVVHPGRYPLVLDPVVRNVKLRRTLIDGGSALNILFAKTLDDMQIPRTKLKPSNAPFHGVIPGLSATPLGQITLPVTFGTRENFRTENVCFEVADFETAYHAILGRPALAKFMAVPHYTYMMMKMPGPRGVISLRSDIKQAVTCDKESCEMAQTHETTLAREEIRLAATTASEGEVPATKLTKTEEVVKTKQKDDLIADLEETFTSIRAFKMKLNPEKCIFGVPSGKLLGFMVSQRGIQANPEKINTILNMKPPSSQKDVQKLTGCMAALSRFVSRLGERGMPFFKLLKKTDNFQWGPEAQKAFEDFKKLLTTPPVLASPHPQELLLLYVSSTSQVPRTSIKSQALADFXPSGPSAKKTCQRKRXNIGLCXFDGLKRLTGTGAGVVLISPTGERLSYVLWIHFSVSHNVAEYMALLHGLRIAISLGIRRLIVRGDSQLVVNQVMKEWSCLDDNMTAYRQEIRKLEDKFDGLELTHVLRHSNEAADRLANFDSKREAAPSDVFVEHLYEPTVPRKETLEAMDTQGVSMIETD

SEQ ID NO: 183091 - protein, 125 aa, Oryza sativa
  unsure (1)..(125): unsure at all Xaa locations
  Clone ID: PAT_MRT4530_80215C.1.pep
CWTAPSGSTASSAGAPAASPAASSAGRRRDPLRAGSTTPASSWTATSSPPTTPTPPPPPRRIPPXSPPSSSPSSPPSPAPPPPPSQLLQPPEDHYDGHLLRPPSAHLLLHCSSPLQCFSLQEWWP

SEQ ID NO: 183092 - protein, 984 aa, Oryza sativa
  Clone ID: PAT_MRT4530_80216C.1.pep
MARGSAPLEGSVLPPSRIVSERQAGLPCRFMPESATGREVVALGEGRPAPHYPGWSVFFLSFAMAGLVPPFSSFFMDVLELYDIQMAHLTPNAVMTLAIFAHLCEMFIGVRPSLRLFRWFFTVQPVSPPSVVGGCYFQPRGPVLNRYIPCVLRKKWDDWKSDWFYTPLADEARLRLPSQPPAQASSWRAPVDLGDGYDAVLDRLAGLRSQGLTGAMVFGDYLRRRIAPLQRRARGAWEYTGSEDYMRTHQGGRWDWAPEDFKMVVQRVLNLSSVEASLIPQGVLPLCSDPERANILTIMQAVGASGERAPRGHDGAGGSRRGEQSTPGGGRASGPRDGGPGGSRPADARGKRKQEDTPSPSPPRGGGAVRASSRRPEGAVPTSQPEGERKKKRLRKMGGTERCWGNLISPPRWSFSRPPRSEIPSRPPRHSKSGRSEAEETATAEARRREAVRREATDRLREAEEAAQEAVRVRQAEEAAREEARLRRAGKSAREAEATRARQAACQAPDPTPPEATTTSEATHDEAAGAPLGPDPSGDVRDEPASGDAPESGTSIGGPSRTAPTPRRLSPLPSAAPLNTEPLLQALAAANTTVLDGLGAQMEVLQAERAELDAAWARVEEGRRSVEAMVEAGRKAYRRHASELEARRRELAEIARENEAASRRREEALKARATALEECARARERDLADRETAVAIREATLAAHEAACAEEESALRLREDALTERERALEEAEATAQRLADSLSLREAAREEQVRRNLEGARAERAALDQRAAELEARVKELDARARSGGAAAGDGDLAARLAAAEHTIADLQGALDSSAGEVEALRLAGEVGPGMLRDAVSHLDRAGRQAGLWGERTAKYAANQGGLAQRLSEMAGTLQRLPEELEETIKSSSRDLARGAVELVQASYQARDPDFSPWAALDEFPPRTEDDARAQVRDAADHIVHSFEGTAPRLAFALDSDEEGGDGGVDDSDHEAGDSGASK

SEQ ID NO: 183093 - protein, 115 aa, Oryza sativa
  unsure (1)..(115): unsure at all Xaa locations
  Clone ID: PAT_MRT4530_80217C.1.pep
CGWWRPNRAVTPGGGAGDVPAMSWMGADLRXVKEVETALLLPPVLSLLVERRMRYGGGKLEVSFGYSFVDRPRACTCERVACAGWHELGAGAHECDSGLARGNTGRHRRWLGLAE

SEQ ID NO: 183094 - protein, 62 aa, Oryza sativa
  unsure (1)..(62): unsure at all Xaa locations
  Clone ID: PAT_MRT4530_80218C.1.pep
MAAAVVCXTGAGGFIGSWIXKLLLARGYAXRXTSRRADDPKNAHXWXLXGAAXRLTMVSVDL

SEQ ID NO: 183095 - protein, 100 aa, Oryza sativa
  Clone ID: PAT_MRT4530_80219C.1.pep
TLKNFPLLPFPGKTNPPLFDQLITKPDYLKNLNQSISIYPPGLISKPFLLPKLLPNYLKTQPISLRAPKNKQFFRACFAACMQTYPFFTPYPLLLSFNPK

SEQ ID NO: 183096 - protein, 452 aa, Oryza sativa
  Clone ID: PAT_MRT4530_8021C.1.pep
MEMDEVGGRWTFSRTNEGYTSCGPVVEMSWHRVGALLLGAQSCLPVPEVPAVGGIGSNWNNPAGATNVQVPTVQQQCKLSEFLKTEPPTFAIAVDPMEASDWLRTVEKKLGLIQCTDQERVGFATHQLVGPASEWWDSYEASRPEGHTITWNEFSSVFKRSHVPAGMIALRKREFRYLKQGDLTVTEYLHEFYRLAHYAPEDVETDEDKQEKFLQGLKDELAVQLLLEDYEDFEKLVDKAMQLESEHNRMTNCKRRIVNIPVFPGGNQRQRTEPLQITGSSVVHQEFLPEEDGRNADNNTSNTNDDDTTNNHGSCPISDHPNKACNVSSIHQDVNDSINVGTQNDNLSNFDTEKDSNGDSNYGTTDANVSKDFQPPIPTPSQNDRPQMDSSVKKTLICYNCKEPGHFSRDCPQPKRNLRHHSGHYARRRQVTRLVVTGANAVPVRPHVNPNP

SEQ ID NO: 183097 - protein, 112 aa, Oryza sativa
  Clone ID: PAT_MRT4530_80220C.1.pep
RRSSSGRRWGQPQLRRGPPTATPTARSSCSCAHRYRRRRCSLPPLASRHCRYLHPRAGATTVTSMRRRRCIAATSNHDRRHRSPLAAAVPTPPPPPQSSSVPPQSAATAALH

SEQ ID NO: 183098 - protein, 109 aa, Oryza sativa
  Clone ID: PAT_MRT4530_80221C.1.pep
MTTTKINSNNKACTTPRYTKIRPTPSTPFISEPTIPISGTMDICPRATRHHHGAVPLKMTPSCPSPHQPKPTRPPSSPSSTLPPPPPAPPPPLSPPAPPPPSPLLPRKL

SEQ ID NO: 183099 - protein, 188 aa, Oryza sativa
  Clone ID: PAT_MRT4530_80222C.1.pep
GIPKRESKAGAISGILIGAIVLVLAALFGVFTLIKKRRALAQQKEELYNLVGRPDVFSYAELKLATDNFNSQNILGEGGFGPVYKGKLPDERVIAVKQLSQSSHQGTSQFVTEVATISAVQHRNLVILHGCCIDSKTPLLVYEYLENGSLDRAIFGEFTSAKLPPSALIELYFLSSQIKLTLQQIYLV

SEQ ID NO: 183100 - protein, 103 aa, Oryza sativa
  Clone ID: PAT_MRT4530_80223C.1.pep
MIPIRAPHGLPQCFATATVAAPSSSSPPRPVDVCTVELRWAATVLLHHGRRGTVLLILSRLAPSTPVQARISQSTPAHGQCTPADQPGQREREEEPRKRREGR

SEQ ID NO: 183101 - protein, 110 aa, Oryza sativa
  unsure (1)..(110): unsure at all Xaa locations
  Clone ID: PAT_MRT4530_80224C.1.pep
MTKEMADDVEYHEEFVTNPRGLRLFTCGWLPASSSPKALIFLCHGYGMEVSGFMKACGVELATAGYGVFGIDYEGHGKSMGARCYXQKFEHLVDDCDRFFKSICELEEYR

SEQ ID NO: 183102 - protein, 80 aa, Oryza sativa
  Clone ID: PAT_MRT4530_80225C.1.pep
PISTQTYPSDDFDNTMVGFYIGPAFMDKLADHISKNFMTLPNIKVPLMLGIWGGKGHGKSFQCELASSKREIHPISARAG

SEQ ID NO: 183103 - protein, 370 aa, Oryza sativa
  Clone ID: PAT_MRT4530_80226C.1.pep
MGSFSHQKHSISVYLVLVSAVLLLNSTLGLCGCYKRIFSFGDSIIDSGNFVHIAGDHPCPFKEPPFGMTYFKHPSGRISDGRVVIDFYAQALQLPFVPPSLPEKDRGQFPHGANFAVLASTALPPEYFRRRNHTVPMPFSLATQLEWFKQTLQRIAPGDAARRALLGESLILMGEIGGNDYNFWFLDHKPREVAYQFIPDVVASISSTVQELIGLGARTIMIPGNFPTGCVPAYLSAYRSGNPADYDEFRCLRWFNAFSAAHNQALLNEVSRLKAQHPGVRLIYADYFGAALQLFRNPRRFGINDPLLACCGGHGPYHTGATCDRTATVWGDPGSFANWDGVHMTEKAYHVIADGVLNGPFADPPLLHSC

SEQ ID NO: 183104 - protein, 564 aa, Oryza sativa
  Clone ID: PAT_MRT4530_80227C.1.pep
MDSYRERDITYNWATPITDSKKLSTTREALESSVNLVHYAMAAAPQQSVHPSLPSSTSTLRLLISSSPRRPPPPPPRARRYNRLAASASAAREMPWPHVLTVAGSDSGGGAGIQADIKACAALGAYCSSVVTAVTAQNTAGVQGIHVVPEEFIREQLNSVLSDMSVDVAALVVDPVMVSTSGDTLSESSTLSVYRDELFAMADIVTPNVKEASRLLGGVSLRTVSDMRNAAESIYKFGPKHVLVKGGDMLESSDATDVFFDGKEFIELHAHRIKTHNTHGTGCTLASCIASELAKGATMLHAVQVAKNFVESALHHSKDLVVGNGPQGPFDHLFKLKCPPYNVGSQPSFKPDQLFLYAVTDSGMNKKWGRSIKEAVQAAIEGGATIVQLREKDSETREFLEAAKACMEICKSSGVPLLINDRVDIALACNADGVHVGQLDMSAHEVRELLGPGKIIGVSCKTPAQAQQAWNDGADYIGCGGVFPTSTKANNPTLGFDGLKTVCLASKLPVVAIGGINASNAGSVMELGLPNLKGVAVVSALFDRPSVVAETRNMKSILTNTSRT

SEQ ID NO: 183105 - protein, 63 aa, Oryza sativa
  unsure (1)..(63): unsure at all Xaa locations
  Clone ID: PAT_MRT4530_80228C.1.pep
HAFGYDAIGGAGKIRRMHHHELNMLKRQIPCLDSYXDTANLSLWARFKMVMDAHLNNLRKANE

SEQ ID NO: 183106 - protein, 68 aa, Oryza sativa
  Clone ID: PAT_MRT4530_80229C.1.pep
QRISFFFLFHFFFNGILFGRIDLMTHFNSGSRNGGAAKSPGATGWAAQGARVEHRAEHRERAPSAHSA

SEQ ID NO: 183107 - protein, 92 aa, Oryza sativa
  Clone ID: PAT_MRT4530_8022C.1.pep
GGHRRPPRPPCLPTSSLDGGPPPLLRPLQRRCVASCQPPPSCRPSPAADALVPPSPVEGNSPPTSSPGALCRAASATYSWVPPHPLPPPPIH

SEQ ID NO: 183108 - protein, 69 aa, Oryza sativa
  Clone ID: PAT_MRT4530_80230C.1.pep
WMEYPIFDIILRLSRRKIFQIPILSNKPNSTCPDIIGIDFKFYISVIILGMAGKNKAQEETLPLCIQQI

SEQ ID NO: 183109 - protein, 62 aa, Oryza sativa
  Clone ID: PAT_MRT4530_80231C.1.pep
TIPSPFLREGKRPSKTSLVGMFQTLNLVGPPSLLTNRLQEFPPYSWATRLPNFGPCKCCLRN

SEQ ID NO: 183110 - protein, 47 aa, Oryza sativa
  Clone ID: PAT_MRT4530_80232C.1.pep
MEVMGNLAGWRYEARMHKLSMIPRSVGLVLELLYTAPWLSLYSLQKR

SEQ ID NO: 183111 - protein, 36 aa, Oryza sativa
  Clone ID: PAT_MRT4530_80233C.1.pep
MKRRQICAWDVAPAGNGLLMGVQITGGLLPMVSLKP

SEQ ID NO: 183112 - protein, 81 aa, Oryza sativa
  Clone ID: PAT_MRT4530_80234C.1.pep
KPWGLFWSRSVPLRIRLPSGKSPRGFPIISCRTAQSLPPRLVVIYGYLFIPANHLLVTFYRVRHRFLFVPLPWLDSLYSHP

SEQ ID NO: 183113 - protein, 202 aa, Oryza sativa
  unsure (1)..(202): unsure at all Xaa locations
  Clone ID: PAT_MRT4530_80235C.1.pep
MVHRALAVAGAAGAAGASGAVEAAAGFGGMALRGGWPRVLQILQLLREQGIILAVLLGLSAFFSMAETSITTLWPWKVRELAEKEPENGVFRMLRSDVTRFLTTILIGTTVVNIGATAIVTEAATAMFGEAGVSAATGVMTVAILLLTEITPKSVAVHNATEVARXLPVAWLSLVLYPVGRIVTFLSMGMLQILGLKGRSIV

SEQ ID NO: 183114 - protein, 461 aa, Oryza sativa
  unsure (1)..(461): unsure at all Xaa locations
  Clone ID: PAT_MRT4530_80236C.1.pep
RRLQRDRGREREREREREREGFGHGDEQQPGTERERGIEAPQGPRRRRRRVXSTAQALNDDTLRSVFSRLDDHFDLARCSAVCNSWNRVIDTAHLMRDLYYKRNPRTRGSGSNTSIKSYFKELALDEHASSFSRGPAEVYQWIGHPNQATICRMKSGSILTGVGDKTLRLWSAESCKYMNEYIVPSSKMLVNFDFDENKIVGLTSSQLCIWRRSEPRSIFQSRGASFNRGLCMSYADPEVIIGCEDGRAFVYDMYSRSCSSIYRLHSSPLTCLTITDDQLIAAGSTFGNVAIADQTSGQKLGVLKSAFAPTAIRCLSFSTSGHLIFAGSSAGYAHCWDLRTLRPLWEKRVSPNVIYSAHHLPGDTATLAVGGIDGVLRLICQRTGETIRSFIVNADRPAASSSHQQVEKKSVRQVAPNARLDNIPTRLRPQITCLAVGMKKIVTTHGENYIRVWKFRPKSS

SEQ ID NO: 183115 - protein, 190 aa, Oryza sativa
  unsure (1)..(190): unsure at all Xaa locations
  Clone ID: PAT_MRT4530_80237C.1.pep
GDEQQPGTERERGIEAPQGPRRRRRRVXSTAQALNDDTLRSVFSRLDDHFDLARCSTVCNSWNRVIDTAHLMRDLYYKRNPQARSSGSNTSIKSYFKELALDEHASSFSRGPAEVYQWIGHPNQATICRMKSGSILTGVGDKGYGQWPSTLAIQTLRLWSAESCKYMNEYIVPSSKMLVNFDFDENKEGL

SEQ ID NO: 183116 - protein, 41 aa, Oryza sativa
  Clone ID: PAT_MRT4530_80238C.1.pep
LSPEATSCTRPYLQRVLHSMRAHSVESMPLVSVFTSSTLCV

SEQ ID NO: 183117 - protein, 60 aa, Oryza sativa
  Clone ID: PAT_MRT4530_80239C.1.pep
MGKMIRHLSNWADHRRQHNVGGRGPSHVVTAEAAVAAVAAGSGLGIRLLSSSPQPLADYG

SEQ ID NO: 183118 - protein, 360 aa, Oryza sativa
  Clone ID: PAT_MRT4530_8023C.1.pep
MGNDEAVVTQKMGKAPSPPKDHPALSPYLDWSNMQAYYGPGILPPTFFSPGIAAGHTPPPFILGPQPLVPSAFGKPYAAIYPPGGAFSHPFMPLMVSPLSMEPAKSVNSKDSCSNKKMKEIDGATVSTGSGNSEKTSGDCSLEGSSDGNNQKASGTPKKRSIDDRPKSGVETGGALTPNDRPSEQAALPNLCIPVTAIKPDVSTASDFRVIATPVTEVPTKDDKESKRERRKQSNRESARRSRLRKQAETEELARKVELLTAENTSLRREISRLTESSKKLRLENSALMEKLTETGPDEAQEVPPVKTKAQQARGVENFLSMIDKTGTPRSSGHMDHAIATPKLRQLLGSGLATDAVAAR

SEQ ID NO: 183119 - protein, 89 aa, Oryza sativa
  unsure (1)..(89): unsure at all Xaa locations
  Clone ID: PAT_MRT4530_80240C.1.pep
MSRIRLMHEWAKNSEMTHRIGPKFTSLRRRAKEEATCRNXPGRPNPWVRPNPPXAVGCRASSGRCGLPPYGGWRVLPIFPTAITVITCL

SEQ ID NO: 183120 - protein, 694 aa, Oryza sativa
  Clone ID: PAT_MRT4530_80241C.1.pep
MAATQATAARKFPEGLRVLAVDDSPVCLMLLEALLRRCKYQPTMTRDAATALRMLRERPGDFDLVISDVHMLDMDGFKLLELIGLEMDLPVIMQSANGELETMMKGVTHGACDYLVKPVSLKDIQNIWQHVWRKRKLDIRNHNGGYNDGGELVGATRTKRKYTRKMRNDGDNYGENKENMDSTLKRQRVVWTPELHRDFVIAVHELGVDRAVPRKILRMMKVDYMTRENIASHLQKYRLYLKRISTQTGMDPDQFPEKWKYMNELDALKNYCENGRYRLTPAIASSSSSNPFARMNSASALATNGFLPTHSVQLKNSQRNMAMGTVGHGGSPGNNPVFQPLQNSSNARKCFPSGPSGSSFANISNGLVLDTDDSGSSYAGMFCKSMWETSNGSPSCHSGNSSANKSNNGVSAPANQFQVQSKFGFSALANQFPVQSNCGFSAPANQYQVQSNGGFSVPANQFPVQSNGEFLAPTNQFPVQYPEVNNQPLVQMNQSSTNHFSTIGNDYQFPDLANCSKYWQPTAPSMFPDLGHNDGTSFRPSQANIANINQLSSFAASSGQEPMFGDELHGQMSPIMSTISLSDFDDQMGSFNIGNDTSPAEMMHDNFSLGSDSNISSSTPTDSSFGSTFPDFHLDSPEMPAQMLNGGDEDGILLPVLDDTVDQQDLFDQLDENNGREKLGSGRCVRKGPFECFF

SEQ ID NO: 183121 - protein, 588 aa, Oryza sativa
  unsure (1)..(588): unsure at all Xaa locations
  Clone ID: PAT_MRT4530_80242C.1.pep
RPRPPSPPPPTPPSPATAARHPCAPXAAAAAAAVADRSVAVAAAAISRRRCRQLRRKAAPAMARKADGRRGRRDAAIPKSFVILEDILQHTLSNMHSIQESILFWQSNALRTNSQKAYFMIFQRGPRAFVATTCQTLAKLQNKGSPVQGLLDSASSMFSTKLAILTRMQHCLASFLAEVYNETDKRRSVLIRRSEQSLHSLFVALNNIFSNLEVELRNAGEVXNVFFFLNDNNSFELFQRLPEADVQSSAAISLIYENLQKLDIFLSSRLSSHKKPRKMTKYWLPYTFGALGLSAFTLWLLRHSSLMGSSDIDNWLHGAKKLLVWCWDENVQKPVRYSIYILFFLFILCTMVVQITPFVFKXQTFKGLTGSCPKINKNKLCLSHTSKTMKEKLPENNYDMYTLFSYSELLYXWVILEQLFSLSCSIENVXCLIIQLYSMHIKCRYEMEPGSPEELACLMINQVIFLPXYIYLHLINSGRFFLTNGQVTQRRDRIAHLKRCQLLSGVQEMLAEFQYCMDKGMKEEAQCSLGLLLYSIYRFYRGVESSSKETGEWIYMKEHIFCLADPQLGVAIKRDILSSLRNYKCLSP

SEQ ID NO: 183122 - protein, 267 aa, Oryza sativa
  Clone ID: PAT_MRT4530_80243C.1.pep
MASSCLLLACVVAAAMVSAVSCGPPKVPPGPNITAAYGKQWLEARGTWYGKPKGAGPDDNGGACGYKDIDKAPFLGMNSCGNDPIFKDGKGCGSCFEVKCSKPEACSDKPVIIHITDMNTEPIAAYHFDLSGHAFGAMAKEGKDEELRKAGIIDMQFRRVRCKYPGETKVTFHVEKGSNPNYFAVLVKYVGGDGDVVKVELKEKGSEEWKPLNESWGAIWRIDTPKPLKGPFSLRVTTESDQKLVANDVIPDNWKANALYKSEIQVD

SEQ ID NO: 183123 - protein, 72 aa, Oryza sativa
  Clone ID: PAT_MRT4530_80244C.1.pep
CVGMTDRTQPTWESTSVGTGSRARQLCAGDIFVTEESSPREELSFVELEDYATSSLLGANKAPLVVARSSSF

SEQ ID NO: 183124 - protein, 221 aa, Oryza sativa
  Clone ID: PAT_MRT4530_80245C.1.pep
ILFKFSQDLLIEAVALKWSCTQKNMASIELDTKIWEMEKDVKKLEKNAIEAAKEYENCKRKTQEHKQQLSNAKQHAESIAMITEDLAKKFLEMPTTIEELDCAIQDTESEANSMLFLNQNVLLEYQSRQREIESISIKLEDDKGECERCYSDIEATKGKWLPTLRTLVSKINSTFSRNFQEMAVAGEVSLGMCGSSFFALSHCYLYYFQMAYQSVPNFLQM

SEQ ID NO: 183125 - protein, 285 aa, Oryza sativa
  unsure (1)..(285): unsure at all Xaa locations
  Clone ID: PAT_MRT4530_80246C.1.pep
LFLKRKRELLHQRVGFTVDRVHGGGSXKRTAEIDPSKMDDRDPSVHGXTTRDDDDDVSDDVTTGSGLGTHACRQTMARRREWRAPKRCGHRCELTGDQRKGGGDLRLDDGDGVPAVNGDGEGADGDSNETAITTVXSRVVTTTGATAXDGGSRSHAEAALHTAAGXDESGDGGXGAAAKAHGDRRREGKFRVRRREIDPNRTQIRRFPKRFRRCFQKGKGRVDHGDPFPSINFTGNGKGRPDPPVSGXARARAGGARLGLTWAKGERERAVSSQNQKGILKTFFH

SEQ ID NO: 183126 - protein, 98 aa, Oryza sativa
  Clone ID: PAT_MRT4530_80247C.1.pep
DRLKPCGSHHLYVLALGSVSGGHGMGGSRTLSLSYVNPVAYNPHAHGSASGGDGRSRSRDLCPSLVDPAATPPYSPTDPLQPLTLSCDDDSGGGGFER

SEQ ID NO: 183127 - protein, 121 aa, Oryza sativa
  Clone ID: PAT_MRT4530_80248C.1.pep
VYIVYKHINIYLHHYQRHPQDVNFSPSSRNYALCPYGTPKISVFLSREIGHMKGFKCSVRTSGKNDRGSEKTKAYGAAKALRMPTICSSCKRRSLLRYLTLGDGWPAAGPAQSDPGRGDWP

SEQ ID NO: 183128 - protein, 596 aa, Oryza sativa
  Clone ID: PAT_MRT4530_80249C.1.pep
PSGHMAKGTASRDRLSELPDDLLIRILSFAPVKQAASSTLLSRRWRLQPLWLETGTVNIDLTSDEFLDRTFHRGWGEAGPSTWEDEGDARAALRRRRHGLKKLTVTVTADRDHDDGYVFGCVRRDFSRYLNPDQFRGTCVGLLRHVEELRLECQVASGSLPSPPRYKYAADPGVEYDLYLGMLPCEDFRVLDIAGCCLKVTTTEWLWDWIAYPCLTTLRLRRCTVRLCDLQKVILAAPRLAELRLESVTFSDRPPLSGFIFDEHIHLHCPAVTSFTMVNCHIDGRTFELDAPSLICFRCAQVPSLYFSVSLKSAAPCLAQVDLGSISGTATLGPLLTTMCHISILKLTVYSIVGDIKFGYFPLFPNLKHLVIEELCGFAMDGGLSAAATAVGDMLCRCPEIRELRIRFSWLEYLNESADDHLGADLTAYLKSSACGLQESDYCKVSESDTPATGSTQNFCSSWQNSLRKVVIQFQKGKLTCSQVQLVKFLAEKAAVLEEFDIEGGNQDGTDHINRKIATWRTHSAGACAGEVVIASAAVLPPPAEDTRWDRAWYKYNCDFPVLGKGPPWIWDGTGYKLHFPILPRRQHRPTSDRGY

SEQ ID NO: 183129 - protein, 103 aa, Oryza sativa
  Clone ID: PAT_MRT4530_8024C.1.pep
ERNIGWNIVQIMYPSMLILIKLIPDGTKPISIFPEYLKKFYIKLLINFEEFDHQCPTRKIPGYLHQPEVEPSNISMGNFLLLPYKLYSITHPLNLSSPAKKKK

SEQ ID NO: 183130 - protein, 171 aa, Oryza sativa
  unsure (1)..(171): unsure at all Xaa locations
  Clone ID: PAT_MRT4530_80250C.1.pep
RRRHATYXPPLAPPTQGLPRPPLSCRLPPPHRSPHAKPSAAAYRLQPPLAVASAVAVPLRCRHWPRGVEGRLVHPTHPVVRRLLPVYAVVFPHSGQLTVRRSLPLVSPPSLPSAGPRCCFAHAPSPSADAAATRAAGCHCQRLLTATALAITGRSALMSSRAQPAPPSPPL

SEQ ID NO: 183131 - protein, 78 aa, Oryza sativa
  Clone ID: PAT_MRT4530_80251C.1.pep
MKWIEDKIREDRDQLGGILHIIEVRENNGSNDRDLIKRYSGQIICIYREKNDTSEIDMVSEKYIPCLTIDIFETNIYV

SEQ ID NO: 183132 - protein, 131 aa, Oryza sativa
  unsure (1)..(131): unsure at all Xaa locations
  Clone ID: PAT_MRT4530_80252C.1.pep
XPSPMVYHAMTSHQTLDLQEATGNYSLSNMREWFEDFIAGYVTDVKWRLESLFKVGPPPAGTTGYGAQTVEASGNTARWKFPLSDADVNIGYLFSPNKYFNLAPRLVGYSRRDRSSQQAAFAQADGKAFVN

SEQ ID NO: 183133 - protein, 122 aa, Oryza sativa
  unsure (1)..(122): unsure at all Xaa locations
  Clone ID: PAT_MRT4530_80253C.1.pep
RSIDPQGERKWQTTNHILINCVFARQVXFRVMSPPGXVALSPPRGSWLQDXWSSSRACLPEHLRIGFDSLVLLVSWQLXKERNSRVFDSALASVLVVLESIRSEGQLCSLAGVAVFRDFLGV

SEQ ID NO: 183134 - protein, 117 aa, Oryza sativa
  Clone ID: PAT_MRT4530_80254C.1.pep
QLLLARASPLPPLPPELLASFTCSPAGAASPYPPLPASLLAPRRDGEEREAGSARPSPPPPRVRRPDIRASPPERGYEVAEILARRRRGGHWRRARGRCAWPVGGGEMRPGGQRRRG

SEQ ID NO: 183135 - protein, 117 aa, Oryza sativa
  Clone ID: PAT_MRT4530_80255C.1.pep
FFFFDAKMTGSSMESLLISKPSINTPTIKHLIPPTTSPQVSRYVFCLLAGLVKARGCPQVVVRPLPSPSWPRLNRYPREPPWPAKPTPCCALLLHPGHRTTTIMRHKAQTACARSTS

SEQ ID NO: 183136 - protein, 222 aa, Oryza sativa
  Clone ID: PAT_MRT4530_80256C.1.pep
MGSEGPSGVTVHVTGFKKFHGVAENPTEKIVRNLESFMEKRGLPKGLTLGSCTVLETAGQGGLGPLYEVFESAIVDKEYGLNDQGQVILLHFGVNSGTTRFALENQAINEATFRCPDELGWKPQRAPIVSSDGSISNLRKTTVPVNEVNKSLQQMGFDVAPSDDAGRFVCNYVYYQSLRFAEQRGIKSLFVHFPLFTTISEEVQMNFVATLLEVLASQNYAQ

SEQ ID NO: 183137 - protein, 76 aa, Oryza sativa
  Clone ID: PAT_MRT4530_80257C.1.pep
MAEREVVLESDAMTLSSLVPDVQIEPSRVFEERVKWKRLRICNIRQYKIRYKFWLRWSVLTIRLDSFNPSHGIDGI

SEQ ID NO: 183138 - protein, 303 aa, Oryza sativa
  Clone ID: PAT_MRT4530_80258C.1.pep
ARGPTAAAAAGGTDVALVPLPREPATMSSGLDMSLDDLIKQSKTKPKGGAPSSSGPTRRAAPPAARAAPYPPAGPKAAGGASPYGVYSEHVAAMAGVVPRPRPPPAAAAAAARSLETGTKLHISNLDPGVTVDDVQELFSEIGELKRYSVNYDKDGKSQGTAEVVFARKVDALEAIKRYDGVILDGNPMKIDLIGNNSETSPMPPTAPLLYNPPFPNYPNSVPRRGGQRGQFHQGNGRPGNSQGIGGGPRGFQGSGRPGSGSQGGGGCSQGKTRGNERSRIQKSAADLDAELDQYHAEAVKEK

SEQ ID NO: 183139 - protein, 266 aa, Oryza sativa
  Clone ID: PAT_MRT4530_80259C.1.pep
MPGAATTAAVVDSRRSAQRAEGPATIIAIGTANPANIVPQDNFADYYFGLTKSEHLTELKDKMKRICKKSGIEKRYIHLDEEIIRAHPEIIDKHQPSLEARVEIAAAEVPKLAESAARKAIAKWGRPATDITHLIFSTYSGCRAPSADLQLASLLGLRPSVSRTILSLHGCSGGGRALQLAKELAENNRGPFSDGECPLFEMVAASQTMIPGTEHALGMQATSTGIDFHLSVQVPMLIKDNIQQSLLESFQSVGYTDPDWNNLFWA

SEQ ID NO: 183140 - protein, 57 aa, Oryza sativa
  unsure (1)..(57): unsure at all Xaa locations
  Clone ID: PAT_MRT4530_8025C.1.pep
RSSGYSCLVGTAMLVPASGVRPAFSFPHAAEQLTAEARAAAAHASAHAFXHAFVHAS

SEQ ID NO: 183141 - protein, 81 aa, Oryza sativa
  Clone ID: PAT_MRT4530_80260C.1.pep
LPKGLTLGSCTVLETAGQGGLGPLYEVFESAIVDKEYGLNDQGQVILLHFGVNSGTTRFALENQAINEATFRCLDELGWKP

SEQ ID NO: 183142 - protein, 399 aa, Oryza sativa
  Clone ID: PAT_MRT4530_80261C.1.pep
MPGAATTAAVVDSRRSAQRAEGPATIIAIGTANPANIVPQDNFADYYFGLTKSEHLTELKDKMKRICKKSGIEKRYIHLDEEIIRAHPEIIDKHQPSLEARVEIAAAEVPKLAESAARKAIAKWGRPATDITHLIFSTYSGCRAPSADLQLASLLGLRPSVSRTILSLHGCSGGGRALQLAKELAENNRGARVLVALSELTLVCFSTPDESKIVGHGLFGDGAGAIIVGAGPFSDGECPLFEMVAASQTMIPGTEHALGMQATSTGIDFHLSVQVPMLIKDNIQQSLLESFQSVGYTDPDWNNLFWAVHPGGRAILDNIEGKLQLQPWKLAASRQVLREFGNMSGATIAFVLDELCHRREKDEDESQQHEWGVMLAFGPGITIETIVMRNPLARGLKQN

SEQ ID NO: 183143 - protein, 38 aa, Oryza sativa
  Clone ID: PAT_MRT4530_80262C.1.pep
MDHGRYAPQHGWENNSALDGYGVINGPDYRAGGSYNGR

SEQ ID NO: 183144 - protein, 386 aa, Oryza sativa
  Clone ID: PAT_MRT4530_80263C.1.pep
MDSSLVEAALATASSFQAAYLHLQAAHAPFLPDAAAAADAAAVSHLRRLSEVKRLARDPGVGGGALTAHLEAQVRENQALLRSFDAVVNRLQAALDGKDAAAASLRRDHAELADGNARLGARLDGDDALGAMLSAGVFDSVLRDALRVAHRFTRSLADLLRCAGWDLAAAAAAVYPGVAYSRPGHCRYALLSRVCLSMFDGFDSYQFGGSTDATTLEGIDLAIRRNESLQQFIEHSDADPMELINSSPDCEFAQFCDRKYKQLIHPGIESSLFGNSDCGKLPVLGVAGPLYELFVAMASSIWTLHRLAWAYDPAVGIFQIGQGAEYSVVYMENIVRSKGFSGSKELGKMMRPKVGFTVVPGFRLGGTVIQCRVYLDCGKREGIIGE

SEQ ID NO: 183145 - protein, 91 aa, Oryza sativa
  Clone ID: PAT_MRT4530_80264C.1.pep
MGRGSNAVVTLLLLGVALLSLAATPAAGDGKVGHHHGIDEAVRQLMVATRLEDVVAAELGMDDLHQRVLGGGGSNSDGFRVMPLAIVGMRI

SEQ ID NO: 183146 - protein, 82 aa, Oryza sativa
  unsure (1)..(82): unsure at all Xaa locations
  Clone ID: PAT_MRT4530_80265C.1.pep
VIHSIKGTPPEGFGSSNHSINTTTIAYNLEDAKPTHREISSNXLDKDLADXGYYLTRGLNQYNPHFLICLMSCRVDPRTNVP

SEQ ID NO: 183147 - protein, 175 aa, Oryza sativa
  unsure (1)..(175): unsure at all Xaa locations
  Clone ID: PAT_MRT4530_80266C.1.pep
MGAVQVNFFPEAPLSPFWDINGPRVGVFFQGRARVXVFPPNGKTVFYGGVSPGQFFFFPPPFPVVKKAPKKGGGFLAFKALPFFLGGPLAGKGSFFRGFPKDVLAKAFCLSKKRGPGVPPNKGGGLGGFPPIPNKGSPGVFFGGESFLGGLGVKNNLINYLPPLVFLFWSGPFFG

SEQ ID NO: 183148 - protein, 64 aa, Oryza sativa
  Clone ID: PAT_MRT4530_80267C.1.pep
QKEMALTRPRAGTRGERRGARHWERKRQDHAPFTNRARSQETGTQCGEWRPLGLVVGGKKRGSV

SEQ ID NO: 183149 - protein, 52 aa, Oryza sativa
  Clone ID: PAT_MRT4530_80268C.1.pep
MVKIPKKIGGLSAKKKIWCAIKGLFVVSTLKICIGAGNTHIWVIGASATGVL

SEQ ID NO: 183150 - protein, 81 aa, Oryza sativa
  unsure (1)..(81): unsure at all Xaa locations
  Clone ID: PAT_MRT4530_80269C.1.pep
APPHRRLRAAAPXRHRRAAVAAAAVEPEGVADPSEGQDPQDFEQGKSSLFFEHVDPNCEIVLFTNKIACNDEHPTCDYAMP

SEQ ID NO: 183151 - protein, 110 aa, Oryza sativa
  Clone ID: PAT_MRT4530_8026C.1.pep
TTQAFFFNQSTRHAFIRMFYSTFFYKKNYFCMLPPTHGTTMFVSISISPPSVFFQNLRKYVALSISFFLGFPRASQLTVAPVFLKPPAGRVSPIMNHVSFVHQRVTARVG

SEQ ID NO: 183152 - protein, 444 aa, Oryza sativa
  Clone ID: PAT_MRT4530_80271C.1.pep
MDVASLESSVEATLDALRGDQWRARQPFTIFRVPANVRESNRTSYEPRVVSIGPYYHGGAALRTMEDHKWHYLQGLLSRHAGDGSVAAVSASTLVAEMRTLEAQARACYSERPAGLASDDFIVMLLLDGCFILEFLLKWHAKEPDALCDAGRGLTLVPAAADLLLMENQIPFFVLERLYGAVTGGGAQHGRESLLHLFVKYLGSEDEEPMRWPSGDWEVHHLLHLYYQSFIPNRTPPRSRRGPRSDRRTITRTPRVIPCATEMREAGVQFVAAQSPAAAAGGTRYDVAFDARWGVMEIPTVLIDDARRPLLANLLAFEQSQRGEEEGLLSSYVALMSQLIVTARDVELLRRRGVVVNLLDNDEEAARFFNRLDDCHPAGYDSQAFSGLYDDVTRYCGTWWHSHMAGLRRNYFPSPWSAISVAVATFVIALAATQTYFTVFPPNK

SEQ ID NO: 183153 - protein, 105 aa, Oryza sativa
  unsure (1)..(105): unsure at all Xaa locations
  Clone ID: PAT_MRT4530_80272C.1.pep
MYKRDGVCRPQRGGFGRGFGRSGRGDRXGQPGGRRGPRQEEEKRVPETKLGRLRKEGQDFKIEEIYLHSLPVKEHQIVETLVPGLKDEVMKITPAQKQTPAGQRT

SEQ ID NO: 183154 - protein, 94 aa, Oryza sativa
  unsure (1)..(94): unsure at all Xaa locations
  Clone ID: PAT_MRT4530_80273C.1.pep
TPSSLLSKKKKNQKKKKKKKKKKKKKNKKKKKKKKKKKKKKKKKKKKKKKKKKKKKKKKXXGGALLRDPSLFPGVGRLNFFFWGPKNKITGPCF

SEQ ID NO: 183155 - protein, 117 aa, Oryza sativa
  Clone ID: PAT_MRT4530_80274C.1.pep
MVLVSVRFKAAGMVGAEASHLIVGASSNLVGAAFPPSPILCRLIPTLPSSNLATASSPFSAPPPPWPPHPRPPLLRPCRHLLSSLPAVLRVAVRLMATSTVLGSAAKLLAASAALGS

SEQ ID NO: 183156 - protein, 101 aa, Oryza sativa
  Clone ID: PAT_MRT4530_80275C.1.pep
PTFVCLLQLAHPCCSVSSFHLRGLSLAPVICTLQEYSPAGSRWLAYCWCSQCFSRVSLPQPMKSYSCTPAPLQTWYVARLRVSGLVPGRQVVFFADIGPAL

SEQ ID NO: 183157 - protein, 926 aa, Oryza sativa
  Clone ID: PAT_MRT4530_80276C.1.pep
MPRSPSPPPDRHHHHHHPARRRGPAGAAAPPPRSLRPRRAAAPSSRPLVDDFFPFPSSPSSSPSRPPPPQQQQQRRPSPEPSSSDSDGHGGGGGGGGGGSSASDRRRRKLKLVVKLSQLAPDQNHHRRGPPPPSYSDSSGGEQEQEEEEEAGGNGGDDVSGGEERVKPPKKRRIEPRGDRSRHREVRGETANPKLVGGRSDAASAPRTKRLPVPGMARTTPLPDRKALDMILDKLQKKDTYGVFAEPVDPEELPDYHDVIEHPMDFGTVRRKLARNAYRSFTITSVDFVFLLDDVFLICSNAMQYNAPDTIYFRQAHSIHELARKKFQELRDEGIPTENLIKSEQKIRPHPSNREPIKKPPVRMNSQDALGSDVSAATIASAGDDSNGLSMSQANAVEPQDCIAANGFMDKDISSPLDEIRSEKPDDISARESSVKPSYKSIVVDETRRKTYDTYEEQPSSESDTIFDVFCEEPKELVNVGPHSEHSYARSLARFAGSLGTQGWRLASERIQRVLPTDVKFGRGWVGEYEPPLPPILFVQNQPRSLVSSEANVQRSASMTRNNERIRPTESVNPKDMSLSLLNRITTGNNVVGVPGPLESPEIKPRLFGVTAEPQQRSTEAPSLHENHRAPGSVAKTKRAPSEQTRKGSSLECAKGASGVHDMPSLNNTSGQPKPFFQSQEAAVPQPRNENTWVYHGRPGDGKYGTTDKSRPMSSMGFITKNQQVNAASFAMNLNGQKNVNDNVKSVGSTVMPVQVNTTNRGPDSSRNIFSAFPPAVRENQSIPSAPVAQSWISFGASSESKPTIVSPTFHDSNSGWKMPFANARPDEAKMTAVPQFFRQPVQMVRESPGQNKGLVIFPQLVQTDFSRSQGQPQWQGLVPPMQQKPNKDMLRPDLNIGFPSPGSPPARQSSGINLEAQQPDLALQL

SEQ ID NO: 183158 - protein, 94 aa, Oryza sativa
  Clone ID: PAT_MRT4530_80277C.1.pep
IYEQHGNLERTLTSYTDTAEQIANTLELLFLELGSARVAFQRPPNSRRWIRPPRGSGTWIRLPPPPSPNRRCPRPLPPTTGVLHRLLHPRAPPP

SEQ ID NO: 183159 - protein, 125 aa, Oryza sativa
  unsure (1)..(125): unsure at all Xaa locations
  Clone ID: PAT_MRT4530_80278C.1.pep
MVHTFETHGHVVYTMCTFSSFSARIAYEARKQLPDDRIWLTNEIIHSPTWNKRSEVMGLQNMTVDAGIKDMDVVXQGDDGALPAFAAVVEEMYTLNEQRAQVVDTTCPWVSKVWSMISHLRAGDC

SEQ ID NO: 183160 - protein, 52 aa, Oryza sativa
  Clone ID: PAT_MRT4530_80279C.1.pep
RRRSTAAAMEPLTCQRRREPRPTDLERRGAAAGTPARGVTGSCRMGGEGERR

SEQ ID NO: 183161 - protein, 110 aa, Oryza sativa
  unsure (1)..(110): unsure at all Xaa locations
  Clone ID: PAT_MRT4530_8027C.1.pep
HSARWRPLYNSGSPGLHEFGTTLRPDNNTTTTTTPTPHNDFSLKPVATFPHMLLIXMAVIGSYYYPFTPLHLTRERFHPSKLHPLLWWWSSPTHLDSLISSVPVRCSSSH

SEQ ID NO: 183162 - protein, 52 aa, Oryza sativa
  Clone ID: PAT_MRT4530_80280C.1.pep
SVVACFRILALAICSELLTDRPTNAHREDSSLRHGPESNKRLAQKWAPFKSH

SEQ ID NO: 183163 - protein, 62 aa, Oryza sativa
  Clone ID: PAT_MRT4530_80281C.1.pep
AEVLQAPCAPFITSQLSTIFLPRFMQKASLLPLGAYWSSEAPNPYKESASHHGRCVSCTAQQ

SEQ ID NO: 183164 - protein, 69 aa, Oryza sativa
  Clone ID: PAT_MRT4530_80282C.1.pep
SVGFWGFLKLPWRFFNPGNQLNMHHVLVCVASVVGAVDNLHDPCTLTLVPKECIQSLTTNSDSRTTIMR

SEQ ID NO: 183165 - protein, 718 aa, Oryza sativa
  Clone ID: PAT_MRT4530_80283C.1.pep
MAIEAARLSPSLAAAAILGRRGAPPAALPLRRALPLLLPPRRRRLCFLAAAGGDGRAVALPSSELRKRRGGASSSSSAAPGGGEDEKLRSLRRLLARPDVAIDAYIVPSQDAHQSEFIAECFMRRAYLTGFTGSAGTAVVTKDKAALWTDGRYFLQAEKELSHDWTLMRSGNQGVPTTSEWLNEVLPSGCRVGIDPFLFSFDAAEELKDAISEKNHELVLIKDLNLVDEIWGESRPEPPKEQTRVHGIKYAGVDVPSKLSFVRSQLAENGCNAVVISLLDEVAWLLNMRGSDVPNSPVFYSYLIVEDTAATLFVDNNKVSEDVLEHLEKAGVKLKPYEAILSDVERLAENGAKLWLDSSSINAAIVNVFRSSCERYVKKRGKAGRQIGKESSQGDPATGSSGVQNGTVNALYKVSPATLAKAVKNEAEVEGMKSSHLRDAAALAEFWCWLEGQVRESVPLTEVQVAEKLLEFRQKQDGFIDTSFDTISGYGANGAIIHYRPTPESCSSVGSDNLFLLDSGAQYIDGTTDITRTVHFGEPTPRQKECFTRVLQGHIALDQAVFPERTPGFVLDVLARSSLWKIGLDYRHGTGHGVGAALNVHEGPQSISYRYGNLTALQKGMIVSNEPGYYEDNSFGIRIENLLLVKEVNLPNSFGGVSYLGFEKLTFVPIQSKLVDLSLLSPSEINWINEYHDEVWEKVSPLLSGHSLDWLRKNTRPL

SEQ ID NO: 183166 - protein, 136 aa, Oryza sativa
  Clone ID: PAT_MRT4530_80284C.1.pep
MGSIWVGSAFMFSGCLHSCQLMMFHPIEIWEAGRYETSDAKSFSGIWVATGKDGLMMATVHSTQFMKNEYTFFAGGFLWPVAALQGFLGPDNYGSPSGPRFFDVTKLYTKPYRLVLIGVIDFIASKKNSGEGYSHE

SEQ ID NO: 183167 - protein, 91 aa, Oryza sativa
  unsure (1)..(91): unsure at all Xaa locations
  Clone ID: PAT_MRT4530_80285C.1.pep
VXRDAATAKPNXPPRSTRRSSALIPAPHTRPLKETRAASRSDQGSRGLCTXRAWLQEEAQTRKGIRQCGVRRTPPTPALSVQECGQQVFRE

SEQ ID NO: 183168 - protein, 62 aa, Oryza sativa
  Clone ID: PAT_MRT4530_80286C.1.pep
MDVHPTAAIASLSTSFVDAVTLLEVKLDDVPAGANISGVKPQIRLITSTCIYTAGRVVELIS

SEQ ID NO: 183169 - protein, 124 aa, Oryza sativa
  Clone ID: PAT_MRT4530_80287C.1.pep
MKSGKPICEKVKPAVAVRIFGGLRYAPPDGLVVNNPLLAAFIRAVYTLYMATTVFLYIFGMVTAIKEYEMLVALSIIVVMQPFFILMWIAAPFLRTVAIVKYAMGLPDSNNVNRITTGRMSALA

SEQ ID NO: 183170 - protein, 281 aa, Oryza sativa
  Clone ID: PAT_MRT4530_80288C.1.pep
MAADGAVEPTSATSTWRAAGMRILRGILAVSGHLAGRRAPANNAHLALFSRALQILAQQEPVRLQKLSAPDSGIVEMRLERPEARNAIGREMLQGLRSAIEKVKADATAKVVLLASSVPKVFCAGADLKALSIPTIAIVEGAAFGGENATFSLPETGLAIIPGAGGTQRLPRIVGKSRAKELIFTGRRFDAVEAVTMGVVNYCVPAGEAYKRALELAQEINQKGPLAIRMAKKAINQGMEVDLSAGLAVEEECYEQVLHTQDRLEGLAAFAEKRKPVYTGK

SEQ ID NO: 183171 - protein, 106 aa, Oryza sativa
  Clone ID: PAT_MRT4530_80289C.1.pep
LITARSIATIRSTVSNPLPPGSHPPSRALAPARRRAPHHSRSLSRPPPEKVVVGRSRARHSRSCLPPAEVVAGRSCSRLLSAAPDPVRHRRREEEEEERKWRRWRK

SEQ ID NO: 183172 - protein, 298 aa, Oryza sativa
  Clone ID: PAT_MRT4530_8028C.1.pep
MVASPTVATMPMEAITTTVSAAIAASRHRAATTATSPAETKVLAGVTATAVLLVLMIVDIHHPMIGRLGSRGSIRRPRRDRPVVLRDDVTYDGSAALVDDVDGTESAAITPNAASRSICSTGDSGGGGCDDAAALLFANKKQITSLGGLDGSFVRCGVIDPVDELTQRGGEPKARSGRRWQTTSEHRLPPYRSSESTQDVEKGRERVIPVTAGAAILEIPCRAAVLEILAELCPATTAVHHRSPSRAPSLFPGGEERKTGERGRERAIRHRERRRPGALRCYCWLLPAMLLRLKKASV

SEQ ID NO: 183173 - protein, 444 aa, Oryza sativa
  Clone ID: PAT_MRT4530_80290C.1.pep
MAPTTAAAAASSNGGGESDGSSKEWRLTAPTRGGAMAAAGDKMSIRAVRYKISASVDDRGPRPVLPLAHGDPSVFPEFRTAAEAEDAVADALRSGDFNCYPAGVGLPAARRAVADHLSRDLPYKLSSDDIFLTAGGTQAIEVVISILAQPGTNILLPRPGYPNYEARAAFNNLEVRHFDLIPEKGWEIDLNSLESIADKNTTAIVIINPNNPCGNVYTYEHLSKVAEVARKLGILVITDEVYGNLVFGSSPFVPMGCFGHIVPILTIGSLSKRWIVPGWRLGWVAICDPKKTLQETKIATLITNFLNVSTDPATFIQGALPNILKNTKEEFFKRIIDLLTETSDICYRGIKDIKCITCPHKPEGSMFVMVKLNLYLLEGIHDDVDFCCQLAKEESVILCPGSVLGMKNWVRITFAIDSSSLLDGLERIKSFCQRHKKKNPLNYI

SEQ ID NO: 183174 - protein, 143 aa, Oryza sativa
  unsure (1)..(143): unsure at all Xaa locations
  Clone ID: PAT_MRT4530_80291C.1.pep
ENATFSLPETGLAIIPGYVFKMALYFXAGGTQRLPRIVGKSRAKELIFTGRRFDAVEAVTMGVVNYCVPAGEAYKRALELAQEINQKGPLAIRMAKKAINQGMEVDLSAGLAVEEECYEQVLHTQDRLEGLAAFAEKRKPVYT

SEQ ID NO: 183175 - protein, 158 aa, Oryza sativa
  Clone ID: PAT_MRT4530_80292C.1.pep
MRILRGILAVSGHLAGRRAPANNAHLALFSRALQILAQQEPVRLQKLSAPDSGIVEMRLERPEARNAIGREMLQGLRSAIEKVKADATAKVVLLASSVPKVFCAGADLKERRLMSPCEVREFVNSLRSTFLSFEALSIPTIAIVEGAAFGGGLELALS

SEQ ID NO: 183176 - protein, 85 aa, Oryza sativa
  Clone ID: PAT_MRT4530_80293C.1.pep
LLAHNKYGFHTHVSVLSVASRRRLRRSRAHPPHPLAPAAHPPHPTPTPPLGLPQHPPRGAPGSWSTPTQPGYPMHPLPRCRALSA

SEQ ID NO: 183177 - protein, 40 aa, Oryza sativa
  Clone ID: PAT_MRT4530_80294C.1.pep
LCLEYDQKLVGFAEVPWEFENLWHLANVEKLNAKNLNLYL

SEQ ID NO: 183178 - protein, 519 aa, Oryza sativa
  Clone ID: PAT_MRT4530_80295C.1.pep
MEEPTSCYGYYHYLALAVAVLVLVRVTRTRGGGSDGVRLPPGPWRLPVIGSLHHLAGKPLVHRALADLARRMDAPLMYLRLGEVPVVVATSPGAAREVMRTHDVAFATRPVSPTVRIMTADGEGLVFAPYGALWRQLRRIAILELLSARRVQSFRRVREEEAARLAAAVAAAAPHGEAAVNVSERIAVLIADSAVRAMIGDRFKKRDEFLEALAEGLKLVSGFSLADLFPSSWLASFVTGAARRAQENHRKNFELMDRAIEQHQERRAAAAAASGDVVEDDDLVDVLLRIQKGGGLDVPLTMGIIKAVILDLFSAGSETSATTIQWAMSELMRNPRVMKRAQAELRDNLQGKPKVTEEDLTDLNYLKLIIKETLRLHLPAPLLLPRESRESCKIFGYDVPKGTTVLVNAWAIGRDPKYWDDPEEFKPERFEDSKIDFKGLDFEFLPFGSGRRMCPGIMFAQPNIELALATLLYHFDWSLPAGVKPSELDMTEEMGITVRRKNDLYLHAVVRVPLHATTP

SEQ ID NO: 183179 - protein, 77 aa, Oryza sativa
  unsure (1)..(77): unsure at all Xaa locations
  Clone ID: PAT_MRT4530_80296C.1.pep
PSASQPSAEMSKTHTSHCPTADQCSHLLIPLNKCRDAEYYLPWKGEPXRHAYKKSQHELMIDRMLQIHYIPYAHEAK

SEQ ID NO: 183180 - protein, 213 aa, Oryza sativa
  Clone ID: PAT_MRT4530_80297C.1.pep
GKLPVTWYPQDYLQKVPMTNMAMRANPAKGYPGRTYRFYTGPTIHPFGHGLSYTSFTHSIAHAPSQLTVRLSAHHAAASASASLNATARLSRAAAVRVAHARCEELRMPVHVDVRNVGERDGAHTVLVYAAAPASSAAEAAAGHGAPVRQLVAFEKVHVGAGGTARVEMGIDVCDGLSVADRNGVRRIPVGEHRLIIGELTHTVTIALEQLGV

SEQ ID NO: 183181 - protein, 159 aa, Oryza sativa
  Clone ID: PAT_MRT4530_80298C.1.pep
MPSSTADLAPLYGLHTVGERSCIPDLEVEIAGVEVERQRIWQDWVVVVAAGHRREEEGDGPTGRRREMDPPAVPCAAPPPLRPLRHPHRSSDRAAPLPSRSSDCAAPPLHTYKGNARVSNHQCCRIGERTGEREIWLAEHRLLKGNNRGKSTEEPACCT

SEQ ID NO: 183182 - protein, 633 aa, Oryza sativa
  Clone ID: PAT_MRT4530_80299C.1.pep
MFDLFSFVISIPLPALREAPSVRQIDGEWRYDSRNPVLEWSILLIDQSNPSGSMEFVVPRTSKIKMAPISIGFSASSTFSDLKVTGIRPRIIPESILSAVILSTKKALKMVVLAASIISKSGKALVSRQFVDMSRIRIEGLLAAFPKLVGTGKQHTYVETENVRYVYQPIEGLYLLLITNKQSNILEDLDTLRLLSKLVPEYSPSLDEEGVCKTAFELIFAFDEAISLGNKENVTVQQVKQYCEMESHEEKAHKLMMQSKINETRDVMKKKASELDKMRMERGKLDKGGYSSISGPRVIEKTFNDMSITGSGFGSGSGLGGLGMDMDSFASKPKGGRPSAAATAPGKGLGMKLGKTQKTNQFLESLKAEGEVILEDVQPSSVQSRASPLPPSDPVTVTIEEKLNVTVKRDGGVNNFDVQGTLALQVLNDADGFIQLQIENQDVPGLSFKTHPNINKDLFNSQQVVGAKDPNRPFPSGQNETPLVKWRIQGMDESSLPLSVNCWPSVSGSETYVNIEYEAAEMFDLHNVVISIPLPALREAPSVRQIDGEWRYDSRNSVLEWSILLIDQSNRSGSMEFVVPPADPSTFFPISIGFSASSTFSDLKVTGIRPLKDGNPPKYSQRARLVTANYQVV

SEQ ID NO: 183183 - protein, 103 aa, Oryza sativa
  unsure (1)..(103): unsure at all Xaa locations
  Clone ID: PAT_MRT4530_8029C.1.pep
APVAAFSPSPLAAAGTIAXXAELHRSDPTPNSRAAVSKEPRXSRARSVISPVFLTGQCPSTTPPLPRFGFHPIICIVVXGXRHEAELPHTGRGXTSSXAQASX

SEQ ID NO: 183184 - protein, 249 aa, Oryza sativa
  Clone ID: PAT_MRT4530_802C.1.pep
MAMTEAMATAAGLEFFLVEFYFFSRFFFFACNRLKRIFACGCAGRTEKLRFSQTLSRFRLEQPHATISFVRAHWLGEGSPVHERRQQRWGVVNEGAPVFRDGGGEEEGGEGGCELELADQPREGGGSSGQWAVEEDGVAAICGGRGGEDLVPQQLRLAGAPTVLRDAGSGLLCRPSCPHKNGKGRAEGGRMQISQLPLCLSRLPLPPPRHLLFAEAIVIGKTLMRMVASCWLYAWLTSSYWKLDAELPI

SEQ ID NO: 183185 - protein, 194 aa, Oryza sativa
  unsure (1)..(194): unsure at all Xaa locations
  Clone ID: PAT_MRT4530_80300C.1.pep
MVVLAASIISKSGKALVSRQFVDMSRIRIEGLLAAFPKLVGTGKQHTYVETENVRYVYQPIEGLYLLLITNKQSNILEDLDTLRLLSKLVPEYSPSLDEEGVCKTAFELIFAFDEAISLGNKENVTVQQVKQYCEMESHEEKAHKLMMQSKINETGDVMKKXASELDKMRMERGKLDXGGYSSISGPRVIEKHS

SEQ ID NO: 183186 - protein, 298 aa, Oryza sativa
  Clone ID: PAT_MRT4530_80301C.1.pep
MERVRRASHAGSWYTNNARKLDEELDGWLRAAGLTKSPDVRAVIAPHAGYSYSGRCAAYAFGNIDPTNISRVFLLGPSHHYYTPKCALTRATIYSTPIGDLPVDHEVIEELNATGKFDFMDLSVDEAEHSMEMHLPYLSKVFQGHNVKVVPILVGALNSQNEAMYGQLLSKYLDDPKNFFSISSDFCHWGTRFSYTYYDKSHGAIHKSIEALDRMGMEIIETGNPDAFKQYLQEYENTICGRHPISVFLSMLKHCLTKIKIGFVRYEQSSQCKSMRDSSVSYASAAAKVDTPAEEEKD

SEQ ID NO: 183187 - protein, 610 aa, Oryza sativa
  Clone ID: PAT_MRT4530_80302C.1.pep
MATATEQRLATAAAALDDRGAEAEVVRSAEFGGGGKARRSWCIILESILSAAILSTKKSIQNGMPNGLLFFVILRRDILTFALLLVVLAASIISKSGKALVSRQFVDMSRIRIEGLLAAFPKLVGTGKQHTYVETENVRYVYQPIERPALRAVSTEATLWCLAGALVLQVFLFPQVPEYSPSLDEEGVCKTAFELIFAFDEAICLGNKENVTVQQVKQYCEMESHEEKAHKLMMQSKINETRDVMKKKASELDKMKMERGKLDKGGYSAISGPRVVEKAFGDMSITGSGFGSGSGLGGLSMDMDSFASKPKGGRPSAAATAPGKGLGMKLGKTQKTNQFLESLKAEGEVILEDVQPSSVQSRVSPLPPSDPVTVTIEEKLNVTVKRDGGVNNFDVQGTLALQVLNDTDGFIQLQIENQDVPGLSFKTHPNINKDLFNSQQVVGAKDPNRPFPSGQNETPLVKWRIHGMDESSLPLSVNCWPSVSGNETYVNIEYEAAEMFDLHNVVISIPLPALREAPSVRQIDGEWRYDSRNSVLEWSILLIDQSNRSGSMEFVVPPADPSTFFPISIGFSASSTFSDLKVTGIRPLKDGNPPKYSQRARLVAANYQVV

SEQ ID NO: 183188 - protein, 97 aa, Oryza sativa
  Clone ID: PAT_MRT4530_80303C.1.pep
EAQQYSHGHLGHLFCNQVSNLERTNLLQIYIRQWCSKSTDSGVFHCTRSACFSVSMELRGLQVSSNNLITLILMFYRIWMAVHKFLLVKPCWVDVTE

SEQ ID NO: 183189 - protein, 74 aa, Oryza sativa
  Clone ID: PAT_MRT4530_80304C.1.pep
MTRADGGRWTRADDEVVAAALEPWGWRREREEREGGKGEKPAGGARRAVDAFPQAIEARWRQRHQVLKLVSWGR

SEQ ID NO: 183190 - protein, 62 aa, Oryza sativa
  Clone ID: PAT_MRT4530_80305C.1.pep
CSMFKVSPTSQHTNSAITYSAVLHKQPRSISHGHTTPLRLFLQVQLAQAATLLSSAQLGTLG

SEQ ID NO: 183191 - protein, 95 aa, Oryza sativa
  Clone ID: PAT_MRT4530_80306C.1.pep
TRRSETGGWMEAVRRRTFEEVVYLECWTLWPCLYRERVLRGIRYGLLWLQNKKARHGLLILLLFLWWALVVRHREANYVNHETACVILISSVRKI

SEQ ID NO: 183192 - protein, 84 aa, Oryza sativa
  unsure (1)..(84): unsure at all Xaa locations
  Clone ID: PAT_MRT4530_80307C.1.pep
ASSAPSSSSXASPSPRARLAAAXVEDEELLQGGYLRQVQGGAGDXXTSAVXAXXXSSRXXMEKKGTEKNKKDGFMNTCLTEDDG

SEQ ID NO: 183193 - protein, 74 aa, Oryza sativa
  Clone ID: PAT_MRT4530_80308C.1.pep
MRDVGWDRKLGSCFYYRTVVSHGRGLNHVTVDRKWRTWMKAMANFVFGPSKADDVNPGWTTFTENFDVMEKLKV

SEQ ID NO: 183194 - protein, 86 aa, Oryza sativa
  Clone ID: PAT_MRT4530_80309C.1.pep
AFSICNGKAESTHPHIKAAKQINLRTYYHNICHDRCCRLAALVCVRRDRRCCLRLCPRPPPSSSTPPSSASTTPSTTATYAWANAW

SEQ ID NO: 183195 - protein, 165 aa, Oryza sativa
  Clone ID: PAT_MRT4530_8030C.1.pep
MAGGGRADDERRIGVAMDYSASSKRALDWAIANLLRRGDHLVVLHVLHHGGEEAKHALWGKSGSPLIPLSEFRDPTAMQQYGVHCDAEVLDMLDTAARQLELTVVAKLYWGDAREKLCDAVEEQKIDTLVMGSRGLGSIQRILLGSVTNYVLSNASCPVTVVKGK

SEQ ID NO: 183196 - protein, 383 aa, Oryza sativa
  Clone ID: PAT_MRT4530_80310C.1.pep
MGGRRGRSATAEAASVAEEAAAAEAASVGRRAAGQGGEAGSGGGERRRKLMLLAGCGGGGSGSSETAADAMRDNQPQPAAVPSSASSRALPPLQRGDRPAAVERWPASPIELRRLEGLGGNSDDRDSSGVSISIFHLNQDHDDDITPLHAIEQQQQAATTTMPMAPEQKQRQEADDDDFTFPTPPQPHLFATTRHLPCSPSPSSSPPVWLLSSPIRRSFSAADCSGSPWRNARVVLRRRHATGGGGGGACSPALSDYAAGFCDGAEEEEEEEEEEEERMDSLWEDLNDDDAAGKKGGDMFLASLDVSRRRSVGGAGLAEKREGGGGAAVLGLGASRSSRRRAPGLVAMMRSLKRMLVAHKGKSKVHKSDDHTTASSCSNSGKK

SEQ ID NO: 183197 - protein, 36 aa, Oryza sativa
  Clone ID: PAT_MRT4530_80311C.1.pep
MATTTVCVYVNNNLVIVFCVVLLYNIIENYNNVQFV

SEQ ID NO: 183198 - protein, 60 aa, Oryza sativa
  Clone ID: PAT_MRT4530_80312C.1.pep
CLFSLICCGICTQLLDCFLSTEFLGGNYLWFGSISLLFTFFQYFFGAVIMTWMSNSSLLM

SEQ ID NO: 183199 - protein, 555 aa, Oryza sativa
  Clone ID: PAT_MRT4530_80313C.1.pep
MATTATLPFSCSSTLQTLTRTIPLRLRLHRRRFLHHLPSLAALPRLPLPRPPLLPHARRHVSASAAPNGASSEGEYDYDLFTIGAGSGGVRASRFASTLYGARAAVCEMPFATVASDDLGGVGGTCVLRGCVPKKLLVYGSKYSHEFEESHGFGWVYETDPKHDWNTLIANKNTELQRLVGIYKNILNNSGVTLIEGRGKIVDPHTVSVDGKLYTARNILIAVGGRPSMPNIPGIEHVIDSDAALDLPSKPEKIAIVGGGYIALEFAGIFNGLKSEVHVFIRQKKVLRGFDEEVRDFIAEQMSLRGITFHTEQSPQAITKSNDGLLSLKTNKETIGGFSHVMFATGRKPNTKNLGLEEVGVKLDKNGAIMVDEYSRTSVDSIWAVGDVTDRVNLTPVALMEGGAFAKTVFGDEPTKPDYRAVPSAVFSQPPIGQVGLTEEQAIEEYGDVDIYTANFRPLRATLSGLPDRIFMKLIVCATTNKVVGVHMCGEDAPEIIQGVAIAVKAGLTKQDFDATIGIHPTSAEEFVTMRNATRKVRRSTTDEVESKDKVVTQN

SEQ ID NO: 183200 - protein, 223 aa, Oryza sativa
  Clone ID: PAT_MRT4530_80314C.1.pep
MGLASSPDVDQGETTATRVDQLGEKSGARGGTASPGWGRRAAARQEQAREKRGGEAARHHRHGGEEPQRGGSRLGRRAAAKRHGITGMGRRATVRREQVGEKSGGGQERVGGARCDWRLIGEKSHGGACSLAKTGGSRGRPEECGAAGARQGGVVMEHVLSPLLSSSYRRLPPSTPPSKMLATPAAGYDGSRRPPLPISTLATRGPPSLRPSPCFSFALPSCS

SEQ ID NO: 183201 - protein, 90 aa, Oryza sativa
  unsure (1)..(90): unsure at all Xaa locations
  Clone ID: PAT_MRT4530_80315C.1.pep
TTXAPPXXSRXNLAAFLXXLTKLTPWPRXXSRLESSRKGIMCRRPAMGTPQXEVEKKKKKQQQQQQQPASSLRSLPWLLIYLFNENGRVG

SEQ ID NO: 183202 - protein, 187 aa, Oryza sativa
  unsure (1)..(187): unsure at all Xaa locations
  Clone ID: PAT_MRT4530_80316C.1.pep
MSGGRVAAASGAERLRDDAGARSYATTDDDALEPVNPAARNLASYSGHTIATSFSGXSPRAADEEDDGLHARRSRRIVGCDGEYXRRHPXRGISTPPPARHRRLPSSPARAARRRLXPPPTAAAALTSSASTLASSAAPRXPPPRLASSSTSSRHRSPPPLPPQPHLASSTAFRRRSPLPLPPCAWE

SEQ ID NO: 183203 - protein, 107 aa, Oryza sativa
  unsure (1)..(107): unsure at all Xaa locations
  Clone ID: PAT_MRT4530_80317C.1.pep
MSISXSTXNRNGVCIFGPTMXHGCXVCFLCVINSIGLDIVHPLVLLLMRNHLVCLGAYFHPKYXLCCCACDTYCTLRLECXIIAVDNAALHLRLLCLHFQDETPYQG

SEQ ID NO: 183204 - protein, 297 aa, Oryza sativa
  Clone ID: PAT_MRT4530_80318C.1.pep
MAGAASPDHLFGLRNSFYVGAYQAVITGVQAIPARAALSPDALAERDSLLYRSYIAIGSHQLVIDEIGPGAATPLQAVRLLTVYLSGGAGGKESAIRKLNELLADDAVGSNPILRLVAGTVLMHERDYAGALKHTNSGGTMELLAMNVQICLQMHRSDHAEKQLRIMQQLDEDHTLTQLANAWVDLVMGGSKIQEAHLIFQDLSEKYPATCLILNGKALCLMHMGNFEDAEGLLLESLNKDAKDAETLANLVVCSLNLGKSASRYLNQLKLAHPDHMLVKRMSSAEDSFDRACQAIS

SEQ ID NO: 183205 - protein, 752 aa, Oryza sativa
  Clone ID: PAT_MRT4530_80319C.1.pep
MLSGVKFIPREQIGEDALGGAGSAGSDSSEDRRRRKKRGRKGRDKEERRDRRRRRRRSKYGSDSEEGSDSGDSIEEEEEKGLSRSKHRRKHQRRRHEFSDDDDDDDEESSGSRKSKLGGAAGDDDDEEEEDEGIGGEELRASDIVRKEMGLEWMLKSASSGRAESSQAGGADKDEEEVAPEEVKKANPKELNPYLRDNGSGYPDESSPSNAGNQLLASSVVGDGGASWRLKALKRAKEQAAREGKQLEEVVGERWGSLGHLAASVSASRAAPSHAHLHAIRGRKAGQAGSSEEHSKENPKEGQQGGDSGRREYLKDVSSRHHAMRKPKPDSVPWKRNRQNISSEDQALISSAIAGINKFSNDGSFLEKINNLESKTVNVLTAEVDELKSDKGSSKKAPSVSTQKLNANQLAAKILQLRMKGKHEEAEQLSREMEAVLENEDTAVEEPRHEVRSSTRNTIKPSAADRRKREEDADRHLANKIMHNKQYNMSKSIEDEYDFGDAPSKKGKRRNKDAHEERRSTHWLTTQKERCMYCFENPSRPKHLVVAIGNFTYLMLPQLEPVVPGHCIILPLQHESATRTVDRSVWEEIRNFKKCLLKMFAQQDKDIVFMETVISLAKQRRHCMIECIPIPSEVSNNAPMYFKKAIDEAEEEWTQHDMKKLIPTKGNLHQVIPENFAYFHVEFGLDRGFAHVIDDESKFSAGFGLNVIRGMLQLREEDMHRRRRHESMDNQKQAVANFMKDWEPFDWTKQLD

SEQ ID NO: 183206 - protein, 134 aa, Oryza sativa
  unsure (1)..(134): unsure at all Xaa locations
  Clone ID: PAT_MRT4530_8031C.1.pep
EETGTLYIDPRGSIVAGMAAISPAEWGEVGRRERLDSKFESRLSRARXTGGRERKWARGTRARVATWATWPRRRGSEGXRRRLEVGGGPDREEGGGRLSWASSFGRPSGEGEXERMGRRPIPKRKRGKKKEKEG

SEQ ID NO: 183207 - protein, 64 aa, Oryza sativa
  Clone ID: PAT_MRT4530_80320C.1.pep
MATFLIRFKSWEDMSVRRLRQVSRKLAGSWRPADMDNRMEHCSRGKFALEFGHGASERGSKMLA

SEQ ID NO: 183208 - protein, 80 aa, Oryza sativa
  Clone ID: PAT_MRT4530_80321C.1.pep
WGAVAYQLSNVVPWVCFQKVGCLLVLEEGFSPKTQRSSWCCVHSEDEAEYDAWSIMVLPVFQPPLQVITRGVLPLNGCLV

SEQ ID NO: 183209 - protein, 84 aa, Oryza sativa
  Clone ID: PAT_MRT4530_80322C.1.pep
MDSFSSSSGSPPNTEALMDQIKAQLAQAYAQEFLETVGNKCFAKCVTKPGSSLSGSESSCISRCVDRYIEATGIVSRALFSSTR

SEQ ID NO: 183210 - protein, 95 aa, Oryza sativa
  Clone ID: PAT_MRT4530_80323C.1.pep
ASNQQSLCGRHTLFMIDANTWEKQIVVYKKTCWGGVPIIEGEPMPPARFFGWTPLLRERGLFNPRPVFWGIPGGKKNPSGSEKTPGPVRFLLGGG

SEQ ID NO: 183211 - protein, 73 aa, Oryza sativa
  Clone ID: PAT_MRT4530_80324C.1.pep
MALAGADPVAPPSGDSMPRESICGDGPGVGLVVRRWRLMHVVDGDSIWHMMEDSICTSILLPENCRKDNARST

SEQ ID NO: 183212 - protein, 104 aa, Oryza sativa
  Clone ID: PAT_MRT4530_80325C.1.pep
IRPSRAIEQFGTVSCRGSQAEEEMPLSPFYMAKLQSAVGFGSRCCMPRPRGDQTGAGQTGSRSRHNARFRGGGGSAFFFELCMVHITCTSFVPPGLHVLVEVKD

SEQ ID NO: 183213 - protein, 76 aa, Oryza sativa
  Clone ID: PAT_MRT4530_80326C.1.pep
MAGIFLAWADNSNEKPAEELGSVAGVSFNSSLKYLLASWRQARTDPAALAEGGKLTWQTTARRRRVHILRFGGGKG

SEQ ID NO: 183214 - protein, 44 aa, Oryza sativa
  Clone ID: PAT_MRT4530_80327C.1.pep
YHAGIKASESEGIKVFIKLLYGKGKKSLRITCPVSAIISNNWVH

SEQ ID NO: 183215 - protein, 105 aa, Oryza sativa
  Clone ID: PAT_MRT4530_80328C.1.pep
YNKSTPSERHINPTSQRGKKKNTPISHTKLAPYCPAMLGHFEQKTPKHDPPLKTKESNFFLKKHFQFVSHKKQLTCSPQITPPLTGQKDKIFLEASRMKPKIANA

SEQ ID NO: 183216 - protein, 139 aa, Oryza sativa
  Clone ID: PAT_MRT4530_80329C.1.pep
MPAVEPRSAEFAQPFREPLLDLVMVASSARIDATHTTHSDDSIEQQRPCNNLAHTLHMNLDSMRRAQRDTHTHTDSTTPGTHHDVFISNNLPLNATWRTSLSQQRRLLVNVTEQRLFLLLPRTVPRHVATFSAVEALSS

SEQ ID NO: 183217 - protein, 107 aa, Oryza sativa
  Clone ID: PAT_MRT4530_8032C.1.pep
MTKTRVLPVSGRDRITSASMTIMKTPWPCRSESMTGDGDESSIIIDDAPATVRCWPRREAEAAVSTVRTPGISMTSQRQDVSPAAGVSDGMEQHNLGRDGLTASTAA

SEQ ID NO: 183218 - protein, 283 aa, Oryza sativa
  Clone ID: PAT_MRT4530_80330C.1.pep
MVAGVIDGVGVGRWRAVDVSWQRRGLVVVVVGVLQLVEVEDMLDLKLEVMGRCLVLPPPWSLLLRMEVLLVLYEKVYCLWSLSLCAGCGLGWWWCFVPLASVRDDGVVAGVGDVVVPATELAEALLRPPPSSGSQLVLLLHLLLVRSFPTLCVVPSREQFIRQWLCSSLLQGGWIWGPSPSSFLGSCIHAGWAIRVELMLLRFKGELRGEVWLSPVKLTPKSTAQQQISNLCRLCEGVRRGLPVRQAVCMSKETQGSNRRGFAAAPVDSRLLRCLVSGGCLYS

SEQ ID NO: 183219 - protein, 60 aa, Oryza sativa
  Clone ID: PAT_MRT4530_80331C.1.pep
ACGATSPSSRSACAWHGSRHHPRHSRHPPNLRARGGDMRPHRPCPSLWAQGFQGARSGAR

SEQ ID NO: 183220 - protein, 39 aa, Oryza sativa
  Clone ID: PAT_MRT4530_80332C.1.pep
LQVRYSKINRIQSPPPPPMLVWFGGNQNSFSFSSLYAVN

SEQ ID NO: 183221 - protein, 274 aa, Oryza sativa
  Clone ID: PAT_MRT4530_80333C.1.pep
MGRPYAVKGRKKKRKLDDGGASREPPVDEEAAEELPPPEGVEEEEGKEEDVAAAAAAGEVADGLPVVPRPVDGKRRPGAIFVLERACLEVGKVGKTMQILNSDDHANYLRKQNRNPADYRPDIIHQALLAIFDSPLTKAGRLQAVYVRTEKGVLFEIKPYVRMPPQLLQKLSITAVGKREKLLNVIKNPVTRYLPVGAKKIGLSYSAEKSVNLFDYVAKSSDDVPLVFVVGAMAHGKIDNEYSDDYIQICNYPLSAACCLNRICSALEQKWNIQ

SEQ ID NO: 183222 - protein, 481 aa, Oryza sativa
  Clone ID: PAT_MRT4530_80334C.1.pep
MGSRVAAALLRRGRDQASSLMAARLPRGAPAPSPAAPRVGSGSVCGCGGGGGLLTGSRSTGSVFSASRLASFHAFRSIGSKTLMGQCTRKMTTTVAAMNSGVANAAAYSGLKLLVTKGPQAQKAIGIWLFGCATWVFGLVILGGVTRLTRSGLSMTDWKFTGSLPPMSDEEWLLEFEKYKLSPEYKRVNKGMSLGDFKFIYWMEYGHRMWGRALGFLFSVPFAYFIAKGYVTRQLGLRLSGLFALGAGQGLIGWWMVKSGLEEPASEYVQPRVSPYRLATHLTSAFVIYCGILWTALSVVMPEPPAGSMNWVNSAAKIKKLAIPVSAVVGITAISGAFVAGNDAGHAYNTFPKMGDTWIPEDVFAMEPFIRNFFENTSTVQLNHRILATTTLLSVGGLWLAARKVDMHPAIKSLIGSTLGMAALQVTLGISTLLMYVPTSLGSAHQAGALTLLSLMILLTHTLRRPSPALLKSLASAVKST

SEQ ID NO: 183223 - protein, 181 aa, Oryza sativa
  unsure (1)..(181): unsure at all Xaa locations
  Clone ID: PAT_MRT4530_80335C.1.pep
IRLAARDSHSSLHQWPRATMALSSPVMARAAPSTSSALFGEARITMRKTPRTQAGASSGXPWYGADRVLYLGPLSGXPPXYLTGXFPGDYGWDTAGLSADPXTFAKNXLEVIHSRWAMLGALGCVXPXLLXRNGVXFGEAVXFXAGXXIFXEGGLXYLXXXLIHXQNILXIWXVQXVLIGS

SEQ ID NO: 183224 - protein, 87 aa, Oryza sativa
  Clone ID: PAT_MRT4530_80336C.1.pep
TKHSLHQYIPFSASAAASSPPHNLALRSYATPETRLGLRSPTFSFGSSSGYEIWILYGGALNATERPQYSTIMKLSVDRNHHHTPWI

SEQ ID NO: 183225 - protein, 86 aa, Oryza sativa
  Clone ID: PAT_MRT4530_80337C.1.pep
RVSANRSPPNIYSQTVKLIKSFLYTKHAAGIPPTSPPPPPASKIPRSNKFDASININRRKNPQEGKNIIDQVSEISSLKRSHRPKE

SEQ ID NO: 183226 - protein, 158 aa, Oryza sativa
  Clone ID: PAT_MRT4530_80338C.1.pep
MKNTRDQVSRHQKFRTWAAVERRYALGRGSHQLLRSKSSTYGCLGINQSPSRFLLFLHYLMQSCCSERQIYRRLTLSPSSRAARPPPLSTRDTCPVTRRGMRATDRPIAFSHEYLLKRVDMVLRLRGSVACSFRSRIELCRDFAQNRLFINTYRKIGN

SEQ ID NO: 183227 - protein, 235 aa, Oryza sativa
  unsure (1)..(235): unsure at all Xaa locations
  Clone ID: PAT_MRT4530_80339C.1.pep
MGRVKLXIMRIVNMLNRLVTFSMRRNGLVKKAYELSVLCDIVMGLLMFCPSDRLSHFSGRRRIEDVLTRLINSPRKXHEEXNYVKYMRVFRSHMLTQLXARATLTEDLTNTSSKAPVNSNIEELEQEIRRCQHQMQLTEEQLMMFEPDPARCASMEDVQASDKFIAGILSRVQEMKRYLLCNMGSFDVTASTSAMQHLYLPQQHQHGDITDDGFGSDEVASWVSEGSRLQPRRWR

SEQ ID NO: 183228 - protein, 154 aa, Oryza sativa
  Clone ID: PAT_MRT4530_8033C.1.pep
MPTRLTGFGRVIDRLSRNDRRRAKAHYNTRRLGLARLLHRTRLPGLLTWALDRSYGADSRLHASRSTESGSAAVVYDNAAVDISNKTAPHFPPVPLILHAYCSQYVQTLNSQSVGQGPGPCTNASVLPLFVCSNQSIHPSLYSDCPINLQHLRV

SEQ ID NO: 183229 - protein, 155 aa, Oryza sativa
  Clone ID: PAT_MRT4530_80340C.1.pep
FVGDPFDAVGAEVSKAPAATSSKTTMEPSRPRLPLLLLLLLHFSLLASPCSARWRDGCGVGDLRESFLRCVARRSPATAGDPSRLVHAPGDASYPSLLDFTIQNLRFALPWTPRPALVLTPVTADEVRACVVCCRAHRLTVRARNGGHDYQGLLY

SEQ ID NO: 183230 - protein, 37 aa, Oryza sativa
  Clone ID: PAT_MRT4530_80341C.1.pep
LKPRKASFSRCQINHLTVFTHSREKQICKDLKTKPRA

SEQ ID NO: 183231 - protein, 49 aa, Oryza sativa
  Clone ID: PAT_MRT4530_80342C.1.pep
NKGTSAQHAGGFLKESAFGPTATREELTCADSYIGARKPRGISPRRDIT

SEQ ID NO: 183232 - protein, 89 aa, Oryza sativa
  unsure (1)..(89): unsure at all Xaa locations
  Clone ID: PAT_MRT4530_80343C.1.pep
RARRARPAGLXRVPXGGGGGGADSAATTGRAGWLHVSRRRVQGGNVRQQARQGQFGYHASTRVASHVINXLLATIIKYGVGHYLASNRG

SEQ ID NO: 183233 - protein, 161 aa, Oryza sativa
  unsure (1)..(161): unsure at all Xaa locations
  Clone ID: PAT_MRT4530_80344C.1.pep
CLSFLGRRERLPLPAGVALVDGRDGEHGQLRQGRWPRGLRRRRGLPPAEERWSPPSCGEVMLPTHSPRIKAQGPSPPPLVAAPPPSSLRLDPSPXVSAPPPLVAAVSAPPLPVAAPPPPSVLTCGCSGAPEGPGPGIDFDPPSTPGPGAGPFQTNPAPTRP

SEQ ID NO: 183234 - protein, 146 aa, Oryza sativa
  Clone ID: PAT_MRT4530_80345C.1.pep
MAAMENCERRGDARARERKRVRNKPTGTWSEARSHTQRERWSSPWPTPAGEVAARASPATRAPSSRGAVVAAVLRRSDASVSAPPPLVAAVSAPPLPVAAPPPPSVLTCGCSGAPEGPGPGIDFDPPSTPGPGAGPFQTNPAPTRP

SEQ ID NO: 183235 - protein, 69 aa, Oryza sativa
  Clone ID: PAT_MRT4530_80346C.1.pep
LRMVHNIASADEGAPRYLNQQISFGPEDAEGVLFPHQDPLVILAEVAGFEVRQILVDGGSSADVIFAEA

SEQ ID NO: 183236 - protein, 95 aa, Oryza sativa
  Clone ID: PAT_MRT4530_80347C.1.pep
KNLKHIVFVNYIFEAIGSEAILLFYLCRPLVSLAYPLYAFLRAIETKSPVDDQQWLTYWVLYSFITLFELTFAPVIEWLPFWSYAKLFFNCWLVL

SEQ ID NO: 183237 - protein, 123 aa, Oryza sativa
  unsure (1)..(123): unsure at all Xaa locations
  Clone ID: PAT_MRT4530_80348C.1.pep
GHVFAKTKSACFEVKMEAQTKSISSTFRSRGPVCTKMGAQVAFMLGLGRSLCRWKAKKITFPMVLVPYSNCFDTVDNQRRRGAAITGLKSVFIQXAGSICVATPPNRLFITTFRKIGYPTSTS

SEQ ID NO: 183238 - protein, 66 aa, Oryza sativa
  Clone ID: PAT_MRT4530_80349C.1.pep
MLATFVTSRQALLYVQLGIETKETRNIAFSSKEIRDPTEIDSDSDPDDPTTHIPAGDNPITGHGIS

SEQ ID NO: 183239 - protein, 99 aa, Oryza sativa
  Clone ID: PAT_MRT4530_8034C.1.pep
MGIKVTNIKNFDIYSFLLTEVSLYHLDHLWVTVKASNVKEVSALVWARAADGRARPPPSLTGGAHPSSPSSRRSHRPARAKRRRCRRIRHIPPPPRAIK

SEQ ID NO: 183240 - protein, 1009 aa, Oryza sativa
  unsure (1)..(1009): unsure at all Xaa locations
  Clone ID: PAT_MRT4530_80350C.1.pep
MAEGAQLAAAGGAARAAGHGLVAAAPVRRGRSRAEEEFDPGVGTGHGRPRMARRCQRLGGACFWGARWLPSEEEEEASWRDEPLMVAPDRLDALGPYMTGGTAGNDAPRIDPPAKDVSLLPRCSALVAVAEKEIGGSSGANMAVAVTKPSPTAMEYWQKKFPETPMPPAILDLLTPLPTVNMPINFLYQAEYKNNNAIELYYIDFIVCPLAVWNIVCKERMNWATLAAEGLKEVSVSYGSEGKEEPKKAFPMGRYMLDKEREMTSCIDKEDLREVSVSYDSNVKLSNLFPTAGLKEVSMTYGSDGEEEPRKTFSQVGYMLDKERKKSSDVDEDGLKEVSVSYGSNGEEETSKTFAMGGFMADKECEMSLQGEKAAEGLKEVSVSYGSEGKEEPRKAFPMGQYMLDKEREMTSHTDKDGLREVSVSYGSKGEVVTRKAFPMERYVLDKEPKRNLHRNKDELREVSVLYGSKGKLKNLFPTGYGHKKHKHANEADLKEVSVSYGSNDEEKPRKAFLRGGLFLGNEYEKSVHIDKEDLKEVSVSYGSNVKLSNLFPTGYAHQKYILTSGAGLKEVSVTYGSDGEEEPRKTFSKVGYMLDKECKKSSDVDEGGLKEVSVSWGSSGVDLPACTPPMGGYMVDMKNEKSLQAEKDGLKEVSVSYGSNGEEDTSKTFAMGGYMVDNEREMSLQGQKVALGLKEVSVSYGSNDEEETRKIIPMKGYMEDREHEKSLQAEKGMDHGRHVHAHGNKMQQLADVFFFRDXPPAGLRHHADHPADDLAAGLPPSPRRRRHPVLRRPLCRRPRHVRAGVPRHGARDTVGARHLRPAGGGAAPGREGRLRHLPRVARRPRRVAPRDARRPRVLRRRPSHRRRDHAGAAREVQRDVRAGALGDGWFRFVVVVGAGAGCRRGVPRPDVPVRRVLLPQYQADRRVRGDAGGGDHRGRRRRRRGGLAGEDGGARRVPPGHVAVEGGQPVLRGARRQAGGGVRVPLPHQAQHRLGPTPRAGGPTRSSL

SEQ ID NO: 183241 - protein, 164 aa, Oryza sativa
  Clone ID: PAT_MRT4530_80351C.1.pep
MEVSKLAIALAMVAAMALPSQAQNSPQDYVRLHNAARAAVGVGPVTWDTSVQAFAENYASQRSGDCSLIHSSNRNNLGENLFWGSAGGDWTAASAVQSWVGEKSDYDYASNSCAQGKVCGHYTQVVWRASTSIGCARVVCSNGRGVFITCNYKPAGNFVGQRPY

SEQ ID NO: 183242 - protein, 253 aa, Oryza sativa
  Clone ID: PAT_MRT4530_80352C.1.pep
MSTPAATPPRASAAVSPNEAAEAALRLAENMFLRGDLTGARREAARARALCPAPSPLHPAAARAMAAYRVHVVAAAGNARGRGVDWHTLLGVRRGDGLDAAKKQLKLMRLLTHPDKNRSAAADGAFKLVTEAWEAISSGHAPFFSGDDVERDAPKPPPPPRRQSPAPPPPRQHSQRRATRDYGEEHVRHDGCCTENYRSTYRRGRRRPSPAAAAASKMYFAFCPFCVAKAAQPKNAQWLDMDPLAFCSKFHRF

SEQ ID NO: 183243 - protein, 373 aa, Oryza sativa
  Clone ID: PAT_MRT4530_80353C.1.pep
MSTENKRKWVILATEGLKEVSVSYGSEGKEEPRKAFPMGQYMLDKEREMTSHTDKDGLREVSVSYGSKGEVVTRKAFPMERYVLDKEPKRNLHRNKDELREVSVLYGSKGKLKNLFPTGYGHKKHKHANEADLKEVSVSYGSNDEEKPRKAFLRGGLFLGNEYEKSVHIDKEDLKEVSVSYGSNVKLSNLFPTGYAHQKYILTSGAGLKEVSVTYGSDGEEEPRKTFSKVGYMLDKECKKSSDVDEGGLKEVSVSYGSNGEEETSKTTPMGGYMVDMKNEKSLQAEKDGLKEVSVSYGSNGEEDTSKTFAMGGYMVDNEREMSLQGQKVALGLKEVSVSYGSNDEEETRKIIPMKGYMEDREHEKSLQAEKEN

SEQ ID NO: 183244 - protein, 577 aa, Oryza sativa
  unsure (1)..(577): unsure at all Xaa locations
  Clone ID: PAT_MRT4530_80354C.1.pep
MGQYMLDKEREMTSHTDKDGLREVSVSYGSKGEVVTRKAFPMERYVLDKEPKRNLHRNKADLKEVSVSYGSNDEEKPRKAFLRGGLFLGNEYEKSVHIDKEDLKEVSVSYGSNVKLSNLFPTGYAHQKYILTSGAGLKEVSVTYGSDGEEEPRKTFSKVGYMLDKECKKSSDVDEGGLKEVSVSYGSNGEEETSKTTPMGGYMVDMKNEKSLQAEKDGLKEVSVSYGSNGEEDTSKTFAMGGYMVDNEREMSLQGQKVALGLKEVSVSYGSNDEEETRKIIPMKGYMEDREHEKSLQAEKGMDHGRHVHAHGNKMQQLADVFFFRDXPPAGLRHHADHPADDLAAGLPPSPRRRRHPVLRRPLCRRPRHVRAGVPRHGARDTVGARHLRPAGGGAAPGREGRLRHLPRVARRPRRVAPRDARRPRVLRRRPSHRRRDHAGAAREVQRDVRAGALGDGWFRFVVVVGAGAGCRRGVPRPDVPVRRVLLPQYQADRRVRGDAGGGDHRGRRRRRRGGLAGEDGGARRVPPGHVAVEGGQPVLRGARRQAGGGVRVPLPHQAQHRLGPTPRAGGPTRSSL

SEQ ID NO: 183245 - protein, 106 aa, Oryza sativa
  Clone ID: PAT_MRT4530_80355C.1.pep
PTKHMDAPPFPPRIHVLWRVAKADDTDRQGSCRRNLGVANKRPCQERKNRQHATGLQQETKIPSRLACTAILHGCILCMSHTLMVTNKIFQLELVLISHFSPSCRI

SEQ ID NO: 183246 - protein, 67 aa, Oryza sativa
  Clone ID: PAT_MRT4530_80356C.1.pep
PSSGLAQVLPRWVIYHELVLTTKEYMRQVTELKPDWLVEIAPHYYQLKDVDDTGTKKLPKGQGRAAL

SEQ ID NO: 183247 - protein, 627 aa, Oryza sativa
  Clone ID: PAT_MRT4530_80357C.1.pep
MERRPLHLHLLLFFSAWLLLLLLQGVSSLQFRREDFPDGFAFGAGTAAYQYEGAAAEDGRTPSIWDTYTHSGRHPEDGTGDVASDGYHKYKEDVKLMTEIGLEAYRFTISWSRLIPSGRGAVNPKGLQFYNNMINELVKAGIQIQVALYHSDLPQSLQDEYGGWINPKIVDDFTAYADVCFREFGDRVAHWTTVLEPNVMAQGCYDTGILPPNHCSYPFGNNCTGGNSTVEPYLFIHHNLLAHASAVRLYREKYQVAQKGIIGINMYSLWFYPLTDSAEDIGATERAKQFMYGWILHPLVFGDYPETIKKVVGSRLPFFSNHESELVTNAFDFIGLNHYSSVYTSNNNNVVKAPLQDLTADIATLFRATKNDTPTPEFLPGNTVDPQGLENALEYIRENYGNLTIYIQENGSGAPDGTLDDVERINYLQKYIAATLKAIRNGANVKGYSMWSFIDIYEIFGGYNSWHYGLVAVDFGSTERRRQPRRSASWYSDFLKNNAPIRRIRRRKGVCRGTYPEKNPQIKQYGIRAKKPKLTSDLPPIRFVDVKGPMIETIQNATIVWTTLSNMYSGEGNVMMMVEAQNKVENLKQEGRTVQEYASELQHLWADLDHYDPLQLKREDDIYCDRK

SEQ ID NO: 183248 - protein, 506 aa, Oryza sativa
  unsure (1)..(506): unsure at all Xaa locations
  Clone ID: PAT_MRT4530_80358C.1.pep
MERLQRIFGASGMGQPPSDSPLLDSSEQVYISSLALLKMLKHGRAGVPMEVMGLMLGEFVDDYTVRVVDVFAMPQSGTGVSVEAVDHVFQTNMLDMLKQTGRXVAVVIDPIQSVKGKVVIDAFRLINPQTMMLGQEPRQTTSNVGHLNKPSIQALIHGLNRHYYSIAINYRKNELEEKMLLNLHKKKWTDGLILKRFDTHSKTNEQTVQEMLNLAIKYNKAVQEEDELPPEKLAIANVGRQDAKKHLEEHVSNLMSSNIVQTLGTMLDTVIQSIEYHFHHPDQAEGVPAFTNTLRWVQWPANLKQMGLTNMTENLTPLLGGQFTPPPSKLPEGDNERFSDYIRRFTEKRNTITHVKDSHANKDANSELVVTHPLGRQLGWLLPPPKCDNPESSKNKGMKRKGGDSCTHVESIPGKEDAAEAAGRATATLLARWMGIGIGGGGGGCAHQDGCGRTNDARSLDGWGSAAEAVRKGKVTRTRGYGTERKMDVSWRKVASNVKDLLCQKV

SEQ ID NO: 183249 - protein, 307 aa, Oryza sativa
  Clone ID: PAT_MRT4530_80359C.1.pep
MERLQRIFGASGMGQPPTDSPLLDSSEQVYISSLALLKMLKHGRAGVPMEVMGLMLGEFVDDYTVRVVDVFAMPQSGTGVSVEAVDHVFQTNMLDMLKQTGRPEMVVGWYHSHPGFGCWLSGVDINTQQSFEALNPRAVAVVIDPIQSVKGKVVIDAFRLINPQTMMLGQEPRQTTSNVGHLNKPSIQALIHGLNRHYYSIAINYRKNELEEKMLLNLHKKKWTDGLILKSFDTHSKTNEQTVQEMLNLAIKYNKAVQEEDELPPEKLAIANVGRQDAKKHLEEHVSNLMSSNIVQTLGTMLDTVVF

SEQ ID NO: 183250 - protein, 604 aa, Oryza sativa
  Clone ID: PAT_MRT4530_8035C.1.pep
MPRRARRTGAAYVDDERERDITFFKRRNGLFKCASDLSILTGASVAVVIEDQNRSKFHAVGTPTVQAVVDAALSSDVEEAAAEARPVADEQLMERIAPLERELAWLKGEAAEKDETTKASKARFKMAQKKEENEEEGDTKKKKLFFSKADKLSSDEMNELLAEMLEIKKELNVRLPPLRRRGGKRPIQGSSVPPPPPPPPPPPQPEQQLQLPQWPNLSGPHNQLLPVAPPPFVADQPPPPPPPAAGGSLWIPELPPPPVEGSPWAGLLPLRPPRFAGMEPSFLESQQAPPPAQVSTQLAPLPLIREEAPLLQEPFLFADQAPVLAPLPAPLQMPVAETHLPLQAPLLQEPFLFSDHAPTLAPLPSPLQMPVAETHLPLQVQAPFMQEPFLFSDQAPVLAPPPTPLQMPVEAHMPLEAPWIQEPFLMPDQAPVHAPPPTPLLMPVGADHFPLEAPLFQESLIMADQKSVHALPPPPLQMPLEAHLPPAAQEYNQDLAVQQQPQEYENYDYMFENVGLSQAQPVAAGAGDAGFAAIGNDDNPFGYQQLVASPLYDGQIYFGSGVDNMGVPPAGDFGGVPEAALPEVEHASSSGWGNNITGDAGAWF

SEQ ID NO: 183251 - protein, 81 aa, Oryza sativa
  unsure (1)..(81): unsure at all Xaa locations
  Clone ID: PAT_MRT4530_80360C.1.pep
RICPVTFCLHVHPCLPPMRTNGTNRVLRPPDLLALATAAPPPACVAYXWIAGNISPCRQAGCSSRSWTAAPTRSAAAAAAA

SEQ ID NO: 183252 - protein, 307 aa, Oryza sativa
  Clone ID: PAT_MRT4530_80361C.1.pep
MERLQRIFGASGMGQPPSDSPLLDSSEQVYISSLALLKMLKHGRAGVPMEVMGLMLGEFVDDYTVRVVDVFAMPQSGTGVSVEAVDHVFQTNMLDMLKQTGRPEMVVGWYHSHPGFGCWLSGVDINTQQSFEALNPRAVAVVIDPIQSVKGKVVIDAFRLINPQTMMLGQEPRQTTSNVGHLNKPSIQALIHGLNRHYYSIAINYRKNELEEKMLLNLHKKKWTDGLILKRFDTHSKTNEQTVQEMLNLAIKYNKAVQEEDELPPEKLAIANVGRQDAKKHLEEHVSNLMSSNIVQTLGTMLDTVVF

SEQ ID NO: 183253 - protein, 123 aa, Oryza sativa
  unsure (1)..(123): unsure at all Xaa locations
  Clone ID: PAT_MRT4530_80362C.1.pep
KNRETYRGIPSTLRYTSHFDIVCLRIYGRSQQKLRKSSMESTDGKSPTRIELGHHCIVSGPMSPSPTWRPVDLRYKRDPXREDLRHXISEPTHPLQPTKPELTGAELPGDLVESTRLRSRRYH

SEQ ID NO: 183254 - protein, 204 aa, Oryza sativa
  Clone ID: PAT_MRT4530_80363C.1.pep
MAGPRGGGGWAPRDPPPPKRGPSEFAGRRAWREDCLLSPSTRIAAERKAACCRGEGRRSLRDAGHGGSSPAPGLEGVFVEVTLKTRAIWNQVCQWQGHDMVSQHPSAPTLMDWWEMLCNISPIAKRKILGDLQNRLNHYMPIISTVDAMMETGGRTADEISSSLDDDRCTIVEDVYAMVAVKVLLAVAFIEKAHGTSLLTTLEI

SEQ ID NO: 183255 - protein, 214 aa, Oryza sativa
  Clone ID: PAT_MRT4530_80364C.1.pep
QNSLVENLKWFGCRYVHFTCFIFFFPLCLSVAGIFQASLFPHIRAKLEGIILTSPALQRATSAAGRLPPQPGCLRSPPQPGRLRSPPAPGRHAPQRREDHRRLLHGETRPRRHRHPPVERRAMEEAVAGDSAQRKEEKKKAATAAATRMRAEGATPAAGPPPLTSLPAARGGESRRWRLRLAERSEEEGRRPPDLCLPAPAGASSPVPTRRPPC

SEQ ID NO: 183256 - protein, 228 aa, Oryza sativa
  unsure (1)..(228): unsure at all Xaa locations
  Clone ID: PAT_MRT4530_80365C.1.pep
MEGLKVSEELNMTPAEVRSWSDMLKPFSCSDTMLHAFSSSVSIEEAGASCVFEAMKKAWGGGGSWGSHRRLSTIPSPENSSSVFAKIVQSKQTKHVRVFSSGTDHRLLRSLVNRGEEVILTVPNEQLEHVARFLPATRITHIMTSDDVLVRSLGNTYFLVPTMVNLHPALAAARLNGRVKASSVRGAAKACSXGRLSRKYHLLAVASSPRGAASLLSHLRWRANLLRR

SEQ ID NO: 183257 - protein, 68 aa, Oryza sativa
  Clone ID: PAT_MRT4530_80366C.1.pep
IVLLNPKLFLEFGFKSKIYFTWLLQTQQIINKFHATYNQIKILMHSHPSLQKNTNQHLQKKTLSLKGF

SEQ ID NO: 183258 - protein, 169 aa, Oryza sativa
  Clone ID: PAT_MRT4530_80367C.1.pep
MAATISQASLLLQKQLKDLAKHPVDGFSAGLVDDSNVFEWQVTIIGPPDTLYDGGYFNAIMSFPQNYPNSPPTVRFTSEMWHPNVYPDGRVCISILHPPGDDPNGYELASERWTPVHTVESIVLSIISMLSGPNDESPANIEAAKEWREKRDDFKKKVRRLVRKSQEML

SEQ ID NO: 183259 - protein, 77 aa, Oryza sativa
  Clone ID: PAT_MRT4530_80368C.1.pep
AYTDRFDQLNEPSLTRELKQTIWDDPNIGHFYTGRTHREVGFKKKTNLARKIPIHWLKNESNITWYYRRQEPSPWEN

SEQ ID NO: 183260 - protein, 1072 aa, Oryza sativa
  Clone ID: PAT_MRT4530_80369C.1.pep
MGCSPSKVCSCPHYKGSLCFCDCGCFGQTPDSPRESRGKSNRVRGKTDSSASDASSDDLEEDDDGLHQMNITRDSNVGINRLSRVSSQFLPPEGSRKVRIPLGNYDLRYSYLSQRGYYPESLDKPNQDSFCIHTPFGTSPDDHFFGVFDGHGEYGAQCSQFVKRRLCENLLRDDRFRTDVVQALHSAFLATNSQLHADSLDDSMSGTTAVTVLVRGKTIYIANTGDSRAVIAEKRGEDVVAVDLSIDQTPYRTDELERVKECGARVMTLDQIEGLKNPDVQCWGTEESDDGDPPRLWVQNGMYPGTAFTRSIGDSVAESIGVVANPEIFILELNANHPFFVLASDGVFEFLSSQTVVDMIAKYKDPRDACAAIVAESYRLWLQYETRTDDITIIVVHINGLTDMECTQTVMKVSLQPSQQVVELVGSESPSTISLNPKNQRSRQDLSRARLRALESSLENGRLWVPPSPSHRKTWEEQAHIERILHDHFLFRKLTDSQCHVLLDCMQRVEVKAGDIVVQQGGEGECFYVVGSGEFEVLAIQEEDGKEVTKVLHRYTADKLSSFGELALMYNKPLQASVRAVTTGTLWALKREDFRGILMSEFSNIPSLKLLRSVELFTRLTMLQLSQLADSLVEVTFGDGQMIVDKNDDASSLYIIQRGRVKLKLAADQVAQSSREDGNYVFEIDEGGHFGEWALFGETIAFTAMSVGDVTCSTIAKEKFDSIIGPLPKVSQSDSKLKDSLVPKGHGADDSSFRKAQLSDLEWKMCIYAADCSEIGLVQLRGSDKIKSLKRFYIKRVKDLHKEKHVFDEKDLMKSLSQSTCVPEVLCTCADQSYLGILLNCCLCCSLASILHAPLNESSARFYAASVVVALENLHQRSILYRGVSADILMVDRSGHLQLVDFRFAKKLQGERTYTICGIADSLAPEIVLGRGHGFSADWWALGVLIYFMLQSDMPFGSWRESELEPFAKIAKGHLVMPSTFSIEVVDLITKLLEVNENARLGAKGAESVKRHPWFDGIDWKQIADGTYTVPQEITDRVDSYVETLTEDLTASPSMPSEETADQAAPEWIQDW

SEQ ID NO: 183261 - protein, 431 aa, Oryza sativa
  Clone ID: PAT_MRT4530_8036C.1.pep
MSKQVQPFVTLRFGSLWVDVPIGPFQVANSGSSLQTTAASPAPADYEQEVSSAPQGGYIPVLSKAAKRRRAAVKARQAASQEHFIKVREAASNDSMPPGFTRAAPAMTRVAPVKTRSYEAYPRFRRTTLGRVDSAAPSSASTGVALNRPHRLHPLDKGTAVMEDETHHELPSSKKKGVVVLQSVPTQQQSSSPSSSKLRADAPEFIPSSIKKSRASRRRAKKKRTLQWEGVYVSLGDVRMGHVDPTVVPSDTVSTVTPTQRPSMQGSFSPSKNRRRRRNACRTWVDFPVATEAKETRHQREKVYNDMMNKRIRESRRGQAERFEDWATFMEATICHTMKEMLPGVSTSDNGMGGAIMRRAEALARWPEYQRLVDQELWRQTYVNHAKRVCAKRAAHKQGELAACHARKFTSNFRTYLCIKPSSRNQPRYTN

SEQ ID NO: 183262 - protein, 72 aa, Oryza sativa
  Clone ID: PAT_MRT4530_80370C.1.pep
MTRRGGESSATGKGGESSVPPSPLLLSNPGGGSATTPPSQPRGHGFLAGELLPVLPSSSSPADYECYVHYTE

SEQ ID NO: 183263 - protein, 73 aa, Oryza sativa
  unsure (1)..(73): unsure at all Xaa locations
  Clone ID: PAT_MRT4530_80371C.1.pep
RTLARSHSRTVDRRFAHITRVPGLSWRKLRRRTVLYXVAQCLGAMAGAGMVKGIMKRPYDTLGGGANTVSDGY

SEQ ID NO: 183264 - protein, 622 aa, Oryza sativa
  Clone ID: PAT_MRT4530_80372C.1.pep
MQLRRRGRQIAALLKSASRAGDLLQLHAAMIKSSLFPHHAFPSAKLLASPHAPLPYALSLFAAIPTPTLFHHTALLRALSASAGGSLAAALSVLASARARLPALDEFAFQPLLALCAKRGPDGDAAAASLGRQVHALVVRYGFSGVVSLGNALCHFYCCCGGGGGEGMADARRVFDEMPERDAVSWNTVIGGYVRAGEVTKAVDMFSEMMCCSVGVSVTALVTMIRCGWQAEPVHGFCIKVGFCRDAKVASAMVGMYVREKSVECGRKVFDEATKRDLVLYNCMVDGYAEAGQVEEAMGLVDRMRLEGVRPSSGTLVGVLSACGASGAMAAGRRLHEIALEAGLELDTALGTALMDMYFKCGYPSEAVAVFDAMQERDVKAWTVMIMGFGVNGQAGEVISLFRSMEEDGVVPNEVTFLAVLNACSHGGLVSEGKKFMESMVLQYGIFPNTEHYGCIIDLLGRAGRLDEAYELIASLSSQSDATAWRALLAACRVHGNANLGRMVQARLDNMDDYHPSDAILLSNTYALESRWDEIAHVRDSEDQKIVKDKKEPGCSSIEVSCSFLSNATCFVAWKVSGICQVMADDNELNLQCSKNAKGTIHTSTGRDYHASKTEKSTGMED

SEQ ID NO: 183265 - protein, 57 aa, Oryza sativa
  Clone ID: PAT_MRT4530_80373C.1.pep
MDTTKYEHVFVTVPFLDWKDHVISELYLLGENNHLMRCLLMMKVRRTQCSDHSQMLN

SEQ ID NO: 183266 - protein, 187 aa, Oryza sativa
  Clone ID: PAT_MRT4530_80374C.1.pep
MAAVQAAISTCCSSSCLSRPPPPFARRRRFKVTAMAPQKKVNRYDEKWSKQWFGAGIFAEGSEEVEVDVFKKLERRKVLSTVEKAGLLSRAEELGVTLSSLEELGLLSKAEDLGLLSLVEAAAAASPDALASVSLPLLVAAIAAVVLVPDDSAALVALQAVLAAVLLAAAAGLFVGSVVLAGLQESD

SEQ ID NO: 183267 - protein, 135 aa, Oryza sativa
  Clone ID: PAT_MRT4530_80375C.1.pep
MEMEVPTSASMGAMGSLLRKLHVLLTPEYQQLIEPVKDGIELLLQDLEAVKAAMVDLSEMETPTMMARHWMNEVRDLSYDIEDYIDNTMDSCSNSAPNWKGINLVGMGKSKVELTNKLTDGSLPQLKVVSILGCA

SEQ ID NO: 183268 - protein, 298 aa, Oryza sativa
  unsure (1)..(298): unsure at all Xaa locations
  Clone ID: PAT_MRT4530_80376C.1.pep
PLENIETSTSSLKQDRAASERMESWSREENMYINXWRSTQQNDSYVPPIHKDRQSYLHXLNRTYRLILKASWIKADIAQERSSGKEDNTYDRRSRIGSQIELVPVRDRVSRELIRIVNDVGHALGLKRGGEQTEXLRNMLEVNCQRCCKMAARLGCHLGGVYVFIPCHLYENPLXICPSVARTSLSSSRHQEGDASSSHXGKATAPSDDDDEEEKDNGKDYIVYCADEIGPSQLDNAPQPSQPTQQYNTSITAGPSILDIGCDEQTGSPGGKVGAADQRRRNGNQGGGGGGEPLGDCC

SEQ ID NO: 183269 - protein, 134 aa, Oryza sativa
  Clone ID: PAT_MRT4530_80377C.1.pep
MVAHLSSTSLRWQRSRLRQVLVLPPPLAMASGSTVRFVSNGDGGGTNATFGSGGEQQLYPLPLMNSVSGDGQWPWPLIGGDGPGLWLCSMECVEEVARVCVVFKDYVSAAFNVTSLVNNHIDIWYNDPNIKVSN

SEQ ID NO: 183270 - protein, 211 aa, Oryza sativa
  unsure (1)..(211): unsure at all Xaa locations
  Clone ID: PAT_MRT4530_80378C.1.pep
GTRGRRTGLLFRFGIPNSIITDLGSNFTSSEFFDFCEQKSIQIKYASVAHPRANGQVERANGQVERANGMILEALRKRVFDKNEKFAGKWIRELPYVVWSLRTQPSRALHGNTPFFMVYGSEAVLPADLKFGAPRCDLRKHSRXEATRLEDIDVLEEERLNAVIQSARYQQTLRRYHDKAVGGTVSLGWENLGLRRILTGGGTGTGYTPLW

SEQ ID NO: 183271 - protein, 46 aa, Oryza sativa
  Clone ID: PAT_MRT4530_80379C.1.pep
QSTNMVLCVSFLLAHGFSFHVSLFPAYGLSPVTLYLVFVRGHKCIL

SEQ ID NO: 183272 - protein, 1242 aa, Oryza sativa
  Clone ID: PAT_MRT4530_8037C.1.pep
MDLDKSTSTSASLMKLQEDGALPGRGTMERELGVFVFPKEQPDKISEWTAKPALTPSLQSFIDVIDDLRVQGLSGYEVVADFIGPSLQSFIDVIDDLRVQGLSGYEVVADFIGLNSETVERRVGHGMISGPTTASNVPVPLCEKGKADREAVINVSVFENSFTSAFLDHTVTSCMQALPLTDVIGPLVDHQAAASLKEGVAKEASDIAAIAAAATTSGRNIPKRGRKFSSVLGNRRKAPTPSVSFSGREIEEAKVAAAASANERADKLARDLAEVREDLQKMRELVAGNERQQQGLEHRMSELENNLSEIRGSLQVTYTGLHQFTGECGVTTTIPANPDDFSLTSSLVELATAMEEIPSKHAAKIREETSNGIYTGACHVLADVDVEDVQQRGQPESLVANSGSSLQTTASPAPADYEQEVSSAPQGGFIPVLSKAAKRRRRAAAKARQAASQEHVIKVREATSNDSMPPRFTRAAPAMTRAAPFKTRSYEAYPRFRRTTLGEWPVREIRTGPSKAAPRRRVSPEPKGIAYSTPKKSALGANASPACVAGSSSTPVAVPLNIAPEMLGVVSPKNSLSILGAAPSMSTAAAPSSASTGGALNRPHRLHPLDKGKVVMEDETHHELPSSKKKGVVVLQSVPTQQQSSSPSSSKLRADAPEFIPSSIKKSRASRCKAKKKRTLQWEGVYVSLGDVRMGHVDPTVVPSDTQDTRGTYVLIKPWSTSVRGGTDITHTEESNNNNITAPLAEHVSLSYSRPDKTLRSTSTSSENEISKSNPREPPETQVEQVLATNETCSAEERLAQLTAALQQKEDELAALRTQMANGTSQRDGGQTSASQNSHQNMATGISLEAIQRMINDGIKAQYMQTHYSMRPGYVKPYPPDVDLVPFPNNYRQPQFSKFNGIGSPHEHVAHFLAACQDTANNGALLLRQFVQTLSGPAFTWYSKLAPGSIRTWEQMQDSFLEHFYSTQRTVGITELTQTEQRANEKAADFINRWRNLSLHCPQPITEHEAVRMCMNNLNPEMAVYLQGVRPVTFEELASKATDIENYTQFVARRSKPYSRPVEKSNPRDKATFKPKQAQAMEATAVIPSLQAGGAASRNNEQKSAPVGLRELNLIALPKSKRPEEATKFNEPNFCHYHRILGHTLKDCFVVKNVIQKLIDDGVIYADLLKSLKMGKKMAANIATVQEDPGMHHSTVNNKNVEISLKEKLMIDGYTPPDPPCLLAKDPKSEDSSGKEEAHSSD

SEQ ID NO: 183273 - protein, 84 aa, Oryza sativa
  Clone ID: PAT_MRT4530_80380C.1.pep
VACHHALLPYSVFRGLVRLTAYSEHRIGKMQEQEKHRNSIGLHTENRGLKTKEFDDMKHSEYRNTYNTRILQSSNLIDYNLIKQ

SEQ ID NO: 183274 - protein, 145 aa, Oryza sativa
  Clone ID: PAT_MRT4530_80381C.1.pep
QQPQRKQYRHLERHHKKIVASEAQALHSNVETPITINKAKEFNEIERDHEACFLSFYHPTTIPSHVLNMMHWSFDIDMERKIHCQEYPTLCYGTPRIAHHNAPLRLPRSYVDFPPKYYLKKVGHNAEKWSCIFQRKFTGLKKRQL

SEQ ID NO: 183275 - protein, 138 aa, Oryza sativa
  Clone ID: PAT_MRT4530_80382C.1.pep
MEMTAPGRGDDLEELIARLVNVTVAALMIWRRCSTTAARRSPRVAWRGGGVGLPGSGASAAGVRPTVPGVGVTGCEERITEHRLTSFSTRAYNLRFRLHFASKSSLREEVKETEEGMKRNSFAFALAVLVMIRFHSTR

SEQ ID NO: 183276 - protein, 112 aa, Oryza sativa
  Clone ID: PAT_MRT4530_80383C.1.pep
MANDWRSGELGLNRQWVEERRRTCCCTAPLRPPSSVDHLFNPTRATSAHFATNIVFSVNAAQPIGATLIACTYLPIELLSSQDIERHPDILDASRKRISYGSTIHVQLQFHV

SEQ ID NO: 183277 - protein, 471 aa, Oryza sativa
  Clone ID: PAT_MRT4530_80384C.1.pep
MAELARRLVAFHGCAATLVTFSGLAASLDAHSAAVLASLPASSVAAVTLPEVTLDDVPADANFGTLIFELVRRSLPNLRQFLRSIGGGVAALVSDFFCGVVLDLAVELGVPGYVFVPSNTASLAFMRRFVEVHDGAAPGEYRDLPDPLRLAGDVTIRVADMPDGYLDRSNPVFWQLLEEVRRYRRADGFLVNSFAEMESTIVEEFKTAAEQGAFPPVYPVGPFVRPCSDEAGELACLEWLDRQPAGSVVFVSFGSAGMLSVEQTRELAAGLEMSGHGFLWVVRMPSHDGESYDFATDHRNDDEEDRDGGGHDDDPLAWLPDGFLERTSGRGLAVASWAPQVRVLSHPATAAFVSHCGWNSALESVSAGVPMVPWPLYAEQKVNAVILTEVAGVALRPAAARGGVDGVVTREEVAAAVEELMDPGEKGSAARRRAREMQAAAARARSPGGASHRELDEVAGKWKQTNRAPYE

SEQ ID NO: 183278 - protein, 421 aa, Oryza sativa
  Clone ID: PAT_MRT4530_80385C.1.pep
MAPTELTAGGGGGGIMGKEGGGGADRVDLHSSCMDGRHQSNGRRWLEEGKHRVEERGDEIDKRQAKKARKTSADLLLLDHIGYQDESQDDGGSTWTAPMVTSRGVRFQLSLRPKEPPDVSRMLFKAVVPADILTSYDPNNTANPFLRPSARFVLIVISSNDKAILLQALCAVAGLERRRSEEGWHVFFLSTSTNIWRRKLVCLAPDHELRDYHWEVSSILTYRGRFWWVDLRRGLLSCSCDSLLLEDDIEATTQQPLDLDFTLLPNVTMEEAKEARLSEYPLQRDRCVGISSNGLRYVEVRAHRHRCPSKSPVAPPPLCDDCRADSITSWVLYDHSGAWAEERTLKLADVWRDESYRSTGLPKKVVEFSYRPVRWQSWRRPRVLRPSKDQADQGLQQQLQGLERRSFGACVHGEFEKHPQL

SEQ ID NO: 183279 - protein, 95 aa, Oryza sativa
  Clone ID: PAT_MRT4530_80386C.1.pep
RPRAPPSFLHALTVDAVRVPDGRAGLERRVLARRRKARGRTRNCAYFSARMLVFFNFLQVAKENITPPPRKLPEDVLFLMILKKPSCLGVCFGNS

SEQ ID NO: 183280 - protein, 68 aa, Oryza sativa
  Clone ID: PAT_MRT4530_80387C.1.pep
GLGGPTKKWEKGPPRGQGVKVRPPQKIFPVTMGPSAMDFFGIISLFLEPLKDFFRRVHLPSCFLFARL

SEQ ID NO: 183281 - protein, 1394 aa, Oryza sativa
  Clone ID: PAT_MRT4530_80388C.1.pep
MPNNPITKNTNYCSLISLSNDVETMSATSAPPAASAEPRPPLLHAFAARADPHLFRNRKFLEQYMGSRPVDEVLDAAAAGVHYSTLRLDELNINGSMTGEEQPTTSGVENGHQEPFVIGVAGGASSGKSTVCKMIIDQLRDQRVVVVTQESFYYGLSDEELVHVHDYNFDHPAKQPFLSMRQKLGMVDMADEGEVGDDADVRLTRRIRRDTIEKGRDIKTVLDQYSKFVKPAFEDFILPTKKYEVVEHGLGHLPFKEKQVITPTGSVYTGVEFSKRLCGISVIRSLELMTIAVHACYVGTYHAPQGVHVVSKRFPRVKIVTSEIEFGLNDDFRVIPGMGEFGDRYFGTDDYQSSTPFFCDEKNRVRSGARVLEMAGAAVSASSGAMNSVIAKLASLLTDEYTHLKGVKSGIRWLRDELGSMNAVLQRLGDMDDDQIDVQTKEWRNKVRELSYDIEDCIDRFLQNHSSGDANANLLQKGVRKMKKLWENHQIGDEIKQLKERVIEEKERHERYKIADRLMVAPQHVRLDPRVPALYEQAKNLVGIDKPREQIIGWIKSEEKQLKVVSIFGTGGLGKTTLAMEVYHKIDESFDCRAMVSVSRTPDIKKLLRDILFQINEREYEKSNDWEMEQLIPKLRKNLEDKRLSLQSGFSEGSKMPKASKDLSHLRSLHMFKHESLPVVPSEFAKCQVLRVLAIKLRLGDNYIKHVGHFCELKYLRIKGGIHKLPEEIGKLQHLQTLDLAYTRIEKLPASIVQLQKLVHLLIPFGVPLPDEIGNLQALEVLSGIDLDRASVKSIYGLGELSKLRDVRIWWSDSNEDNSKEGHRTACISSLSKLVKCSLQSLRLARGLSNPDVIASLMISCGFIPPLRRLVFYDEFPTIPSQFASLVNLTRLRVEVGGVGGLEILASLPILQSLTLDTNSDVSNLRWVISGQGFQNLRKFNFEIRDSVVGLMFEPGAMPKLQRLKLWLYARWQLDVHGGPVVGLHHLSALKSIALVFNCNGAVAAEVESSEDDARAAAVSHPNCPTLDIQRYNERQQAVASGSSSSTPHSPGDTDDNDRERWRRHHSKSDRRSSGDAALDPHEGRCPRPHGELPGTYPPCRVAIHQLGHNHLHAGTGDLRHATATALRRPEQCRIPPQKANQRLIESLPFSSRHHAPKTSLTPFPQQISGEVERRATAAHLGSSPPHSSKLSPNRGSTLPISAFGRATLSATHHRRAHAKPSRTLIFPPRCGSDHELQVEAMEKQNIDFGKVLGEIQESLVSLHRAQGDTQAAIIKLDQGVSAWRPQVEAAVQDLHEEVGDLRQQVDLLNKVKQAPPAASSPRVPLTGEERKAPLLPTPTATSPAAVAEGAEKWANGHRLHQNFRGKASGVVTTLIHSLGKGRSGGVVGWTINS

SEQ ID NO: 183282 - protein, 789 aa, Oryza sativa
  Clone ID: PAT_MRT4530_80389C.1.pep
MEKQNIDFGKVLGEIQESLVSLHRAQGDTQASIVKLDQGVSAWRPQVEAAVQDLRDEVGDLRQQVDLLNKAKQAPPAASSPWVLLTGKERKAPLLPTPTATSPAAVAEGAEKWANGHRLHQNFWGKASGVVTTLIHSPGKGTSDSNRIPFRSLENFDLDGGASDFDQGNRQYNHRVPKLDFPKFDGSDPQDWLMRCEHYFDVNNTYPGLWVRVSTIYFIGRAASWLRSSRAHVRFPIWEDFCVAVANKFDRDQHDELIRQMDTIRQTGTVWEFYEKFDELMNHLLAYDPAEEVAESSGGHSTRELKKFDGQVNNRSSLKGAWPLPQPPGRVVGVQVLFSILHETDSTLDDEPAVSPTGQIQGLEILILVDSGSSVSFLNSTIADNLKNVQRKPQQISVQVANGNILHCTSAITNCQWSTQGYVFNTTLRVLSLNSYDLILGMDWLTEHSPMTVNWATKQLTVSLKGQFILLQGINSQVSQCNLLLGHQMKQLQARQAVAHLVQLCVSHSNIEQEFIPDSVQQVLQEFSGIFDEPSGLPPSRSFDHTIPLLPGAQPVSVRPYRYTPAQKDEIESEVTEMLDKGIIQPSASPFSSPVLLVKKKDGTWRFCVDYRHLNAITVKNKYPLPIIDELLDELSGAQWFTKLDLRSGYHQIRMNSADEHKTAFRTHHGHFEFKVIPFGLTSAPATFQGVMNSILSSLLRRCVLVFIDNILIYSRSLEEHVKHLRAVFQILARHQLKVKKSKCSFAQQRLSYLGHVISPNGVATDEEKIQAVQMWPTPTSMSRPEIPE

SEQ ID NO: 183283 - protein, 118 aa, Oryza sativa
  Clone ID: PAT_MRT4530_8038C.1.pep
ANEGDGVVSRPSFRSCHDDSCCSGTRTCKVTTHQQVGRQTSMNRKQAYTCKHTNYNFNIDYSPRFCSLPFLKNIKSFLLTECHVCIKEQSDRSNVFLVVSEDICLHELHVIHTIKLIP

SEQ ID NO: 183284 - protein, 315 aa, Oryza sativa
  Clone ID: PAT_MRT4530_80390C.1.pep
MAAVTLGTETDGSILCPASLNSVVGIKPTVGLTSRAGVIPISPRQDTVGPICRTVSDAAHVLDVIVGFDELDAEATGAASKYIPSGGYGRFLRMDGLKGKRIGIPNGFFTEGAYGKTQLRVYQKHLSTMRKHGALVIENINITTNLSAAQDVLYSNENIALQAEFKLSLNAYLSDLLYSPVHSLADVVAFNNAHPVEERLQDFGQPDLIAAQKTNGIGPVEKAAIQRLNELSADGLENLMRMHQLDAIVTPNSHASSFFAIGGMPAITVPAGYDGHGVPFGICFGGLKGYEPRLIEMAYAFEQATKVRRMPSFKP

SEQ ID NO: 183285 - protein, 489 aa, Oryza sativa
  Clone ID: PAT_MRT4530_80391C.1.pep
MGSRPVDEVLDAAAAGVHYSTLRLDELNINGSMTGEEQPTTSGVENGHQEPFVIGVAGGASSGKSTVCKMIIDQLRDQRVVVVTQESFYYGLSDEELVHVHDYNFDHPDAFDTELLLSCMENLKHGKAVDIPNYNFKTYKSVASARKVNPSDVIILEGILVFHDSRVRDLMNMKIFVDTDADVRLTRRIRRDTIEKGRDIKTVLDQYSKFVKPAFEDFILPTKKYADIIIPRGGDNDVAIDLIVQHIRTKLGQHDLCKVHPNLYVIQTTYQIRGMHTIIRDAVTTTHDFIFYADRLIRLVDEHGLGHLPFKEKQVITPTGSVYTGVEFSKRLCGISVIRSGESMENALRACCKGIKIGKILIHREGDNGKQLIYHNLPKDIANRHVLLLDPILGTGNSAVQAISLLLKKGVQETNIIFLNLISAPQGVHVVSKRFPRVKIVTSEIEFGLNDDFRVIPGMGEFGDRYFGTDDYQSSTPFFCDEKNRVRLL

SEQ ID NO: 183286 - protein, 296 aa, Oryza sativa
  Clone ID: PAT_MRT4530_80392C.1.pep
MADDPSLDFGEFPQPFCSQQVVSFQPSVTTSGSGGMPVYLDCSSGMDSNTVMLSTTPSVVVSTTSSNTVADPGQNLKYGGPLAADWSRLELDVLKDGLQKYGNEQGIMKYIKIAASLPSKTVRDVAMKCQWLGKRENSRRRKSEDHHTGRKMKERKAKMAEPSLWGTNHPVQTDTRVPSFVSHNAIQNNQILTGATEIDRAMQQLLVQNDRLLDQIEANMLACQPQNNIELFHRTRRNINGLLQTMNQMPGIMSKMPPLPVSVNENLASFVLPGLTVPQFLGGSQLKEEPRGCFSV

SEQ ID NO: 183287 - protein, 440 aa, Oryza sativa
  Clone ID: PAT_MRT4530_80393C.1.pep
MEMRRVAVLGLVWLAAAATVAMADPLPSYYNAIFSFGDSFSDTGNFVIINSGKLPNMPKFPPPYARCSNGRLVIDFLAEAFGLPLLPPSANKGTNFSQGANFAVMGATALDLKYFKDNNVWSIPPFNTSMNVQLQWFDEVKQTICSSPQECREFFSKALFVFGEFGGNDYSFAWKAEWSLEKVKTMVPSVVASMAGGIERLLDEGARHVVVPGNLPAGCIPITLTMYATEDRSEYDPRTGCLKKYNSVALYHNAMLRIALDQLQRRHPDSRIVYADYYTPYIQFARTPHLYGRPATDTNLTVTSHKTVPIISPTLPHRPCRVSTLGRGDGPELIIVVGELEAEQSRYAGVSGQSNGVCEFTYQHRGALRACCGGGGPYNYNMSASCGLPGATTCEDPDAHVSWDGIHLTEAPYRFIANTWIRGPYAHPPLASVVRDDMVY

SEQ ID NO: 183288 - protein, 98 aa, Oryza sativa
  Clone ID: PAT_MRT4530_80394C.1.pep
GRGRNRGRGRGLPRRSTSPGIRRSSPTLSGGTGLFSRRTPPTPGPSCDLKIIGIFSLKTFSDLSSGKIKHAPYRPAHIYYPSYRGSSLSTFKPSLWNC

SEQ ID NO: 183289 - protein, 87 aa, Oryza sativa
  Clone ID: PAT_MRT4530_80395C.1.pep
MAGLVVGACSMAVGDFASIYTQLNIELAEQAAPWPDWPASSDMTGEHHGVQSRKNGSEAAISIIKIGHVQSGEKQEEKLTNKRGHYS

SEQ ID NO: 183290 - protein, 38 aa, Oryza sativa
  Clone ID: PAT_MRT4530_80396C.1.pep
MDPVFNRFGLDKLGPMSCAPVPGMDIVWTGLISYGTTV

SEQ ID NO: 183291 - protein, 62 aa, Oryza sativa
  Clone ID: PAT_MRT4530_80397C.1.pep
SRRTAHEPQPPSKPAGHRRTASHRRQWPAQTAPSPPPSWTSLGQGPTPTRWPVHVQEKEREG

SEQ ID NO: 183292 - protein, 627 aa, Oryza sativa
  Clone ID: PAT_MRT4530_80398C.1.pep
MAYAQAQQQQPQYGFHPQAPPPPPQYPHHPPPYAAPLPQYAPYARGMPPPQAQQLYSHLPPHQQPPHFAAHAMPSPSPPPPHPAYMHPPPFDSAPPPAAAPPPSDPELQKRIDKVVEYIAKNGPEFEVVIRDKQHDNPDYAFIFGGEGHAYYRYKLWVSPRPPVAPYPPGSMHMMPPPLGPMMRGPPMHQPGYPPFYDQHQHFGAHGHGEYDAAPQQSFKGLSGPLPVDVAAELHDVLTNLNGTKESIKGAKTWFMQRSPFAPALAEALKDRVFALEDSERQLHIIFLVNDILFESLQRRTNSRDLDNEALAFKFVLGSMLARIYNNPQSKDDNQIRLEKILQFWGSKEVYDQETIANLERDMKGGVAYPLPPRHVSPDPSTFSGSVHQPSKWSSDPQEEMATHPLSVPPQPVPSAQFPLNQLPAGVYPPVGQTAFPGSLPVQTPTVLPQTAATPAITNDPNPPPYPLFPPGLIPGMVRKMQIGSGVPYSPLSPLDIPTIIPPSTIPESEILERVSKFFKEIGEVNPSEGPMKQSEPDDYDNYERDIPARKGGACIPPPPNLLVNLETGMRADGSVDSKPGSTGRLGLGASADPNEIGQYDDVYSSYRKQRSSTYHSSISARSLAPK

SEQ ID NO: 183293 - protein, 55 aa, Oryza sativa
  Clone ID: PAT_MRT4530_80399C.1.pep
IYYEICSKCSTFVLLKFTPEDIITTPRRMGYVEDNKGYIEEEPVHAKPINIQDSS

SEQ ID NO: 183294 - protein, 54 aa, Oryza sativa
  Clone ID: PAT_MRT4530_8039C.1.pep
CFGEVVEVTQESRSAKCVFFSKFLKYKVFPCILHVYLRVLDCTALHANHVCYSS

SEQ ID NO: 183295 - protein, 65 aa, Oryza sativa
  Clone ID: PAT_MRT4530_803C.1.pep
MTRAEGVEAFGDLVACVGEEKRRRGWRTHCWRRSFIWRDNSPTTERCPYHKRAMERATQQTPPPL

SEQ ID NO: 183296 - protein, 60 aa, Oryza sativa
  unsure (1)..(60): unsure at all Xaa locations
  Clone ID: PAT_MRT4530_80400C.1.pep
SNSRSSACHYNTVINSVSTSLCYKSILHSCLPSICLLRLFLLFXLGHSPMDKIHPIKEFN

SEQ ID NO: 183297 - protein, 181 aa, Oryza sativa
  Clone ID: PAT_MRT4530_80401C.1.pep
MWTLSSISSRPQRARHRVTTPLASCTHRHPSPAHVTTCRLLANAPAQATRAINPLLELGASSAITYPSSHAAFILSVRWMMWHRGQIRRPAPSLSWGVGMATGRGGAGLGWNATVPDPRLHPPPLALTVDTGPNQPPSLISLGPRNLTGAPHWIASPSNQEKKTRHSSNWQKQKLHILDTP

SEQ ID NO: 183298 - protein, 344 aa, Oryza sativa
  Clone ID: PAT_MRT4530_80402C.1.pep
MDSTAKTHLKVSGSLNNIQFDLPVEIVEKVNHFANEVTEMRRGFDNILMVQELQMQQIADLTHGVSRYPRKKEISIDPANSIAKRVHGLDGRPIIANKKFDYDRRTFVENKKDFDSEATFPEQCTVIDIQSLDRENTIVHIDDVVLTGANLECLTKLYCYDDDKKSISPETIDAFVEHYRHTKSVVDGNAYIERASVVSMLMLSAFYDGVDINRYKNMMHESAGHRYLRHDMVFLPICTSLKQLLQGVEKCIKLAMDSDVHYPTWTDFNVTNWDISIRYLARKKDRTSSGLFIIKFIEYWNGVCLTKTFFQEDIDEYRRKIAAILYNSPSNKIQNHVQAISEEI

SEQ ID NO: 183299 - protein, 156 aa, Oryza sativa
  unsure (1)..(156): unsure at all Xaa locations
  Clone ID: PAT_MRT4530_80403C.1.pep
LXXXXXXXQRTXXXXSXXXXXXQXXPQXGXKXXPXPXXXXXXRXXXXTSXXXSIXXXXXGXXXXXXXKXXXXGXXXXXHXXXXXEXXPXXXXXHRRHXCTXTNPQGXXASXXIXXMTLXXXXXXXFYPXXXKXXXAPVFKPXCXIAPTQTPXNPXM

SEQ ID NO: 183300 - protein, 324 aa, Oryza sativa
  Clone ID: PAT_MRT4530_80404C.1.pep
MTSSFVDNRVNTGPIQGIPASTMLVWTQVDEIVFPVYTTVPISAGPSITGNENAVAINPDGPMSKDPPARAENETSTSYEPEKIPSTAEPCPSDKDCEPTRTTSEVTKSWLDGQLQMVVITQRPVSSALRPLPPPPPSASATAFDSLHSCKPAAAAHAPYNFALCCSLPHKGVVEDTMGDAVEDKMYQVVKEDEPKELLRDSKVNLMANVVEDTMKEKEINEDDHMGWYSLALVVEDTMDQQVGADIMDQQVVEDSLVTYTMEESDEDEYLKAEYEKGALIFARDEANALERKEAEARYEKSLEEIRDEFLKIYVPLYFTLRKK

SEQ ID NO: 183301 - protein, 329 aa, Oryza sativa
  Clone ID: PAT_MRT4530_80405C.1.pep
IPSFPTEHLDAKLLHEYISPPDLPSHSVICSSSLGTHQSTKIVTTGSEDHSFSLDSVGSKDHSYSFVSVVEDTMGDAVEDKMYQVVKEDEPKELLKDSKVNFMANVVEDTMKEKEINEDDHMGWYSLASVVEDTMDQQVGADIMDQQVVEDSLVTDTMEESDEDEYLKAEYEKGALIFARDEANALERKEAEARYEKSLQEIRDEFLKIYVPFRYTAMCISRRGTVPRSLIALLIRWFPSECFFNQTLESSTTEQENDIEVDEYDSQEFNGEGYNGMQDLMEDLFPQCNTPGGDEATHESTDQGPEEEPNTDAAKFYALLDKYNQPLYE

SEQ ID NO: 183302 - protein, 135 aa, Oryza sativa
  Clone ID: PAT_MRT4530_80406C.1.pep
MASYADLENFQFAQISSKPWRGKTLPRPSNKRGYGTGIPSNNFEKRRLVAFCNGKIRYPEIACQLEGEDHLPMLLRMWTFTYTEENDHWLGQHFLKALTLAYLASYRLGHHFLKVLLSKDNCVTSKDVVHSEFIK

SEQ ID NO: 183303 - protein, 413 aa, Oryza sativa
  unsure (1)..(413): unsure at all Xaa locations
  Clone ID: PAT_MRT4530_80407C.1.pep
MTAAPGSLPLVNSRPVSLSLAASRSSFSSLLSGGAGSSLNLMTPPSSLPPSSPSSYFGGVSSSGFLDSPILLTPSLFPSPTTTGALFSWITTATATAAIAPESQVQGGVKDEQQQYSDFTFLPTASTAPATTMAGATATTSNSFMQDSMLMAPLGGDPYNGEQQQPWSYQEPTMDADTRPAEFTSSAAAGDVAGNGSYSQVAAPAAAGGFRQQSRRXSSDDGYNWRKYGQKQMKGXSENPRSYYKCTFPGCPTKKKVEXSPDGQVTEIVYKGAHSHXKPPQNGRGRGGSGYALHGGAASDAYSSADALSGTPVATPENSSASFGDDEAVNGVSSSLRVASSVGGGEDLDDDEPDSKRWRRDGGDGEGVSLVAGNRTVREPRVVVQTMSDIDILDDGYRWRKYGQKVVKGNPNP

SEQ ID NO: 183304 - protein, 41 aa, Oryza sativa
  Clone ID: PAT_MRT4530_80408C.1.pep
YRWGPSLNILIKLMAVESLVFAPFFAAHDALQFKLLLDREI

SEQ ID NO: 183305 - protein, 659 aa, Oryza sativa
  unsure (1)..(659): unsure at all Xaa locations
  Clone ID: PAT_MRT4530_80409C.1.pep
MPSCCCLLGLGFPSPPSALRILRRRMASRAFQLRLNPLTGDSEWLVVEEEEEEDHHPTPPPKQLLATTSYLDMLNDSARNRAYRRAIEAAVTDPSSRVLDIGSANPTQFKYLLNFAKGGMDAYVFNDFRAGTGLLSMMAARALAAVGGETRGGSVSACESYLPMGKLMRRVLRANGMENRVKVFHKRSDELKVRDDLDSPADILVSEILDSELLGEGLIPTLQQAYDMLLAKNPKIVPYRATTYGQLVESTFLWKLHDLHNNEANAADGVWLTPGEMERIVSVKPQQHAMQCDALEDEIRLVWTLVLQNLVEKWVLQLDSAGSIFYSTAPRWARQSSSEGPQRDMKDWCDHWKQCVWFMQGKGIPATEDQVLSLRARHNQTSISYQLNINDEACDRSSKGDHLTLLPERIALYGDKDWRSALINTIKNALTVKSSPTCVVADDSMFLALLISSMSPTSKVIAMYPGLRDKGAAYLRSVADANNFSIDQIQVIGKRASSITADDLKHKKVNLLVGEPFYLGSEGMLPWQNLRFWFDLWRSRSSLKDVEGFDHSVVNETLGACGCLPGDQQGPCLPYYVWQCGYTKKLSKVYSLMDFNFSEPIHSCFGKTKIEFSHDGTCHGFAVWIDWVLDERKSVVLTTGPAXDNRYWKQGVQLFSKPV

SEQ ID NO: 183306 - protein, 519 aa, Oryza sativa
  Clone ID: PAT_MRT4530_8040C.1.pep
MQFSSVFPLEGKACVSPIRRGGEGSASDRLKIGDSSSIKHDRAVRRMCLGYRGTKNGAQCVLTSDAGPDTLHVRTSFRRNFADPNEVAAVILGGGTGTQLFPLTSTRATPAVPIGGCYRLIDIPMSNCFNSGINKIFIMTQFNSASLNRHIHRTYLGGGINFTDGSVEVLAATQMPGEAAGWFQGTADAVRKFIWVLEDYYKHKAIEHILILSGDQLYRMDYMELVQKHVDDNADITLSCAPVGESRASDYGLVKFDSSGRVIQFSEKPKGTDLEAMKVDTSFLNFAIDDPTKFPYIASMGVYVFKRDVLLNLLKSRYAELHDFGSEILPRALHEHNVQAYVFADYWEDIGTIRSFFDANMALCEQPPKFEFYDPKTPFFTSPRYLPPTKSDKCRIKDAIISHGCFLRECTIEHSIVGVRSRLNSACELKNTMMMGADLYETEDEISRLLSEGKVPIGVGENTKINNCIIDMNARVGRNVVITNSEGVQESDRPEEGYYIRSGIVVILKNATIKDGKVI

SEQ ID NO: 183307 - protein, 264 aa, Oryza sativa
  Clone ID: PAT_MRT4530_80410C.1.pep
MDPNGSFPKNDGSSRKEAYLSPLHEALRGTTAVQGLGEYVGHNSSTTPPIISGPQETTILPSHNYSSYNPNTALAPPPFQLPHQQNFLTTPMGTYFDSSEQAHIMSTESPPVTSLLQGDPFAVVHAHLNTTGVLDNGPIFENSATSLLVPEVNSMPSVYPFPLQNIQPFISGTISQQQRLQSGSSSHVESFGPPYVPREQPEPIGGTKSVQVPAGRSGVVNERVYTCRHCPNATFSTPQAYGGHMSAHSKKDKKNMSSGPSSRG

SEQ ID NO: 183308 - protein, 70 aa, Oryza sativa
  Clone ID: PAT_MRT4530_80411C.1.pep
VYKVIFCSVFFTPDSWGVYLGKKGVLKRSPHAPGDCPPPPGGGEGFLTNIVFFFFLLNWFLDPQSFFCLN

SEQ ID NO: 183309 - protein, 111 aa, Oryza sativa
  Clone ID: PAT_MRT4530_80412C.1.pep
NRLDSSFFGGMLVVTKEDFNSSNNTIQQSKQSVHSSDATLHFWNHERAPEAKEKKKKRNLQCQNTMRFRFRVAESKRGIVGGHAHKKEDQIKAQPHLFVGPAILCYALGLT

SEQ ID NO: 183310 - protein, 866 aa, Oryza sativa
  Clone ID: PAT_MRT4530_80413C.1.pep
MGVRGGGSALGRAGASSSKRTKQGGRGGAKRTKQGGRQRATEPGDAHQVFDRLLKRGDRASIFDLNRALSDVARASPAVAISLFNRMPRAGATSAAPNIATYGIVIGCCRRLGRLDLAFATVGRVITTGLRMSPILFSPLLKGLCDRRRTSDAMDIVLRRMPELGCKPDLFSYTILLKGLCDDKTSQQALDLLHIMADHKGRCPLDVVAYTTVINGLLREGQLDKAYSLFDAMLDRGPSPDVVTYSSIISALSKTQAMDKATQVFTRMVKNGVMPDCIMYTSLVHGYCSSGKPKEAIGIFKKMCRHGVEPDVVTYTALMDYLCKNGKSTEARKIFDSLVKRGHKPDSTTYGTLLHGYATEGALVEMHDLLDLMMKKGMQLGHHIFNMIMGAYAKHNKVDEALLVFSNMRQQGLNPDIVNYGTVLDILCTAGRVDDALSQFNSLKSEGLAPNIVVFTTLIHGLCTCDKWDKVEELAFEMIDRGICLDTIFFNAIMGNLCKKGRVIEAKNLFDLMVRIGIEPNTNTYNTLIDGYCLDGKMDEAMKLLGVMVFNGVKPSDVTYNTIINGYSQNGRIEDGLTLLREMDGKGVNPGIVTYEMLLQGLFQAGRTVAAKELYLRMIKWDTIENRNDDAEDLFAALSTNGLVTNVVTYWLMIENVVKQGLLEELDDLFLHMEKSGCTKLLHKEQFDCHAMHCICGSKFFIVPLQRRAAERATAIPAKASTPGGCTGRGETSQRLGFAGGCSTAADCGGGNRRQGKRETATRPRGADSRRNNSKFVALVSSSGSSLDTSPMSALFAFNALSDDQREELGSEVDPFNAFGCGELKHIKFNCPNRKKAIKEEVDKKNNKKEKKKSCMQRLTRELIEA

SEQ ID NO: 183311 - protein, 41 aa, Oryza sativa
  Clone ID: PAT_MRT4530_80414C.1.pep
PLHEDKIHRRLVYANTLNSHRMIRKIGTMCSCRVHGICCMA

SEQ ID NO: 183312 - protein, 152 aa, Oryza sativa
  unsure (1)..(152): unsure at all Xaa locations
  Clone ID: PAT_MRT4530_80415C.1.pep
VFPHSSQVPLRKECVQPPFKDWQSANEXIVTIKGLPKIRYSCKPVYREMVINGNNYVVVKVANWMRRHPGRSFENYDRCHVQRRKNVAMFWRNFKMTNCQAAIAXRRYSLACISPPSPLRVIYKISSDDEPCSSEVTGVRRKCPDPDIVIYL

SEQ ID NO: 183313 - protein, 641 aa, Oryza sativa
  Clone ID: PAT_MRT4530_80416C.1.pep
MATSGPARGWLPALARRIASVTGTLNPPASRVSRFPGSRNMASGSGVEGEGLGIPYRRRFIPFANDPIHTTKDNIISMDKHLPITQGKDSAATKEFISCYGHCRPTTYGDEDASRTAVEVTGGKQDPRGAVQNLIDGEVAVQELIDGEEIARNQRASEVSDNDGYEEFNDRAVNYHCDCHVWTPLIASSHRDGSIYDTRGTFGSGWKWDYRIADRNETRLEAMMLSHPTKDCYMRDGTCIWHPANSMLQIFSVKLAKTPVVDGSIELYGYIAVRDLQDPLLNYIVKIGRDDPIIVEQVQGSLIEMTGPKRGIDFSCAVLVEYDMRIKTGEREEDDLQLIDGATDLDHILTSHVPVRNRIYGDCGAVDITQANLLYAFEATVEVVISEVQTSFDLCLSCFTSGLHEEIRLFDGAISESRDLRSLEQRSGGVDSGDGDSCYRGSRRSRREGGSRVCARWLSRARGGRTAGERRTVRAASRLGCGSVPDHYGSRLGYGYKSTSYRHLGNACQLFRVEPWSHGVHTSNPDVLSIPISKMASVKAANNITIEPVVQYVDKELDKASNRDKGAKGTEVYLTAFHCVHSNKILRPWIIARAANEKQNRKVKRCGYDSIVGFDGNNPIDASIAVKISEMARNSGAPTFD

SEQ ID NO: 183314 - protein, 806 aa, Oryza sativa
  Clone ID: PAT_MRT4530_80417C.1.pep
MATSGPARGWLPALARRIASVTGTLNPPASRVSRFPGSRNMASGSGVEGEGLGIPYRRRFIPFANDPIHTTKDNIISMDKHLPITQGKDSAATKEFISCYGHCRPTTYGDEDASRTAVEVTGGKQDPRGAVQNLIDGEVAVQELIDGEEIARNQRASEVSDNDGYEEFNDRAVNYHCDCHVWTPLIASSHRDGSIYDTRGTFGSGWKWDYRIADRNETRLEAMMLSHPTKDCYMRDGTCIWHPANGMLQIFSVKLAKTPVVDGSIELYGYIAVRDLQDPLLNYIVKIGRDDPIIVEQVQGSLIEMTGPKRGIDFSCAVLVEYDMRIKTGEREEDDLQLIDGATDLDHILTSHVPVRNRIYGDCGAVDITQANLLYAFEATVEVVISEVQTSFDLCLSCFTSGLHEEIRLFDGAISESRDLRSLEQRSGGVDSGDGDSCYRGSRRSRREGGSRVCARWLSRARGGRTAGERRTVRAASRLGCGSVPDHYGSRLGYGYKSTSYRHLGNACQLFRVEPWSHGVHTSNPDVLSIPISKMASVKAANNITIEPVVQYVDKELDKASNRDKGAKGNRGMVVADHFQLWPSPYQLNCECSHTEQQPWPPPTQAGDIGCQVALRRVLGSSSKCSQGDLMPVTPPRPLTIGKLHNSRSRSAGNTTEAVQSIIESHAISLHCRISKSMCIALNFVESWLQNTAKKLCNGQLLNLSVGIHFDDRKISTTLFFAELLEHPIIYFQVYLTAFHCVHSNKILRPWIIARAANEKQNRKVKRCGYDSIVGFDGNNPIDASIAVKVSIDVIGTWTDSETLYA

SEQ ID NO: 183315 - protein, 89 aa, Oryza sativa
  Clone ID: PAT_MRT4530_80418C.1.pep
ELLVNIPEEKIREALKVILDVRNQPVLIHCKRGKHRTGCVVGCLRKLQKWCLTSVFDEYQHFAAAKARSTDQRFMELFDTSSLMHLTAS

SEQ ID NO: 183316 - protein, 919 aa, Oryza sativa
  Clone ID: PAT_MRT4530_80419C.1.pep
MATPDVILPGPSLRPMPYMRSAPSARPEYHECATCHGPAKTRCSRCKSVRYCSGKCQIIHWRQGHKQTCQQWNGFGTSSSGGLPPTENTEQMPFLSNLNSPLRGSDVHLHDMDFDTMSEPSFVTTDSYNLDTSPFLSDRSNMNKPNQFLHTSENGAAIGSYEKNDYSIDGEVPSSEILSGNKGLNNSSGSGENCGNRDVIYPLNSVVHQPNNYAPEIRKRPKASITVYESDKGVYLTSDMISSGEGPYASAAESLQRSNSSGNVTGKGNMIHKKPPYPSGSTKTAVSTNSSLQGCNGISKAGASKVEALKKPSKFLKTSLVGLINDNKRSKVLFPYEDLVKFFQYEVRGISPRGLFNCGNSCYANAVLQCLMCTKPLMIYLLLRLHSKDCNTKTQAPTLLGVVVKSLTISDFFDIDCFILLGCSKNWCLMCELEQYASTLRESGGPVSPSRILSNLRNIGCRLGGGSQEDAHEFLRHLVMSMQGACLDGLGGEKQVEASLQETTLIQQMFGGRLKSKVKCLRCYHESERYENIMDLTLEIHGWVESLQDALTQFTAPEDLDGENMYKCGRCSAYVKARKQLSVHEVPNILTVVLKRFQTGKYGKINKCVTFPDMLDMVPFVTGAGDNPPLYFLYAVVVHVDTENASFSGHYISYVKDMQGTWLRIDDSEVQAVSLNQVMSEGAYMLFYMRSFPRPPKIYIEKGLSSVPTCSKRHSSKSSKGSKQDLNHTESLFASSDQTYGIYDFRPDNGYIQDQHAALRTRNFYHTDDAFADSISTDFSDATSSEWSLFTSSDESSFTTESTRDSFSVVDYGDNAGLDPISSIFGPYYAQDHPPGSFASCTRLSPSNPQTRYFQENTGFVSDSSMPAHLPGNVHRGRYPDRACSSSAEPPASANPRSVYGRYGLSREGFVQTSGFCQM

SEQ ID NO: 183317 - protein, 125 aa, Oryza sativa
  Clone ID: PAT_MRT4530_8041C.1.pep
TMDPPGCRIHHEILRLHAQRQNTKKRLNIRMFKCCGVYFIGKSEFCHAFKSESLLKKMHITFPLLSPPYPLLPSLPVVCFSSLPSSLPLIASSLLYRSPSNLLFLSPGGGGGLWVPPLLPPLLIV

SEQ ID NO: 183318 - protein, 44 aa, Oryza sativa
  Clone ID: PAT_MRT4530_80420C.1.pep
RWHHRRGKRRHVCVCQGGSFSHGRPFFFFFFFFFFFFFFFFFFF

SEQ ID NO: 183319 - protein, 145 aa, Oryza sativa
  unsure (1)..(145): unsure at all Xaa locations
  Clone ID: PAT_MRT4530_80421C.1.pep
MARPMPAMPTQTASASHHAAAPRRAPPSSSSSSSSPTPSLAEPAAPAAPLSPEFSASSIMTHRRCADSTTESRTSSAESSPLLAPAAASFSSASRARDCDSRSARIRRSPPSPPPPSPSPXSDPGSCSSTPPRSPLVPNSARGPR

SEQ ID NO: 183320 - protein, 160 aa, Oryza sativa
  unsure (1)..(160): unsure at all Xaa locations
  Clone ID: PAT_MRT4530_80422C.1.pep
CRVCRAAGHAWGAVEWSWTHGRASWTKVREDALETKTVTXSRQSLRKMMPKSRCSRTAKDETSHRACQTPGQLGTNARAGVANTARARQGTTMNHTPMSEETSREDLQDGRGTRMADEKSTDDVAMLRRASLSTAITSGGVDHGQRHCGPRGXTQRQPEA

SEQ ID NO: 183321 - protein, 111 aa, Oryza sativa
  Clone ID: PAT_MRT4530_80423C.1.pep
CSGPRSIALPTFPSLHARSGRGTPSVSSPLSGSLSSIGLCQSTGARSWRGSGAPHPPRPPHNEREVSACPSAQPHEAACGCRPRACAYAVAHYVWRMSSGRVYRRIVGEIQ

SEQ ID NO: 183322 - protein, 629 aa, Oryza sativa
  Clone ID: PAT_MRT4530_80424C.1.pep
MEEQRMCYRTALLLAAVIFLFRSEIGRWCSYLYKATDVAVQAVGPATSPSTSSSMTHRQRCCIFLDYTSLFSGNCVLLRQFSLYAVLAPRPSRRPSLLVFSDIGLPDFGYIDHGYSAHGFIDHGSLGSFALATSTMAQRAIIRVEHSCRVPAGCDGGGFGGEDSCGEGVVRGCGCRLVLAARRHRLSISPSSHRSPAPPRPLDACRCRRWRAFSPRAHLAGDHGEELGGGGDELELAGEAATTGRNLAAEGTSSSLPAASGTRGGAESGGGAWDELELADGVGRGGRERRRATDRRRRALGVEAQSGGVGRGRVGRVAWRRRVGETGSSAATTRERGREARSHGSAAAARDAAAVTAGDEELGAASPLHLGGMRADGARRGFPLPSRTELGAGCDPTASPSLPSPARHAEQQLARAVPALHGGSSSRRLAELNDYATALVSYSGHAIATSSSGLPRAADEEDDGLHADHARRSRRIVGYDGEYHRQHPVHGISTPPPARRGHLLSSPAHAARLVRRPGQPPCRHCCLASSVAALASSAAALASSAAPPPAPPHFALSSASSRRRRLVSPPPPQPRLASTAAASPRLASSAAPRRRSPPPSPLCACETESERRERKGEREKRERNSGIGV

SEQ ID NO: 183323 - protein, 139 aa, Oryza sativa
  Clone ID: PAT_MRT4530_80425C.1.pep
MAKISRGAPGGKLKMTLGLPVGAVMNCADNSGARNLYIIAVKGIGARLNRLPAGGVGDMVMATVKKGKPELRKKVHPAVTVRQSKPWKRFDGVFLYFEDNAGVIVNPKGEMKGSVITGPVGKEAAELWPRIASNSGVVM

SEQ ID NO: 183324 - protein, 168 aa, Oryza sativa
  Clone ID: PAT_MRT4530_80426C.1.pep
MSHRQYRRIFLDYTSIFFGNRVLLRQFSLYAVLAPRPSRRPSLLVSSNIGVWFMVVPYLVRALFGVIFLHDRRDCVTVFVSSTSSRAIGPRRPPLPDFGYIDHGYSTHGFIDHGSLGSFALATSTMAQSAIIRIEHSCRRWPTWKVLHIQIEESIGRVETVVVFGELL

SEQ ID NO: 183325 - protein, 488 aa, Oryza sativa
  unsure (1)..(488): unsure at all Xaa locations
  Clone ID: PAT_MRT4530_80427C.1.pep
YPHPSLFLSLPLSHSLSLPLSLSLLYAWPTRGRRAAGGRRRRAAGGGRRGRGAGAGSRLRAPRQGGGGGRRSEEEASGTGGGGSARQPTTTTAAVGAATAGGGSGYGGGGFATLARRPTTTTAAVGAATAGGGERLPADLTTFRSTPFVRRLLLRXPRPSSGGTSSRSSSPCRASCNPPGRWPRRLDAPGYNDFCNRSSLSTRLRHQPSGCRCVAPLGCSVAARGPPPPVVGVLAAASTSSRTCVAPSGHNVAPLVVFIVVRASTPSSSTLVIVSHSGYLYMATDVAVXAVGPATSPSSSSSMIHRHRRRIFLDYTXALLRKFSLYAVLACPGVWQALCDVSSFMVRLHRLFGVIFLXTTVAIMSPSSSPAHPRTPWFTTPXPCVHDHSTAPHARSAARLPRHXLPYFGYIDHXLGSFALATSTMAQRAIIRIEYSCWFLLQSKCPRCSRLDCGGMLEYMYSYIYRPPRLNTIIPRYTIYLXLYYPTI

SEQ ID NO: 183326 - protein, 52 aa, Oryza sativa
  Clone ID: PAT_MRT4530_80428C.1.pep
MSSAAVASSHSCRPPHAGVARMGQPSTLVVLSGAGLQGSKDELCTGGGALLC

SEQ ID NO: 183327 - protein, 500 aa, Oryza sativa
  Clone ID: PAT_MRT4530_80429C.1.pep
MAANQGEAHRREPDQRRPMCGVCTKPLRLCLCGCLRRPPLDTAVGVTVLQHLMEAGHPLNSTRVARLGLRNLAVALVGDVNHRASFHLRTLDAAAAAGGGNHDRPDGPGEIQVLEGDGFGGGTGGPAGPVQCEGETLDSAICSNGISGESGGAVSCARRDYVTKGINASSDLGVKAANIRGSSDIGGEILDLVDIPDRIGFDLDGEICSVKSDLGGGEELGFQSMKRNGYCSDSERLGSSANQTGNSFVDGIHGENHHSIGEVNGNLPRHLVENASEFQMATAQNCNGIPRENVGTVAAIGQDWTVKNMDKCSITYTEKELKIEIERGVKPKIRWLSRGPLGQSAVSNGFTVTKIQMKKSKQTGEVSVFEEFSITIPPKSALLFPCQRAISIDASDCQLQHLIVLDGTWAKAQRMYHENPWLQLLPHVKLESDGVSLYSEVRHEPRAGCLSTIESIVVAMRKLGEDAKGLDDLLDVFESMIADQRRCKDENWKQKLESKT

SEQ ID NO: 183328 - protein, 97 aa, Oryza sativa
  Clone ID: PAT_MRT4530_8042C.1.pep
MAPSKARMGLVDDRLNHEYLEGVEKFIDYAFSKLDGVQEFNGEGYNGMQDLMEDLFPQCNTPGGDEATHESTDQGPEEEPNTDAAKFYALLDKYNQP

SEQ ID NO: 183329 - protein, 298 aa, Oryza sativa
  unsure (1)..(298): unsure at all Xaa locations
  Clone ID: PAT_MRT4530_80430C.1.pep
DDFYRRSSSTARLRHQASGCRCVAXPRAAVPLPVVHISTGCCSAERRPPHQGYIIGGLLAAASTWSCSCVVLSDRSFAAFVVFLTVRASTTLSSILVIVSRSGYLYIATDVAVQAIGPATSPSTSSNMIHRQRRRIFLDYTSLFSDNRVLLRQFSLYVVLAPRPCPGVWQTLCDVSSFTVRLHRLFGINFLXTTAAIASPSSSPAHPRAPWXHDHSTTPHARPVARLPRHQLPDIGYIDHGYSTHGFIDHGSFGSFILATSTMAQRAIIRVEHSCRFLLQSKCPRCSRLKCGGMFESY

SEQ ID NO: 183330 - protein, 67 aa, Oryza sativa
  Clone ID: PAT_MRT4530_80431C.1.pep
HVKLNNLSQDHAAIDLLSLMVTICSFLFLLTYLCCQISFSDRQQSMCTSEARAHQLELIICFLGFTA

SEQ ID NO: 183331 - protein, 708 aa, Oryza sativa
  Clone ID: PAT_MRT4530_80432C.1.pep
MASPPPERAPAAEARRRRTTVYHGHRRPSPHRPTVRGGVFSDLRATTAASSQPRPPSSSSSSAPFRLADWDPSSSSSSTPSPSATAAARRLSPLARFLLDALHRHQRWGPPVVAELTKLRRVAPELVAEVLSARPPPPPPLALPFFLWAGRQKGFRHCFPAFHALASLLSAAGLPAAADQLPDLMRAHGKPVSHSQLNLLVRLHTGARRPLRALHALRRFRHEFSVQPEVHACNRVLGALAAAGHVDDTLKLFDEMSHCSVRPMPVTFAIMVRALARAGMTDKLLEMIGRMRAEVCRPDVFVYTALVKTMVRWGHMEGCIRVWEEIRRDHVDPDTMAYTTMIAGLCNAGMVEKAEELFGEMRRKGLLVDRMVYASLIDGYVSTGRVSDGCRVLKEMVDAGYRADLGIYNTLIGGLCEIEREDKAHKMFQIVVQEDLIPSSETVSPLLARYADKGEMVKFFGLVDKLVELSLPIVEILVDFLKLFACKSGNELKAVEVFNAFRRRGHYSVGIYNILIENLLKIKERKKALVLFEEMQSSDDCKPDSCTYSHMIPCFVDEGNIEEACSCYNLMMKAVWIPSISAYCALVKGLCKKGEINAAISLVKDCLGNVENGPMEFKYTLTILEACQSKSPEKVIKVVDEMIELAWKVDGLIQRIVSHRSDAPGRSHLPHGLTPSIMRHKMQLEVPSSGNRVSPSLRSQALRFENPG

SEQ ID NO: 183332 - protein, 1023 aa, Oryza sativa
  Clone ID: PAT_MRT4530_80433C.1.pep
MARGSALLDGSVLPPSRIVSERHAGLPRRFMPESATGREIVMLGEGRPAPDYPGRSIFFLPFAMAGLVPPFSSFFMDVLEFYDLQMAHLTPNAVMTLAIFAHLCEMFIGVRPSLQLFRWFFTVQSVSPPSVVGGCYFQPRGPVLNRYIPCVLRKKWDDWKSDWFYTPLANEARLRLPSQPPAQVSSWRAPVDLGEDYDAVLDRLAGLRSQGLTGAMVYGDYLRRRIAPLQRRARSAWEYTGPEDYMRTHQGARWDWAPEDFKIVVQRVLNLSSVEASRIPQEILPLCSDPDRASILTIMMGVGASEERAPKGHDGAGERRRGRPADAQGKRKLGGTPPPSPPRGGGAARASSRRPEGAAPTSQPEGERKKKRLRKTGETEPCRGNLISPPRWSFNRPPRSDVPSHSSRHPKSGQSEAEDPAAAEERRRESDRREAADRLREAEEAAREAARIRQAEEAAREEAARAEEAAKEEAARARQAEATAAAGASTGPTPSGNPQATASGEARDEAAGTSPGPTSPGDAQDQTGPGDIPEPSTSSGGPSRIAFSPRRLFSSSSVAPLSAEPILQALAAANTAVLDGFSAQVEALRAERAELEAAWARVEEGRRSVDAMVEVGRKAHRRHVSEFEARKAALTEIAREVEEERAATLIATTTMIEAQDALRLQNASREAELKEKLDAAQGVLDSAAARERRVTEAEAASRRREESLEARAMALEEHIGTVGKGLTDREAAAALREATLAAHEAACAEEECALRLREDALAERERALEEAEATTKWLADSLSLREAAQEEQARRNLECVRAERAALEQRAADLEAREKELDARAHIGGAAAGENDLAARLAAAEHTVADMQRALDSSTGEAEALRLAGEIGPGMLWDAVSRLKRAGRQAGLWKGQTTVPPTNLEGLAPHLNRMAWVLEQLPEELEKTIKSSSRDLARGAVELVLASYQARDPNFSPWMALEEFPPGTEDDARARVRDAANHIVQSFEGSAPRLAFAPSSDEEGDASGEDDGGDEAGDPGTLE

SEQ ID NO: 183333 - protein, 915 aa, Oryza sativa
  Clone ID: PAT_MRT4530_80434C.1.pep
MARGSAPLDGSVLPPSRIVSERQAGLPRRFMPESATSREVVALGEGHPAPHYPGRSVFFLSFAMAGLVPPFSSFFMDVLELYDLQMAHLTPNAVMTLAIFAHLCEMFIGVRPSLRLFRWFFTVQPVSPPSVVGGCYFQPQGPVLNRYIPCVLRKKWDDWKSDWFYTPLADEARLRLPSQPPAQASSWRAPVDLGDGYDAVLDRLAGLRFQGLTGAMVYGDYLRRRIAPLQRRARGAWEYTGSKDYTRTHQGVKWDWVPEDFKMVIQRVLNLSSVEASLIPQGVLPLCSDPERANILTIMQAVGALGERAPRGHDGAGGSHRGEQSTPGGGRASGPRDGGPGGSRPADARGKRKQEDTPSPSPPRGGGAEAAQEAVRARQAEEAAWEEAKLCRAEESVRETEAARARRAACQAPDPTPSEATTTSEATHDEAAGAPLGPDPSGDVRDEPASGDAPEFGTSIGGPSRAAPTPRRVSPLPSAAPLSAEPLLQALAAANTTVLDGLSAQMEVLQAERAKVDAAWARVEEGRRSVEAMVEAGRKAHRRHASELEARRRDLAEIAREVEEERETALIATAVFNAARDDLCLQYGSRAAELEKKLDASRQLEEALEARATVLEERARALDTKERELAGREAAVAIREATLAAHEAACAEEESALRLREDELTERERALEEAEAAAQRREEQAHLNLEGARAERAALDQRAAEFEARAKELDARARSDGAAAGDGDLAARLAAAEHTIAELQGTLDSSAGEVEALRLAGEVGPDMLRDAVSRLDRAGRQAGLWGGRTAKYAANQEGLAQRLSEMAGTLQRLPEELEETIKSSSRDLARGAVELVLASYQARDPDFSSWAALDEFPPGTEDGARAQVRDSADHIVHSFEGTAPRLAFALDSDEEGGNGGADDSDDEAGDLGASA

SEQ ID NO: 183334 - protein, 673 aa, Oryza sativa
  Clone ID: PAT_MRT4530_80435C.1.pep
MARRLSWQDLQASGSAIATRLSLQDLQCLVRRKPACSAADRAESSAAGAPAGGGKGRHLAKALSVPDLIAIGIPRRLVLISASSFSSCVEHPRRNEALCLVPNGMLRWCQLAIGKSYECVGSTIGAGIYVLVGTVAREHAGPALTLSFLIAGIAAALSALCYAELSCRFPLAGSAYHYSYICIGESVAWLIGWALILEYTIGGSSVARGISPNLALFFGGHEKLPFFLTQIHVKWFETPLDPCAAILVLIVTALLCLGIKESSFVEGIITIANVIVMLFVICAGGYLAFQNGWSGYNDEQGYFPKGVAGVLSGSATLFFAYIGFDAVASTAEEVKNPQRDLPWGMCLTLSLCCFLYMMVSIVIVGLVPYYALDPNTPISSAFAKYGMQWAVYIISTGAVFALIASLIGAILPQPRIVMAMARDGLLPPLFSAVDPTTQVPTLSTILSGICAAILALFMDVSELAGMVSVGTLLAFTMVAISVLIVRYAPPNEIATKVALPGSSESLTSDSGYSEPDEENSEDLLGNEGAAIRVRQASTSKVVHRPASVESDQPKEVMTSRRGIRLPDWLVLEFLSPFFRCAFGSLLLVSATIALWFIGQDKSSLRQTGGFMCPFVPILPVCCILINVYLLMNLGIHTWIRVSMWLAVGAIIYVFYGRKYSSLTGVAYQRISPA

SEQ ID NO: 183335 - protein, 864 aa, Oryza sativa
  Clone ID: PAT_MRT4530_80436C.1.pep
MMGPKANAAAAGDLPEYAEVDPTGRYGRYNDVLGKGASKTVYRAFDEYQGMEVAWNQVKLHDFLQSPEDLERLYCEIHLLKTLKHRNIMKFYTSWVDVSRRNINFITEMFTSGTLRQYRQKHMRVNIWAVKHWCRQILSGLLYLHSHDPPIIHRDLKCDNIFVNGNQGEVKIGDLGLAAILRKSHAVHCVGTPEFMAPEVYEEEYNELVDIYSFGMCVLEMVTFEYPYSECTHPVQIYKKVISVRIASWILGTKPEALYKVKDPMVRQFVEKCLATASRRLSARELLKDPFLQVDDLVFCPGDGDYSLMNYLRQPYLEHAYSNVSMMSNGLSESIDEDTPTEDRWDCEDDDIKADGIDLFNGHEDEPLGNVDITIKGRKSEDGSIFLRLRIADNDGHVRNIYFPFDIEADTALSVATEMVAELDITDHEVTRIAEMIDGEVSALVPDWRPGPGIEESQDTTYCHNCGSNVSSCGSLYAYMSSAARGCQCAELHGRFEEITFQANGEQTDLQDSGGSSDDGGGQTQHVKDQEAEQSCSPRHYEYDTSLQAKGFDMKHEVKMAKYKARKMAHLRRAIHPSLDFDNLNGERRMKSSLNKLQSFHIGKNHNFRIPTCERSPGARDAEEDPDIFNLAYHSRHPDPGAQRARHCEVDAQSSPDLIAKDGHHMLPDTNILTCYCQLVLLEQDKGVSLLAAAAAATAAAASSRSASPPLDAMGRMHSSGKGMSCSVLPYRRAAPAWVKTSASEVEEMIVRAAKKGQLPSQIGAILRDAHAVPLAQGVTGGKILRVLKSRGLAPEVPEDLYFLIKKAVAMRKHLERNRKDKDTKFRLILVESRVHRLTRYYRLAKKIPAFFKYDSTTASTLVA

SEQ ID NO: 183336 - protein, 796 aa, Oryza sativa
  Clone ID: PAT_MRT4530_80437C.1.pep
MVYGDYLRRRIAPLQRRARGAWEYTGSEDYMRTHQGVKWDWVPEDFKVVIQRVLNLSSVEASFIPQGVLPLCSDPERANILTIMQAVGASGERAPRGHDGAGGSRRGEQSTPGGGRASGPRDGGPGGSRPADARGKRKQEDTPSPSPPRGGGAVRASSRRPEGAVPTSQPEGERKKKRLRKIGGTEPCRGNLISPPRWSFSRPPRSEIPSRPSRHSKSGRSEAEETATAEARRREADRREAADRLREAEEAAQEAVRARQAEEAVREEARLRRAEESVRETEAARARQAACQAPDPTPPEATTTSESSHDEAAGAPLGPDPSGDAQDEPTSGDVPESGTSIGRPSRAASLPRRLSPMPSAAPLSAEPLLQALAATNTTVLDGLSAQMEVLQAERAELDAAWARVEEGRRSVEAMVETGRKAHRRHTSELEAHRRELAEIAREVEEERETALIATAVFNAARDDFYLQYGSRAAELEKKLDASRQREEALEARATVLEERARALDTKERELAGREAAVAIQEATLAAHEAACAEEESALRLREDELTERKRALEEAEAATQRREEQARLNLEGARAERAALDQRAAEFEARAKELDARARSGGAAAGDGDLAARLAAAEHTIAELQGALDSSAGEVEALRLAGEVGPGMLRDAVSRLDRASRQAGLWGGRTAKYAANQGGLAQRLSEMAGTLQRLPEELEETIKSSSRDLARGAMELVLASYQARDPDFSPWAALDEFPPGTEDGARAQVRDAADHIVHSFEGTAPRLAFALDSDEEGGDGGADDSDDEAGDPGASA

SEQ ID NO: 183337 - protein, 71 aa, Oryza sativa
  Clone ID: PAT_MRT4530_80438C.1.pep
MSVQKRRLWLPSAQRLKAADHLDLVAKCLDIKIKALKLLQLDVATATAANRSRHAGSQAEGTRACMTNKDR

SEQ ID NO: 183338 - protein, 122 aa, Oryza sativa
  Clone ID: PAT_MRT4530_80439C.1.pep
MGRMHSSGKGMSCSVLPYRRAAPAWVKTSASEVEEMIVRAAKKGQLPSQIGAILRDAHAVPLAQGVTGGKILRVLKSRGLAPEVPEDLYFLIKKAVAMRKHLERNRKDKDTQFRLILVQSRV

SEQ ID NO: 183339 - protein, 80 aa, Oryza sativa
  Clone ID: PAT_MRT4530_8043C.1.pep
ELHHLELTVGLLVLSHHLGLSVLAPTSTSKCFRHGLHLEGPSLLSAGFSLRCHYCNFICHKSDLRSEHAREGEKRDSSGI

SEQ ID NO: 183340 - protein, 1804 aa, Oryza sativa
  Clone ID: PAT_MRT4530_80440C.1.pep
MSSFASPLGAPSAEYAEHLSNLVAIPSLAHENHYFLGPIGNPDPTEFIIGETNRIPFRLTNPDLGHWKNTFKSWPSLEKVPLEKSWTTWFKRVSASKRVHWDEIGIGQALDLTIANSAKDEPLMAAASYFWSNTTNAFLFNQAPMTPTLIDIIMITGLDVTSSAHPMSLNTKNQYDFKTKSIGGWSGYVATYMGQGSVTPREHVAFLLMWLEKFLFCGSSCGPTTNWQFLAEALETKRQFPLGKILLGYLYQMLSNASAKIAVGSVVGAGKSSRLQSAHVSSLFRQLARQVGVASSFSPTSVMGSVSGIDDFVFPPGQAFRFGSLDFITNNFGKISLLDSDSNQSGKNQVSAPFGIPASSGLASRLQADWNREKSGESLRDYIQRFSEQRNKISEITDDVIIAAFTKGIRHEELVGKFGRKPPKTVKQMFEKANEYAKAEDTIIASKQLGPTWKPKKDAPTTGGGGSNNHKDRKRKPEELVATTTHSSRQQSRVNTFDKIMNSQCPHHPNSNHAAKDCFVYKQFAEQYAKNARKTPDGEQSTSKKKDDDDDAPTDFQDHRKELNHIFGDPLAYESKRKQKLTEREINAVQPDTPQYLRWSETTIKFDHSDHPDRVVHPGRYLQVLDPVVRNVKLCRSLIDGGSALNILFAKTLDDMQIPRTELKPSNAPFHGVIPGLSATPLGQITLPVTFGTRENFRTENVCFEVADFDTAYHAILGRPTLAKFMAIPHYTYMTMKMHGPRGVISLRSDIKQAVTCDKESCEMAQTCEIAIAREDIRLVAATASEGEVPTTKISKSGESEAKTKKIPLDPSDPTKTAVIGAKLDYIFAWKPSDMPGIPREVIEHSLHVKEDAKPIKQRLRRSAQDRKDAIKEELTKLLAAGFIKEVLYPDWLANPVLVRKKTGQWRMCVDYTDFNKSCPKDPFELPCIDQVVDSTAGCELLSFLDCYSGYHQIRLKESDCLKTSFIMPFRAYCYITMPFGLKNAGATYQRMIQRCFSTQIGRNVEAYVDDVVVKTKQKDDLITDLEETFASIRAFRMKLNPEKCTFGVPSGKLLGFMVSHRGIQANPEKVNAILNMKPPSSQKDVQKLTGCMAALSRFVSRLGKRGMPFFKLLKKTDNFQWGPEAQKAFEDFKKLLTTLPVLASPHPQEPLLLYVSATSQVVSTVLVVEREEEGHVQKVQRPIYFVSEVLADSKTRYPQVQKLLYGVLITVRKLFHYFQGHSVTVVTSFPLSNILHNREANGRIAKWALELTSLDISFKPQTSIKSQALADFVAEWTECQEDTPEEKMEWKYEALLHGLRIAISLGIKRLIVCGDSQLVVNQVMKEWSCLDDNMIAYRQEVRKLEDKFDGLELTHVLRHNNKAADRLANFGSKREAAPSDVFVEHLYEPTVPRRETAEAADTQDIAMVEADWREPLIRFLTSQELPQDKDEAEQISRRSRLYIIHEAELYKKSPSGIMQRCVSSEEGRQLLKDIHSGIYGNHAAARTIVGKAYRQGCQFFARQTHLPAQELQTIPLSWPFAVWGLDMVGPFKKAVSGYTHLFVAIDKFSKWIEAKPVIIITADKARDFFINIVHRFGVPNWIITDNGTQFTGGVFKDFCEDFGIKICYASVAHPMSNGQVERANGMVLQGIKARVFDRLNPYTDKWVEQLLSVLWSLRTTPSRATGQSPFFLVYGAEAMLPSEVEFESLHFRNFHEERYGEDRVDDLHRLEEAREAALIQSARYLQGLRRYHNRNVRSRAFLVGDLVLRKIQTIRDRHKLSPLWEGPFIISEVTRPGSYRLKREDGTPIDNSWNIEHLRRFYA

SEQ ID NO: 183341 - protein, 678 aa, Oryza sativa
  Clone ID: PAT_MRT4530_80441C.1.pep
MMGPKANAAAAGDLPEYAEVDPTGRYGRYNDVLGKGASKTVYRAFDEYQGMEVAWNQVKLHDFLQSPEDLERLYCEIHLLKTLKHRNIMKFYTSWVDVSRRNINFITEMFTSGTLRQYRQKHMRVNIWAVKHWCRQILSGLLYLHSHDPPIIHRDLKCDNIFVNGNQGEVKIGDLGLAAILRKSHAVHCVGTPEFMAPEVYEEEYNELVDIYSFGMCVLEMVTFEYPYSECTHPVQIYKKVISGTKPEALYKVKDPMVRQFVEKCLATASRRLSAREVLKDPFLQVDDLVFCPGDGNYSLMNYLRQPYLQHAYSTVSMMSNGLSESIDEDSPTEDRWDCEDDDIKADGIDLFNGHEDEPLGNVDITIKGRKSEDGSIFLRLRIADNDGHVRNIYFPFDIEADTALSVATEMVAELDITDHEVTRIAEMIDGEVSALVPDWRPGPGIEESQDTTYCHNCGSNVSSCGSLYAYMSCAARGCHCADLHGRFEDITFQANGEQTDLQDSGGSSDDGGGQTQHVKDQEAVHSNGFVQMGTTRPRDQFCFSSFQEQSCSPRHYEYDTSLQAKGFDMKHEVKMAKYKARKMAHLRRGIHPSLDFDNLNGERRMKSSLNKLQSFHIGKNHNFRIPTCERSPGARDAEEDPDIFNLAYHSRHPDPGAQRARHCEVDAQSSPDGHVYS

SEQ ID NO: 183342 - protein, 980 aa, Oryza sativa
  Clone ID: PAT_MRT4530_80442C.1.pep
MARGSAPLDGSVLPPSRIVSERQAGLPRRFMPESATGREIVSLGEGCPAPRYPGRSVFFLPFAMAGLVPPFSSFFMDVLEFYDLQMAHLTPNAVMTLAIFAHLCEMFIGVRPSLRLFRWFFTVQPVSPPSVVGGCYFQPRGPVLNRYIPCVLRKKWDDWKSDWFYTPLADEARLRLPSQPPAQASNWRAPVDLGDGYDAVLDRLAGLRSQGLTGAMVFGDYLRRRIAPLQRRARGAWEYTGSEDCMRTHQGVRWDWAPEDFKIVVQRVLNLSSVEASLIPQGVLPLCSDPDRASILTIMQAVGASEERAPRGHDGAGGSRRGEQSTPGGGGGAARASSRRPEGATPTSQPEGERKKKRLRKTGGTEPSRGNLISPPRWSFNRPPHSEIPSRPSRHSKSGQSEAEDPATTEARRQESDRREAADRLREAEEAAQVAVRARQAKEAAREEARLRQVEAATTSEAARDEAAGASLGPTPSGDAQDKPGPGDIPESGTSIGGPSRAASSPRRLFPTPSVAPLSAEPLLQALAVANTTVLDGLSAQVEALQAERAELDAAWARVEEGRRSVEAMVEVGRKAHRRHVSELEARRKVLGEIAKEVEEEREAALIATTMMNEAQDTLRLQYGSWEAELGKKLDAARGVLDAAAARERRAAETEVASRRREEALEARAMALEERAGVVERDLADREAAVAIREVTLAAHEAACAEEECALRLREDALTERERALEEAEAAAQRLAESASLREAVLEEQARRNLEGARAEKAALNQRAAELEAQAKELDARARSGGAATGESDLASRLAAAEHTIADLQGALDSSAGEVEALRLAGEVGPGMLRDAVSRLDHAGRQAGLWGGRTVKYAANQGGLAQRLSEMAGTLQRLPEELERTIKSSSRDLARGAVELVLASYQARDPDFSPWTALDEFPPGTEDGARAQVRDAADHIVHSFEGSAPRLAFALNSDEEGDDGGVGDSGDEAGDPGASE

SEQ ID NO: 183343 - protein, 55 aa, Oryza sativa
  Clone ID: PAT_MRT4530_80443C.1.pep
YMLSQKYSIVREFGEENTEPQTITEQTACHAFFCSDITLISISLFPNHSMTTCYV

SEQ ID NO: 183344 - protein, 1006 aa, Oryza sativa
  Clone ID: PAT_MRT4530_80444C.1.pep
MARGSAPLDGSVLPPSRIVSERQAGLPRRFMPESATGREIVSLGEGCPAPRYPGRSVFFLPFAMAGLVPLFSSFFMDVLEFYDLQMAHLTPNAVMTLAIFAHLCEMFIGVRPSLRLFRWFFIVQPVSPPSVVGGCYFQPRGPVLNRYIPCVLCKKWDDWKSDWFYTPLADEARLRLPSQPPAQASNWRAPGLTGAMVFGDYLRRRIAPLQRRARGAWEYTGSEDCMRTHQGVRWDWAPEDFKIVVQRVLNLSSVEASLIPQGVLPLCSDPDRASILTIMQAVGASEERAPRGHDGAGGSRRGEQSTPGGGRASGPRVGGPGSGRPADARGKRKQEGTPPPSPPRGGGAARASSRRPEGATPTEIPSRPSRHSKSGQSEAEDPATTEARRRESDRREAADRLREAEEAAREAARARQTEEAVREEAGLRQAEATTSSEATRETDRQEAADRLREAEEAAQVAVRARQAEEAAREEARLRQAEAAMTSEATRDEAAGASLGPTSSGNAQDKPGLGDIPESGTSIGGPSRAASSSRRLFPTPSVAPLSAEPLLQALAVANTTVLDGLSAQVEALQAERAELNAAWARVEEGRRSVEAMVEVGRKAHRRHVSELEARRKVLGEIAKEVEEERGAALIATTVMNEAQDTLRLQYGSWEAELGKKLDAARGVLDAAAARELRVAETEVASRQREEALEARAMALEERACAVERDLADREAAVAIREVTLAVHEAACAEEESALRLREDALTERERALEEAEAAAQRLADSLSLREAAQEEQARRNLESACAERAALNQRAAELEAQARELDARARSGGVAMGDSDLTARLAAAEHTIADLQGALDSSAGEVEALRLAGEVGPGMLRDAVSRLDRAGRQVGLWGGRTAKYAANQGGLAQRLSEIAGTLQRLPEELERTIKSSSRDLARGAVELVLASYQARDPDFSPWTALDEFPPGTEDGARAQVRDAADHIVHSFEGSAPRLAFAPNSDEEDDDGGVGDSGDEAGDPGASE

SEQ ID NO: 183345 - protein, 166 aa, Oryza sativa
  unsure (1)..(166): unsure at all Xaa locations
  Clone ID: PAT_MRT4530_80445C.1.pep
SCXSSSSSSAAAAAVQVGVPKPHLXPHLEPHXXXXXXPPXTPPHRRAAPXHPTTIKKATPQRLLFPRWWWEPVRPPTPVALPRWCRGVTGCRLRKEGRGARSSSSSSGGERRRLRSIERAEARRSPTRCWAKGTGRRGGCKVVVVATTVEGLYWXGGAVRACVLCA

SEQ ID NO: 183346 - protein, 1027 aa, Oryza sativa
  Clone ID: PAT_MRT4530_80446C.1.pep
MARGSALLDGSVLPPSRIVGERQAGLPRRFMPESATGREIVMLGEARPAPDYPGRSIFFLPFAMAGLVPPFSSFFMDVLEFYDLQMAHLTPNAVMTLAIFAHLCEMFIGVRPSLRLFRWFFTVQSVSPPSVVGGCYFQPRGPVLNRYIPCALRKKWDDWKSDWFYTPLANEARLRLPSQPPAPVSSWRAPVDLGDDYDAVLDRLAGLRSQGLTGAMVYGDYLRRRIAPLQRRARSAWEYTGSEDYMRTHRGVRWDWAPDDFKIVVQRVLNLSSMEASLIPQGLLPLCCDPDRASILTIMMGVGASEEVAPKGHDGAGGSRQEESTPGGGRASGPRDGGSGSNRPADARGKRKQGGTPPPSPPRGDGAVRASRRRPEGAAPTSQPETERKKKRLRKTGETEPSRGNLISPPRWSFNRPPRSDVPSRSSRHPKSGQSEAEDPAAAEERRRESDRREAADRLREAEEAAREAARVRQAEDTAQEEAARARQAEEAAREEAARARQAEEATREETARARQAEAMASSEAVHDKTAGASLGPTPSGDAQATTSGAARDKAAGASPGPAPSGDAQDQTGPGDIPELSASSGGPSRVAFSPRRLFSSSSAAPLSAEPLLQALAAANTAVLDGFSAQVEALRAERAELEAAWARVEEGRRSVDAMVEVGRKAHRRHISELEARKAALAEIAREGVLDAAAAREQRATEAEAASRRREEALEARAMALEDHAGAVEISLADREAAAAIREATLAAHEAACAEEESALRLREDALAERERALEESEAATQRLADSLSLRKAAQEEQARRNLECIRAERAALEQRAANLEAREKELDARERSGGAATGESDLVARLAAAEHTVADMQRALDSSTGEAEALRLSGEIGPGMLWDAVSRLDRAGREAGLWKGQTISRSTNLEGLAPHLRRMAWAVQQLPEELEKTIKSSSRDLAQGAVELVLASYQARDPGFSPWMALEEFPPGTEDDARARVRDAANHIVQSFEGSAPRLAFALSSDEEGDASGEDDGGDEAGDPGALE

SEQ ID NO: 183347 - protein, 1157 aa, Oryza sativa
  Clone ID: PAT_MRT4530_80447C.1.pep
MEMAMAIDGLAGGEGSALASVEIMDTPYLHGMYSLVGYGVPDIDRISLRGLGIDDCAFPPGQAFRFGSLDFITNDFGKISLLDSNSNQSGRDQVSAPFSIPNSAKIYPKLISIESAPNHSDKIPSTPTPPDQDDGAYPPILMKLPDDLVVVFTTRTSSPRRPRRDSAPAPIRPSSREVGVILQPLGMVSTDQLEGYFSSPGVDSRPTEIVEYDEFGYRYDNRDLDDFDESFEDNYTPLYFVVFMADNETEEQRQDREAEARRQDVEGTADFRTPQQNAVAAITLLDTLLKEDALNQADHVVNILNQTKTMIAASVPVNSGSIRTPTSSRVPHLRSQDYHQPSLSIAGAGSNRRSRGHDEQSVHSPPERHRERRVERPRSPPRWRPVDLRDTINQRRAARGYAHRHSPDRYDDDVDGVAAFTNDLRRVDWPTGFKPTGIEKYDGTTNPESWLTVYGLAIRAVGGDSKAMANYLPVALADSARSWLHGLPRGTIGSWAELRDHFIANFQGTFERPGTGIRYEDLVGKFGHKPPKTIKQMFKKANEYAKAKDAIIASKQSGPTWKPKKDAPTTGGGGSNNHKDRKHKPEELVATTTHSSRQCSRVNTFDKIMNFQCPHHPNSNNAAKDCFVYKQFAEQYAKNARKTFDGDQSTLKKKDDDDDAPTGFQDHRKELNHIFGGPMAYESKRKQKLTEREINAVQLDTPQYLRWSETTIKFDCSDHPNQVVRPGRYPLVLDPVVHNVKLRRSLIDGSSALNILFAKSLDDMQIPRTELKPSNAPFHGVILGLSATPLGQITLPVTFSTRENFRTENVCFEVADFETAYHAILGRPALAKFMAVPHYTYMMMKMPSPRGVISLRSDIKQAVTCDKGSCEMAQTREIAIAREDIRLAATMASEGEVPTTKISKSGESEAKTKKIPLDPSDPTKTAVIGTELDFLVRKKTGQWRMCVDYTNLNKSCPKDPFGFPRIDQVVDSTAGCELLSFLDCYSGYHQIRLKESDCLKTSFITPFGAYCYITMPFGLKNAGATYQRMIQRCFLTQIGRNVEAYVDDVVVKTKQKDDLITDLEETFASIRAFKMKLNPEKCIFGVPSGKLLGFMMSHRGIQANPEKINAILNMKPPSSQKDVQKLTGCMAVLSRFVSRLGEWGMPFSKLLKKTDNF

SEQ ID NO: 183348 - protein, 81 aa, Oryza sativa
  Clone ID: PAT_MRT4530_80448C.1.pep
HLGLQGSSSCIRTSRRNNGARILESLKIRHLVKKDRSWNKPINLKHHIAKAIRDSSFEATKSVKMNRSNYQCHFVSVQLMS

SEQ ID NO: 183349 - protein, 450 aa, Oryza sativa
  Clone ID: PAT_MRT4530_80449C.1.pep
MAFPDWVMLDPYVFRDGPFPDDDPTAAIGHNSRGDKVGVRFLLRAPPEPSSIFLDWEAGTGDCDDFSVVAAHRDAVLFQMGYLVSLGPSNAYKAFDYLLYRAAGAGGSSPSLDLLAPFGGSVDELKARMEADGLIRLTNQHLRRLKCLDIGVLCRDGEEFAVAELQITRSEVGPELHVLRSSTSSRKWELKRPPITPANGGSLDLEKFLWDWDADTVIPFGSYLCWVDYCLGILFCDMFDENPQLHYLEFPADVRGACFGGCCQAVGVTNGVMKLVSLVPDDGLIAENYTPESGFTIVCWTLRMDEMDKMVWEKDAVLKSDYLWSMLKPDFLWPLDEFPFITTNRFPRVQFPLISIDDSSVIYLVLAQNGMVEEAGYNYDETWLLAIDMSKMTLKMSFPYINDEMGDPSPEMLAFAEDKFWRFEPFLAADFSRHFNLRCPRHVLLKPAEA

SEQ ID NO: 183350 - protein, 34 aa, Oryza sativa
  Clone ID: PAT_MRT4530_8044C.1.pep
TEGGADHTHAQSLKRANHACALDLYGKMIATPSQ

SEQ ID NO: 183351 - protein, 1935 aa, Oryza sativa
  Clone ID: PAT_MRT4530_80450C.1.pep
MGSVSGIDDFAFPPGQAFRFGSLNFITNDFGKLSLLDSDSNQSGRDQVPVPFGISNSAEAYSKIISSESASNHSDEIQSTPPRPDQEDGFYPSILMRLPDDLAAVFTAKTSPTRRSRQAPASAPIQSRSREVGVILQPLGTVSTEELDGYLSSPGVSSRPTEILDCDDFGYYHDHGDFDDSYEDNYTPLFFGVFMADNETEGQRRAREAEEERTRQETERRRLEEERQRQERERLQCEQQDREQVAKEAEDRRQRALESERRARDLIGQQDVDGTMVFRTPQQNAVAAITLLDTLLKEDALNQADHVVNILNQTKTMIAASVPANSASARTPTGSRVPHLRSHDYHQPSLSIIGTGSSRRSRGHDERSVHSPPERHRERRVERPRSPPHQRPVDLRDTINQRRAARGHRHSPNRYDDDMDGVAAFTNDLRRVDWPAGFKPTGIEKYDGTTNPESWLTVYGLAIHAAGGDSKAMANYLPVALADSARSWLHGLPRGTIGSWAELRDHFIANFQGTFERPGTQFDLYNVVQKSGESLRDYIRRFSKQRNKISDITDDVIIAAFTKGIRHEDLVGKFGRKPPKTVKQMFEKANEYAKAEDAITASKQSGTTWKPKKDTPTAGESGSNNRKDCKRKPEELVATTSPSSRQRPRVNTFDKIMNSQCPHHPKSNHVAKDCFVYKQFAEQYVKNARKPSDGEQGTSKKKDDEDDAPTGFQDHRKELNHIFGGPLAYESKRKQKLTEWEINAVQPNTPQYLRWSEIAIKFDRSDHPDRVVHPGRYPLVLDPVVRNVKLRRTLIDGGSALNILFAKTLDDMQIPRTELKPSNAPFHGVIPGLSATPLGQITLPVTFGTRENSRTKNVCFEVADFETAYHAILGRPALAKFMAVPHYTYMMMKMPGPRGVISLWSDIKQAVTCDKESCEMAQIRKITLAREEIRLDATTASEGEVPATKLTKTEESDAKTKKIPLDPSDPDKTAVIGAELDYIFAWKPSDMPGIPREVIEHSLHVKEDAKPIKQRLRRFAQDKKDAIKEELTKLLAAGFIKEVPHPDWLANPALVWKKTGQWRMCVDYTDLNKSCPKDPFGLPRIDQIGRNVEAYVDDVVIKTKQKDDLIADLGETFASIRAFRMKLIPKKCIFGVPSGKLLGFMVSQRGIQANPEKINAILNMKPPSSQKDVQKLTGCMAALSRFVSRLGERGMPFFKLLKKTDNFQWGPKARKAFEDFKKLLTTPPVLASPHPQEPLLLYVSVTSQVVSTVLVVEREEEGHIQKVQRPIYFVSEVLADSKTRYPQVQKLLYGVLITVRKLSHYFQSHSVTVVTSLPLEDILHNREANGRIAKWALELMSLDISFKPRTSIKSQALADFLAEWTECQQDMPGEKMEYWTMHFDGSKRLTGTGAGVVLISPAGERLSYVLWIHFSASHNVAEYEALLHGLRIAISLGIRRLIVRGDSQLVVNQVMKEWSCLDDNMTAYRQEVRKLEDKFDGLEFTHVLRHNNEAADRLANFGSKREAAPSDVFVEHLYEPTVPRKETIQAMDTQGVSMIEADWREPFIRFLTKQELPQDKSEAEQISRCSRLYVIHETELYKKSSSGILQRCVSLEEGRQLLKDIHSGICGNHAAARTIVGKAYRQGFFWPTAVSDADKIVRTCEGCHFFARQIHLPAQELQTIPLSWPFAVWGLDMVGPFKRAVRGYTHLFVAIDKFSKWIEAKLVITITADKARDFFINIVHRFGVLNRIITDNGTQFTGGAFKDFCEDFGIKICYASVAHPMSNGQVERANGMVLQGIKARVFDRLRPYAGKWVDQLPSVLWSLHTTPSRATGQSPFFLVYGAEAMLPSEVEFESLQFRNFNEELYEEGRVDDINRLEEAREAALIQSTRYLQGLRRYHNRNVRSRAFLVGDLVLRKIQTTQDRHKLSPLWEGPFIIAEVTRPGSYQQFLEY

SEQ ID NO: 183352 - protein, 1029 aa, Oryza sativa
  Clone ID: PAT_MRT4530_80451C.1.pep
MARGSALLDGSVLPPSRIVNERHAGLPRRFMPESTTGREIVMLGEGRPAPDYPGRSIFFLPFAMAGLVPPFSHFFMDVLEFYDLQMAHLTPNAVMTLAIFAHLCEMFIGVRPSLQLFRWFFTVQSVSPPSVVGGCYFQPRGPVLNRYIPCVLRKKWDDWKSDWFYTPLADEARLRLPSQPPAQVSSWRAPADLGEEYDAVLDRLAGLRSQGLTGAMVYGDYLRRRIAPLQRRARSAWEYTGPEDYMRTHQGTRWDWAPEDFKIVVQRVLNLSSAEASRLPQEILPLCIDPDRVSILSIMLGVGASEERAPKGHDGAGESRRGKRSAPGGGRASGPRVGGSGSSRPADAPGKRKLGGTPPPSPPRGGGAVRTSGRRPEGAAPTSQPEGERKKKRLRKMGETEPARGNLISPPRWSFNRPPRSDVPSHSSRHPKSGQSEAEDPAAAEERRRESDRREAAARLREAEEAAREAARVRQAEEAAREEAARARQAEATASLGPTPSGGPQATSSEAARDEAAGASPGPTSPGDAQDRTGPGDIPELSVSSGGPSRVAFSPRRLFSSSSVAPVSAEPIMQALAAANTAVLDGFNTQVEALRAERAELEAAWARVEEGRRSVDAMVEVGRKAHRRHISELEARKAALAEIAREVEEEREAALVATTAMVEAQDTLRLQHASWEAELKSKLDAAQGVLDSAAARERRATEAEAASRRREEALEARAMALEEHAGAVERGLMDREAATALREATLVAHEAACAEEESALRLREDALAERERALEEAEATTRRLADSLSLREAAQEEQARRNLESVRAERAALEQRAANLEAREKELAAGARIGGAAAGESDLAARLAAAEHTVADMQRALDSSTGEAEALRLAGEIGPGMLWDAVSRMKRAGRQAGLWGGQTTVPPTNLEGLAPHLNRMAWVLERLPEELEKTIKASSRDLARGAVELVLASYQARDPNFSPWMALEEFPPGTEDEARVRVGDAADHIVNGFEGSAPRLAFAPSSDEEGDTSSEDGGGDEAGDPGAYE

SEQ ID NO: 183353 - protein, 88 aa, Oryza sativa
  Clone ID: PAT_MRT4530_80452C.1.pep
LGSDVIYSEEAVDDLLLTLKHLSAPHTTIILAAELRNDAVLECFLEAAMADFQVGCIEQQQWHPDFRSTRVALFILLKKPPSQPDVLL

SEQ ID NO: 183354 - protein, 78 aa, Oryza sativa
  Clone ID: PAT_MRT4530_80453C.1.pep
ATAGEKGALAALTPSASSRARPRQPATVSGQIESNRIQRGKSGVQLNPNAPRLGQPRWVSRLLRFTWRGVRVEFPRRA

SEQ ID NO: 183355 - protein, 184 aa, Oryza sativa
  unsure (1)..(184): unsure at all Xaa locations
  Clone ID: PAT_MRT4530_80454C.1.pep
TGQWARGPRRGGPVGVPPSLRRPRLPPARRRRPRRRRRQPPSPSAASPRRRRDRRRLISASSLSCRSTPRRRRRRRRRPPRTRSPPXPERRPPRRLRXASPASSRSPRRHRRRRRPPPRCTGCTCPSTPGCWPAARRTSPPARPPRPPPPPPPPPPAAPTTTPPPRRRRRRRSLAAAPSRQLPP

SEQ ID NO: 183356 - protein, 519 aa, Oryza sativa
  Clone ID: PAT_MRT4530_80455C.1.pep
MMMALRRAVGIGSAAALRSAAYLRRASPSPARPHPLVPPPPAARTFAAPPQVMKRSTKDDDDDGPRINNDITSPFVRLVTDQGHSVVPRHEALQLAARMDLDLVEVHRKSDPPVCKIMDFHKEKYKKDVKEKERLKTKSAIVLRGGENKEVRFKGKTELKDLKVKADGITRLMERGYRVKVLNTNSKIILNVFLFGSAWRCPQIQDVCIVESGPHLDSKHAYVIVRHVKFATKKAGKKASKAIEDVGKGARKNASELSTVTADSGDETNDCGNGAISDQMDNAPAYVSNEFSMQKDAHDRGSRRELSWSKSNPGNYGENMQNVDAGAHRISSSQRAAQTSEGGFGSNNVKSGMEKQEKANEDVVPAETNRYASRRQQIRGDNQGLSQDRSPQGHRRNENEVRYPVNDYQRPLQQNNRQSPRFNDGRLPQEPRRNERGGHIPLNNKQGQFQQMNHPAESAGNGAGYPTPTAKSFGVFSTRKPATSELGKTNGASRTANSDVPKSYGIFSSPRRESGDKSS

SEQ ID NO: 183357 - protein, 254 aa, Oryza sativa
  Clone ID: PAT_MRT4530_80456C.1.pep
MKKTIVLYPGVAVSHFLPMMQLADELVDHGYAVAVALIDPAFQQHTAFPATVDRVVSSKPTVRFHRLPRVELPPATATDDGDFLLLGYLDLVRRHNECLHDFLCSMLPGGVHAFVVDSLSVEALDVGERLNVPGFVFHPANLGAFAIFLQLPSIRAEGEPSFRELGDNPLELPGLPPMPASHLFSQFLEHPESQVYKAMMNLDSKLWQKESDALTPPDLPKKWWKTKYQTNELKLEQSSYHHDDVAAVAEPLLE

SEQ ID NO: 183358 - protein, 44 aa, Oryza sativa
  Clone ID: PAT_MRT4530_80457C.1.pep
GNAVRPHVPHPYSRNDQSIRARHQMNWRQDSSTARIHLLTKIMD

SEQ ID NO: 183359 - protein, 61 aa, Oryza sativa
  unsure (1)..(61): unsure at all Xaa locations
  Clone ID: PAT_MRT4530_80458C.1.pep
MTVHCVYEGTQHANEEEDEPTRTNREQSRKALPKNLIATFSRCRXSKAEIPETCSPDRRVA

SEQ ID NO: 183360 - protein, 198 aa, Oryza sativa
  unsure (1)..(198): unsure at all Xaa locations
  Clone ID: PAT_MRT4530_80459C.1.pep
RIRQARDMTVYRLIISGMLEEXSLYHWQIHEHFLKYKVLKGTHQRSSFKASNMMNLFTLQDYDSKGLIXTSNIFSQFSEDLNTKHPNDXATRLVITSGTGPNSSRNSKGKIYHSSAQVHEESSILKGLYDAQGFMXAIILRSIMNANDDQKLHLETEASHANLGCLEVVIVFLHLHELEELPDTAYMNQLTIYSSIYC

SEQ ID NO: 183361 - protein, 57 aa, Oryza sativa
  Clone ID: PAT_MRT4530_8045C.1.pep
VNDDSVRSNSSLTKKKKNSIHATTPAKLASYSSKLIKLRLRLRLPLARARANLRMRR

SEQ ID NO: 183362 - protein, 108 aa, Oryza sativa
  unsure (1)..(108): unsure at all Xaa locations
  Clone ID: PAT_MRT4530_80460C.1.pep
ARGELNARGFEKQDVINTNCSREHAPRTXEFGGALGRRSAXNHYARSKSVKGTKXIFGACVLPVFLLCNQLNFCSNGMTCKAFVCPPAKFLLYSSPEGLILNQTQIAL

SEQ ID NO: 183363 - protein, 79 aa, Oryza sativa
  Clone ID: PAT_MRT4530_80461C.1.pep
NTCGCLIQISTYVKFAWANDSWYYLRYVLPLGFMVNSSCFGVCGSGVNLIEYGGCSSFANRRMLYEEDLSEMVVAFIYK

SEQ ID NO: 183364 - protein, 56 aa, Oryza sativa
  Clone ID: PAT_MRT4530_80462C.1.pep
HVTYLIIRSTVLMYIVHRTGGLGSPTLSSVARYVRMCPSVHVVWVGYVCVISIKNQ

SEQ ID NO: 183365 - protein, 81 aa, Oryza sativa
  unsure (1)..(81): unsure at all Xaa locations
  Clone ID: PAT_MRT4530_80463C.1.pep
FHGQKRSTEDIVARAXIICFSDRCIYSGCQGXYRLGPEGALRVPSEAAAVEAFCGGPCLVLGCVDAIMDTFRLAAGLCVAA

SEQ ID NO: 183366 - protein, 69 aa, Oryza sativa
  unsure (1)..(69): unsure at all Xaa locations
  Clone ID: PAT_MRT4530_80464C.1.pep
KSTNYPPELSRSSELPXEPQNRTFFXPSNYANRTNYPPXPNPQWFWFTWRTRGNPPLRLLVPSATVRRS

SEQ ID NO: 183367 - protein, 72 aa, Oryza sativa
  Clone ID: PAT_MRT4530_80465C.1.pep
YWLIDSVVMFIVLINWANLIVYLLAEELCPCQVFGSLVVLYKISLLPQNVLLLCALKVSSKVVSFVFVSLLA

SEQ ID NO: 183368 - protein, 1824 aa, Oryza sativa
  Clone ID: PAT_MRT4530_80466C.1.pep
MGDGERREDENPTTSAADDDDDEDYDEPGGGNHFLGFMFGNVDDSGDLDADYLDEDAKEHLFALADKLGPSLKDIDLIKPSAAPTDPSEQDYDAKAEDAVDYEDIDEEYDGPEVEAATEEDHLLSKKDYFSSNAVYASVNSKVSVFDEENYDEDEEPPNDNDLPSDNIVQNCTSASAEQLDMAPSNDNLAVEKMSSSLSEPEESFESEAFQKEMVAEEQLESKTATSLPVLCIEDGSVILKFSEIFGAQEPVRKAKMDRHKRPVNKELQITNFTDIVEEDEEVFLRSTIQNLSALKHIKTNDNFVESDSDESTSDVALRLKDSCLSEQPMKDKDIPTAVQSPVFPDFYPLEHENWENDIVWGNSPTTAIQPCLTSCAISKESLDDHNEDQAEGYVSGCWDVQNKFHSSSVMADPFGHTEIPDSTSYRSPENSYSPLRKETAQENNSLDEPNNITQPVKIDTTRHLNKLSLLNKELLEGSWLDNIVWDPSEDVPKPKLIFDLKDDHMLFEILDEKNGDHLRSHARAMIVTRPMKTSAVENVDHNNQAIALSGRFNISNDKFYSNRKMSQQARSHAKKRATMGLKLVHSVPAQKLQTMKPKLSIKEIANFHRPKAKWYPHENKLTARFQGDECSHGPMTAIVMTLGGKGVKFLVNAEETPLSVKSKASKKLEFKPSEKIKLFCSGKELQDDISLAMQNVRPNSILHVVRTEIHLWPKAQRLPGENKPLRPPGAFRKKSDLSVKDGHVFLMEYCEERPLLLANAGMAARLCTYYQKTSPSDQTATSLRSNSDGLGTMLAIDPADKSPFLGNIRSGSHQSCLETNMYRAPVFPHKVATTDYLLVRSPKGMLSLRRIDKLYAVGQQVKKSVSWIYHRLTRRATNFKILFSWQEPHMEVFSPGTKNMQNYILNRILVYVYREFRAREKPGIIPQIRADELPIQPPITEAIKGPKGHLFYIQRPDFRIPSEEELRRLLTPENVCCYESMQAGQYRLKHLGIEKLTQPVGLASAMNQLPDEAIELAAAAHIERELQITSWNLTSNFVACTNQDKENIERLEITGVGDPSGRGLGFSYVRVTPKAPVSNSTHKKKSAAAKGTTVTGTDADLRRLSMDAARELLLKFGVPEEQIDKLTRWHRIAMVRKLSSEQAASGVTMDEIPVSKFARGQRMSFLQLQQQTKEKCQEIWDRQIQSLSAMDGNENGSDTEANSDLDSFAGDLENLLDAEEFDDEDVGNTDIRSDKMDGMRGLKMRRCHTQSQINEEIQDDVAEAALVEKLLEESDSDMKRKKQPVETTNYSTPMYNQGNKMKQGKAGQMIKSSVYAGALTPKESIPREAKEVENFAEGSLPSKLRTKTGFDANDDIILVKRKNIPGKDGFKEKRQGARGDTLVCGACGQLGHMRTNKLCPKYGEDPETSEMDVNSIRSHPPDIVSNAQIKTSNKRLVAKVSSEAFETEGPESIEKAKPVPVKFKCGAPEKSLDRNMSISASLVSDKRMMDATDSKSTGKVNKIKISNKIKYDDYPPDTPKPSVVIRPPAEVEKDLPRKKIIIKQPKVLGDQQRPTELRSGQEPRKTRKIVELSSFEKRDREDDNGFSGQPIQINSSHDRGWGLVGKRSKGIMESSESWRAFEEQRERQEQRLIEARIYDARREDELQKAKKKNKKKKKHEFRDDDLLDPRPYKNDRRVPERGRAAKRRTPADMTEYTPPAKRHRGGEVELSNILEKIVDHLRTMSCSFLFRKPVTKKEAPDYFDIIERPMDLGTIRDKVRKMEYKNREDFRHDVAQIALNAHTYNLNRHPHIPPLADELLELCDYLLEESADVLDDAEYAIED

SEQ ID NO: 183369 - protein, 1012 aa, Oryza sativa
  Clone ID: PAT_MRT4530_80467C.1.pep
MARGSVLLDGSVLPPSRIVNERHAGLPRRFMPESATGREIVMLGEGRPAPDYPGRSIFFLPFAMAGLVPPFSHFFMDVLEFYDLQMAHLTPNAVMTLAIFAHLCEMFIGVRPSLQLFRWFFTVQSVSPPSVVGGCYFQPRGPVLNRYIPCVLRKKWDDWKSDWFYTPLADEARLRLPSQPPAQVSSWRAPVDLGEEYDAVLDRLAGLRSQGLTGAMVYGDYLRRRIAPLQRRARSAWEYTGPEDYMRTHQGARWDWAPEDFKIVVQRVLNLSSAEASRLPQEILPLCSDPDRVSILTIMMGVGASEERAPKGHDGAGERRRGEQPAPGGGGGAARASSRRPEGAAPTSQPEGVRKKKRLRKTGETEPCRGNLISPPRWSFTRPPRSNVPSHSSRHPKSGQSEVEDPAAAEERRRESDRREAADRLREAEEAAREAARVRQAEEAAREEAARARQAEEAAREEAARARQAEATAAAGASLGPTPSGGPQATSSEAARDEAAGASPGPTSPGDAQDQTGPGDIPEPSASSGGPSRVAFSPRRLFSSSSVAPVSAEPIMQALAAANTAVLDGFSAQVEALRAERAELEAAWARVEEGRRSVDAMVEVGRKAHRRHISELEARKAALAEIAREVEEEREAALVATTAMIEAQDSLRLQHGSWEAELKKKLDAAQGVLDAAAAREQRATEAEAALRRREEALEARAMALEEHAGAVERGLTDREAAAGLREATLAAHEAACAEEESALRLREDTLAERERALEEAEATTQRLADSLSLREGAQEEQARRNLECVRAERAALEQRAADLEAREKELDARAPIGGAAAGESDLAARLAAAEHTVAEMQRALDSSIGEAEALRLAGEMGPDMLWDSVSRMDRAGRQAGLWKGQSRMRPANLEGLAPHLNRMAWVLERLPEELEKTIKSSSRDLARGAVELVLASYQARDPNFSPWMALEEFPPGTEDDARARVGDAADHIVNGFEGSAPRLAFAPSSDEEGDASGEDDGGDEAGDPGALE

SEQ ID NO: 183370 - protein, 88 aa, Oryza sativa
  unsure (1)..(88): unsure at all Xaa locations
  Clone ID: PAT_MRT4530_80468C.1.pep
ISVVRTKQFLYRVSPMLKPHCGQFKAIPNWKLPXHSPHPHPTFSNGATSXXLSSYMMNETRRIPTISDTWQDISQLKVQSPYGSPKRF

SEQ ID NO: 183371 - protein, 1059 aa, Oryza sativa
  Clone ID: PAT_MRT4530_80469C.1.pep
MARGSALLDGSVLPPSRIVNERHAGLPRRFMPESATGREIVMLGEGRPAPDYPGRSIFFLPFAMAGLVPPFSSFFMDVLEFYDLQMAHLTPNAVMTLAIFAHLCEMFIGVRPSLQLFRWFFTVQSVSPPSVVGGCYFQPRGPVLNRYIPCVLRKKWDDWKSDWFYTPLANEARLRLPSQPPAQVSSWRAPVDLGEDYDAVLDRLAGLRSQGLTGAMVYGDYLRRRIAPLQRRARSAWEYTGSEDYMRTHQGARWDWAPEDFKIVVQRVLNLSSAEASRIPQEILPLCSDPDRASILTIMMGVGASEERAPKGHDGAGGGRQEESAPGGGRASGPRDGGSGSNRPADARGKRKQGGTPPPSPPRGGGAARASSRRPEGAAPTSQPEGERKKKRLRKTGETEPCRGNLISPPKWSFNRPPRRFVSLSLQPSFSQNNVPSHSSRHPKSGRSEAEDPAAAEERRRESDRREAADRLREAEEAAREAARVRQAEEAAREEAARARQAEEAAREEAARVRQAEATAAAGASLGPTPSGGPQATSSEAARDEAAGASPGPTSPGDAQDQTGPGDIPEPSASSGGPSRIAFSPRRLFSSSSVAPLSAEPILQALAAANTAVLDGFSAQVEALRAERAELEAAWARVEEGRRSVDAMVEVGRKAHRRHVSELEARKAALTEIAREVEEERAAALIATTAMIEAQDTLRLQHASWEAELKEKLDAAQGVLDSAAVRERRVTETEAASRRREEALEARAMALEEHAGAVERGLTDREAAAGLREATLAAHEAACAEEESALRLREDALAERERALEEAEATTRRLADSLSLREAAQEEQARRNLECVRTERAALEQRAADLEAREKELDARAHIGGAAAGESDLAARLAAAEHTVADMQRALDSSTGEAEALRLAGEIGPDMLWDAVSRLKRAGRQAGLWKGQTTVPPTNLEGLAPHLHRMAWVLEQLPEELEKTIKSSSRDLARGAVELVLASYQARDPNFSPWMALEEFPPGTEDDARARVGDAADHIVNGFEGSAPRLAFAPSSDEEGDASGEDDGGDKAGDPGALE

SEQ ID NO: 183372 - protein, 134 aa, Oryza sativa
  Clone ID: PAT_MRT4530_8046C.1.pep
RGFGFVPRAFFPELGPAISAPDGHSLGARSFNFFFPRRDLRAKAFFGVAGFVGVFRPRGPHRCFLVGFFPPIVVFLGFLVLCLFGGLFQAPPFLVPFLSPVGFVPPFLQVGFFFGAPFPPFVVVSPGFFYPLFF

SEQ ID NO: 183373 - protein, 1061 aa, Oryza sativa
  Clone ID: PAT_MRT4530_80470C.1.pep
MARGSALLDGSVLPPSRIVSERHAGLPRRFMPESATGREIVMLGEGRPAPDYPGRSIFFLPFAMAGLVPPFSSFFMDVLEFYDLQMAHLTPNAVMTLAIFAHLCEMFIGVRPSLQLFRWFFTVQSVSPPSVVGGCYFQPRGPVLNRYIPCVLRKKWDDWKSDWFYTPLANEARLRLPSQPPAQVSSWRAPVDLGEDYDAVLDRLAGLRSQGLTGAMVYGDYLRRRIAPLQRRARSAWEYTGPEDYMRTHQGARWDWAPEDFKIVVQRVLNLSSVEASRIPQEILPLCSDPDRASILTIMMGVGASEERAPKGHDGAGERRRGEQSAPGGGRASGPRVGGSGSSRPADAQGKRKLGGTPPPSPPRGGGAARASSRRPEGAAPTSQPEGERKKKRLRKTGETEPCRGNLISPPRWSFNRPPRRFVSLSFCSSSGFFFCFSDVPSHSSRHPKSGQSEAEDPAAAEERRRESDRREAADRLREAEEAAREAARIRQAEEAAREEAARAEEAAKEEAARARQAEATAAAGASTGPTPSGNPQATASREARDEAAGTSPGPTSPGDAQDQTGPGDIPEPSTSSGGPSRIAFSPRRLFSSSSVAPLSAEPILQALAAANTAVLDGFSAQVEALRAERAELEAAWARVEEGRRSVDAMVEVGRKAHRRHVSELEARKAALTEIAREVEEERAAALIATTTMIEAQDALRLQNASREAELKEKLDAAQGVLDSAAARERRVTETEAASRRREESLEARAMALEEHAGAVEKGLTDREAAAALREATLAAHEAACAEEECALRLREDTLAERERALEEAEATTKRLADSLSLREAAQEEQARRNLECVRAERAALEQRAADLEAREKELDARAHIGGAAAGESDLAARLVAAEHTVADMQRALDSSTGEAEALRLAGEIGPGMLWDAVSRLKRAGRQAGLWKGQTTVPPTNLEGLAPHLNRMAWVLEQLPEELEKTIKSSSRDLARGAVELVLASYQARDPNFSPWMALEEFPPGTEDDARARVGDAADHIVNGFEGSAPRLAFAPDSDEEGNASSASDGGNEAGDLGASE

SEQ ID NO: 183374 - protein, 520 aa, Oryza sativa
  Clone ID: PAT_MRT4530_80471C.1.pep
MGGICSGSVTVGWSLPLIRSLGSGPRAGRKGQALAGCHFATVGRGVALARLPPPFSSCGLGLATHSASASASPDTPHYTTRSRATMPPLSLSAKARRGFSSSSSSASAAASSCRSQLEQDVKKLQKALQEETTLHAILENALHRAALTLADMSYLPTNAQELLSNISILEGTISKLEDDMVSLHFQLIQERNERRLVEYRLKQAPPPPQLQLQQPRSVCSCHSTKSESDDTANEKSCRVDKVYPFAVLHDSAMKLQRQLSSKCFGNPNQLSEDIVRCMKNIFISLSDSCRESSRTPSTEKQQSGPSPSGNYSISAFWSLSEPTSISSWVQSPQVDLNYNNNLLASETVFDPYKAREKLSWADIGSYGAAAEVSWMSVGKKQLEYAAESLRKFSAAFIEYVILKMKPPNHRPQMALLLALQKIKVPEEQKKFCIGSPEPLLTFALSCGLYSSPAVKIYTAGNVREELQDAQRDFIRASQATFVEHCVSQRRQSLLGTRTFGIIPFDSRFRYLFLPDMGFSN

SEQ ID NO: 183375 - protein, 868 aa, Oryza sativa
  unsure (1)..(868): unsure at all Xaa locations
  Clone ID: PAT_MRT4530_80472C.1.pep
MARGSAPLDGSVLPPSRIVSERQAGLPRRFMPESATGREIVSLGEGCPAPRYPGRSVFFLPFAMAGLVPPFSSFFMDVLEFYDLQMAHLTPNAVMTLAIFAHLCEMFIGPVSPPSVXVGGCYFPAAGXPVLNRYIPCVLRKKWDDWKSDWFYTPLADEARLRLPSQPPAQASNWRAPVDLGDGYDAVLDRLAGLRSQGLTGAMVFGDYLRRRIAPLQRRARGAWEYTGSEDCMRTHRGVKWDRVPEDFKVMIQRVLNLSSAEASLIPQGVLPLCSDPDRANILSIMMAVGASEERAPKGHDGASGRRKGDQSTLGGGCASGPRDGGSGGSRPADARGKRKQXGEIPSRPSCQFKSGQSEAENAATTEARRRESDRREAANRLREAEEAAQVAVRARQAEEAAREEARLRQAEAATTSEAARDEVAGASLGPTPSGDAQDKPGXLAVANTTVLDGLSAQMEALQAERVELDAAWARVEEGRRSVEAMVEVGRKAHRRHVSELEARRKMLGEIAREEAELGKKLDAARGVLDAAAARERRAAETEVASRRREETLEARAMALEERACVVERDLADREAAVAIREVTLAVHEAACAEEESALRLHEDTLTERERALEEAEAAAQRLVESASLREAAQEEQARRNLESARAERAALNQRAAELEAQARELDARARSGGAATGDSDLAARLAAAEHTIADLQGALDSSTGEVEALRLAGEIGPSMLRDAVSRLDCAGRQAGLWGGRTVKYAANQGGLAQRLSEMAGTLQRLPEELEGTIKSSSRDLARGAVELVLASYQARDPDFSAWTALDEFPPGTEDGARAQVRDAADHIVHSFEGSAPRLAFALNSDEEDDDGGVGDSGDEAGDPGASE

SEQ ID NO: 183376 - protein, 789 aa, Oryza sativa
  Clone ID: PAT_MRT4530_80473C.1.pep
MKSSSPYVWPCKTRQTIIAVGLKRKTSTDAKNNGGKKKFHMLFDGALVSDAAYRRTGSSSGCWVGRKTGPVYHDAQPAQRKPSRAFLAVSARCTATRISGPNQPNCKRARADTPRSDTPLSPPCRTRHPLDGMPSPSPSAPPSASLFNSLIASRARAGRAAEGFALLARMLAAGVAPTAFTFAPILSSPSAGARCAAQLHPHILKSGLLHSDPYSGTSLVGFFGRNGRFDDALRLFGEMPVRSVVTWNCLISSFAQHGRACDAVIWFRALVRSGNSVSDGSLVAVLPAFGTPEQVHGLVKKIAIDSFSTVANSLLNSYCTHSSTSLAENLFSEFMFRDVVSWNTMIIAFARRSLPQRALEFFWMMEGWSVLPNEITFSSVIYACTSINGHEHGKSIHAKVIKHNLNTRPFVNTSLFDFYSKCGCTKDAHKVLEEAPEDSTTRWNGLISCHSDTDVPTSFFILREMLRSGVMPNEIHSLVTRLGYDGYDYVSSAIISSYASHEMVSDALAYGAGVYNRVRMYDEAKKLLLHQGCNDTVSWSILITACARNGDYAEALKFFELMRILGHHFDSYVSVSLLSICTKSNSLVLDMYAKCGRIEECLKAFKEMEDRNIISWTAIISGLALNGFSRKALAWFKAMEEDGFKPDKILCLYDLVIDGIYPGNLAPYVLAVLHSAHSQFSYTTSLVLGFDSTQCLLCVCIVLCLVLVVVVGLAATQAEAARALAEYAAPPGGDYDDDVAGGGGGGGFGIRGRRRPGSLPAKRLAEGHDAGHCYGLMVVGFFCDEALRA

SEQ ID NO: 183377 - protein, 967 aa, Oryza sativa
  Clone ID: PAT_MRT4530_80474C.1.pep
MARGSALLDGSVLPPSRIVSERHAGLPRRFMPESATGREIVMLGEGRPAPDYPGRSIFFLPFAMAGLVPPFSSFFMDVLEFYDLQMAHLTPNAVMTLAIFAHLCEMFIGVRPSLQLFRWFFTVQSVSPPSVVGGCYFQPRGPVLNRYIPCVLRKKWDDWKSDWFYTPLANEARLRLPSQPPAQVSSWRAPVDLGEDYDAVLDRLAGLRSQGLTGAMVYGDYLRRRIAPLQRRARSAWEYTGPEDYMRTHQGARWDWAPEDFKIVVQRVLNLSSVEASRIPQEILPLCSDPDRASILTIMMGVGASEERAPKGHDGAGERRRGEQSAPGGGRASGPRVGGSGSSRPADAQGKRKLGGTPPPSPPRGGGAARASSRRPEGAAPTSQPEGERKKKRLRKTGETEPCRGNLISPPRWSFNRPPRSDVPSHPSRHPKSGQSEAEDPAAAEERRRESDRREAADRLREAEEAAREAARVRQAEEAAREEAARARQAEEAAKEEADRARQAEATAAAGAPWPRANTAVLDGFNAQVEALRAERAELEAAWTRVEEGRRSVDAMVEVGRKAHRRHVSELEARKAALAEIAREVEEERAAALISTTAMVEAQDTLRLQHASWEAELKKKLDAAQGVLDSAAARERRVTETEAASRRREEALEARAMALEEHAGAVERGLTDREAAADLREATLAAHEAACAEEESALRLREDALAERERALEEAEATTQRLADSLSLREAAQEEQARRNLECVRAERAALEQRAADLEAREKELDARARVGGAAAGESDLAARLAAAEHTVADMQRALDSSIGEAEALRLAGEMGPDMLWDSVSRMDRAGRQAGLWKGQTRMRPINLEGLAPHLNRMAWVLERLPEELEKTIKSSSRDLARGAVELVLASYQARDPNFSPWMALEEFPPGTEDDARARVRDAADHIVNGFEGSAPRLAFAPNSDEEGNTSSADDGGDEAVDSGASE

SEQ ID NO: 183378 - protein, 133 aa, Oryza sativa
  Clone ID: PAT_MRT4530_80475C.1.pep
RTRGLQRDSVGRIPYEVAMKRGHVACAALLNPSSAEPLVWPSPLKFISELEPDAKALLEAALMEANREREKRTLKGARSASPLALPSPSRSDDGAHDATISEVVPNCANFTSSTTPLLPSRHILDNDHGNNSS

SEQ ID NO: 183379 - protein, 875 aa, Oryza sativa
  unsure (1)..(875): unsure at all Xaa locations
  Clone ID: PAT_MRT4530_80476C.1.pep
MARGSAPLDGSVLPPSRIVSERQAGLPRRFMPESATGREVVALGEGRPAPHYPGRSVFFLSFAMAGLVPPFSIFFMDILEFYDLQMAHLTLNAIMTLAIFAHLCEMFIGVRPSLRLFRWFFTVQPVSPPTAVGGCYFQPRGQVLNRYIPCVLRKKWDDWKSDWFYTPLADEARLRLPSQPPAQASSWRAAVDLGDGYDAVLDRLAGLRSQGLTGAMVFGDYVRRRIAPLQRLARGAWEYTGLEDYMRTHQGRKWDWDPEDFRMVVQRVLNLSSVEASLIPQGVLPLCCDPERAKILAIMQAVRASGERAPRGHDGAGGSRRGEQSTPGGGRASGPRDGGPGXSRPADAWGKRNQEGTPPPSPPRGGGARXPSRPPRHSKSGRSEAEETATAEARRREADRREAADRHREAEEAAQEAVRVRQAEEAAQEEARLRRAGESVREAEAARARQAACQTPDPTPPEATMTSEATHDEAAGAPLGPDPSGDAWDEPASGDAPESGTSIGGPSRATPTPRGLSPLPSAAPLSAEPLLQALAAANSTVLDGLSAQMEALQAEWAELDAAWACVEVGRRSVEAMVEAGRKAHCRHASQLEARRRDLAEIAREVEEERETALIATAVLDEARDDLRLQYGSRATELEEKLDAARGVLDAAAARERRAAENEAASRQREEGLEARATALEERARALDAKERDLADREAAVATREATLAAHEAACAEEESALRLREDALTERGRALEEAEAAAQRLADSLFLREAAREEQARRNLESARAERAALDQRAAELEARAKELDARAHSGGAAAGHGDLAARLAAAEHTIAELQGALDSSAGEVEALRLASEVGPGMLRDAVSRLDRAGRQAGLWGGRYAKYAANQGGLA

SEQ ID NO: 183380 - protein, 1411 aa, Oryza sativa
  Clone ID: PAT_MRT4530_80477C.1.pep
MDGVTAAASNAPHPNHKAFRFGSLNFITNDFGKISLLDLDSNQSGRDQVPAPFGIPNSAEAYSKIISPESASNHSDETQSTPPRPDQDDGEVGVILQPLRTVSTEELDGYLSSPGVGSQPTEVLNYDDFGYHYDHSDLDNFDDSFEDNYTPLFFGNAVAAITLLDTLLKEDALNQADHVVKILNQTKTIIAASVPANSASTCTPIGSRVPHLRSQDYHQPSLSIAGAGSSRRSRGHDERSVRSPPERYRERRVERPYSPHRRRPIDLRDTINQHRAARGHHSPDRYDDDVDGVAAFTSDLHRVDWPAGFKPTGIEKYDGTTNPQSWLTVYGLAISAAGGDSKAMANYLPVALADSARSWLHELPRGTIGSWAELRDHFIANFQGTFERPGTHFDLYNIIQKSGESLRDYIRRFSEQRNKISDITDDVIIASFTKGIRHEDLVGKFGRKPPKTVKQMFEKANEYAKAEDAITASKQSGTTWKPKKDTPTAGGSGSNNHKDRKRKPEELVVTTSPSSRQRSRVNTFDKIMNSQCPHHPNSNHVAKDCFIYKQFAEQYVKNARKPSDGDQGTSKKKDDEDDAPTGFQDHRKELNHIFGGPLAYESKRKQKLTEREINAVQPNTPQYLRWSEIAIKFDRSDHPDRVVHLGRYPLVLDPVVRNIKLRRTLIDGGSAFNILFAKTLDDMQIPRTELKPSNAPFHGVIPGLSATPLGQITLPESALITFLQNNKDIFAWKPSDMPGIPREVIEHSLHVKEDAKPIKQQLRRFAQDRRDAIKEELTKLLAAGFIKEVLHPDWLANPVLVRKKTGQWRMCVDYTDLNKSCPKDPFGLPRIDQVVDSTAGCELLSFLDCYLGYHQIRLKESDCLKTSFITPFGAYCYITMPFGLKNAGATYQCMIQRCFSTQIGRNVEAYVDDVVVKTKQKDDLITDLEETFASIRAFRMKLNPEKCIFGVPSGKLLGFMVSQRGIQANPEKINAILNMKPPSSHKDVQKLTGCMAALSRSVSRLGERGMPFFKLLKKTDNFQWGIRRLIVRGDSQLVVNQVMKEWSCLDDNMTAYRQEVRKLEDKFDGLELTHVLRHNNEAADRLANFGSKREAAPSDVFVEHLYEPTVPRKEAIEATNTRGVSIIKADWREPLIKFLTKQELPQDKNEAERISKRSRLYIIHETELYKKSPSGILQHCVSLEEGRQLLKDIHSGICGNHAAARTIVGKAYRQGFFWPTAVSDADKIVRTCEGCQFFARQIHLPAQELQTIPLSWPFAVWGLDMVGPFKRAVGSYTHIFVAIDKFSKWIEAKPVITITADKARDFFINIVHRFGVPNRIITDNGTQFTGGAFKDFCEDFGIKICYASVAHPMSNGQVERANGMVLQGIKARVFNRLRPYAGKWKQCCRVKWNLNHYDFRTSTRSAMKRAE

SEQ ID NO: 183381 - protein, 970 aa, Oryza sativa
  Clone ID: PAT_MRT4530_80478C.1.pep
MARGSAPLDGSVLPPSRIVSERQAGLPRRFMPASAAGREAVELGEGRPAPHYPGRSVFFLPFAMAGLVPPFSSFFMDVLEFYDLQMVHLTPNAVMTLAIFAHLCEMFIGPRGPVLSRYIPCVLRKKWDDWKSDWFYIPLADEARLRLPSQPPAQVSSWRAPVDLGDGYDAVLDRLAGLRSQGLTGAMVYGDYLRRRIAPLQRRARGAWEYTGSEDCMRTHQGVRWDWAPDDFKIVVQRVLNLSSVEASLIPQGVLPLCSDPDRTTILTIMQAVRASEERVPRGHDGAGGSHRGEQSTPGGGRASGPRDGGPGSSRPTDARGKRKQEGTPSPSPPRGGGAARASSRRPEGAVPTSQSEGERKKKRLRKSGQSEAEETATVEARRREADRREDADRLRETEEAAQEAVRARQAEEAAREEAKLRRAEESVREAEEARACQAACQAPDPTPPEATTTSEATHDEATGAPLGPDPSGDARDVPASGDAPESGTSIGGPCHAAPAPRRLSPLPSAARLNAEPLLQALAAANTTVLDGLGAQMEVLQAERKELDAAWARVEEGRRSVEAMVEAGRKAHRRHASELEARQRELAEIAREVEEERETALIATAVLNEARDDLRLQYGSRAAELEKKLDAARGVLDAAAARERRAAENKAASQRREEALEARAKALEERARARERDLADREAAVAIREATLAAHEAACAEEESALRLREDALTERERALEEAEAAAQRLADSLSLREAAREEQARRNLEGARAERAALDQRAAELEARVKELDARARSGGAAAGDGDLAARLAAAEHTIADLQGALDSSAGEVEALRLANEVGPGMLRDAVSRLDRAGRQAGLWGGRTVKYAANQGGLAQRLSEMAGTLQRLPEELEETIKSSSRDLARGVVELVLASYQARDPDFSPWAALDEFPPGTEDDARAQVRDAADHIVHSFEGTAPRLAFALDSDEEGGDGGDEAGDPGVSE

SEQ ID NO: 183382 - protein, 166 aa, Oryza sativa
  Clone ID: PAT_MRT4530_80479C.1.pep
MARATIGAAILVCVVILALDVTAGILGLQAQIAQNKVKTVRMLFIECEQSSSKVYQLGLAAAVLLVAAHAVANFLGGCACICSQMEFIRASIKRKLAATLIVLSWLALIAGFSLLLAGAMRNSNPRRNCSFAQGHTLDLGGILCFVHAGVTVAYYVTANAAAYELP

SEQ ID NO: 183383 - protein, 71 aa, Oryza sativa
  Clone ID: PAT_MRT4530_8047C.1.pep
MRGGEDERPGPHSTAAWRRRRRPRATAASRAAAADPEGRQPAAVGSEGGGSWAAALRGEPHPTAAGAAAGG

SEQ ID NO: 183384 - protein, 940 aa, Oryza sativa
  unsure (1)..(940): unsure at all Xaa locations
  Clone ID: PAT_MRT4530_80480C.1.pep
MARGSALLDGSVLLPSRIVSERQAGLPRRFMPESATGREIVMLGEGRPAPDYPGRSVFFLPFAMAGLVPPFSSFFMDVLEFYDLQMAHLTPNAVMTLAIFAHLCEMFIGPRGPVLNRYIPCVLRKKWDDWKSDWFYTPLANEARLRLPSQPPAQVSSWRAPVDLGDDYDAVLDRLAGLRSQGLTGAMVYGDYLRRRIAPLQRRARSAWEYSGSEDYMRTHQGVRWDWAPEDFKIVVQRVLNLSSVEASLIPQGILPLCSDPDRASILTIMMGVGASEEETPKGHDGVGESRRGGQSTPGGGRASGPXVGGSGSSRPADAQGKRKLGGTPPPSPPRGGGAXDVPSRSSRHPKSGQSEAEDPAAAEERRRESDRREAADRLREAEEAAREAARVRQAESAAREEAARARQAEAMASSEAAHDKAAGASLGPTPSGDAQATASGAARDEAAGASPGPTPSGDAQATASGAARDEAAGASPRPTSPGDAQDQTGPGDIPEPSASSGGPSRVAFSPRRLFSSSSVAPLSAEPLLQALAAANTAVLDGFSAQVEALRAERAELEAAWARVEEGRRSVDVMVEDTLRLQHASWEAELKRKLDAAQGVLDTAAARERRATETEAASRRREEVLEARAMALEEHAGAVERGLADREAAVAIREATLVVHEVACAEEESALRLREDALAERERALEEAEAAAQRLADSLSLREAAQEEQARRNLECVRAERAALEQRAADLEAREKELAARAPIGGAAAGESDLVARLAAAEHTVADMQRALDSSAGEAEALRLAGEIGPGTLWDAVSRLDRAGRQAGLWKGQTMPHSTNLEGLAPRLTKMAWALQQLPEELEKTIKSSSRDLAQGAVELVLASYQARDPNFSPWMALDEFPPGTEDDARARVRDAADHIVNSFEGSAPRLAFAPNSDEEGDASGADNDGDEAGDPGASE

SEQ ID NO: 183385 - protein, 902 aa, Oryza sativa
  unsure (1)..(902): unsure at all Xaa locations
  Clone ID: PAT_MRT4530_80481C.1.pep
MARGSALLDGSVLPPSCIVSERQAGLPRQFMPESATGREVVELGEGRPAPHYPGRSVFFLSFAMAGLVPPFSNFFMDVLEFYDLQMAHLTPNAIMTLAIFAHLCEMFIGVRPSLQLFRWFFTVQPVSPPTVVGGCYFQPRGQVLQRYIPCVLPKKWDDWKCDWFYTPLADEARLRLPSQPPAQASSWRATVDLGDGYDAVFDRLAGLRSQGLTGAMVFGDYLRRRIAPLQRRARGAWEYTGPEDIMRTHQGRQWDWDSEDFRIVVQRVLNLSSVEASLIPQGILPLYSDPDRASILTIMQTRDPIAPPPPRHSKSGRSEAEETATAEARRREADRREAADHLREAEEAAQEAVRVRQAKEAAREEARLRRAGESAREEEAARARQAACQTPDPTPPEATTTSEATHDEAASAPLGPDPSGDAREEPASGDAPESGTSIGGPSRAAPTPRRLSPLPSAAPLSAEPLLQALAAVNTTVLDGLSAQMEVLQAERAELDAAWACVEEGRRSVEAMVEAGRKAHRRHASELEARRRGLAEIAREVEEERETALIAAAVLDEARDDLRLQYVSRTAELEKKRDAARGVLDAAAAWERRAAENEAASRQREEALEARATALEERARALDAKEKDLADREAAVATREATLAAHEAACAEEESALRFREDALTERERALEEAEAAARRLADSLSLREAARVEQARRDLEGARAERAALDQRAAELEARAKELNARAHSGGAAAGDSDLAARLAAAEHTIAGLQGALDSSTGEVEALRLANEVGPGMLRDAVSRLDRAGRQAGLWGGRCAKYAANQGGLAQRLSEMAGVLWRLPEELEEMIKSSSRDLARGAVELVLASYQARDPDFSPWAALEEFPPGTEEXARAQVRDAANHIVHSFEGWSVPRSFCVLA

SEQ ID NO: 183386 - protein, 1065 aa, Oryza sativa
  Clone ID: PAT_MRT4530_80482C.1.pep
MSNKQIFQVYHGPGNVRYGPTGVDLSDFIVSERGIDRPAERSVPSIKGWLMRGLRVDLQTSDITINVIVSRATEGFYWELMPVQNSRVWRWYLENALQRGWPLALVPFVHPKDPGVQTNMDDGEGLSAEVNETSVEEVNAREDGGVVAPVGIQPGGVADEGETVGAIVDEMEREDSDNERVEEGDSSDDETDINPAEWASEDFSGLIVSEEDSVRWEYKENEVIQGAIYSRAEDMKEAVKHFAVSLHREFWVAKSNRSQYEVRSIIRHIEETYKYTISYAKAWRAKQKIIEMRFGTYEASYDNLPRLLGVIEERNPGSSYEVKKFPSIEHPGKSVLQRAFLALHACKMAFVNCRPVLCIDGTFLTGKYRGQILTAIGVDGNNQVLPLAFAFVESENTDSWYWFLKLVKTKVVGMRPNVCLIHDRHAGILRAIGELQFGSMERGYPGVWEDVQSRWCMRHMGANFFKQFKNKELMNMFKRLCNQNQEKKFNELWKRLDELTAKCSDQRAAAPSTAVADPPQALGPLPTDSPTLVRRTGLEIRKFSQWILHEPKEKWAKAYDTGGARYGIMTTNLAEVYNWVMRGVRGLPLVGIVEFILHETCSILFGAFMQKKLEELRKKAMKHRALVQGTQQHRFEILCQDKAGRGIYRKRVKQECVLKADGTCHCSCAKPKLLHRPCTHVIAAAAECGIPDAVYVSQYFSKQAIYHTWSGEIYGFGIAGEFTETNDEVLNIPDPSKLRGKAGRRRTRRIRNDMDESEAGRVKRCSKCDEHGHTYKHCPKDKEKPSVAEAGLSGSAADGARPTDGTSGYTSVVGPGNRSPTPVSPYCGAGGSAWDVPGMDVRGATHGSRLLQNSVTFSTLFPTCFITNSTGFRQWLDAEVLRIQTGVAILVYTYYHLGASVLSAYATCTTACAYIEWVDTENPILDLTTCLQESRWYFASESTEQYLQRKAAYERQCRELQSDWRVLTTALPPWEARPRCRCGDRCQVLHSINPTTLGRRFFVCPNILDDDFMEPPRRCQYREWIDTRRVLTPPSRVMQLELPEQYSVTKARFEKEEGSSRRGAV

SEQ ID NO: 183387 - protein, 896 aa, Oryza sativa
  unsure (1)..(896): unsure at all Xaa locations
  Clone ID: PAT_MRT4530_80483C.1.pep
MSNKQIFQVYHGPGNVRYGPTGVDLSDFIVSERGIDRPAERSVPSIKGWLMRGLRVDPQTSDITINVIVSRATEGFYWELMPVQNSRVWRWYLENALQRGWPLALVPFVHPKDPGVQMNMDDGEGPSAKVNETSVEEVNAREDGDVVAPVGIQLGGVADEGETVGAIVDEMEREDSDNERVEEGDSSDDETDINPAEWASEDFSGLIVSEEDSVRWEYKENEVIQGAIYSRAEDMKEAVKHFAVSLHREFRVAKSNRSQYEVRLREAGLLPMCRLVEAAAGDADPARRWTVDRSLLAALVDRWRPETHTFHLPCGEVAPTLQDVSYLLGLPLAGDAVGPVTTAVDWEDDLTARFALVQRAPHLPLEPLAHHRNTGPTKRWLLQFTVEQLQAKADEYSYSRCLEAYLLWLFGWVMFCGGHGHAIDKGLVHYARSIADAAVGEVPQWSWGSALLAALYRALCESCTKTDPSATFGGCPLFLSIWAAERIAIGRPEVDQHAYEESLYEERPEVDYPTMGTLWCRRQRRWAHVQVRRSYPEFAMEFDRLLMTDVVWXPTVPRLPRLVRRWVCPHSAPGTRXYSRKGQQSAGDWPAKLATFVQDWLLATEEVVDHEGEPHAEESYQAYLRWYQPRTRTRVTFAPLEQQPHVASTRDLYARHHDQDFARVVDDINRVVVDGSMTIQRLGAGILVPVEEHLTTYTRMVESMRSILRVLTCRADDVARADAAVQRPPVPSGSRPAAHVPRPTPPPHGGFRAPFSTPPSSARPSVVPPTGFAQFAMTQAAHFSQAAGSASQAAGTSSQGPPLDHAGTSSDRFLSSTVLFDITDFDFASGSTEDVIGPSQLGGAPPVQTQDQAQATPPRDTRLPVLCHRIVSPTPRTMCEHRPGGPSVVAARGRAS

SEQ ID NO: 183388 - protein, 775 aa, Oryza sativa
  unsure (1)..(775): unsure at all Xaa locations
  Clone ID: PAT_MRT4530_80484C.1.pep
KKNRQWGNITRGEARNNLSAKKIAKIDPAAHLWGGKLTWQTGEGRAAAPCRPLAGRKASLPIKGLPPSPQPSFLPSNPVKKNKKKGEEKRRRGEALPDSDADFRGIDRPAERSVPSIKGWLMRGLRVDPQTSDITINVIMNMDDGEGPSAEVNETSVEEVNAREDGGVVAPVGIQPGVVADEGETVGAIVDEMEREDSDNERVEEGKYRGQILTAIGVDGNNQVLPLAFAFVESENTDSRYWFLKLVKTKIVGMRPNVCQIHDRHAGILRAIEELQFGNMEQGYPGEWEDVQSRWCMRHMGANFFKQFKNKELMNMFKRLCDQNQEKKFNELWKRLDELTAKCKTNDEVLNIPDTSKLRGKAGRRKTRRIRNDMDESEAGXGLSGSTADGARPTDXALPPLDHVLGVVVPPERIAIGRPEVDQHAYKESLYAERPEVDYPTIGTLWCRRQRRWAHVQVRRSYPEFVMEFDRLLPTDVVWEPYSAAATQARAPLGLSTVCTRDQAYWMTTVPMVFDICVEPHAPFRVMRQFGFCQPFPQSAGDWPAKLATFVEDWLLTTEEVVDHEGEPHTEEAYQAYLRWYQPRTRTRVTFAPLEQQPHVASTRDLYARHRDQDFARAXDVARADAAVQRPPVPTGPRPAMHVPRPTPPPHGGFRAPFSTPPSSARPSVVPPTGXHFSQAAASVSQAAASTSHSVQFWQYTGTSSQAAGTSKDVIGPSQLRGAPPVQTQDQAQATPPPDTRATRAVPPDRFTYSQDHVRAQARRTKRGRGAGQGQ

SEQ ID NO: 183389 - protein, 382 aa, Oryza sativa
  Clone ID: PAT_MRT4530_80485C.1.pep
MDDGEGPSAEVNETSVEEVNAREDRGVVAPVGIQPGGVADEGETVGAIVDEMERKDSDNERVEEGDLSDDETDINPTEWASEDFSGLVVSEEDSVRWEYKENEVIQGAIYSRAEDMKEAVKHFAVSLHREFWVAKSNRSQYEVRYAKAWRAKQKIIEMRFGTYEASYDNLPRLLGVIEERNPGSSYEVKKFPSIEHPGKSVLQRAFLALHACKMAFVNYRPVLCIDGTFMTGKYRGQILTAIGVDGNNQSRWCMRHMGANFFKQFKNKELMNMFKRLCNQNQEKKFNELWKRFDELTAKCSDQRAAAPSTADADPPQALGPLPTDSPTLVRRTGLEIRKFFQWILHEPKEKWAKAYDTGGARYGIMTTNLAEVYNWVSVDCH

SEQ ID NO: 183390 - protein, 768 aa, Oryza sativa
  Clone ID: PAT_MRT4530_80486C.1.pep
MSNKHTFQVYHGLGNVRYGPTGVDLSKFIVTPRGIDRPAERSVPSIKGWLMRGLRVDPQTSDITINVIVSRATEGFYWELMPVQNSRMWRWYVENALQRGWPLAMVPFVHPKDLGVQMNMDDGEGPSAEVNETFVEEVNAPEEANEGETVGTIVDEMEREDFDNERVEEGGSSDDETDINPAEWASEDFSGLVVSEEDSVRWEYKENEVIQGAIYTRAEEMKEAVKHFVVSLHREFWVAKSNRSQYEVRYPGSSYAVKKFPSIEHPGKSVLQRVFLALHACKMAFVHCCPVLYIDGTFLTGKYRGHILTAIGVDGNNQVLPLAFAFVESENTDSWYWFLKLVKTEVVGMRPNVCLIHDRHAGMLRAIEELQFGSMDRGYPGEWEDVQTGPSTAVIDHPQALGPLPTDSPTLVRRTGVEIRKFSQWILHEPKEKWAKAYDTGGSRYGIMTTNFAEVYNWVMRGVRGLPLVGIVEFILHGTCRGIYRKRVKQGCVLKADGTCHCSCAKPKLLHGPCTHVIAAASECGIPDAVYVSQYFSKQTIYHTWSGEIYGFGIAGEFTETNDEVINIPDPSKLQGKAGRRKTRHIHNDIDESEAGRVKRCSKCDERGHTYKHCPKDKEKPSAAEAGLSGSVADGARPTGSASQAAASTSHSAQFWQYTGTSSQAVGTSSQGPPLDNARTSSDYGVASTLLFSMSDFDFASVSTEDVIGPSQLGGAPPVQTQDQSPSTPAPDTHATRAVPPNRFTYSQDHVRAQARRTKRGRGAGQGQ

SEQ ID NO: 183391 - protein, 85 aa, Oryza sativa
  Clone ID: PAT_MRT4530_80487C.1.pep
YVSYPMRLIAWIRVGPIGQSACPHDAQADRLRPIRPCANVAKVVCHQRQFTLVHAGVLQSQRCQSPAREVNIDEHIKKPIICRYV

SEQ ID NO: 183392 - protein, 446 aa, Oryza sativa
  unsure (1)..(446): unsure at all Xaa locations
  Clone ID: PAT_MRT4530_80488C.1.pep
MEAPGMWGAVVKDGDEGFVNVPLVGFNVVRGPLLANNLSAKKITKIDPAAHLQGGKLTWQTGKGRAVTEGDMSNKQIFQVYHGPENVRYRPTGRRLVSKGELILAERSVPSIKGWLMRGLRVDPQTSDITINVIDPGVQMNMDDGEGPSAEVNETSVEEVNAREDGGVVAPVGIQLGGVADEGETVGAIVDEMEREDSDNERVEKGDSSDDETDINPAEWASEDFSSLVVSEEDSVRWEYKENEVIQGAIYTRAEDMKEAVKHFAVSLHREFWVAKFNRSQYEVRNITCAFVASEMYAHVIDNLTYEPRSIIQQIEETYKYTISYAKAYRAKQKIIEMRFATYEASYDNLPRLLGVIEERNPGSSYTVKKFPSIEHPSKSVLQRAFLALHACKMALVNCRPVLCIDGTFLTGKLEXSWTGSEMVNQSCWHACILRAIEELQFWSME

SEQ ID NO: 183393 - protein, 64 aa, Oryza sativa
  Clone ID: PAT_MRT4530_80489C.1.pep
SSVSLLLTSLIQSATFAYPIWTHSVSVQRNPLVPRRPPPPSHCSRMSRSGKVMLSSSSQLHLHS

SEQ ID NO: 183394 - protein, 232 aa, Oryza sativa
  unsure (1)..(232): unsure at all Xaa locations
  Clone ID: PAT_MRT4530_8048C.1.pep
MVKETKRRQSVHVDGGSGDRTPMSPIRLPPHLCLRPEPPHPXPTPPDASPFPAPSARAEPPAPHLRPALPWLLPPPPRXASACLPIFGPLCPPPPRLRSVLSPSPPPPAFPSSSPFALSRAVVPRLRYAPPPPPAARRRLPPAFPSPXLSPEPPPAHLRSALPPPPPPRHSLRLPPYLPLPLPSAVASAPTPAHPLALPPSPLTNWRHLRLHQRAPAGEREGREGRSRDGMV

SEQ ID NO: 183395 - protein, 85 aa, Oryza sativa
  Clone ID: PAT_MRT4530_80490C.1.pep
PRGRPGKKKKKKKKKGILSMANAGPNTNGSQFFICTVPCSWLDGKHVVFGRVVEGMDVLQAIEKVGSPRGSTAKPVVIADCGQLS

SEQ ID NO: 183396 - protein, 607 aa, Oryza sativa
  Clone ID: PAT_MRT4530_80491C.1.pep
MSNKQIFQVYHGPGNVRYGPTGVDLSDFIVSERGIERPAERSVPSIKGWLMRGLRVDPQTSDITINVIVSRATEGFYWELMPVQNSRVWRWYLENALQRGWPLALVPFVHPKDPGVQTNMDDGEGPSAEVNETSVEEVNAREDGGVVAPVGIQPGGVADEGETVGAIVDEMEREDSDNERVEEVDSSDDETDINPAEWASEDFSRLIVSEEDSVRWEYKENEVIQGAIYSRAEDMKEAVKHFAVSLHREFWVAKSNRSQYEVRCVKEKDGCPWRVHAYKGKWKDYWTVSVVTKHTCFLPSVQKYHMNITCAFVASEMYAHVIDNLTYEPRSIIRHIEETYKYTISYAKAWRAKQKIIEMRFGTYEASYDNLPRLLGVIEERNPGSSYEVKKFPSIEHPGKSVLQRAFLALHACKMAFVNCRPVLCIDGTFLTGKYRGQILTAIGVDGNNQIRTTACAYIEWVDTENPVLDLTTCLQEGRWYFASESTEQYLQRKAAYERQCREQQSDWRVLTTALPPWEARPRYRCGDRCQVLRSINPTTLGRRFFVCPNILDDDFMEPPRRCQYREWIDTRRVLTPPSRVVQLELPEQYRVTKARFERGEGSSRRG

SEQ ID NO: 183397 - protein, 94 aa, Oryza sativa
  Clone ID: PAT_MRT4530_80492C.1.pep
SSSLSIIPLQKFSRPSLQQGWMPVRSSPLASRPQTSLCPCQLAAAWQEETSKPRQPSVQTSPARRPPWSLAAGRAAAWLERMPQPQLCALEAGS

SEQ ID NO: 183398 - protein, 655 aa, Oryza sativa
  Clone ID: PAT_MRT4530_80493C.1.pep
MSNKPIFQVYHGPGNVRYGPTGVDLSDFIVPERGIERPAERSVPSIKGWLMKGLRVDPQTSDITINVIVSRATESFYWELMPVQNSQVWRWYVENAMQRGWPLALVPFVQPKDPGVQINMDDGEGPSVEINETSVEEVNAGVDGGVVAPVGIQPGGVADEGETVAAIVDEMEREDSDNERVEEGDSSDEETDINPAEWASQDFSGLIVSEEDSVRWEYKENEVIQGAIYSRTEDMKEAVKHFAVSLHREFWVAKSNRSQYEVRCVKEKDGCPWRVHAYKGKWKDYWTVSVVTKHTCFLPGVQKYHRNITCAFVASEMYAHVIDNLTYEPRSIIRHIEETYKYTISYAKAWRAKQKIIEMRFGTYEASYDNLPRLLGVIEERNPGSSYEVKKFPSIEHPGKSVLQRAFLALHACKMAFVNCRPVLCIDGTFLTGKYRGQILTAIGVDGNNQVLPLAFAFVESENTDSWYWFLGRLPLRTEGFVHRSAPHLPRLGLLVCPQQLTRSRCRCVGFAQFAMTQAAYFSHAAGSASQPAASTSHSAQFQQYTGASSQAAGTSSQGPPLDHAGTSSDCLLSSTLLFDITDFDFASGSAEDVIGPSQLGGAPSVQTQDQAQATPPPDTRATRAVPPDRFTYSQDHVRAQARRTKRGRGAGQGQ

SEQ ID NO: 183399 - protein, 101 aa, Oryza sativa
  Clone ID: PAT_MRT4530_80494C.1.pep
MSGGGDVRQCGTGASGGRVVGRAGEGKSKGQIFGDGGGWALKRRWPSWARGRPYQGFSYRRSQGYRAPMGDEGCDKGMKEGGSKLVLGHYLNSVSDRCRKY

SEQ ID NO: 183400 - protein, 388 aa, Oryza sativa
  Clone ID: PAT_MRT4530_80495C.1.pep
MSNKQIFQVYHGLGNVRYGPTVVDLSEFIVSKRGIDRLAERSVPSIKGWLMRGLRVDPQTSDITINVIVSQVTEGFYWELMPVQNSRVWRWYVENALQRGWSLAMVPFVHPKDPGVQMNMDDGEGPSAEVNETSVEEVNAREDGGVVAPVGIQPGGVADEGEIVCAIVDEMEREDSDNERVEEGDSSDDETDINPADWASEDFSGLVVFEEDSVRWEYKENEVIQGAIYTRAENMKEAVKHFAVSLHREFWVAKSNRSQYEVRCVKEKDGCPWRVHAYKGKWKDYWTVSFVTKHTCFPHGGFRAPFSTPPSSARPYVVPPTGSTEDVIGPSQLGGAPPVQTQDQAQATPPPDTRATRAVPPDRFTYSQDHVRAQARRTKRGRGAGQGQ

SEQ ID NO: 183401 - protein, 910 aa, Oryza sativa
  unsure (1)..(910): unsure at all Xaa locations
  Clone ID: PAT_MRT4530_80496C.1.pep
MEREDSDNERVEEGDSSDDETDINPAEWASEDFSGLVVSEKDSVRWEYKENEVIQGAIYSRAEDMKEAVKHFAVSLHREFWVAKSNRSQYEVRKVSGPDTNSNRGRWEQSEVYNWVMRGVRGLPLVGIVEFILHGTCRYFRDRFQAVLPSMPNNSILFGTFMQKKLEELRKKAMKHRALVQGTQQHSGEIYGFGIAGEFTETNDEVLNIPDPSKLRDKAGRRKTRRIRNDMDESEAGRVKRCSKCDERGHTYKHCPKDKEKPSAAEAGLSGSAADGARPTEMARQDTPQLLDPAIDHRHRSHLTAVQGAQLGTFRARTCGELLTVHDSFVERLREAGLLPMCRLVEATAGDADPARRWTVDRSLLAALVDRWRPETHTFHLPCGEVEQLQAEADEYSYSRCLEAYLLWLFGWVMFCGGHGHAVDKGLVHYARSIADAVVGEVPQWSWGSALLAALYRGLCEVCTKTDPSATFGGCPLFLSIWAAERIAIGRPEVDQHAYEESLYAERPEVDYHMMGTLWCRRQRRWAHVQVRRSYLEFVMEFDRLLPTDVVWEPYSAAATQARAPLGLSTLCTRDQAYWMTTVLMVFDICVEPHAPFRVMQQFGFRQPFPVLFPTTVPAAVHRYSRKGQQSAGDWPAKLTTFIEDWLFATEEVVDHEREPHTEEAYQAYLRGYQPCTRTRVTFAPLEQQPHVASTRDLYTRHRDQDFARAVDDINRVVVDGSTMIQRLGAGIPGFXAPFSTPPSSARPSVVPPTAYKGPVVDVXGFAQFAMMQAAHFSQAAGSASQAAASTLHSAQFXQYTGTSSQAAGTSSQGPPLDHAGTSSDRLVPSTLLFDITDFDFASGSTEDVIGPLQLGGAPPKQTQDQAQATPPPDTRATCAMPPDRFTYSQDHVRAQARRTKRGRGVGQGQ

SEQ ID NO: 183402 - protein, 423 aa, Oryza sativa
  Clone ID: PAT_MRT4530_80497C.1.pep
MELGLALRLVAPPPRLPCRALQPPPMPCFSPCAARRSRIRSSRLERRVGVVVSGGSMASLAMEEEEEEEWEEAEEEAEGWQEEEAAVVTTRPRLELIEKPDRSLCLLDEYESEELGTSHCANHRSGYVAVLGKPNVGKSTLINQIVGQKLSIVTDKPQTTRHRILGICSEPEYQIILYDTPGVIKKEMHKLDTMMMKNVRSAVGSADCVLVVVDACKMPEKIDEILEEGVGNKDTELPVLLVLNKKDLIKPGEIAKKLEWYQKFTNADDVIPISAKFGHGVDDIKEWILSKLPLGPAYYPKDIASEHPERFFVGEIVREKIFLQYRQEIPYACQVNVISYKSRPTAKDFIQVEILVEKESQRSIILGKDGKAIKMLATASRLDIEDFLQKKVYLEIMVKVKENWRQDELLLKRYGYGGEIQAL

SEQ ID NO: 183403 - protein, 66 aa, Oryza sativa
  Clone ID: PAT_MRT4530_80498C.1.pep
ERRDPVLTVVAVSKTLIMVDPPTNFFYGVQILYYKILHGAKEIKHSKPWITCLIVERGISQSMCTI

SEQ ID NO: 183404 - protein, 74 aa, Oryza sativa
  Clone ID: PAT_MRT4530_80499C.1.pep
PLSSSPWPTHDTCGATDEAAAERELQEPHLAVVQLERLAHAAAQATAELGFDARHPGAVAPPPQVAGHHLHDDQ

SEQ ID NO: 183405 - protein, 51 aa, Oryza sativa
  Clone ID: PAT_MRT4530_8049C.1.pep
FGVRHAFAFIELTYSEDATTIKHQIGIGTLDARSAKTGTYRPFSYFRRLKS

SEQ ID NO: 183406 - protein, 79 aa, Oryza sativa
  Clone ID: PAT_MRT4530_80500C.1.pep
SLFAIVRQVLMKIPFLFVWSGSHQRSLLAVQHLVRPPMPIFMQHSSCVDEPPRSDVFPALARHHQAKYFLQLGQKQMRH

SEQ ID NO: 183407 - protein, 206 aa, Oryza sativa
  Clone ID: PAT_MRT4530_80501C.1.pep
MSFTGTQDKCKACDKTVHFIDLLTADGVSYHKTCFKCSHCKGTLSMCNYSSMDGVLYCKTHFEQLFKETGSFSKKFSQGGKSSEKSDQGRAPSKLSSAFSGTQDKCAACQKTVYPLEKLTLEGESYHKSCFKCSHGGCILTTSSYAALNGILYCKIHFSQLFKEKGSYNHLIQTAQSKQKESEEAAPVAATEASEKEQEVPPQDAT

SEQ ID NO: 183408 - protein, 72 aa, Oryza sativa
  Clone ID: PAT_MRT4530_80502C.1.pep
MLNYMIETYNSSTGVRNVGKGSKQANLIRKQQRRLHSDKIRLQRQPRQHVHALSVQYEWINRSGTLMMILWW

SEQ ID NO: 183409 - protein, 108 aa, Oryza sativa
  Clone ID: PAT_MRT4530_80503C.1.pep
MTMRGDCCADKAVLGEEGRGRGHPQRRGSLAVIDCDGSNSDIKMKQGYMSMKALVDDRTPKDSCKFTITPGPCFPMLCLTATRKSLQYLLASALLRDANAPTVFRLHL

SEQ ID NO: 183410 - protein, 138 aa, Oryza sativa
  Clone ID: PAT_MRT4530_80504C.1.pep
TAPARRHHRLEPRPRRALSPSRRAVPSPSRRRTASSPSLPHRSPSRCSRAPRSPSSPAPPLRAPRRAAARQSLRRRVARHVAIAARREPSPSASRPEPPRAARLSPSCRRVAAPSPAPSRRRASPSPRSPRAAPSQRP

SEQ ID NO: 183411 - protein, 200 aa, Oryza sativa
  Clone ID: PAT_MRT4530_80505C.1.pep
MSQSPPDSSSAAAVPLAPGFRFHPTDEELVSYYLRRRILGRRLRIDAIAEVDLYRLEPWDLPSLSRIRSRDAQWYFFARLDRKVTGAGAGGRGGPGNRTNRATPRGYWKTTGKDRDVHHRGKLVGMKKTLVFHSGRAPKGQRTNWVMHEYRLLDADGTQVPVKSFDPSQISQDLPYHEITRLAVAPKKFCSFSLSPARLV

SEQ ID NO: 183412 - protein, 699 aa, Oryza sativa
  Clone ID: PAT_MRT4530_80506C.1.pep
MEEAVNASAALDPKLAPLLLFGGHGDATFLYSVPKRALLAPMPTPTRVGDGGVDDMMRGHRWWTTAQGWLLMARRGSPCTFLWDPFTGRRVRLPPDHDGTVLTAEGSHRRRCLLSCCGPMDPTSCTDLVIDLADPELWYCRPGDNHWVKLHQQPYQYRNPAHRDAIISFLRKFTAIDGKFYTELHTGNVGVLEFSPEVAFTKIAVHDDDRRPAVYKKRTTCFVESNGELHSVVFSHPIGCDRIVARVGVYRLSINAAATQEQRSAAWVKVDSLGGRAFFVKIGSFGASLDAEGTGLRGNCVYYSVFNGKVLCVYDMERGTTAVIDPGTHLPYHQSPQVLMPTFPRYHGGATRSVESIYQVGPTIQENAYEVKDTKGTDCACVAAAGTVEAERLLDVDLVYGPFEHVGLVVLCCLLLHVSFFFPIRDRVCVVHRLVDIYASLTSASTSSSCPAHLRLDHPFKRPTTTTSVTDRHRACVYAIKLWVAAVSPPWAAVPLPMVHTSIGYCNAERRPSQRGLTAGGLLAAASTWSCSCAVLSDHSFATFVVFIAVRASTTSSSALVIVSRSGSPSSTSSIAAASPSCHCRHSRPVVQLPLHGYRCRRPGRWSRYFAFYFVQHDSSPASPYLPRLHFALLRQLRAAPAILPLRRSRAATVPEAFSASLLRHWRMIHGGLLSRPRGIGNTGARVCPELSRGLASPV

SEQ ID NO: 183413 - protein, 98 aa, Oryza sativa
  Clone ID: PAT_MRT4530_80507C.1.pep
RGGFLPREPPGGRFSTGGAHLKVFGGPLWGRGPPPPPKGPFSFWCPPGGGENPFPKKVFPGTRGPRAPLGSKPPCFLNGGGNPPPNFFPFKLVKRVPF

SEQ ID NO: 183414 - protein, 1030 aa, Oryza sativa
  Clone ID: PAT_MRT4530_80508C.1.pep
MARGSALLDGSVLPPSRIVSERHAGLPRRFMPESATGREIVMLGEGRPAPDYPGRSVFFLPFAMAGLVPPFSSFFMDVLDFYDLQMAHLTPNAVMTLVIFAHLCEMFIGVRPSLRLFRWFFTVQSVSPPSVVGGCYFQPLGPVLNRYIPCALRKKWDDWKSDWFYTPLANEARLRLPSQPPAQVSSWRAPVDLGDDYDAVLDSLAGLRSQGLTGAMVYGDYLRRRIAPLQRRARGTWEYTGSEDYMRTHQGVRWDWAPEDFKIVVQRVLNLSSVEASLIPQGILPLCSDPDRASILTIMMGVGASEEETPKGHDGAGESRRGEQSTPGGGRASGPRVGGSGSSRPADAQGKRKLGGTPPPSPPRGGGAVRASSRRPEGAALTSQPEGERKKKRPRKMGETEPSRGNLISPPRWSFNRPPRSDVPSRSSRHPKSGQSEAEDPAAAEERRRESDRREAADRLREAEEAAREAARARHAEDTAREEAARARQAEEAAKEEAARARQAEAMASSEAAHDEAAGASLGPTSPGDAQDQTGLGDIPEPSASSGGPSRVAFSPRRLFPSSSVAPLSAEPLLQALAAANTAVLDGFSAQVEALRAERAELEAAWARVEEGRRSVDVMVEVGRKAHRRHVSELEARKAALAEIAREVEEEREAALIATTAMIEAQDTLRLQHGSWEAELKKKLDAAQGVLDTAAARERQATEIEAASQRREEALEARAMALEERVCVAEKVLADREAAVTSREATLAAHESACAEEESALRLREDALAEWERALEEAEAEAQRLADSLSLREAALTEQARRNLESVRAERAALEQRAADLEAREKELDARACIGGAAAGESDLAARLAAAELTIADMQCALDSSAGEAEALRLAGEIGPGMLWDAVSRLDRAGRQAGLWKGQTRTHSTNLEGLASHLTRMAWALQQLPEELEKTIKSSSRDLAQGAVELVLASYQARDPNFSPWMALEEFPPGTEDDARARVRDAADHIVHSFEGSAPRLAFAPNSDEEGDASGADDRDDEAGDPGASD

SEQ ID NO: 183415 - protein, 1070 aa, Oryza sativa
  unsure (1)..(1070): unsure at all Xaa locations
  Clone ID: PAT_MRT4530_80509C.1.pep
MGSVSGIDDFVFPPGQAFWFSSLDFITNDFGKISLLDSDSNQSGRDQVPAPFGIPNSAEIYPKLISIKSAPNHLDEIPSTSTPPDQDDGAYPPILMKLPDDLAVVFTTRTSSPRRPKRDPALAWIRPSSREVGVILQPLGTISTDQLEGYFSSPGVDSRPTEIVERKNNAKPEKQKHDAYNRRXERRRLEEERQAQEQEQLXNAVAAITLLDTLLKEDALNQADHVINILNQTKTMIAASVPVNSASVRTPTGSRVPHLRSQDYHQPSLSIAGAGYNCRSRGHNERSVHSPPERHRERRVERPRSPPRRRPVNLRDTINQRRVARGYAHRHSPDRYDDDVDGVAAFTNDLRRVDWPAGFKPTRIEKYDGTTNPESWLTVYGLAIRAAGGDSKAMANYLPVALADSARSWLHGLPRGTIGSWAELRDHFIANFQGTFERPSTQFDLYNVIQKSGESLRDYIRRFSEQRNKISDITDDVITAAFTKGIRHEDLVGKFGRKPPRTVKQMFEKANEYAKAEDAIIASKQSGPTWKPKKDTPTMGGGGSTNHKDPKDCFVYKQFAEQYAKNAWKASDGDQSTSKKKDDDDDAPTGFQDHRKELNHIFGRPLAYESKRKQKLTEREINAVQPDMPQYLRWSETTIKFNRSDHPDRVVHPGRYPLVLDPVITLPVTFGTRENFCTENVCFEVTDFETAYHAILGCPALAKFMAVPHYTYMMMKMPGPRGVISLRSDIKQTVTCDKESYEMAQTREIAIAREDIRLAATTESALTTFLQNNKDIFAWKPSDMPDIPREVIEHSLHDKEDAKPIKQRLHRFAQDRKDTIKEELTKLLAAGFIKEVLHPDWLANPVLVQKKTGQWRMCVDYTDLNKSCPKEPFGLPRIDQVVDSTADCELLSFLDCYSGYHQIRLKESDCLKTSFITPFGAYCYITMPFGLKNAGATYQRMIQRYFSTQIGRNVEAYVDDVVVKTKQKDDLITDLEETFASIRAFRMKLNPEKCIFGVPSGKLLRFVVSHRGIQANPEKINAILNMKPPSSQKDVQKLTGCMAALSWFVSRLGERGMPFFKLLKKADNFQ

SEQ ID NO: 183416 - protein, 73 aa, Oryza sativa
  Clone ID: PAT_MRT4530_8050C.1.pep
IAFLHLHPPPADRFPRARAVSKGKRSTHPFTFTFLRDTPRGEARRGRYRSAPFPDHHDTVGGWILHSTHLLRF

SEQ ID NO: 183417 - protein, 57 aa, Oryza sativa
  unsure (1)..(57): unsure at all Xaa locations
  Clone ID: PAT_MRT4530_80510C.1.pep
DYDRFHELVTSGKPFRSQDYMALTPSWAVYXAEEGGFDPDQSRYKKERRHGAAALKD

SEQ ID NO: 183418 - protein, 1033 aa, Oryza sativa
  Clone ID: PAT_MRT4530_80511C.1.pep
MARGSALLDGSVLPPSRIVNERHAGLPRRFMPESATGREIVMLGEGRPAPDYPGRSIFFLPFAMAGLVPPFSHFFMDVLEFYDLQMAHLTPNAVMTLAIFAHLCEMFIGVRPSLQLFRWFFTVQSVSPPSVVGGCYFQPRGPVLNRYIPCVLRKKWDDWKSDWFYTPLANETRLRLPSQPPAQVSSWRAPVDLGEDYDAVLDRLAGLRSQGLTGAMVYGDYLRRRIAPLQRRARSAWEYTGPEDYMRTHQGARWDWAPEDFKIVVQRVLNLSSAEASRIPQEILPLYSDPDRASILTIMMGVGASEERAPKGHDGAGERRRGEQSAPGGGRASGPRVGGSGSSRPADAQGKRKLGGTPPTSPPRGGGAARASSRRPEGAAPTSQPEGERKKKRLRKMGETEPSRGNLISPPKWSFNRPPRSDAPSHSSRHPKSGQSEAEDPAAAEERRREADRREAADRLREAEEAAREAARARQAEEAAREEAARARQAEATAAAGASLGPTPSGGPQATSSEAARDEAAGASPGPTSPGDAQDQTGPGDIPEPSASSGGPSRVAFSPRRLFSSSSVAPLSAEPLLQALAAANTAVLDGFNAQVEALRAERAELEAAWARVEEGRRSVDAMVEVGRKAHRRHISELEARKAALAEIAREVEEEREAALIATTAMIEAQDTLRLQHAIWEAELKKKLDAAQGVLDSAAARERRVTETEATSRRREEALESRAMALEEHAGTVVRGLMDREAAAALREATLAAHEAACAEEECALRLREDALAERERALEEAEATTKRLADSLSLREAAQEEQARRNLECVRAERAALEQRAADLEAREKELDARAPIGGAAAGESDLAARLAAAEHTVAEMQRALDSSTGEAEALRLAGEIGPDMLWDAVSRMKRAGRQAGLWRGQTSVPPTNLEGLAPHLNRMAWVLEQLPEELEKTIKSSSRDLAQGAVELVLASYQARDPNFSPWMALEEFPPGTEDDARARVRDAADHIVNGFEGSAPRLAFAPSSDEEGDASGEDDGGDEAGDPGASE

SEQ ID NO: 183419 - protein, 162 aa, Oryza sativa
  Clone ID: PAT_MRT4530_80512C.1.pep
MAAEDGGELPAAASPDLLVHRAGGDALALHERPASRQRYMTKLLCMAFTDVMKKNRMSKKQLDQRKAKANLIRSEMDCAATRSALARGGVGHGKDGEDGGWRSGAGWQRRWTSAWPVERQCRPSGVAAAATKCAIGVAAAGGWREWRTPHGDGDGDASSHVG

SEQ ID NO: 183420 - protein, 311 aa, Oryza sativa
  Clone ID: PAT_MRT4530_80513C.1.pep
MALEERACVAEKVLADREAAVTSREATLAAHESACAEEESALRLREDALAERERALEEAEAEAQRLADSLSLREAALTEQARRNLESVRAERAALEQRAADLEAREKELDARACIGGAAAGESDLAARLADAEHTVADMQRALDSSAGEAEALRLVGEIGPGMLRDAVSRLDRAGRQAGLWKGQTIKPAANLGGLAQRLSKMAGALQQLPEELEKTIKSSSRDLAQGAVELVLASYQARDPNFSPWMALDEFPPGTEDSARAQVRDAADHIVHSFEGSAPRLAFAPNSDEEGDVSGADDVEDEAGDPGASD

SEQ ID NO: 183421 - protein, 58 aa, Oryza sativa
  Clone ID: PAT_MRT4530_80514C.1.pep
PKEKITYYTCYTSGPTPKDYLHLIEGTGMETYAAISGMQNKLPEEAPVVYTIDPDEPP

SEQ ID NO: 183422 - protein, 1030 aa, Oryza sativa
  Clone ID: PAT_MRT4530_80515C.1.pep
MAGLVPPFSSFFMDVLEFYDLQMAHLTPNAVMSLAIFAHLCEMFIGVRPSLRLFRWFFTVQPVSPPSVVGGCYFQPRGPALNRYIPCALRKKWDDWKSDWFYTPLADEARLRLPSQPPAQASSWRAPVDLGDGYDAVLDRLAGLRSQGLTGTMVYGDYLRRRIAPLQRRARGAWEYTGSEDFMRTHQGVRWDWAPEDFKILVQRVLNLNSVEAALIPQGILPLCSDPDRASILTIMMAVGASEERAPKGHDGAGGSRRGEQSTPRGGRASGSRGRGPGSSRPADARGKRKQGGTPPPSPPRGGGAARASSKRPEGAAPASQPEGERKKKRPRKMEETEPSRGNLISPPKWSFNRPPRSEIPSRPSRHSKSGQSEAEDPAAAEARRREADRRDAADRLREAEEAAHEAARARQAEEIAREGAARARQAEETARDEAARAHQAEEAAREEAGFRQDETMATSEAARDEAAGASLGPTPSGDAQATTPGAAGDEAAGASLGPTPSGDAQATTSGAAGDEAAGASLGPTPSGDAQDQTGPGDIPESGTSIGGPSRVASSPRRLFPTPSAALLSAEPLLQALAAANTTVLDGLSAQVEALQAERAELDAAWARVEEGRRSVEAMVEVGRKAHRRHVSELETRKKVLAEIAKEVEKERGAALIATTVMNEAQDTLRLQYGSWEAELRKKLDAAQGVLDAAAAREQRAAETEATSRRREEALEARAMALEERACVVERDLADREAAVTIREATLAAHDAACAEEELALRLREDALIERERALEGAEAAAQQLADSLSLREAAQEEQARRNLEGARAERAALNQRAAELEARAKELEARALSGGAAAGESDLAARLADAEHTIAVLQGALDSSAGEVEALRLAGEVGPGMLWDAVSRLDRAGRQVGLWRGRTVKYADNQGGLAQHLSKMAGALQRLPEELEKTIKSSSRDLAQGAVELVLASYQARDPNFSPWMALDEFPPGTENRARAQVRDAADYIVDSFEGSAPRLAFAPNSDDEGNAGGVDDSDVEAGDPGASG

SEQ ID NO: 183423 - protein, 98 aa, Oryza sativa
  unsure (1)..(98): unsure at all Xaa locations
  Clone ID: PAT_MRT4530_80516C.1.pep
MASNMVGLSVLLLAVVSALVATATMADYHHQDQVGYTPGPLCLPGMGXLMYPLPSXHTVVKRQCVGRGTGAFVEQVRRDWXRKLVCVHDRLCRRQAIY

SEQ ID NO: 183424 - protein, 1056 aa, Oryza sativa
  Clone ID: PAT_MRT4530_80517C.1.pep
MARGSALLDGSVLPPSRIVSERQAGLPRRFMPESATGREIVTLGEGRPAPCYPGRSVFFLPFAMAGLVPPFSSFFMDVLEFYDLQMAHLTPNAVMTLAIFAHLCEMFIGVRPSLRLFRWFFTVQSVSPPSVVGGCYFQPRGPVLNRYIPCVLRKKWDDWKSDWFYTPLADEVRLRLPSQPPAQASSWRASVDLGDGYDAVLDRLAGLRSQGLTGAMVYGDYLRRRIAPLQRRARGAWEYTGSEDYMRTHQGVRWDWAPEDFKIVVQRVLNLSSVEASLIPQGVLPLCSDPDRASILTIMQAVGASEERAPRGHDGAGGSRRGEQSTPGGGRASGPRDGGPGSSRPADARGKRKQEGTPPPSPPRGGGAARDSSRRPEGATPTSQPEGERKKKRLRKMGGTEPSRGNLISPPRWSFNRPPRSEIPSRPSRHSKSGQSEAEDPAAAEARRRESDRREAADRLREAEEAAREAARARQAEEAAREEAGLRQAEATTSSEATRETDQQEATDRLREAEEAAQVAVRARQAEEAAREEARLRQAEATTTSEAARDEAAGASLGPTPSGDAQDKPGPGDIPESGMSIGGPSRAASSPRRLFPTPSVAPLNAEPLLQALAVANTTVLDGLSAQVEALQAERAELDAAWARVEEGRRSVEAMVEVGRKAHRQHVSELEARRKVLAEIAKEVEEERGAALIATTVMNEAQDTLRLQYGSWEAELGKKLDATRGVLDAAAARERRAAETEVASRRREEALEARAMALEERACAVERDLADREAAVAIREATLAVHEAACAEEESALRLREDVLTERERALEEAEAAAQRLADSLSLREAAREEQARRNLESVRAERAALNQRAAELEAREKDLDAGESDLTARLAAAEHTIADLQGALDSSAGEVEALRLAGEVGPGMLRDAVSRLDRAGRQAGLWGGRTVKYAANQGGLAQRLSEIAGTLQRLPEELERTIKSSSRDLARGAVELVLASYQARDPDFSPWTALDEFPPETEDDARAQVRDAADHIVHSFEGSAPRLVFALNSDEEDDDGGVGGSGDEAGDPGASD

SEQ ID NO: 183425 - protein, 806 aa, Oryza sativa
  Clone ID: PAT_MRT4530_80518C.1.pep
MGCAPAAHYLPGGGWRRLLVVVVALVVLDRAGARVRAADDDTGGLSRAAFPKGFVFGTATSAFQVEGMAASGGRGPSIWDPFVHTPGNIAGNGNADVTTDEYHRYKLISIFVFNLKQAQPYSVFILYWAKIITYIVFLLAQEDVDLLKSLNFDAYRFSISWSRIFPDGEGKVNTEGVAYYNNLIDYVIKQGLIPYVNLNHYDLPLALQKKYEGWLSPKIVGVFSDYAEFCFKTYGDRVKNWFTFNEPRIVAALGHDTGTDPPNRCTKCAAGGNSATEPYIVAHNIILSHATAVDRYRNKFQASQKGKIGIVLDFNWYEPLTNSTEDQAAAQRARDFHVGWFLDPLINGQYPKNMRDIVKERLPTFTPEQAKLVKGSADYFGINQYTANYMADQPAPQQAATSYSSDWHVSFIYDQGKNHKEIGIASAAVEMDIKYDAANLSRRIDEACDQNHGEPMTRCSAMGSSVTAVSLYSGPTIQSKSAAQIDQYASPAQMPQCGRESSGVSGHGSQKLHGVAMNHADCNTNKQQVDTNGGMDKPVSSSAVCLPSQGLSGNDQSLSAKDDGAPRRSKVEKECRKKNYDPDVFFKVNGKLYQKLGKIGSGGSSEVHKVISAECTIYALKKIKLKGRDYPTAYGFCQEIEYLNKLKGKSNIIQLIDYEVTDKSLLQDDSLSPRDGRIKDDHYIYMVLEYGEIDLANMVAQEWKKRNTSNMKIDENWLRFYWQMLGSMVAPPPPPPPRNPSGIQAQFRSSHRLASPRLAPCDLWGDWELASASRGMKWRVRVWGRLSSSRQSNLPYKRPTQTPTSQ

SEQ ID NO: 183426 - protein, 49 aa, Oryza sativa
  unsure (1)..(49): unsure at all Xaa locations
  Clone ID: PAT_MRT4530_80519C.1.pep
NKTSLEILVPGXISGXHNITXLLCVTTXVCXHVCNIVLXYTRSLYICEI

SEQ ID NO: 183427 - protein, 112 aa, Oryza sativa
  Clone ID: PAT_MRT4530_8051C.1.pep
MLSVAANSEGEEKGMMMAVASSIICHSVNPQPALGSSLLGECRGAASSATRDRAYRGHPLVTTSGSLSPVWNEASLGEGRGCGAWEIEGRGSTAKEHIAGDGLMEGVGMPTK

SEQ ID NO: 183428 - protein, 189 aa, Oryza sativa
  Clone ID: PAT_MRT4530_80520C.1.pep
MKLPDDLAAVFTTRASSPRRPRRKSASTPILPSSREVSVILQPLGTASTDQLEGYFSSPGVDSRPTKIVEYDEFGYRYDNRDLDNFDESLEDNYTPLYFGVFMADNETEEQRQAQEAEARRIQREAERRRLEEERQAQEQEWLRREQQERERAAKEAEDRRQRALDAGRRARDLIGQQDVEGTAVFRTP

SEQ ID NO: 183429 - protein, 111 aa, Oryza sativa
  unsure (1)..(111): unsure at all Xaa locations
  Clone ID: PAT_MRT4530_80521C.1.pep
PTSPLSXPLSLSLLCXWPTRRXRAAGXRXRRAXXXVRXXXXFXXXXTXNXDXLXIXXYVVXSXGSTXSFXXKIXGWXFVXPXIVIGRXXYXWGYLTXXGFXIILXLSHXLS

SEQ ID NO: 183430 - protein, 1101 aa, Oryza sativa
  Clone ID: PAT_MRT4530_80522C.1.pep
MARGSALLDGSVLPPSRIVGERQAGLPRRFMPESATGREIVMLGEARPAPDYPGRSIFFLPFAMAGLVPPFSSFFMDVLEFYDLQMAHLTPNAVMTLAIFAHLCEMFIGVRPSLRLFRWFFTVQSVSPPSVVGGCYFQPRGPVLNRYIPCALRKKWDDWKSDWFYTPLANEARLRLPSQPPVPVSSWRAPVDLGDDYDAVLDRLAGLRSQGLTGAMVYGDYLRRRIAPLQRRARSAWEYTGSEDYMRTHRGVRWDWAPDDFKIVVQRVLNLSSMEASLIPQGLLPLCCDPDRASILTIMMGVGASEEVAPKGHDGAGGSRQEESTPGGGRASGPRDGGSGSNRPADARGKRKQGGTPPPSPPRGGGAVRASSRRPEGAAPTSQPETERKKKRLRKTGETEPSRGNLISPPRWSFNRPPRRFVSRLSQPSSLYPNQQVFSYPPCLSSGFFFCFSDVPSRSSRHPKSGQSEAEDPAAAEERRRESDRREAADRLREAEEAAREAARVRQAEDTAREEAARARQAEEAAREEAARARQAEEATREETARARQAEAMASSEAVHDKTASASLGPTPSGDAQATTSGAARDKAAGASPGPAPSGDAQDQTGPGDIPELSASSGGPSRVAFSPRRLFPSSSAAPLSAEPLLQALAAANTAVLDGFSAQVEALRAERAELEAAWARVEEGRRSVDAMVEVGRKAHRRHISELEARKAALAEIAREVEEEREAALIATTAMIEAQDSLRLQHGSWEAELKKKLDAAQGVLDAAAAREQRATEAEAASRRREEALEARAMALEDHAGAVEISLADREAAAAIREATLAAHEAACAEEESALRLREDALAERERALEESEAATQRLADSLSLRKAAQEEQARRNLECIRAERAALEQRAANLEARGKELDARERSGGAATGESDLVARLAAAEHTVADMQRALDSSTGEAEALRLSGEIGPGMLWDAVSRLDRAGREAGLWKGQTIPRSTNLEGLAPHLRRMAWAVQQLPEELEKTIKSSSRDLAQGAVELVLASYQARDPGFSPWMALEEFPPGTEGDARARIRDAANHIVQSFEGSAPRLAFAPSPDEEGDASGEDDGGDEAGDPGALE

SEQ ID NO: 183431 - protein, 44 aa, Oryza sativa
  Clone ID: PAT_MRT4530_80523C.1.pep
MVQGNISCLSSENWIVLCTATRVEPSSSYSRLDLEQIDFAHRRL

SEQ ID NO: 183432 - protein, 931 aa, Oryza sativa
  Clone ID: PAT_MRT4530_80524C.1.pep
MARGSAPLEGSVLPPSRIVSERQAGLPRRFMPESATGREVVTLGEGRPAPHYPGRSVFFLSFAMAGLVPPFSIFFMDILEFYDLQMAHLTPNAIMTLAIFAHLCEMFVGVRPSLRLFRWFFTVQPVSPPTVVGGCYFQPRGQVLNRYIPCVLRKKWDDWKSDWFYTPLADEARLRLPNQPPAQASSWRAAVDLGDGYDAVLDRLAGLRSQGLTGAMVFGDYLRRRIAPLQRRARGAWEYTGPEDIMRTHQGRKWDWDPEDFRMVVQRVLNLSSVEASLIPQGVLPLCCDPERANILTIMQEVGASGERAPRGHDGAGGSRRGEQSTPGGGRASGPRDGGPGGSHPADARGKRKQEGTPPPSPPQGGGAVRASSRRSEGAAPTPQPEGERKKKRLRKMGGIVPCRGNLISPPRWSFSRPPRRPDPSGDAWDEPASGGAPESGTSIGGPSRAAPTPRRLSPLSSAAPLSAEPFLQALVAANSTVLDGLSAQMEALQAERAELDAAWARVEEGRRSVEAMVEAGRKAHRRHTSQLEARRRELAEIAREVEEERETALIATAVLDEARDDLRLQYGSRAAELEEKLDAARGVLDAAAARERRVAENEAASRQREEALEARATALEERARALDAKERDLADREAAVATREATLAAHEAACAEEESALRFREDALTEWGRALEEAEAVAQRLADSLFLREAVREEQARRNLEGVRAERAALDQRAAELEARAKELDVRAHSGGAAAGHGDLAARLAAAEHTIAELQGALDSSAGEVEALRLASEVGPGMLRDAVSRLDRAGRQAGLWGGRHAKYAANQGGLAQRLSEMTGALERLPKELEETIMSSSRDLARGAVELVLASHQARDPDFSPWAALEEFPPGTEDGARAKVRDATDHIVHSFEGTAPRLAFALDSDEEGGDDGADDSDDEADVPGASE

SEQ ID NO: 183433 - protein, 166 aa, Oryza sativa
  unsure (1)..(166): unsure at all Xaa locations
  Clone ID: PAT_MRT4530_80525C.1.pep
AKSQSLNRQPIGVLHNDGYGNMAHDGKNAXGLSAISWFQXLCAQIWLLVSRARQRLAPDAPSTLRMLVNFRHSLRSSISPVYFCDDIQRSANLISVHQLVSINVRWASVKLNSSCRXVDGAILRASSAWHGRSSVLTVGQSXNGAVITMGSSNRFPMYEGIDFGLV

SEQ ID NO: 183434 - protein, 918 aa, Oryza sativa
  unsure (1)..(918): unsure at all Xaa locations
  Clone ID: PAT_MRT4530_80526C.1.pep
AAAADPELNFMDGNASYNQIFMGEEDLHKTAFRCPGAIGLYEWVVMTFGSKSAGATYQKVMNYIFHDLISLLVEVYIDDVIVKSKVVKDHKADLRNVFERTRRYGLKMNRTKCAFDVSAGQFLGFLVHERGIEVTHSSNNAIKEIQPPKNKTQLQSLVGKINFISRFISNLSGKIESFTPLLRLKADQEFVWGXEQQKALDNIKGCLSNPPVLIPPQKGMPFKLYLSADEKAIGLVLVQEFDGKERAIFYLSRKLLDAETMYSPVERLRLCLYFSYTKLRHYLLSNECIVLCKADVVKYMLSALVLKGRIGKWIFXLTEFDLRYQSPKAVKGQAIADLIVEHQNGSIGLVFIVPWTLFFDGSVCTHGCGIGLVIVSPRGASFEFAYTIKPYANNNQAKYEAVLKGLQLLKEVEADDVEIIGDSLLVISQLVGEYECKNDTLVIXNERCRELMDCFWLVTMRHVSRAQNAEANDLAQGASGYKPMARDVGIEVTTIAADDWRHDIFQYLKNPSQSASRKLXYKALRYVLLEDELYYGMIDGVLLKCLSAHQTKVMMGEVHEGICGTHQSAHKMKWLLRRAGYFWPTMLEDCFRYYKGCQDCQKFGAIQRAPTSAMNPIIKPWPFRGWGIDMIGQINPLSSKGHKFMLVATDYFTKWVEVVPLKNVDSGDAIEFVKEHMMYRFGVPQTITTDQGSIFVLDEFVQFAENMGIKXLNSSSYYAQANGQAEASNKSLIKLIKRKILDYPKQCHTRLAEALWSYRMACHGSIQXVPPYKLVYRHEAVLPREINIGSRRIALQDELTADEYRNLMVDESEELVQSRLRTLEKVMKDKERVARHYYKKVVPKSFTDGELVWKLILPIGTRDNKFDKWSPNWEGPFXIYKSVYKGAYMLQGLDGEVYGRALNGKYLKKYFLSIWVNA

SEQ ID NO: 183435 - protein, 1009 aa, Oryza sativa
  Clone ID: PAT_MRT4530_80527C.1.pep
MARGSAPLDGSVLPSSRIVSERQAGLPRRFMPASATGREVVELGEGRPVPHYPGRSVFFLPFAMAGLVPPFSSFFMDVLEFYDLQMAHLTPNAIMTLAIFAHLCEMFIGVRPSLRQFRWFFTVQPVSPPSVVGGCYFQPRGPALSRYIPCVLRKKWDDWKSDWFYTPLADEARLQLRSQPPAQASSWRAPLDLGDGYDAVLDRLAGLRSQGLTGAMLYGDYLRRRIAPLQRRARGAWEYTGSVEASLIPQGVLPLCSDPDRANILTIMMAVGASEERAPRGHDGAGGSRRGEQSTPGGGRASGPRDRGPGGSRPADARGKRKQEGTPSPSPPRGGGAARVSSRRPEGAAPTPQPEGERKKKRLCKMGGTESYRGNLISPPRWSFNRPPRSEIPSRPSRHSKSGRSEAEDTATAEARRRETDRREAADRLREAEEAAQEAVRARRAEEAAREEARLRRAEESAREAEAARARQAACQAPDPTPPEATTTSEATHDEAAGAPLGPDPSGDAQDKPGPGVVPESGTSIGGPSRAASSPRRLSPMPSAAPLSAEALLQALAAANTTVLDGLSAQMEVLQAERAELDAAWARVEEGRRSVEAMVEAGRKAHRRHTSELEARRKELAEIAREVEEEREAALIATAVMNEAQDDLRLQYGSWAAELGKKLDAARGVLEAAAARKRRAAETEAASRWREEALEARATALEERACVKERDLADREAAVAIREATLAAHEAACAEEESALRLREDALTERERALEEAEAAAQRLADSLSLREAALEKQTCRNLEGARAERAALDQRAAELEARARELDARARSGGAATGDGDLAARLAAAEHTIAELQGALDSSAGEVEALRLAGEVGPGMLRDAVSRLDRAGRQAGLWGGRIAKYAANHGVLAQRLSEMAGTLQRLLEELEETIKSSSRDLARGAVELVLASYQARDPDFSPWAALDEFPPGTEDDARAQVRDAADHIVHSFEGTAPRLAFALDSDVEGGDGGVDDSDDEAGDPGASK

SEQ ID NO: 183436 - protein, 1162 aa, Oryza sativa
  unsure (1)..(1162): unsure at all Xaa locations
  Clone ID: PAT_MRT4530_80528C.1.pep
MPISDMSNKQIFQVYHGPGNVRYGPTGVDLSEFIVSERGIDRPAERSVPSIKGWLMRGLRVDPQTSDITINVIDPGVQMNMDDGEGPSAEVNETSVEEVNAREDGGIVAPMGIQPGGVADEGETVGAIVDEMEREDSDNERVEEGDSSDDETDINPAEWASEDFSGLVVSEEDSVRWEYKENEVIQGAIYTRAEDMKEEILTAIGVDGNNQVLPLAFAFVESENTDNWYWFLKLVKTKVVGMRPNVCLIHDRHAGILRAIEELQFGSMEQGYPGEWEDVQSRWCMRHMGTNFFKQFKNKELMNMFKRLCNQNQEKKFNELRKRLDELTAKCSDQRAAAPSTAVADPPQALGPLPTNNPTLVRRTGVEIRKFSRWILHEPKEKWAKAYDMGGARYGIMTTNLAEVYNWMMHGVHGLPLVGIVEFILHGTCRYFEDRFQAVLPSMPNNSILFGTFMQKKLEELRKKAMKHRALVQDTQQHRFEILCQDKACRGIYRKRVKQECVLKADDTCHCSCTKPKLLHRPCTHVIATAAECGIPDAVYVSQYFSKQAVYHTWSGEIYGFGIAGEFTETNDEVLNIPDPSKLRGKAGRRKTRRIRNDMDKSEAGRVKRCSKCDERGHTYKHCPKDKEKPSAAEAGLSGSAADGARPTEMAHQDTPELLDPTIDHRHQSHLTAVQGTQLGTFRARTCGELLTAGLLPMCRLVEATAGDADPARRWNVDRSLLATLVDRWRPETHTFHLPCGEVAHTLQDVSYLLGLPLVGDAVGPVTTGVDWKDDLTARFAPVQSAPHLPLQLLAHHRNTGPTKRWLLQFSAAERIAIGRHEVDQHAYEESLYAERPEVDYPTMGTLWCRRQCRWAHVQVRRSYPEFVMEFDRLLPTDVVWEPYSAAATQARASLGLSTLCTRDQAYWMTTVPMVFDICVEPHAPFRVMRQFGFRQPFPLLATEEVVDHEGEPHTEEAYQAYRRWYQPRTRTRVTFAPLEQQAHVASTRDLYARHRDQDFARAXDVARADAAVQRPPVPTCPHPAAHVPRPTPPPHGGFRAPFSTPPSSARPSVVPPTGXGTSSQGPPLDHAGTSSDHLVASALLFDITDFDFASGSTEDVIGPSQLGGAPPVQTQDQAQATPSPDTRATRAVPLDRFTYSQDHVRAQARRAKRGRGAGQGQ

SEQ ID NO: 183437 - protein, 1346 aa, Oryza sativa
  unsure (1)..(1346): unsure at all Xaa locations
  Clone ID: PAT_MRT4530_80529C.1.pep
MSNKQIFQVYHGPGNVRYGPTRVDLSDFIVSERGIDRPAERSVPSIKGWLMRGLRVDPQTSDITINVIVSRATEGFYWELMPVQNSRVWRWYLENALQRGWPLALVPFVHPKDPGVQMNMDDGEGPSAEVNETSVEEVNAREDGGVVAPVGIQPGGVADEGETVGAIVDEMEKEDSDNERVEEGDSSDDETDINPAEWASEDFSGLIVSEEDSVRWEYKENEKYHRNITCAFVASEMYAHVIDNLTYEPRSIIRHIEETYKYTISYAKAWRAKQKIIEMRFGTYEASYDNLPRLLGVIEERNPGSSYEVKKFPSIEHPSKSVLQRAFLALHACKMAFVNCRPILCIDGTFLTGKYRGQILTAIGVDGNNQVLPLAFAFVESENTDSWYWFLKLVKTKVVGMRPNVCLIHDRHTGILRAIEELQFGSMERGYPGVWEDAQSRWCMRHMGANFFKXVYNWVMRGVRGLPLVGIVEFILHGTCRKXLEELRKKAMKHRALVQGIQQHRFEILCQDKADKGIYRKRVKQECVLKADGTCHCSCAKPKLLHRPCTHVIAAAAECGIPDAVYVSQYFSKQAIYHTWSSEIYGFGIAGEFTETNDEILNIPDPSKLRGKAGRRRTHRIRNDMDESEAGMVKRCSKCDEHGHTYKHCPKDKEKPSAAEAGLSGSAADGARPTEMARQDTPQLLDPAIDHRHRSHLTAVQGAQLGTFRARTCGELLTVHDSFVERLREAGLLSMCWLVEAAAGDADPARRWTVDRSLLAALVDRWRPETHTFHLPCGEVAPTLQDVSYLLGLPLAGDAVGPVTTAVDWQDDLTARFALVQRAPHLPLEPLAHHCNTGPTKRWLLQFTVEQLQAEADEYSYSRCLEAYLLWLFGWVMFCGGHGHAVDKGLVHYARSIADAAVGEVPQWSWGSALLAALYRALSERIAIGRPEVDQHAYEESLYEEQPEVDYPTMGTLWCHRQRRWAHVQVRRSYPEFVMEFDRLLPTDVVWXPTVPRLPRLVRRWFGFRQPFPVPFPTTVPAAVHRYSCKGQQSAGDWPAKLATFVEDWLLATEEVVDHEEEPHTEESYQAYLHWYQPRTHTRVTFAPLEQQPHVASTRDLYAMHRDQDFARAVDDINRVVVHGSTTIQRLGAGIPVPVEEHLTTYTRMVESMRSILRVLTYRADDVARADAAVQRPPVPTGPHPAAHVPRPTPPPHGGFRFAQFAMTQAAHFSQAAGSASQAAVSTSHSAQFWQYTGTSSQAAGTSSQGPPLDHAGTSSDRLLPSTLLFDITDFDFASGSIEDVIGPSQLGGAPPVQTQDQAQATPPRDTRATRAVPPDRFTYSQDHVRAQARRTKRGRGAGQGQ

SEQ ID NO: 183438 - protein, 88 aa, Oryza sativa
  unsure (1)..(88): unsure at all Xaa locations
  Clone ID: PAT_MRT4530_8052C.1.pep
SMMMLAACPASCXVFTTWILAHVSFCRIPACMYGPAGCCQLDDGLMVIGSGIQEHGWCPVGQFDTCRWTQGALKEFSADEFWELFFRL

SEQ ID NO: 183439 - protein, 1235 aa, Oryza sativa
  Clone ID: PAT_MRT4530_80530C.1.pep
MSNKQIFQVYHGPGNVHYGPTGVDLSDFIVSERGIDRPAERSVPSIKGWLMRGLRIDPQTSDITINVIVSRTTEGFYWELMPVQNSRVWRWYLENALQRGWPLALVPFVHPKDPSVQMNMDDGEGPSAEVNENSVEEVNAREDGGVVAPVGIQPGGVADEGETVGAIVDEMEREDSDNERVEEGDSSDDETDINPAEWASEDFSGLIVSEEDSVRWEYKENEVIQGAIYSRAEDMKEAVKYFAVSLHREFWVAKSNRSQYEVRCVKEKDGCPWRVHAYKGKWKDYWTVSVVTKHTCFLPGVQKYHRNITCAFVASEMYVHVIDNLTYEPRSIIRHIKETYKYTISYAKAWWAKQKIIDMRFGTYEASYDNLLRLLGVIEERNPGSSYEVKKFPSIEHPGKSVLQRAFLALHACKMAFMKCRPVLCIDGTFLTGKYRGQILTAIGVDGNNQVLPLAFAFVESENTDSWYWFLKLVKTKVVGMRPNVCLIHDRHAGILRAIEELQFGSMERGYHGVWEDVQSRWCMCHMGANFFKQFKNKELMNMFKRLCNQNQEKKFNELWKRLDELTAKCSDQRAAAPSTAVADPPQALGPLPTDSPTLVRRTGLEIRKFSQWILHEPKEKWAKAYDTGGARYGIMITNLAEVYNWVMRGVRGLPLVGIVEFILHGTCRYFRDQFQAVLPSMPNNSILFGTFMQKKLEELRKKAMKHRALVQSTQQHRFEILCQDKAGRGIYRKRVKQECVLKADGICHCSCAKPKLLHRPCTHVIAAAAECGIPDAVYVLQYFSKQAIYHTWSGEIYGFGIAGEFTETNDEVLNIPDPSKLRGKARRRRTRRIRNDMDESEAGRVKRCSKYDEHGHTYKHCPKDKEKPSAAEAGLSGSAADRARPTEMARQDTPQLLDPAIDHRHRSHLTAVQGAQLGTFRARTCGELLTVHDSFVERLREAGLLPMCRLVEATAGDADPARRWTVDRSLLAALVDRWRPETHTFHLSCGEVAPTLQDVSYLLGLPLAGDAVGPVTTAVDWQDDLTAHFALVQRTLHLPLEPLAHHRNTGPTKRWLLQFTLFGWVMFCGGHGHAVDKGLVHYARSIADAAVGEVPQWSWGSALLAALYRALCEACTKTDPSATFGGCPLFLSIWATERIAIGRPEVDQHVYEESLYEERPEVDYPTIGSTEDVIGPSQLGDAPLVQTQDQAQATPPPDTRATRAVPPDRFTYFQDHVRAQARRTKRGRGAGQGQ

SEQ ID NO: 183440 - protein, 154 aa, Oryza sativa
  Clone ID: PAT_MRT4530_80531C.1.pep
MAASSSLDLVKTMAASGFLLRCPAAPSAVPLWGRSGRGGGGGLAFSASSSNGAAVPSSLSDSEKKGPVVMEIPLDKIRRPLMRTRANDPAKVQELMDSIRVIGLQVPIDVLEVDGVYYGFSGCHRYEAHQRLGLPTIRCKVRRGTKETLRHHMR

SEQ ID NO: 183441 - protein, 529 aa, Oryza sativa
  Clone ID: PAT_MRT4530_80532C.1.pep
MTMMGGQPQQTPPPPQVVQVQQPAAAFGDTTLTKVFVGGLAWETHKDTLREHFERFGDILEAVIISDKLTGRSKGYGFVSSTTPRSHSRFRVATCARFGFLTVVWLQVTFKEADAAKKACEDATPVINGRRANCNLASLGAKPRAQPPHLLRPSPPATPGPHAPALPSPHHHQPAPAIAVGSRGVSPVPWYYHPSTTPPPPPPPAAHYAAHGGHHQQYHGVLPFYPAATTYGGARDATRSAQAQAGHGPDQLPRRALTYSPNYVADLSYNAKLGQAAAAHGTNGAYLQGHFSYPAAAQGGMLAANGMMPVYPYYQYHYHGAQGLGVPAAHFFPPVSAAAVTTVPAIISKPTVMAPPKGDGMQLKGHGDTRYLVPIVRENRAFDGFRESLNAQLPLHMDSGGDKEDGKEEDGSNVHGKGKGEDISNLKDGSIMDNGGQNSGSIFRERGFFYSIYPGTKEAESQRSVKQSRDGEQQKSGIGREAEQSRLGELYSRAKQTGHKMRNPDRHLDRLESQREHDRGGLGQWQAEE

SEQ ID NO: 183442 - protein, 923 aa, Oryza sativa
  Clone ID: PAT_MRT4530_80533C.1.pep
MSNKQIFQVYHGPGNVRYGPTGVDLSYFIVSERGIDRPAERSVPSIKGWLMRGLRVDPQTSDITINVIVSRATEGFYWELMPVQNSRVWRWYLENALQRGWPLALVPFVHPKDPGGQMNMDDGEGPSAKVNETSVEETEPQTKPYPLDMWKYGSALQQRPEDRSLCGRGGVADEGETVGAIVDEMEREDSDNERVEEGDSSDDETDINPAEWASEDFSGLIVSEEDSVRWEYKENEVIQGAIYSRAEDMKEAVKHFAVSLHREFWVAKSNRSQYEVRCVKEKDGCPWRVHAYKGKWKDYWTVSVVTKHTCFLPGVQKYHRNITCAFVASEMYAHVIDNLTYEPRSIIRHIKETYKYTISYAKAWRAKQKIIEMRFRTYEASYDNLPRLFGVIEERNPGSSYEVKKFPSIEHPGKSVLQRAFLALHACKMAFVNCRPVLCIDGTFLTGKYRGQILTAIGVDRNNQVLPLAFAFVESENTDSWYWFLKLVKTKVVGMRPNVCLIHDRHAGILRVIEELQFGSMERGYPGVWEDVQSRWCMRHMGANFFKQFKNKELMNMFKRLCNQNQEKKFNELWKRLDELTAKCSDQCAAAPSTAVADPPQALGPLPTDSPTLVRRTGLEIRKFSKWILHEPKEKWAKAYDTGGARYGIMTTNLAEVYNWVMRGVRGLPLVGIVEFILHGTCGYFRDRFQAVLPSMPNNSILFGTFMQKKLEELRKKAMKHRALVQGTQQHRFEILCQDKVGRGIYRKRVKQECVLKADGTCHCSCAKPKLLHRPCTHVIAAAAECGIPDAVYVSQYFSKQAIYHTWSGEIYGFGIAGEFTETNNEVLNIPDPSKLRGKAGRRRTRRIRNDMDESEAGRVKHCSKCDEHGHTYKHCPKDKEKPGAAEAGLSGSAADGARPTGEGTTSTRPRPRRRRATSGYVV

SEQ ID NO: 183443 - protein, 889 aa, Oryza sativa
  Clone ID: PAT_MRT4530_80534C.1.pep
MSNKQIFQVYHRPGNVRYGPTGVDLSDFIVSERGIDRPAERSVPSIKGWLMRGLRVDPQTSDITINVIVSRANEGFYWELMPVQNSRVWRWYLENALQRGWPLALVPFVHPKDPGVQMNMDDGEGPSAEVNETSVEEVNAREDGGVVAPVGIQPGGVADEGETVGAIVDEMEREDSDNEHVEEGDSLDDETDINPAEWASEDFSGLIVSEEDSVRWEYKENEVIQGAIYSRAEDMKEAVKHFAVSLHREFWVAKSNRSQYEVRCVKEKDGCPWRVHTYKGKWKDYWTVSVVTKHTCFLPGVQKYHRNITCAFVASEMYAHVIDNLTYEPRSIIRHIEETYKYTISYAKAWRDKQKIIEMRFGTYEASYDNLPRLLGVIEERNPGSSYEVKKFPSIEHPGKSVLQRAFLALHACKMAFVNCRPVLCIDGTFLTGKYRGQILTAIGVDGNNQVLPLAFAFVESENTDSWYWFLKLVKTKVVGMRPNVCLIHDRHAGILRAIGELQFGSMERGYPGVWEDVQSRWCMRHMGANFFKQFKNKELMNMFKRLCNQNQEKKFNELWKRLDELTAKCSDQRAAAPSTAVADPPQALGPLPTDSPTLVRRTGLEIREFSQWILHEPKEKWAKAYDTGGARYGIMTTNLAEVYNWVMRGVRGDDVARADAAVQRPPVPTGPCPAAHVPRPTPPPHGGFRAPFSTPPSSARPSVVPPTGFAHFAMTQAAHFSQAAGSASQAAGTSSQGPPLDHAGTSSDPFLSSTVLFDITDFDFASGSTEDVIGPSQLGGAPPVQTQDQAQATPPRDTRATRAVPPDRFTYSQDYVRAQAQRTKRGRGCGAGPVEQSSFYLLASLSSTTRTTACAYIEWVDTENPVLDLTTCLQGRWNHQGDVNTENG

SEQ ID NO: 183444 - protein, 1026 aa, Oryza sativa
  Clone ID: PAT_MRT4530_80535C.1.pep
MRGLRVDPQTSDITINVIVSRATEGFYWELMPVQNSRMWRWYLENALQRGWPLALVPFVHPKDPGVQMKMDDGEGPSAEVNETSVEEVNAREDGGVVAPVGIQPGGVADEGETVGAIVDEMEREDSDNERVEEGDSSDDETDINPAEWASEDFSGLIVSEEDSVRWEYKENEVIQGAIYSRAEDMKEAVKHFAVSLHREFWVAKSNRSQYKVRCVKEKDGCPWRVHVYKGKWKNYWTVSVVTKHTCFLPGVQKYHRNITCAFVASEIYAHVVDNLTYEPRSIIRHIEETYKYTISYAKAWRAKQKIIEMRFGTYEASYDNLPRLLGVIEERNPGSSYEVKKFPSIEHPGKSVLQRAFLALHACKMAFVNCCPVLCIDGTFMTGKYRGQILTAIGVDGNNQVLPLAFAFVESENTDSWYWFLKLVETKVVGMRPNVCLIHDRYAGILRAIEKLQFGSMERGYPGVWEDVQSRWCMRHMGANFFKQFKNKELMNMFKRLCNQNQEKKFNELWKRLDELTAKCSDQRAAAPSTAVADPPQALGPLPTDSPTLVRRTGLEIRKFSQWILHEPKEKWAKAYDTGGARYGIMTTNLVEVYNWVMRGVRGLPLVGIVEFILHGTCRYFRDRFQAVLPSMPNNSILFGTFMQKKLEELRKKAMKHRALVPGTQQHRFEILCQDKAGRGIYRKRVKQKCVLKADGTCHCSCAKPKLLHRPCTHVIAAAAECGIPDAVYVSQYFSKQAIYHTWSGEIYGFGIAGEVTETNDEVLNIPDPSKLRSKAGRRRTRRIHNDMDELEAGKVKRCSKCDEHGHTYKHCPKDKEKPSAAEAGLSGSAADGARPTEMARQDTPQLLDPAIDHRHRSHLPAVQGAQLGTFRARTCGELLTVHDSFIERLCEAGLLPMCRLVEAAAGDADPARRWIDRFRLVRYDAGRALLPGCRVSVSGSCVDLALSAVLAVHRDFVTGSTEDVIGPSQLGGAPPVQTQDQAQATPPRDTRATHAVPPDRFTYSQDHVRAQARRTKRGRGAGQGQ

SEQ ID NO: 183445 - protein, 384 aa, Oryza sativa
  unsure (1)..(384): unsure at all Xaa locations
  Clone ID: PAT_MRT4530_80536C.1.pep
MDDGEEPSVEVNETSVEEVNAREDGGVVAPVGIQPGGVADEGETVGAIVDEMEREDSDNERVKEGDSSDDETDINPAEWASEDFSGLIVSEEDSVRWEFKENEVIQGAIYSRAEDMKEAWILHEPKEKWAKAYDTGGARYGIMTTNLAEVYNWVMRGVRGLPLVGIVEFILHGTCRYFRDRFQAVLPSMPNNSILFGAFMQKKLEELRKKAMKHRALVQGTQQHRFEILCQDKAGRGIYRKRVKQECVLKADGTCHCSCAKPKLLHRPCTHVIAVAAECGIPDAVYVSQYFSKQAIYHTWSGEIYGFGIAGEFTETNDEVLNIPDPSKLRGKAGRRRTRRIRNDMDESEAGXGLSGSAADGARPTGEGTTSTRPPWDVPGTDVR

SEQ ID NO: 183446 - protein, 121 aa, Oryza sativa
  unsure (1)..(121): unsure at all Xaa locations
  Clone ID: PAT_MRT4530_80537C.1.pep
ASCVAAAPTLGSWIVNQXKGISSSFCPASKCGDMFLGNTTTSPTSSCESTACSYAGYTNSTSFTILANLTTSSTCNAAAMSPMAQQAHSSAFRLASTWLRWTELIVCLHVIFLCVSFLNHV

SEQ ID NO: 183447 - protein, 642 aa, Oryza sativa
  unsure (1)..(642): unsure at all Xaa locations
  Clone ID: PAT_MRT4530_80538C.1.pep
MNMDDGEGPSAKVNETSVEEVNAREDGGVVAPVGNQPGGVSDEGETVGAIVDEMEREDSDNERVEEGDSSDDETDINPAEWASEDFSGLIVSEEDSVLPLAFAFVESENTDSWYWFLKLVKTKVVEVYNWVMRGVRGLPLVGIVEFILHGTCRGIYRKRVKQECVLKADGTCHCSCAKPKLLHRPCTHVIAAAAECGIPDAVYVSQYFSKQAIYHTWSGEIYGFGIAGEFTETNDEVLNIPDPSKLRGKAGRRRTRRIRNDMDESEAGRRRWAHVQVRRSYPEFVMEFDRLLPTDIVWEPYSAAATQARAPLGLSTLCTRDQVYWMTTVPMVFDICVEPHAPFRVMRQFGFRQPFPVPFPTTIPAAVHRYSRKGQHSAGDWPAKLATFVEDWLLATEEVVDHEGEPHTEESYQAYLRWHRDQDFARAVDDINRVVVDGSTTIQRLGAGIPXDVARADAAVQRPTIPTGPRPAAHVPRPTPPPHGGFRTPFSTPPSSARPSVVPPTGXHFSQAAGSASQVAVSTSHSAQFWQYTGTSSQAAGTSSQGPPLDYARTSSNRLLPSTLLFDITDFDFASGSTEDVIGPSQLGGAPPVQTQDQAQATPPRDTRATRAMPPDRFTYSQDHVRAQARRTKRGRGAGQGQ

SEQ ID NO: 183448 - protein, 72 aa, Oryza sativa
  Clone ID: PAT_MRT4530_80539C.1.pep
ASTYWPSWQKSACGMHQRGVPIQAKRPTTATTITTTAADNLIVILLLSGNLISRYRWVRSLFSLTGHAPPRV

SEQ ID NO: 183449 - protein, 135 aa, Oryza sativa
  Clone ID: PAT_MRT4530_8053C.1.pep
MATRAPATGSATVTVDPTPSSSAPASSAPPPAAETVVLRLKRRAKKKVTWKEGTVDNESLGRKSSKKCCIFHKDVPFDEDCSDDDPDGGRRSPPGDAGEGTSGGGVNLSWSSVAMREVVISREELLLLYCQLPKQ

SEQ ID NO: 183450 - protein, 387 aa, Oryza sativa
  unsure (1)..(387): unsure at all Xaa locations
  Clone ID: PAT_MRT4530_80540C.1.pep
GTSGYTXVVGPGDRSPTPVSPYCGAGGSAWDIPGTDVRLREAGLLPMCRLVEVVAGHADPARRWNVDRSLLAALVDRWRPETHTFHLPCGEVAPILQDVSYLLGLPLAGDAVGPVTTGVDWKDDLTACFAPVQRAPHLPLQPLAHHRNTGPTKRWLLQFTYTGTSSQAAGTSSQGPPLDHVGTSSDHLVASALLFDITDFDFASGSTEDVIGPSQLGGAPPVQTQDQAQATPPPDTRATRAVPPDHFTYSQDHVNPDIRGRRFFRCPNYDRERKAAYERQCREQQCDWRVLTMALPPWEARLRCKCGDRCQVLRSIKPTTLGRRLFVCPNILDDDFMEPPRRCQYREWIDTRRVLTPPSRVVQLELPEQYRVTKARFEREEGSSRRG

SEQ ID NO: 183451 - protein, 948 aa, Oryza sativa
  unsure (1)..(948): unsure at all Xaa locations
  Clone ID: PAT_MRT4530_80541C.1.pep
MSNKQIFQVYHGPGNVRYGPTGVDLSDFIVSERGIDRPAERSVPSIKGWLMRGLRVDPQTSDITINVIVSRTTKGFYWELMPVQNSRVWRWYLENALQRKWPLALVPFVHPKDPGVQMNMDDGEGPSAEVNETSVEEVNAREDGGVVAPVGIQPGGVADEGETVGAIVDEMEREDSDNERVEEGDSSDDETDINPAEWASEDFSGLIVSEEDSVRWEYKENDVIQGAIYSRAEDMKEAVKHFAVSLHREFRVAKSNRSQYEVRCVKEKDGCPWRVHAYKGKWKDYWTVSVVTKHTCFLPEMAHQDTPQLLDPAIDHRHQSHLTAVQGAQLGTFRARTCGELLTVHDSFVERLREAGLLPMCRLVEAAAGDADPARRWTVDRPETHTFHLLCGEVAPTLQDVSYLLGLPLAGDAVGPGTTAMDWKDDLTARFALVQRAPHLPLEPLAHHRNTGPTKRWLLQFTVEQLQAEADEYSYSRCLEAYLLWLFGWVMFCGGHGHAVDKGLVHYARSIADAAVGEVPQWSWGSALLAALYRALCESCTKTDPSATFGGCPLFLSIWAAERIAIGRPEVDQHAYEESLYEEQPEVDYPTMGTLWCRRQRRWAHVQVRRSYLEFVMEFDRLLPTDVVWXPTVPRLPRLVRCWAYWMTTVPMFGFRQPFPVPFPTTVPAAVHRYSRKGQQSAGDWPAKLATFVEDWLLATEEVVDHEGEPHTEESYQAYLRWYQPRTRTRVTFAPLEQQPQVASTRDLYARHRDQDFARAVDDINRVVVDGSTTIQRLGAGIPTGPRPAAHVPRPTPPPHGGFRAPFSTPPSSARPSVVPPTGFAQFAMTQAAHFSQAAGSASQAAGTSSQGPPLDHVGTSSDRLLPSTVLFDITDFDFASGSSEDVIGPSQLGGAPPVQTQDQAQATPPRDTRATRAVPPDRFTYSQDHVRAQARRTKRGRSAGQGQ

SEQ ID NO: 183452 - protein, 117 aa, Oryza sativa
  unsure (1)..(117): unsure at all Xaa locations
  Clone ID: PAT_MRT4530_80542C.1.pep
IIFEKEKRIIASAARVHGGPGARRRSTKTNGLDXPYPKRTAEINLIHRGSTASVSANVSNDVITGCGSAAARQRTLAGKRRRGGANGGHQRVAGDAAILTEARTAADGDRMSRPEIH

SEQ ID NO: 183453 - protein, 121 aa, Oryza sativa
  unsure (1)..(121): unsure at all Xaa locations
  Clone ID: PAT_MRT4530_80543C.1.pep
KNAFAIRYKALGDGENNSLGLKSRVKLXTRLCVFEGKKLGRFAGSPKRKPKIKVYXKDRKKGAGALITPGKTNNPAADLGLGQSPEKTPKKPEGALKKRKHQKTEPAPAKKTPKKDGGQEG

SEQ ID NO: 183454 - protein, 56 aa, Oryza sativa
  Clone ID: PAT_MRT4530_80544C.1.pep
MTQPPWTNPVWKGSRPMKKFVFVAVVSDELVRQLAVPYSMRRCRKRPGQVDSRGSP

SEQ ID NO: 183455 - protein, 53 aa, Oryza sativa
  Clone ID: PAT_MRT4530_80545C.1.pep
RWRRWNWRRRPAVQARQEVGSQRRNWGRRRLPSRIGGQLILQSFSPVSLVVFP

SEQ ID NO: 183456 - protein, 486 aa, Oryza sativa
  Clone ID: PAT_MRT4530_80546C.1.pep
MASSAATVVLIPFCVSGHLTPMLEVGKRMLRSRCCGDDDDGRPAMSLTVLLAQLPESHRAPEIDEIIRREAAGASEHSGFDVRFHCLPAEELPDFRGGEDFISRFMQQHASHAREAIAGLESRVAAVVLDWFCTTLLDVTRDLGLPGYVFFTSAASMLSLLLRLPALDKEVAVDFEEMGGAVDLPGLPPVPAALLPTPVMKKGCNYEWLVYHGSRFMEAAGIIVNTVAELEPAVLEAIADGRCVPGRRVPAIYTVGPVLSFKTPPEKPHECVRWLDAQPRASVVFLCFGSMGSFAPPQVLEIAAGLERSGHRFLWVLRGRPPAGSPYPTDADADELLPEGFLERTKGRGMVWPTWAPQKDILAHAAVGGFVTHGGWNSTLESLWHGVPMAPWPLYAEQHLNAFELVRDMGVAVEMEVDRKRGNLVEAAELERAVRCLMDEGSEEGRMAREKAAAAKAACRNAVDGGGSSIAALRKLTQEMAHMSSI

SEQ ID NO: 183457 - protein, 75 aa, Oryza sativa
  Clone ID: PAT_MRT4530_80547C.1.pep
MGFLGGGDGDVKTWRHALVAIRRRRDTKEEQQRRPPAKPWASWASPRFGRTRALVAVGCRASSGRCGLAPNDGWR

SEQ ID NO: 183458 - protein, 187 aa, Oryza sativa
  Clone ID: PAT_MRT4530_80548C.1.pep
MALRLSVSSSHGPASSPAISTCRPAACGRFPALLGGGVASQRRSLTVVSGPETRAVIPVRSSGSDTATVGAEAEAVAVTGQVTEVNKDTFWPIVKSAGPKVVVLDMYTQWCGPCKVMAPKFQEMSEKDQDVVFLKLDCNQDNKSLAKELGIKVVPTFKILKDGKVVKEVTGAKLDELIQAIETVKSS

SEQ ID NO: 183459 - protein, 75 aa, Oryza sativa
  Clone ID: PAT_MRT4530_80549C.1.pep
MDIFIITAGLPASLPTGVSAFTVSTLGVIIFVFALELVFYFSNSNYFTGNFSFSKFLKYQHLYFIGPDISTVAKG

SEQ ID NO: 183460 - protein, 82 aa, Oryza sativa
  Clone ID: PAT_MRT4530_8054C.1.pep
LPSNRFFFFWGLTAFPACFLSLWASRLGPLICFPSGSLVKKNPLVPIRIVPLPAGWGINLLNCPARFFACLLGREGPPLYLI

SEQ ID NO: 183461 - protein, 205 aa, Oryza sativa
  Clone ID: PAT_MRT4530_80550C.1.pep
MAAAAVAAGRGGVRGRGEGEEGSLARRAWRQYLRQLQLHPLRTKMITAGCLAGVSDSVAQKLSGYQRIEKRRLLLKMLFGFAYGGPFGHFLHKVLDYIFKGKKDTKTIAKKVLLEQITSSPWNNLLFLFYYGYVVERRPFKEVKTRVKKQYPSVQLSAWMFWPIVGWINHMYMPLQFRVIFHSFVACCWGIFLNLRARAMSLKQS

SEQ ID NO: 183462 - protein, 1021 aa, Oryza sativa
  Clone ID: PAT_MRT4530_80551C.1.pep
MARGSALLDGSVLPPSRIVSERHAGLPRRFMPESATGREIVMLGEGRPAPDYPGRFVFFLPFAMAGLVPPFSSFFMDILEFYDLQMAHLTPNAVMTLAIFAHLCEMFIGVRPSLQLFRWFFTVQSVSPPSVVGGCYFQPRGPVLNRYIPCALRKKWDDWKSDWFYTPLANEARLRLPSQPPAQVSSWRAPVDLGDDYDAVLDRLAGLRSQGLTGAMGVRWDWAPENFKILVQRVLNLNSVEASLIPHGILPLCSDPDRASILTIMTAVGASEEQAPKGHDGAGGSRRGDQSTPGGGRASGPRVGGSGSSRPTDARGKRKLGGTPPPSPPRGGGAVRASSRRPEGATPTSQPEGERKKKRLRKMGETEPSRGNLISPPRWSFNRPPRSDIPSRSSHHPKSGQSEAKDPAAAEERRRESDRREAADRLREAEEAAREAARARHAEDTAREEAARARQAEEAAKEEAAQARRAEAMASSEAAHDTAAGASLGPTPSGNAQATASGVARDEAAGGSPGPTSPGDAQDQTGPGDIPEPSASSGGPSRVAFSPRRLFSSSSVAPLSAEPLLQALAAANTAVLDGFSAQVEALRAERAELEAAWARVEEGRRSVDVMVEVGRKAHRRHVSELEARKAALAEVAREVEEERGAALIATTVMIEAQDSLRLQHGNWEAELKKKLDAAQGVLDAAAAREQRATETEAALRRREEALEARAMALEERACVAEKVLADREAAVTSREATLAAHESACAEEESALRLREDALAERERALEEAEAEAQRLADSLSLREAALTEQARRNLESVRAERAALEQRAADLEAREKELDARACSGGAAAGESDLAARLAAAEHTVADMQRALDSSAGEAEALRLAGEIGPGTLWDAVSRLDRAGRQVGLWKGQTTTHSSNLEGLAPHLTKMAWALQQLPEELEKTIKSSSRDLAQGAVELVLASYQARDPNFSPWMALEEFPPGTEDDARTRVRDAADHIVHSFEGSAPRLAFAPNSDEEGDASSADDGDDEAGDPGASE

SEQ ID NO: 183463 - protein, 505 aa, Oryza sativa
  Clone ID: PAT_MRT4530_80552C.1.pep
MEGAGRDGNPLGGYRIGKTLGIGSFGKVKIAEHILTGHKVAIKILNRRKIKSMEMEEKVKREIKILRLFMHPHIIRLYEVIDTPADIYVVMEYVKSGELFDYIVEKGRLQEEEARRFFQQIISGVEYCHRNMVVHRDLKPENLLLDSKCNVKIADFGLSNVMRDGHFLKTSCGSPNYAAPEVISGKLYAGPEVDVWSCGVILYALLCGTLPFDDENIPNLFKKIKGGIYTLPSHLSPLARDLIPRMLVVDPMKRITIREIREHQWFTVGLPRYLAVPPPDTAQQVKKLDDETLNDVINMGFDKNQLIESLHKRLQNEATVAYYLLLDNRLRTTSGYLGAEFHESMESSLAQVTPAETPNSATDHRQHGHMESPGFGLRHHFAADRKWALGLQSRAHPREIITEVLKALQELNVCWKKIGHYNMKCRWSPSFPSHESMMHNNHGFGAESAIIETDDSEKSTHTVKFEIQLYKTRDEKYLLDLQRVSGPQLLFLDLCSAFLTQLRVL

SEQ ID NO: 183464 - protein, 510 aa, Oryza sativa
  Clone ID: PAT_MRT4530_80553C.1.pep
MARGSTPLDGSVLPPSRIVSERQAGLPRRFMPESATGREVVELGEGRPAPHYPGRSVFFLSFAMAGLVPPFSSFFMDILEFYDLQMAHLTPNAIMTLAIFAHLCEMFIGVRPSLRLFQWFFTVQPVSPPTVVGGCYFQPRGQVLHRYIPCVLRKKWDDWKSDWLDAARGVLDAAAARERRAAENEAASRQREEALEARAMALEERARAKERDLADREAAVAIREATLAAHEAACAEEESALRLREDALAERERALEEAEAAAQRLADSLFLRKAAREEQARRNLEGARAERAALDQRAAELEARAKELDARAHSGGAAAGDGDLAARLAAAEHTIAELQGALDSSAGEVEALRLAGEVGPGMLRDAVSRLDRAGRQAGLWGGRCAKYAANQGGLAQLLSEMAGTLQRLPEELEETIKSSSRELARGAVELVLASYQARDPDFSPWAALDEFPPGTEDGARAQVRDAADHIVHSFEGTAPRLAFALDSDKEGGDGGADDSDDEAGDPGASK

SEQ ID NO: 183465 - protein, 57 aa, Oryza sativa
  Clone ID: PAT_MRT4530_80554C.1.pep
SKGFHGQGHLKLTGSLVALYNGTKLRHFLTNWKRVFSKARIPKMQDITLGEAEKHEW

SEQ ID NO: 183466 - protein, 1065 aa, Oryza sativa
  unsure (1)..(1065): unsure at all Xaa locations
  Clone ID: PAT_MRT4530_80555C.1.pep
MARGSAPLDGSVLPPSRIVSERQAGLPRRFMPESATGREIVSLGEGCPAPRYPGRSVFFLPFAAGLVPPFSSFFMDVLEFYDLQMAHLTPNAVMTLAIFAHLCEMFIGVCPSLRLFRWFFTVQPVSPPSVVGGCYFQPRGPVLNRYIPCVLRKKWDDWKSDWFYTPLADEARLRLPSQPPAQASSWRAPVDLGDGYDAVLDRLAGLRSQGLTGAMVFGDYLRRRIAPLQRRARGAWEYTGSEDYMRTHQGVRWDWAPEDFKIVVQRVLNLSSVEASLIPQGVLPLCSDPDRASILTIMQAVGASEERAPRGHDGAGGSRRGEQSTPGGGRASGPRDGGPGSGRPADARGKRKQEGTPPPSPPRGGGAARASSRRPEGATPTSQPEGERKKKRLRKMGGXTEPSRGNLISPPRWSFNRPPRSEIPSRPSRHSKSGQSEAEDPATTEARRRESDRREAADRLREAEEAAREAARARQTEEAAREEAGLRQAEATTSSEATRETDRQEAADRLREAEEAAQVAVRARQAKEAAREEARLRQAEATTTSEATRDEAAGASLGPTPSCDAQDKPGPGDILESGTSIGGPSHAASSSRQLFPMPSVAPLSAEPLLQALAVANTTVLDGLSAQVEALQAERAELDAAWARVEEGRRSVEAMVEVGRKAHRRHVSELEARRKVLGEIAKEVEEERGAALIATTVMNEAQDTLRLQYGSWEAELGKKLDAARGVLDAAAARERRAAETEVASRRREEALEARAMALEERACAVERDLADREAAVAIREATLTAHEAACAEEESALRLREDALTERERALEEAEAAAQRLADGLSLREAAREEQARRNLEGARAERATLNQRATELEAREKELDARARSGGAAAGESDLTARLTAAEHTIADLQGALDSSAGEVEALRLAGEVGPGMLRDAVSRLDRAGRQAGLWGGRTAKYAANQGGLAQRLSEIAGTLQRLPEELERTIKSSSRDLARGAVELVLASYQARDPDFSPWTALDEFPPGTEDGARAQVRDAADHIVHSFEGSAPRLALALNSDEEDDDGGVGDSGDEAGDPGALE

SEQ ID NO: 183467 - protein, 134 aa, Oryza sativa
  Clone ID: PAT_MRT4530_80556C.1.pep
INSCRFENANKKTKEVLHRDIAAVLASEIQSQTIQKPKSAKKKRQNCSGHKSEPKIKTQSKQKIALAINLSPKSRPNQNKRYNQESGCSSLFEAVTKQRKSERHGELRLFVVANLQCKDSHCIWPLCSANWLSS

SEQ ID NO: 183468 - protein, 867 aa, Oryza sativa
  unsure (1)..(867): unsure at all Xaa locations
  Clone ID: PAT_MRT4530_80557C.1.pep
MARGSAPLDGSVLPPSHIVSERQAGLPRRFMPESATGREVVALGEGRPAPDYPGRSVFFLSFAMAGLVPPFSIFFMDILEFYDLQMAHLTPNAIMTLAIFAHLCEMFIGVRPSLRLFRWFFTVQPVSPPTVVGGCYFQPRGQVLNRYIPCVLRKKWDDWKSDWFYTPLADEARLRLPSQPLAQASSWRATGLTGAMVFGDYLRTHQGRKWDWDPEDFRMVVQRVLNLSSVEASLIPQGVLPLCCDPERANILTIMQEVGASGERAPRGHDGAGGSRRGEQSTPGGGRASGPRDGGPGGSRPADARGKRKQEGTPPPSPPRGGGAVRASSWRPEGAVPTPQPEGERKKKRLRKMGGTEPCRGNLISPPRWSFSRPPCSEIPXAPPPPRHSKSGRSEVEETATAEARRREADRREAADRLREAEEAAQEAVRARQAEEATREEARLRRAGESIREAEAARAXRRPRRLSPLSSAAPPSAEPLLQALAAANVTVLDGLSAQMEALQAERAELDAAWARVEEGRRSVEAMVEAGRKAHRRHASQLEARRRDLAEIAREVEEERESALIAARGVLDAAAARERRAAENEAASRQREEALEARATELEERARALDAKERDLADREAAVATRLFLREAAREEQARRNLEGARAERAALDQRAAELEARAKELDARAHSGGAAAGDGDLAARLAAAEHTIAELPGALDSSAGEVEALRLASEVGPGMLRDAVSRLDCAGRQAGLWGGRYAKYAANQGGLAQRLSEMAGTLKRLPEELEETIKSSSRDLARGAVELVLASYQARDPDFSPWAALEEFPPGTEDGARAQVRDAADHIVHSFEGTAPQLAFALDSDEEGGDDSADDSDDEAGDPGASE

SEQ ID NO: 183469 - protein, 77 aa, Oryza sativa
  Clone ID: PAT_MRT4530_80558C.1.pep
MARKNLLLLGVLLSALLFFFLDVAHARELAEASESEGKNVKPTGGSGVEDQKWGGAHGGGYGYGGGYGGGGHGGGWP

SEQ ID NO: 183470 - protein, 894 aa, Oryza sativa
  unsure (1)..(894): unsure at all Xaa locations
  Clone ID: PAT_MRT4530_80559C.1.pep
MARGSALLDGSVLPPSRIVSERQAGLPRRFMPESATGREIVTLGEGRPAPCYPGRSVFFLPFAMAGLVPPFSSFFMDVLEFYDLQMAHLTPNAVMTLAIFAHLCEMFIGVRPSLRLFRWFFTVQSVSPPSVVGGCYFQPRGPVLIRYIPCILRKKWDDWKSDWFYTPLADEARLRLLSQPPAQASSWRAPVDLGDGYDAVLDRLAGLRSLGLTGAMVYGDYLRRRIAPLQRRARGAWEYTGSEDCMRIHXGVKWDWVPEDFKRXSRRVPPAIPSPASLRPRTRRPQRPGGGNLTGEKPRIVFGKPRRPLGRPPGLARPRKSLGRRPDSARPRRRHPPRRXRETDRQEAVDRLREAEEAAXVAVRARQTEEAAREEARLRQAEATTTSEATRGEAXDKPGPGDIPESGTSIGRLSRAASSSRRLFPTPSVAPLSAEPLLQALAVANTTVLDGLSAQVEALQAEQAELDAAWARVEEGRRSVEAMVEVGRKAHRRHVSELEARQKVLGEIAKEVEEERGAALIATIVMNEAQDTLRLQYGSWEAELGKKLDAAQGVLDAAAARERRAAETEVASRRREEALEARAMALEERACAVERDLADREAAVAIREATLTAHEAACAEEESALRLREDALTERERALEEAEAAAQRLADSLSLREAVWEEKARRNLEGARAERAALNQRAAELEARERELDARARSGGAAAGESDLTARLAAAEHTIADLQGALDSSAGEVEALRLAGEVGPGMFRDAVSRLDRAGRQAGLWGGRTAKYAANQGGLTQRLSEIAGTLQRLPEELERTIKSSSRDLARGAVELVLASYQARDPDFSPWTALDEFPPGTEDGARAQVRDAADHIVHSFEGSAPRLAFALNSDEEDDDGGVGDSGDEAGDPGASE

SEQ ID NO: 183471 - protein, 134 aa, Oryza sativa
  Clone ID: PAT_MRT4530_8055C.1.pep
MASSETHLGRSGRDNADPHALHASSMTNQIMRSSGISIMEYISLPSTGSAWDNTAALTYRTQNTNAFTPINRESTNSTATTTSLLRGDTVRDRISHASSSTTGGQQRRSQFDPYGVDADFDRYPEASSYTSSLG

SEQ ID NO: 183472 - protein, 140 aa, Oryza sativa
  unsure (1)..(140): unsure at all Xaa locations
  Clone ID: PAT_MRT4530_80560C.1.pep
MMAMKSWLGTMIGVGAAVVFTMPAVAQSQPLFLAYPPQNHQTSSPTIFFIGSAAPNVTVTLNGQPIERSAQGNFAPVIPLKMGENQFVFQAESQRIERTITRIGTGPTLSPQGGFAAGSLTXKVPISRPAGEPICFTAIL

SEQ ID NO: 183473 - protein, 552 aa, Oryza sativa
  unsure (1)..(552): unsure at all Xaa locations
  Clone ID: PAT_MRT4530_80561C.1.pep
VPSRSSRHPKSGQSEAEDPAAAEERRRESDRREAADRLREAEEAAREAARARQAEDTAREEAARARQAEEAAREEAARARQAEEAAREEAARVRQAETMASSEAAHDKAAGASLGPTPSGDAQATASGAARDEAAGGSPGPTSPGDAQDQTGPXTSPSPALAAANTAVLDGFSAQVEALRAERAELEAAWARVEEGRRSVDVMVEVGRKAHRRHVSELEARKAALAEIAREVEEERGAALIATTMMIEAQDSLRLQHGNWEAELKKKLDAAQGVLDAAAAREQRATETEAALRRREEALEARAMALEERACVAEKAALTEQARRNSESVRAERAALEQRAADLEAREKDLDARACIGGAAAGESDLAARLADAEHIVADMQRALDSSAGEAEALRLAGEIGPGMLWDAVSRLDRAGRQAGLWKGQSMTHPTNLEGLAPHLTKMAWALQQLPEELEKTIKSSSRDLAQGAVELVLASYQARDPNFSPWVALEEFPPGTEDDARARVRDAADHIVHGFEGSAPRLAFAPNSDEEGDASGADDVEDEAGDPGASD

SEQ ID NO: 183474 - protein, 1035 aa, Oryza sativa
  unsure (1)..(1035): unsure at all Xaa locations
  Clone ID: PAT_MRT4530_80562C.1.pep
MARGSAPLDGSVLPPSRIVSERQAGLPRRFMPESATGREMVALGEGRPAPRYPGRSVFFLSFAMAGLVPPFSSFFMDVLEHYDLQMAHLTPNAVMTLAIFAHLCEMFIGVRPSLRLFRWFFTVQPVSPPSVVGGCYFQPRGPVLSRYIPCVLRKKWDDWKSDWFYTPLADEARLRLPSQPPAQASSWRVPVDLGDGYDTVLDRLAGLRSXGLTGAMVYDDYLRRRIAPLQRRARGAWEYTGSKDYMRTHQGGRWDWAPEDFKMVVQRVLNLSSVEASLIPQGVLPLCSDPDRANILTIMMAVGASEERAPRGHDGAGGSRRGEQSTPGGGRASGPRDGGPGGSRPADARGKRKQEGTPSPSPPRGGGAVRASSRRSEGAAPTPQPEGERKKKRLRKMGGTEPSRGNLISPPRWSFNRPPRSEIPSRPSRHSKSGRSEAEDTATAEARRREADRREAADRLREAEEAAQEAVRARQAEEAAREEARLRRAEESAREAEVARARQAACQAPDPTPPEATMTSEATHDXAAGAPLGPDSSGDAQDEPGSGDVPESGTSIGGPSRAAFSPRRLSPMPSAAPLSAEPLLQALATANTTVLDGLNAQMEVLQAERAELDAAXARVEEGQCSVEAMVEAGRKAHRRHTXELEARRKELAEIAREVEEKREAALIATAVLNEARDDLRLQYGSXAAELGKKLDAARGVLDAAAARERRAAKTEAASRRREEALEARAMVLEERARAKERDLADREAAVAIRETTLAAHEAGCAEEESTLRLREDALTERERALEEAEAAAQRLADSLSLREAAREEQARRNLEGARAERAALDQRTAELEARARELDARARSGGAAAGDGDLAARLAAAEHTIADLQGALNSSTGEVEALRLAGEIGPSMLRDGVSRLDRAGRXVGLWGGRTVKYAANQGGLAQRLSEMAGTLQRLPEELEETIKSSSRDLARGAVELVLASYQARDPDFSPWAALDEFPPGTEDGARAQVRDAADHIVHNFEGTAPRLAFALDSDEEGGDGGDEAGDPGASE

SEQ ID NO: 183475 - protein, 1058 aa, Oryza sativa
  Clone ID: PAT_MRT4530_80563C.1.pep
MARGSAPLEGSVLPPSRILSERQAGLPRRFMPESATGQEVVALGEGRLAPHYPGRSVFFLSFAMAGLVPPFSIFFMDILEFYDLQMAHLTPNAIITLAIFAHLCEMFIGVRPSLRLFRWFFTVQPVSPPTEVGGCYFQPRGQVLNRYIPCVLRKKWDDWKSDWFYTPLADEARLRLPSQPPAQASSWRAAVDLGDGYDAVLDRLAGLRSQGLTGAMVFGDYLRRRIAPLQRRARGAWEYTGPEDIMRTHQGRKWDPEDFRMVVQRVLNLSSVEASLIPQGVLPLCCDPERANILTIMQEVGASRERAPRGHDGEGGSRRGEQSTPGGGRASGPRDGGPGGSRPADARGKRKQEGTPPPSPPRGGGAVRASSRRPEGAVPTPQPEGERKKKRLRKMGGIVPCRGNLISPPRWSFSRPPRRFVPAPTAAVFILPSPKASFHSPVSFCLLVFLLPQRDPVAPPPRHSKSGRSEAEETATAEARRREADRREAADRLREAEEAAQEAVRVRQAEKAAREEARLRRAGESVREAEAARARQAACQTPDPTPPEGTTTSEATHDEAAGVPLGPDPSGDTWDEPASRDAPESGTSSAAPLSVEPFLQALAAANSTVLDGLSAQMEALQAERAELDTAWARVEEGRRSVEAMVEAGRKAHHRHTSQLEARRRELVEIAREVEEERETALIATAVLDEARDDLRLQYGSRAAELEEKLDAARGVLDAAAARERRAAEKEAASRQREEALEVRATALEERARALDVKERDLADREAAVATREATLASHEAACAEEESALRLHEDALTERERALEEAEAAAQRLADSLFLREAAREEQARRKLEGARAERAALDQRAAELEARAKELDARAHSGGAAAGHGDLAARLAAAEHTIAKLQGALDSSAGEVEALRLASEVGPGMLRDAVSRLDRAGRQAGLWGGRHAKYAANQGGLAQCLSEMAGALQRLPEELEETIKSSSRDLARGAVELVLASYQARDPDFSPWAALEEFPPGTEDGARARVRDAADYIVHSFEGTAPRLAFALDSDEEGGDDGADDSGDEADGPGAPE

SEQ ID NO: 183476 - protein, 110 aa, Oryza sativa
  Clone ID: PAT_MRT4530_80564C.1.pep
MRSGFVDPTTTVSHRTASRIMLLLRDMDPAAAAAFPASRPITTGSSRHSFFPNRKPSAAGSSLHKFGECGSDDCRLHPLTPGDHSFFPNAANTTRMCLIFLILQMFIAKL

SEQ ID NO: 183477 - protein, 142 aa, Oryza sativa
  unsure (1)..(142): unsure at all Xaa locations
  Clone ID: PAT_MRT4530_80565C.1.pep
RRTRARRRRPPRSSSPRPSSPPPPAGVVVVAAGRSSSPHPPSPTSPPPXIAVVVATGRSSSPHPPRPTSPPPPATVVVAAPEPDPPPPSSSSLRGRAPAPDPRGRRAADPGSARGRAVVPRSALAAVAAPACRLSSSPPPPL

SEQ ID NO: 183478 - protein, 1038 aa, Oryza sativa
  unsure (1)..(1038): unsure at all Xaa locations
  Clone ID: PAT_MRT4530_80566C.1.pep
MARGSAPLDGSVLPPSCIVSERQAGLPCRFMPASAAGREVVELGEGRPAPHYPGRSVFFLPFAMAGLVPPFSSFFMDVLEFYDLQMAHLTPNAVMTLAIFAHLCEMFIGVRPSLRLFRWFFTVQPVSPPSVVGGCYFQPRGPVLSRYIPCVLRKKWDDWKSDWFYTPLADEARLRLPSQPPAQVSSWRAPVDLGDGYDAVLDRLAGLRSQGLTGAMVYGDYLRRRIAPLQRRARGAWEYTGSEDYMRTHQGVRWDWAPEDFKIVVQRVLNLSSVEASLIPQGVLPLCSDPDRATILTIMQAVGASEERAPRGHDGAGGSRRGEQSTPGGGRASGPRDGGPGSSRPADTRGKRKQEGTPSPSPPRGGGAARASSRRPEGAVPTSQPEGERKKKRLRKMGETEPYRGNLIXPPRWSFSRPPRXSIAPPPRHPKFGQSEAVETATAEARRREADRREAADRLREAEEAAQEAVRVRQAEEAAREEAKLRRAEESVRKAEEARARQAACQAPDPTPPEATTTSEATHDEAAGAPLGPDPSGDARDVPASGDAPESATSIGGPCHAAPAPRRLSPSPSAAPLNAEPLLQALAAANTTVLDGLGAQMEVLQAEWTELDAAWARVEEGRRSVEAMVEAGRKAHRRHASELEARRRELAEIAREVEEERETALIATAVLNEARVDLYLQYGSRAVELEKKLDAARGVLDAAAARERRAAENEAASRRREEALEARAKALEERARTRERDLADREAAVAIQEATLAAHEAACAEEESALRLREDALTERERALEEAEAAAQRLADSLSLREAAREEQAPRNLEGARAERAALDQRAAELEARVKELDARVRSGGAAAGDGDLAARLAAAEHTIADLQGALDSSAGEVEALRLAGEVGPGMLRDAVSRIDRAGRQAGLWGERTAKYAANQGGLAQRLSEMAGTLQRLPEELEETIKSSSRDLARGAVELVLASYQARDPDFSPWAALDEFPPGTEDNARAQVRDAADHIVHSFEGTAPRLAFALDYDEEGGDGGAGDSGDEAGDPGVS

SEQ ID NO: 183479 - protein, 139 aa, Oryza sativa
  Clone ID: PAT_MRT4530_80567C.1.pep
MGCCRMGTTVGNGTVDAHGESWEAEQLYVCNDSVLPTAVGINPMITIQSVAYCVANGIADSLSDKYKKYEKIIIYIFINVFTIIKLDQQRFAPIDINGNTISMGAKLACDYMCDRGQISLGVQVYITDDRAKSFIYQLF

SEQ ID NO: 183480 - protein, 90 aa, Oryza sativa
  Clone ID: PAT_MRT4530_80568C.1.pep
MAMQRVAAEAVEGISVHDIATSTSGGETEGGRGLPRRLAARSRGGSGQTRRLWQHNRSRHDYGNDTARRGQLIGSGLGHGCKGVMMMESL

SEQ ID NO: 183481 - protein, 1059 aa, Oryza sativa
  Clone ID: PAT_MRT4530_80569C.1.pep
MNGLFKTATLRANRDVPLTRARDVPSRLPQPHIHLMHRKRANGISGRVGARIEGARYSSSGVMARGSAPLDGSVLPPSRIVSERQAGLLRRFMPESATGQEIVSLGERCPAPRYPGRSVFFLPFAMAGLVPPFSSFFMDVLEFYDLQMAHLTPNAVMTLAIFAHLCEMFIGVRPSLRLFRWFFTVQPVSPPSVVGGCYFQPRGPVLNRYIPCVLRKKWDDWKSDWFYTPLADESRLRLPSQPPAQASNWRAPVDLGDGYDAVLDRLAGLRSQGLTGAMVFGDYLRRRIAPLQRRARDAWEYTGSEDCMRTHQGVRWDWAPEDFKIVVQRVLNLSSVEASLIPQGVLPLCSDPDRASILTIMQAVGASEERAPRGHDGAGGSRRGERSTPGGGRASGPRDGGPGSGHPADARGKRKQEGTPPLSPPRGGGAARASSRRPEGATPTSQPEGERKKKRPRKMGGTEPSRGNLISPPRWSFNRPPRSEIPSRPSRHSKSGQSEAEDPATTEARRRESDRREAADRLREAEEAAREAALARQTEEAVREEAGLRQAEATTSSEATRETDRQEAADRLREAEEAVQVAVQARQAEEAAREEARLRQAEAATTSEAACDEAAGASLGPNPSGDAQDKLGPGDIPESGTSIGGPSRAASSPRRLFPTPSVAPLSAEPLLQALAVANTTVLDGLSAQGRRSVEAMVEVGRKAHRRHVSELEARRKVLEEIAKEVEEERGAALIATTVMNEAQDSLRLQYGSWEAELEKKLDAAQGVLDAAAARERRAAETEVASRRRDEALEARAMALEERACAVEGNLADREAAVAIREVTLAVHEAACAEEESALRLREDALTERERALEEAEAAAQRLADSLSLREASQEEQARRNLEDARAERAALNQRAAVLEAREKELDARAQIGGAAAGESDLTARLAAAEHTIADLQGALDSSAGEVEALRLAGEVGPSMLRDAVSRLDRAGRQVGLWGGRTAKYAANQGGLAQRLSEIAGTLQRFPEELERTIKSYQQLSCIRHTFGLIPTTFVLTNFRNQYQLSVFSLSTKANAKGNT

SEQ ID NO: 183482 - protein, 163 aa, Oryza sativa
  unsure (1)..(163): unsure at all Xaa locations
  Clone ID: PAT_MRT4530_8056C.1.pep
EIGVKFDDIGALEDVKRTLDELVTLPMRRPELFSHGNLLRPCKGVLLFGPPGTGKTLLAKALATEAGANFISITGSTLTSKWFGDAEKLTKALFSFASRLAPVIIFVDEVDSLLGARGGAFEHEATRRMRNEFMAAWDGLKSKESQRILILGATNRPXDLDDA

SEQ ID NO: 183483 - protein, 388 aa, Oryza sativa
  unsure (1)..(388): unsure at all Xaa locations
  Clone ID: PAT_MRT4530_80570C.1.pep
MDESEAGRVKRCSKCDERGHTYKHCPKDKEKPSAEEAGLSGSAADGARPTEMARQDTPELLDPAIDHRHRSHLTMVQGAQLGTFRARTCGELHTVHDSFVERLREAGLLPMCRLVEAAAGDADPARRWNVDRSLLAALVDRWRPEAHTFHLPCGEVAPTLQDVSYLLRLPLAGDAIGPVTTCVDWKDDLTARFAPVQRAPHLPLQPLAHHRNTGPTRRWLLQFTLFGWVMFCGGHGHAVDKGLVHYARSIADTAVGEVPQWSWGSALLAALYRGLCEACTKTDPSATFGGCPLFLSIWVAERIAIGCPEVDQHAYGESLYVERPEVDYPTMGTLWCRRQVRRSYPEFVMEFDRLLPTNVVWXPTVPRLPRLVRRWVCPHSAQGTRRTG

SEQ ID NO: 183484 - protein, 1703 aa, Oryza sativa
  Clone ID: PAT_MRT4530_80571C.1.pep
MSNKQIFQVYHGPENVRYGPTGVDLLEFIVSKRGIDKLAERSVPSIKGWLMRGLRVDPQTSDITINVIDPGVQMNMDDGEGPSAEVNETSVEEVNAREDGGVVAPVGIQLGGVADEGETVGAIVDEMEREDSDNERVEKGDSSDDETDINPAEWASEDFSSLVVSEEDSVRWEYKENEVIQGAIYTRAEDMKEAVKHFAVSLHREFWVAKFNRSQYEVRNITCAFVASEMYAHVIDNLTYEPRSIIQQIEETYKYTISYAKAYRAKQKIIEMRFATYEASYDNLPRLLGVIEERNPGSSYTVKKFPSIEHPSKSVLQRAFLALHACKMALVNCRPVLCIDGTFLTGKYFRDRFQAVLPSMPNNSILFRTFMQKKLEELRKKAMKHRALVQGTQQHKFEILCQDKAGRGIYRKRVKQECVLKADGTCHCSCAKPKLLHRPCTHVIAAAAECGIPDAVYVSRYFKMARQDTPELLDPAIDHRHRSHLTMVQGAQLGTFRARTCGELHTVHDSFVERLREAGLLPMCRLVEAAAGDADPARRWNVDRSLLAALVDRWRPEAHTFHLPCGEVAPTLQDVSYLLRLPLAGDAIGPVTTCVDWKDDLTARFAPVQRAPHLPLQPLAHHRNTGPTRRWLLQFTLFGWVMFCGGHGHAVDKGLVHYARSIADTAVGEVPQWSWGSALLAALYRGLCEACTKTDPSATFGGCPLFLSIWVAERIAIGCPEVDQHAYGESLYVERPEVDYPTMGTLWCRRQVRRSYPEFVMEFDRLLPTNVVWEPYSAAATQARAPLGLSTLCTRDQAYWMTTVPMVFDICVEPHAPFRVMWQFGFRQLFPVPFPMTVPAAVHRCGDRCQVLRSIKPRTLGRRFFICPNILDDDFMEPPRRCQYREWIDTRRVLTLPSHVVQLELPEQYRVTKARKIIWGYFLHLGPLPPSSGVARGPNAKSTNPKLFMGCRGAKCNFGRRRQTAEAYLRMIREQQRMGLRQLRGDGDGAASQEGESDGDGDEGGGGRRKGVVAAGSSLGHRVDPRELEAGEYVVHKKVGVGKFVCISAEDGLDYVFIQYADAMAKLAVDQAARMLYRYNLPHEKQRPRNLSKLNDPSTWEKRRLKGKLAVQKMVVNLMELYLQRMRQKRPPYPKPVGMDQFTAEFPYEPTPDQNQAFIDVDKDLTERETPMDRLICGDVGFGKTEVAMRAIFIVISAGFQAMVLAPTVILAKQHYDVMSERFSNYPDIKVAMFSGAQTKEEKDELITKIRNGDLHIIVGTHAVLTERMAYNNLGLLVVDEEQKFGVQQKEKIASYKASIDVLTLSATPIPRTLYLALTGFRDASLMSTPPPERVAVRTYVSGFSKERALSAIKFELARGGQVFYVVPRIKAIDDVLQFLKDSLPDVPMAVAHGKKVSKNIQLAMEKFACGEVKILVCTHIIESGIDIPNANTMVVQYAELFGLAQLYQLRGRVGRSGTEGFAYLFYTDKSLLSKIATDRLGAIEEHSDLGQGFHVAEKDMGIRGFGSLFGEQQSGDVANVGIDLFFDMLFDSLSKVDQFCLIPVPYKDVQLDINISSRLSSEYISYLENPVELLNEAAKAAEKDLWTLIQFTEDLRRQYGKEPRDMELLLKKLYVRRMAADLGISRIYSSGKMIIMKTNMNKKVFRLMREAMSLETHRNSLSFTGKEIKGELLVNLPDTLLLNWLFHCLADCYAVIPALVKY

SEQ ID NO: 183485 - protein, 127 aa, Oryza sativa
  Clone ID: PAT_MRT4530_80572C.1.pep
IHRPCLVWLQFKVQGPIQSSRLGLLHVGVGVDLGRCLARWLAPTVIISLFQAGTKTSILHLFQLILGHHSLSQLYPPPTTVDVKSCEVDHLAINIKEDMKSVFWSNCNLHHQIKSCLWHPSLKKKKK

SEQ ID NO: 183486 - protein, 198 aa, Oryza sativa
  Clone ID: PAT_MRT4530_80573C.1.pep
MPNNSILFGTFMQKKLEELRKKAMKHRALVQGTQQQRFEILCQDKAGRGIYRKRVKQDEIYGFGIAGEFTETNDEVLNIPDPSKLRGKARRRRTRRIRNDMDESDAGGSDWDVPGTDVRLREAGLLPMCRLVEAAAGDVDPARRWTVDRSLLAALVDRWRPETHTFHLPCGEVAPTLQDISYLLGLPLAGDAVRPVTT

SEQ ID NO: 183487 - protein, 1577 aa, Oryza sativa
  unsure (1)..(1577): unsure at all Xaa locations
  Clone ID: PAT_MRT4530_80574C.1.pep
MSNKQIFQVYHGPGNVHYGPTGVDLSDFIVSERGIDRPAERSVPSIKGWLMRGLRVDPQTSDITINVIELMPVQNSQVWRWYVENAMQRGWPLALVPFVHPKDPGMQMNMDDGKGPSAEVNETSVEEVNAGEDRGVVAPVGIQPGGVADKGETVAAIVDEMEREDSDNERVEEEDSVRWEYKENEVIQGAIYSRAEDMKEAAKHFAVSLHREFWVAKSNRSQYEVRCVKEKDGCPWRVHAYKGKWKDYWTVSVVTKHTCFLPGVQKYHRNITCAFVASEMYAHVIDNLTYEPRSIIRHIEETYKYTISYAKAWRAKQKIIEIRFRTYEASYDNLPRLLGVIEERNPGSSYEVKKFPSIEHPGKSVLQRAFLALHACKMAFVNCRPVLCIDGTFLTGKYRGQILTAIGVDGNNQVLPLAFAFVESENTDSWYWFLKLVKTKVVGMRPNVCLIHDRHAGILRAIEELQFGSMEQGYPGVWDDVQSRWCMRHMGANFFKQFKNKELMNMFKRLCNQNQEKKFNELWKRLDELTAKCSDQRAAAPSTAVADPPQALGPLPTWILHEPKEKWAKAYDTGGARYGIMTTNLAEVYNWVMRGVRGLPLVGIVEFILHGTCRFEILCQDKAGRGIYHKRVKQECVLKADDTCHCSCSKPKLLHRPCTHVIAAAAECSIPDVVYVSQYFTREFTETNDEVLNIPDPSKLRGKAGRRRTRRIRNDMDESEAGRVKRCSKCDERGHTYKHCPKDKEKPSAAEAGLSGSAADGARPTEMARQDTPQLLDPVIDHRHRSHLTAVQGAQLGTFRARTCGELLTVDDSFVERLREASLLPMCRLVEAAAGHADPARRWTVDRSLLAALVDRWRPETHTFHLPCGEVAPTLQDVSYLLGLPLAGDAVGPVTTAVDWQDDLTARFALVQRAPHLPLEPLAHHRNTGPTKRWLLQFTVDQLQAEADEYSYSRCLKAYLLWLFGWVMFCGGHGHAVDKGLVHYARSIADAAVGEVPQWSWGSALLAALYRGLCEACTTTDPSATFGGCPLFLSIWAAERIAIGRPEVDQHAYEESLYKERPEVDYPTMGTLWCRRQRRWAHVQVRRSYPEFVMEFDRLLPTDVVWXPTVPRLPRLVRRWFGFRQPFPVPFPTTVPAAVQRYSRKGQQSAGDWPAKLATFVEDWLLATEEVVDHEGEPHTEEAYRPTTLAHDINRVVVDGSTTIQRLGAGIPVPVEEHLTTYTRMVESMRSILRVLTCRADDVARADAAVQRPPVPTGPRPAAHVPRPTPPPHGGFRFAQFAMMQDFSQATGSASQAAVSTSHSAQFCQYTGTSSQAAGTSSQGPPLDHAGTSSDRLLPSTVLFDITDFDSASGSAEDVIGPSQLGGAPPTRTMACTYIEWVDTENPVLDLTTCLQEGRWYFASESTEQYLQRKAVYERQYREQQSDWRVLTTALPPWEARPRCRCGDRCQVLRSINPTTLGRRFFVCPNILDDDFMEPPRRCQYREWIDTRRVLTPPSRVVQLELPEQYRKNLLTVLFTSGSLAALYWPQKVRPQALRGRPKLQLAPCRPLYGRQGSNRNFGRRRQTARSTHRLPC

SEQ ID NO: 183488 - protein, 804 aa, Oryza sativa
  unsure (1)..(804): unsure at all Xaa locations
  Clone ID: PAT_MRT4530_80575C.1.pep
MSNKQIFQVYHGPGNVCYGPTGVDLSDFIVSERGIDRPAERSVPSIKGWLMRGLRVDPQTSDITINVIMNMDDGEGPSAEVNETSVEEVNAREDGGVVAPVGIQPGVVADEGETVGAIVDEMEREDSDNERVEEGDSSDDETDINPAEWASEDFSGLVVSEEDSVRWEYKENEIIQEAIYSRAEDMKEAKYHRNITCAFVASEMYAHVIDNLTYEPRSIIRHIEETYKYTISYAKAWRAKQKIIEMRFGTYEASYDNLPRLLGVIEERNPGSSYEVKKFPSIEHPGKSVLQRAFLALHACKMAFVNCRPVLCIDGTFLTGKYRGQILTAIGVDGNNQVLPLAFAFVESENTDSRYWFLKLVKTKIVGMRPNVCQIHDRHAGILRAIEELQFGNMEQGYPGEWEDVQSRYFRDRFQAVLPSMPNNSILFGTFMQKKLEELRKKAMKHRALVQGTQQHRLRHLVSLFLSIWAAERIAIGRPEVDQHAYKESLYAERPEVDYPTIGTLWCRRQRRWAHVQVRRSYPEFVMEFDRLLPTDVVWEPYSAAATQARAPLGLSTVCTRDQAYWMTTVPMVFDICVEPHAPFRVMRQFGFCQPFPYSRKGQQSAGDWPAKLATFVEDWLLTTEEVVDHEGEPHTEEAYQAYLRWYQPRTRTRVTFAPLEQQPHVASTRDLYARHRDQDFARAXDVARADAAVQRPPVPTGPRPAMHVPRPTPPPHGGFRAPFSTPPSSARPSVVPPTXEDVIGPSQLRGAPPVQTQDQAQATPPPDTRATRAVPPDRFTYSQDHVRAQARRTKRGRGAGQGQ

SEQ ID NO: 183489 - protein, 804 aa, Oryza sativa
  Clone ID: PAT_MRT4530_80576C.1.pep
MGSVDGDFEGLQAADRRAEVIEWLNALLPEYCLPLDSSDDELRELLSDGTVLCHIVNALIPGVLEESWGAYASLDQDEGHVEKFIAVVADMGLPGFSVKDLEEGSMSGVVDCLLVLRESVSSGLRDGTSKAPLRKKWRVPETCEPLAPGVTQGKTSPGKDKRSCRPNHKSQRKMPIFDESTFSQKAPTQSLLSVANGIMDESIERKKGEKPQRVVYLRRKVVQEIERSLCIQAEHIISQNVMIKSREDKYHSKIKALEILVNGTNEENEIAINRLQIIKEDKSKVEEERKLGEQVVARLSKEKGLRISSWSIKNEMHALEMELRDEMSNFGSGLKCLVDAAENYHKVLAENQKLFNEVQELKGNIRVYCRVRPFLPGQDKKSTTVDYIGENGELLISNPFKQGKDGHRMFKFNKVFSPFSSQAEVFSDIQPLIRSVLDGFNVCIFAYGQTGSGKTYTMSGPSTSKQDWGVNYRALNDLFDISLSRRNAFSYEVGVQMVEIYNEQANRAVGSTALNERSSRSHSILTVHVRGLDVKNGSTSRGCLHLIDLAGSERVERSEATGDRLKEAQHINKSLSALGDVIFALAQKNAHVPYRNSKLTQVLQSSLGGQAKTLMFVQINPDVESYSETISTLKFAERVSGVELGAARSNKEGKDIKELLEQVASLKDTIVRKDTEIEQLQLMKDKVKSPSFAVDINGASMPKNSNSDLRSVLSITTNQQSQLSDPQSYAEVNRDGGPTSYTDITPTCLDEADFEDNASEDGFSGGTDYSVGCAAGASVFPNSCSDRTADTSMYSHLPISLTPN

SEQ ID NO: 183490 - protein, 292 aa, Oryza sativa
  Clone ID: PAT_MRT4530_80577C.1.pep
GIPGSTHASGELLISNPFKQGKDGHRMFKFNKVFSPFSSQAEVFSDIQPLIRSVLDGFNVCIFAYGQTGSGKTYTMSGPSTSKQDWGVNYRALNDLFDISLSRRNAFSYEVGVQMVEIYNEQVRDLLSNDIAQKRLGIWSTSQPNGLVVPDASLHPVKSTSDVLDLMEIGQANRAVGSTALNERSSRSHSILTVHVRGLDVKNGSTSRGCLHLIDLAGSERVERSEATGDRLKEAQHINKSLSALGDVIFALAQKNAHVPYRNSKLTQVLQSSLGGQAKTLMVVQINPDVES

SEQ ID NO: 183491 - protein, 78 aa, Oryza sativa
  Clone ID: PAT_MRT4530_80578C.1.pep
MVNCLEDQRVKLLKKQTVPVLKPTVGLGVPKSGVVGDAFGIVGVAEVNENTGLEVELKGEVAGEPRGSSRVDLQACKL

SEQ ID NO: 183492 - protein, 1369 aa, Oryza sativa
  Clone ID: PAT_MRT4530_80579C.1.pep
MSNKQIFQVYHGPGNVRYGPTGVDLLDFIVTERGIERPAERSVPSIKGWLMRGLRVDPQTIQNSRVWRWYLENALQRGWPLALVPFVHPKDPGVQMNMDDGEGPSAEVNETSVEEVNAREDGDVVAPVGIQPGGVADEGETVGAIVDEMEREDSDNERVEEGDSSDDETDINPAEWASEDFSGLIVSEEDSVRWEYKENKVIQGAIYSRAEDMKEAERNPGSSYEVKKFPSIEHPGKSVLQRAFLALHACKMAFVNCRPVLCIDGTFLTGKYRGQILTAIGVDGNNQVLPLAFAFVESENTDSWYWFLKLVKTKVVGMRPNVCLIHDRHAGILRAIGELQFGSMERGYPGVWEDVQSRWCMRHMGANFFKQFKNKELMNMFKRLCNQNQEKKFNELWKRLDELTAKCSDQRAAAPSTAVADPPQALGPLPTDSPTLVRRTGLEIRKFSQWILHEPKEKWAKAYDTGGARYGIMTTNLAEVYNWVMRGVRGLPLVGIVEFILHGTCSILFGAFMQKKLEELRKKAMKHRALVQGTQQHRFEILCQDKAGRGIYRKRVKQECVLKDDGTCHCSCAKPKLLHRPCTHVIAAAAECGIPDTVYVSQYFSKQAIYHTWSGEIYGFGIAGEFTETNDEVLNIPDPSKLRGKVGRRRTRRIRNDMDESEAGRVKRCSKCDEHGHTYKHCPKDKEKPSAAEAGLSGSAADGARPTEMARQDTPQLLDPAIDHRHRSYLTAVQGAQLGTFRARTCGELLTVHDSFVERLREAGLLPMCRLVEAAACDADPARRWTVDRSLVAALVDRWRPETHTFYLPCGEVEQLQAEADEYSYSRCLEAYLLWLFGWVMFCGGHGHAVDKGLVHYATSIADAAVGEVPQWSWGSALLAALYSALCESCTKTDPSATFGGCPLFLSIWAAERIAIGRPEVDQHAYEESLYEERPEVDYPTMGTLWFRRQRRWAHVQVRRSYPEFVMEFDRLLTTDVVWEPYSAAATQARAPLGLSTLCTRDQAYWMTTVPMVFDICVEPHAPFRVMRQFGFRQPFPVPFPTTVPAAVHRYSREGQQSAGDWPAKLATFVEDWLLATEEVVDHEGEPHTEESYQAYLRWYQPRTRTRVTFAPLEQQPHVASTRDLYARHRDQDFARVVDDINRVVVGGSTTIQRLDAGIPVPVEEHLTTYTLMVESMRSILRVLTCRADDVARADAAVQRPPVPTGPRPAAHVPRPTPPPHGGFRAPFSTPPSSARPSVVPPTGFAQFAMTQAAHFSQAAGSASQAAGTSSQGPPLDHAGTSSDPFLSSTVLFDITDFDFASGSTEDVIGPSQLGGAPPVQTQDQAQATPPRDTRATRAVPPDRFTYSQDHVRAQARRTKRGRGAGQGQ

SEQ ID NO: 183493 - protein, 501 aa, Oryza sativa
  unsure (1)..(501): unsure at all Xaa locations
  Clone ID: PAT_MRT4530_8057C.1.pep
YAKDKFTIPSFHGXLNYNAAACLDWEMTVDQXKFSAHLVPDEHRVRQATSEFEDFAILXWTQISTDGLTPTTWEALKTSMXTKFVPPFRHDLLNKLQCLNQRDKSIEEYYQELQKGCLPSYIMEDEEAAIVCFYGGLNCEIQDIVMYKXMILCXRLLKLXMLVKQQLQGWQQSTKYRFRNSTLTRTVPPPTRSSMPSTIQATLTTVSIPPRATEVSKYTKKFLISGFYGXTTRIIYHHCKGMGHIMKDXPSQRAYIATNDGGYVSSSDVKEEHSLATNLAGETNVPETEIDDGEILGVADTANYKTILVXXVLSIQVEHTEELQRHNLFQTFLVIKDCRVHMVIDSGSCNNLVSTDLIKKLNLLTRHHSQPRHIXWLNNNGKDKVTQTIRMHVVPMNACSLLLGRSWNXNINATHHGRSKIXYNFMHRDKKLTSLPMTYAEIVECDNEISQNEKGTPISNIEHLICLLMEKRNTEDHCDLWKRRKRLCLVLTDASFYAKAA

SEQ ID NO: 183494 - protein, 91 aa, Oryza sativa
  Clone ID: PAT_MRT4530_80580C.1.pep
STGETWRTEKGILSWIFDLYEQRMSHQLLVLRQQNALTSVELQLTSTLSPTATSPIFTFWTYKIQLSNRSVLYFCHLLNALSEEPPINWLD

SEQ ID NO: 183495 - protein, 1003 aa, Oryza sativa
  Clone ID: PAT_MRT4530_80581C.1.pep
MGRGKYHRNITCAFVASEMYAHVIDNLRYEPRSIIRHIEEIYKYTISYAKAWRAKQKIIEMRFGTYEASYDNLPRLLGVIEERNPGSSYEVKKSPSIEHPGKSVLQRAFLALHACKMAFVNCRPVLCIDGTFLTGKYRGQILTAIGVDGNNQVLPLAFAFVESENTDSWYWFLKLVKTKVVGMRPNVCLIHDRHAGILRAIGELQFGSMERGYPGVWEDVQSRWCMRHMGANFFKQFKNKELMNMFKRLCNQNQEKKFNELWKRLDELTAKCSDQRAAAPSTAVADPPQALGPLPTDSPTLVRRTGLEIRKFSQWILHEPIEKWAKAYDTGGARYGIMTTNLAEVYNWVMRAVRGLPLVGIVEFILHGTCRYFRDRFQAVLPSMPNNSILFGAFMQKKLEELRKKAMKHRALVQGTQQHRFEILCQDKAGRGIYRKRVKQECVLKDDGTCHCSCAKPKLLHRPCTHVIAAAAECGIPDTVYVSQYFSKQAIYHTWSGEIYGFGIAGEFTETNDEVLNIPDPSKLRGKAGRRRTRRIRNDMDESEAGRVKRCSKCDEHGHTYKHCPKDKEKPSAAEAGLSGSAADGARPTGEGTTSTRPRPRRRRATSGYVGAQLGTFRARTCGELLTVHDSFVERLREAGLLPMCRLVEAAAGNADPARRWTVDRSLVAALVDRWRPETHTFHLPCGEVAPTLQDVSYLLATFVEDWLLATEEVVDHEGEPHTEESYQAYLRWYQPRTRTRVTFAPLEQQPHVASTRDLYDRHRDQDFARVVDDINRVVVDGSTTIQRLDAGIPVPVEEHPTTYTRMVESMRSILRVLTCRADDVARADAAVQRPPVPTGPRPAAHVPRPTPPPHGGFRAPFSTPPSSARPFVVPPTGFAQFAMTQAAHFSQAAGSASQAAGTSSQGPPLDHAGTSSDPFLSSTVLFDITDFDFASGSTEDVIGPSQLGGAPPVQTQDQAQATPPRDTRATRAVPPDRFTYSQDHVRAQARRTKRGRGAGQGQ

SEQ ID NO: 183496 - protein, 146 aa, Oryza sativa
  Clone ID: PAT_MRT4530_80582C.1.pep
MYQEEGWSSSSSSSSSLRRVLSTGGGLVEEERRERIDKYRSKRNQRNFDKKITYACRKTLADSRPRVKGRFARNSSDDAAAAAAAQVEVSPATNNNVPEWWPAVQEALARQEQEAAGLHLCDTADDDLLAAYLGVSSIDLYSPRGH

SEQ ID NO: 183497 - protein, 725 aa, Oryza sativa
  Clone ID: PAT_MRT4530_80583C.1.pep
MSNKQIFQIYHGPGNVRYGPTGVDLSDFIVSERGIDRPAERSVPSIKGWLMRGLRVDPQTSDITINVIDPGVQMNMDDGEGPSAEVNETSVEEVNAREDEGVVAPVGIQPGGVADEGETVGAIVDEMEREDSDNERVKEGDSSDDETDINPAEWATEDFSGLVVSEEDSVRWEYKENEVIQGAIYSRAEDMKEAVKHFAVSLHREFWVAKSNRSQYEVRSIIRHIEETYKYTISYAKAWRAKQKIIEMRFGTYEASYDNLPCLLGVIEERNPGSSYAVKKFPSIEHPGKSVLQRAFLALHACKMTFVNCRPVLCIDGTFLTRKYRGQILTAIGVDGNNQVLPLAFAFVESENTDSWYWFLKLVKTKVVSMRPNVCLIHDRHAGILRAIEELQFGSMERGYPGEWEDRRWAHVQVRQSYPEFVMEFDRLLPTDVVWEPYSVAATQARAPLGLSTLCTRDQAYWMTTVPMVFDICVEPHAPFRVMRQFGFRQPFPVPFPTTVLAAIHCGDSTPQAILDGSDKTNLSATAPTEKNFNSGVREKRARLTTHCTQQVIPEEELDNRTPRPTQLHHAHPRHRCLGKGRAILPIKQLPTPACGKHARKGGELQGVTKGQQSAGDWPAKLATFVEDWLLATEEVVDHEGEPHTEEAYQAYLRWDQPRTRTRVTFAPLEQQPHVEPPRRCQYREWIDTRRVLTPPSRVVQLELPEQYRVTKARFERGEGSSRSG

SEQ ID NO: 183498 - protein, 114 aa, Oryza sativa
  Clone ID: PAT_MRT4530_80584C.1.pep
WRTRVVTYLHFGPSSPHPIQREHRRAWEAGGRRARYRRRAVGGAAVGKHGGGLRGERTAGERSSGPGTPAAGERSIGRRATDGTMVGEGGDGRTRQQLAGNGGSQRRACEAPSP

SEQ ID NO: 183499 - protein, 500 aa, Oryza sativa
  Clone ID: PAT_MRT4530_80585C.1.pep
SAFHRTPSGVCQQLVSEPRWLAGAMAERSLPHHSRTPPHVSTPPGSRSPLSRPLCTPPRRCPAKSPPRRGRGRGERQPLAAQPRVVRESSVAVHYSVLTRTNYEERALLMTVNLHAQGLWHAMEPYEDEETEYRDDRLVLAVILRALLRQEFADARFKDDENIDDFSMRLTGITNSIRTLGGDLPEVDVVNKLLNVVPKHLSQIAISIETLLDISDLSIEEVTGRLRAAEKRKAKPKEIVDSGGHLMLTEEQWLARLKHREQSGESSGTAPGAATNNGGKKRGNRRGCAKDYRSKAKKAEAHIVAEDDDEPTLLMARTCLVERRRSPAEPAPEITTVFLEEAKVLAHLDDDPDPTNLDDDPDPADLWYLYTGATNHMTGVRSVFSELDTAVTGFVKFGDGSVVTIAGCSTILFTYKNGEHRRLTGVYFIPRLTANLISVGQLNKNDCESLVHDGFMRIRDQDRRLLARIPRSRNRHRAITRPRCAPCVPTNPAPQPCLLR

SEQ ID NO: 183500 - protein, 347 aa, Oryza sativa
  Clone ID: PAT_MRT4530_80586C.1.pep
MSNKHIFQVYHGPGNIRYGPTGVDLSEFIVTPRGIERPTERSVPSIKGWLMKGLRVDPQTSDITINVIVSRATEGFYWELMPVQNSRMWRWYVENALQHGWPLSIVPFVHPKDPSVQMNMDDGDGPSAEVNETSVEEDWLLVTEEVVDHAREPHTEEAYQAYLRWYQPRTRTRVTFAPVEQQAQAASTRDLYTRHRDQDFARAVVDCNRVIVDASTTIQRLDAGIERGQFSECSPVVLSTLLRQTQHHSGHPDRLVLVQLRTFIGRLPLPTEFWRDAGTSSQAAGTSSRGPPLDHAKTSLEYGVASALLFGIGDFDFQVSTKDVIGPSQLGGALPLQTQDQSPSTPF

SEQ ID NO: 183501 - protein, 1187 aa, Oryza sativa
  Clone ID: PAT_MRT4530_80587C.1.pep
MRGLRVDPQTSDITINVIVSRATEGFYWELMPVQNSRVWRWYLENALQRGWPLALVPFVHPKDPGVQMNMDDGEGPSAEVNETSVEEVNAREDGGVVAPVGIQPGEVADEGETVGAIVDEMEREDSDNERVEEGDSSDDETDINPAEWASEDFSGLIVSEEDSVRWEHKENEVIQGAIYSREEDMKEAVKHFAVSLHREFWVAKSNRSQYEVRCVKKKDGCPWRVHAYKGKWKDYWTVSVVTKHTCFLPGVQKYHRNITCAFVASEMYAHVIDNLTYEPRSIIRHIEETYKYTISYAKAWRAKQKIIEMRFGTYEASYDNLPRLLGVIEERNPESSYEVKKFPSIEHPGKSVLQRAFLALHACKIAFVNCRPVLCIDGTFLTGKYRGQILTAIGVDGNNQVLPLAFAFVESENTDSWYWFLKLVKTKVVGMRPNSRWGMRHMGADFFKQFKNKELMNMFKRLCNHNQEKKFNELWKRLDELTAKCSDQRAAAPSTAVADPPQALGPLPTDSPTLVRRTGLEIRKFSQWILHEPKEKWAKAYDTGGARYGIMTTNLAEVYNWVMRGVRGLPLVGIVEFILHGTCRYFRDRFQAVLPSMPNNSILFGAFMQKKLEELHKKAMKHRALVQGTQQHRFEILCQDKAGMSIYRKRVKQECVLKADGTCHCSCAKPKLLHRPCTHVIAAAAECGIPDAIYVSYGEIYGFGIAGEFTETNDEVLNIPDPSKLRGKAGRRRTRRIRNDMDESEAGRVKRCSKCDEHGHTYKHCPKDKEKPSAAEAGLSGSTADGARPTEMARQYTPQLLDPAIDHRHRSHLTAVQGAQLGTFRARTCGCVRPASYRCVGWWRLPPATRTRPDNRLWTVTLATFVEDWFLATEEVVDHEGEPHTEEAYQAYLRWYQPRTRTRVTFAPLEQQPHVASTRDLYARHHDQDFARAVDDINRVVVDGSTTIQHLGAGIPVPVEEHLTTYTRMVESMRSILRVLTCRADDVARADAAVQRPPVLTGPRPAAHVPRPTPPPHGGFRAPFSTPPSSARPSVVPPTGFAQFAMTQAAHFSQAARSASQAAASTSHLAQFWQYTGTSSQAAGTSSQGPPLDHAGTSSDRLLPSTLLFDITDFDFDFASGSTEDVIGPSQLGGAPPVQTQDQAQATPPRDTRATRAVPPDRFTYSQDYVRAQARRTKRGRGAGQGQ

SEQ ID NO: 183502 - protein, 69 aa, Oryza sativa
  Clone ID: PAT_MRT4530_80588C.1.pep
STKWEPWSTIPYMGYIVTDRSALGLRLHEIYGRESDTGVSYAIRFVGIVRAVTGVEIPPAIGYWSCMRR

SEQ ID NO: 183503 - protein, 217 aa, Oryza sativa
  Clone ID: PAT_MRT4530_80589C.1.pep
MSPFSRHRTLMNIFDKTPHVHRDAFVAPSASLIGDIQVGQGASIWYGCVLRGDANNVQIGSGTNIQDNSLVHVAKSNLSGKVFPTIIGDNVTVGHSAVLQGCTVEDEAFVGMGATLLDGVVVEKHGMVAAGALVWGGNPAKFLRKLTDDEITFIKESASNYSTLAKAHAAENAKPVEKTEFEKLFRKKSAHQDEEHDSMIGATREVTPELTPSSSAQ

SEQ ID NO: 183504 - protein, 1168 aa, Oryza sativa
  Clone ID: PAT_MRT4530_8058C.1.pep
MRLRCLLTRPPVSLAISASAGGGEGCFARRFGAAVAPRPWGAGRRLCRFYGSSKGGVGSAEARSAAAAEGSSGRCSEQEHAKLGERDQQEWLSGERFLTDCKRRESPFLTRRERFRNEFMRRVVPWEKGNLTWQNFPYYVKYDARTTCSVLCLRTELYRERLVRALAHELQVPLLVLDSSVLAPYDYGDDYSESDEEDEHDESEDEESDIEDEGDEDWTSNGEAKTDESDDEDALKSVEELKKSVDRLRKLVPCTLEEFAKRVAGAEEGTTSESSESPESSEEDKRPYQRGDRVKYVGSSEAFEADQRIILGKVPTKDGSRNAYTFISGRTLSKGQRGEVYEINGDQVAVIFDPLAEKLHDGDNDATSKEENTEASIYWVDSQDIVHDHDTESEDWHIAIEALCEVLPSLQPAIVYFPDSSQWLSRAVPKSNRREFIQKVEEMFDKLTGPVVMICGQNILEAEPKDKDKEPPALMFHNLSRLSSLPSSLKRLVGGRPKYSRSSGISKLFTNSLIVPLPEEDEQRRIFNNQIEEDRKIIISRHNLVELHKVLQEHELSCVELLHVKSDGVVLTRQKAEKVVGWARSHYLSSAVLPNIKGDRLIIPRESLDVAIERLKEQGIKTKRPSQNIKNLAKDEYERNFISAVVPPDEIGVKFDDIGALEDVKRTLDELVTLPMRRPELFSHGNLLRNGDVTLTQVVLRWPVAISGENEIVKKCLPCKGVLLFGPPGTGKTLLAKALATEAGANFISITGSTLTSKWFGDAEKLTKALFSFASRLAPVIIFVDEVDSLLGARGGAFEHEATRRMRNEFMAAWDGLRSKESQRILILGATNRPFDLDDAVIRRLPRRIYVDLPDAQNRMKILKILLAKENLESDFRFDELANSTEGYSGSDLKNLCIASAYRPVHELLEEEKKGGPCSQNTGLRPLRLDDFIQAKAKVSPSVSYDATSMNELRKWNEHDWPILKTSKLNVRLLKPGNRFPHMRGCFGERDSSWEIVITIDWSPTPIFKAKDEIKSGKANRDGYGGGGRGIDRGGRDDGCSCAWARLALLRRMEASSAGRGERGKKGNLKGRRQGRRDHEPCLEKGSGGARSFNGGRASLQGSGDGKWTAFAKTRVEDTIAHALMSKVSGVRTRDHSSKAFILASHRMVGIAIRKIEHDVINVMQLEN

SEQ ID NO: 183505 - protein, 64 aa, Oryza sativa
  Clone ID: PAT_MRT4530_80590C.1.pep
GRGRSGRGDGRTTAPANGTPRQRRRPSTAPLPPHSRPLSGQRRRSSAHRCGCLHGAAVASSSKP

SEQ ID NO: 183506 - protein, 42 aa, Oryza sativa
  Clone ID: PAT_MRT4530_80591C.1.pep
FYCRSWSGIGCIDRTNIFAGLCSFCSELKSPIVYEKMDWIKT

SEQ ID NO: 183507 - protein, 254 aa, Oryza sativa
  Clone ID: PAT_MRT4530_80592C.1.pep
MDDSSLFLHWAVSTLQHQHPAAVAVVADDDATFFSFQELCDTEEVVVVPVQEEVITEAHGAAERRRRWRRAGDGVRVTAGGRGIHHQEDLGAHGGAAAAYAQLEHVVAERKRREKINQRFMELSAVIPKLKKMDKATILSDAASYIRELQEKLKALEEQAAARVTEAAMATPSPARAMNHLPVPPEIEVRCSPTNNVVMVRIHCENGEGVIVRILAEVEEIHLRIINANVMPFLDQGATMIITIAAKASSSLLY

SEQ ID NO: 183508 - protein, 263 aa, Oryza sativa
  Clone ID: PAT_MRT4530_80593C.1.pep
MAGLGKAFYAVGFWIRETGQALDRLGCRLQGNYYFHEQLSRHRTLMNIFDKTPHVHRDAFVAPSASLIGDIQVGQGASIWYGCVLRGDANNVQIGSGTNIQDNSLVHVAKSNLSGKVFPTIIGDNVTVGHSAVLQGCTVEDEAFVGMGATLLDGVVVEKHGMVAAGALVRQNTRIPCGEVWGGNPAKFLRKLTDDEITFIKESASNYSTLAKAHAAENAKPVEKTEFEKLFRKKSAHQDEEHDSMIGATREVTPELTPSSSAQ

SEQ ID NO: 183509 - protein, 554 aa, Oryza sativa
  Clone ID: PAT_MRT4530_80594C.1.pep
MAEEEDSRVWIPPAAEKLTDDLLVEVLSRVPYKSLCRSKRVCRRWRRVISDPDHRRLLPRYHLHDAVVGFFDHRSFISFSGRGRFVGPSLPFLPDCGDLRLLDICNGLLLCRRRRLSDPRRFDYLVANPATEQWIVLPESGWTHKEQIARLGFDPAVSSSHFHVFEFELVEHSAMGMSGDHDGNVVAVEIYSSETGVWIHRNNGWGCIIRTLDIWRSVFFKGMLHLITMDDVVAVVDVEGNSWRTIPMPETFVDPYYGVDDGFIDVSQDCLCFVNTDRDDLYKLSVWVLEDYSSDQWTLKHTVSHLHLFGTDKQHFGYDDKVVSIHPKRNIIFLVSLNDGIFISYEMDSREVHYILVNHATRQWVVLPESARSDKRQIAYLGFDPAVSSSHFHVFELVEKNPANADGEADDGELDATINALEIYSSETGVWSHKDIGWGHQIGVLDDWRSVFFNGMLHLITMGYVVAVVDVEGNSWRTIPMPQTLDDPDCNVDDGFVDLSQGRLYFVNTDRYDLYNSLSVWVLQDYSSDQWTLKHTVSHLHLFGRRRKDFGHDY

SEQ ID NO: 183510 - protein, 166 aa, Oryza sativa
  Clone ID: PAT_MRT4530_80595C.1.pep
TSPPSSNCIAYKPQRTRKYQAFFKTPRGILRANLLALSKPEAKQSRQKDQTPSESLLPEMSSTPATSNPKSTQHKTLLQKDQIVAQTEIPSITFAPTEIDGLHCRSRNLPGFFLKERRPGADPGTRCAKWRESARGLVGFGGLKLGFSVGDPDWDLVRELACAEFL

SEQ ID NO: 183511 - protein, 89 aa, Oryza sativa
  Clone ID: PAT_MRT4530_80596C.1.pep
NIEPNQESSSHADTSEVDGTYFIVEDRNNATQLETTNSLEKGGYAPKVIVLICGDRLQRSQVYLFIPSVDTNPNRTRDKTSIYQSTSFL

SEQ ID NO: 183512 - protein, 41 aa, Oryza sativa
  Clone ID: PAT_MRT4530_80597C.1.pep
MDIFFLFVENNSVEHEYPFQRQPSNRSDATLAVEVDVMEND

SEQ ID NO: 183513 - protein, 81 aa, Oryza sativa
  Clone ID: PAT_MRT4530_80598C.1.pep
KPIGPPAKLQVNFIELIRILITPNQIGCAGRKRFSRKSLPTVADKNASFLNFILSVPGPLVREQQVKICMMFFFLFFQLSA

SEQ ID NO: 183514 - protein, 193 aa, Oryza sativa
  unsure (1)..(193): unsure at all Xaa locations
  Clone ID: PAT_MRT4530_80599C.1.pep
MAVSQSAQLGMATAFFGALSFLLAILGELNKPPHGTPIRGRGVVVCKFPADPTVALGALSAVAAACGAGVGALAVFFPYNGKPVPRKALFDYTLLYVFFHLAIGITVAGIATTGWXTSSEAMHRVRNVHGVDPEYACPTAKTGVLGGVAFLNLDASLFWLLCLMLAGNVKEEYFDDGGGGGEVGDGVAGLEEK

SEQ ID NO: 183515 - protein, 61 aa, Oryza sativa
  Clone ID: PAT_MRT4530_8059C.1.pep
MADSSLPRPPTPDPPLLRAQVDGGVAMVDDDDSVARPWWRQLSTRSEKQRWRRKANSPVVA

SEQ ID NO: 183516 - protein, 65 aa, Oryza sativa
  Clone ID: PAT_MRT4530_805C.1.pep
VTRPAHNGTLSVLSSTLQPPPFLTPLPFRACVTLSSKSSQSLLLSIGEDSPTYLVTLTFMSIIFY

SEQ ID NO: 183517 - protein, 185 aa, Oryza sativa
  Clone ID: PAT_MRT4530_80600C.1.pep
MAQSCLALAVCVLLVHGGAARVAEAASYNVGNSAGWDISADFPSWLDGKSFFVGDTLVFQYSKYHTLSEVDEAGYRNCSTASAVLSSSDGNTTVALTAPGDRYFVCGNELHCLGGMRLHVPVSEPASPGGAGATPASPGGGGALSPGAAGDAGVPTLDLGGSHRVTVGPAVATWLCIIAAALFVW

SEQ ID NO: 183518 - protein, 398 aa, Oryza sativa
  Clone ID: PAT_MRT4530_80601C.1.pep
MVYGDYLRRRIAPLQRRARGAWEYTGSEDYMRTHQGVRWDWAPEDFKILVQRVLNLNSVEASLIPHGILPLCSDPDRASILTIMTAVGASEEQAPKGHDGAGGSRRGDQSTPGGGRASGPRVGGSGSNRPTDARGKRKLGGTPPPSPPRGGGAVRASSRRPEGAAPTSQPEGECKKKRIRKMGETEPSRGNLISPPRWSFNRPPRSDVPSRSSHHPKSGQSEAEDPAAVEARRRESNRREAADRLREAEEAAREAARARQAEDTAREEAARARQAEEAAREEAARARQAEAMATSEAARDEAAGASLGPTSSGDAQATASGVARDEAAGASLGPTPSGDAQDQTGPGDIPESGTSIGGPSRAALLQRQLFPTPSVAPVERKTPFAALTAEKPGGLGWG

SEQ ID NO: 183519 - protein, 41 aa, Oryza sativa
  unsure (1)..(41): unsure at all Xaa locations
  Clone ID: PAT_MRT4530_80602C.1.pep
GIPFPELGSRKTYQSXKAELKGPCGLIVRPGIKIALEGEPG

SEQ ID NO: 183520 - protein, 984 aa, Oryza sativa
  Clone ID: PAT_MRT4530_80603C.1.pep
MARGSALLDGSVLPPSRIVSERQAGLPRRFMPESATGREIVTLSEGRPAPSYPGRSVFFLPFAMAGLVPPFSSFFMDVLEFYDLQMAHLTPNAVMILAIFAHLCEMFIRVRPSLRLFRWFFTVQSVSPPSVVGGCYFQPRGPKSDWFYTPVADEARLRLPSQPPAQASSWRAPVDLGDGYDAVLDRLAGLRSQGLTGAMVYGDYLRRRIAPLQRRAWGAWEYTGSEDYMRTHQGVRWDWAPEDFKIVVQRVLNLSSVEASLIPQGVLPLCSDPDRASILTIMMAVGASEERAPKGHDGAGGSRRGEQSTPGGGRASGPRDGGPGSSRPADARGKRKQGGTPPPSPPEGAGCEIPSRPSRHSKSGQSEADDPATAEARRRESDRREAADRLREAEEAAREAARARQAEETAREEAARARQAEEAAREEAGFRQDEAMATSEAARDEAAGASLGPTPSGDAQATTSGAAGDEAAGASLGPTPSGDAQDQPGPGDIPESGTSVGGPSRAVSSPRRLFPTPSVAPLSAEPLLQALATANTTVLDGLSAQVEALQAERAELDAAWARVEEGRRSVEAMVEVGRKAHRRHVSELEARQKVLAEIAKEVEEERGAALIATTVMTEAQDTLRLQYGSWEAELGKKLDAAQGVLDAAAARERRAAETEVASRRREEALKARAMALEERACVVERDLADREAAVTIREATLAVHEAACAEEESALRLREDALTERERALEEAEAAARRLADSLSLCEAAREEQARRNLEGARAERAVLNQRAAELEARAKELDARAHSGGAAAGESDLASRLAAAEHTIADLQGALDSSAGEVEALRLAGEVGPGMLRDAVSRLDCAGRQVGLWGGRTVKYAANQGGLAQRPSEMAGTLQRLPEELERTIKSSSRDLARGAVELVLASYQARDPDFSPWTALDEFPPGTEDGARAQVRDAADHIVQSFEGSAPRLAFALNSDEEDDDGGVGGSGDEAGDPGASD

SEQ ID NO: 183521 - protein, 81 aa, Oryza sativa
  unsure (1)..(81): unsure at all Xaa locations
  Clone ID: PAT_MRT4530_80604C.1.pep
IKRKTLFMGRDGVSIKERTQYFTESTWDTWRCFSAGPHGRRRTGVDTLASNCPANSPPGPGCLQLPEVAXAGAPQEKGAPG

SEQ ID NO: 183522 - protein, 1045 aa, Oryza sativa
  unsure (1)..(1045): unsure at all Xaa locations
  Clone ID: PAT_MRT4530_80605C.1.pep
MARGSAPLDGSVLPPSRIVSERQAGLPRRFMPESATGREVVALGEGRPAPHYPGRSVFFLSFAMAGLVPPFSIFFMDILEFYDLQMAHLTPNAIMTLAIFAHLCEMFIGVRPSLRLFRWFFTVQPVSPPTVVGGCYFQPRGQVLNRYIPCVLRKKWDDXKSDWFYTPLAEEARLRLPSQPPAQASSWRATVALGDGYDAVLDRLAGLRSQGLTGAMVFGDYLRRRIAPLQRRARGAWEYTGPEDYMRTHQGRKWDWDPEDFRMVVQRVLNLSSMEASLIPQGVLPLCCDPERAKILTIMQVVGVSGERAPRGHDGAGGSRRGEQSTPGGGRASGPRDGGPGGSRPADARGKRKQEGTPPPSPPRGGGAVRASSRRPEGAVPTPQPEGERKKKRLRKMGGIVPCRGNLISPPRWSFSRPPRSEIPSPPPLPRHSKSCRSEAEETATAEARRREADRREAADRLREAEEAAXEAVRVRQAEEAAREEARLRRAGESVRVAEAARARQAAYQTPDSTPPEATTTSEATHDEAAGVPLGPDPSGDAWDKPGSGGTPESGTSIGGPSRAAPTPRGLSPRPSAAPLSAEPFLQALAAANSMVLDGLSAQMEALQAERAELDAAWARVEEGRRSVEAMVEAGRKAHRRHASQLEARRRDLAEIAREVEEERETALIATAVLDEARNDLRLQYGSRAAELEEKLDAAQGVLDAAAARERRAAENEAASRRREEALEACATALKERARALDAKERDLADREAAVATREATLAAHEAACAEEESALRFREDALTERGRALEEAEAAAQRLADSLFLREAAREEQARRNLEGARAERAALDQRAAELEARAKELDGRARSGGAAAGHGDLVARLAAAEHTIAELQGALDSSAGEVEALRLASEVGPGMLRDAVSRLDRAGRQAGLWGGRHAKYAANQGGLAQRLSEMTGALKRLPEELEETIKSSTRDLARGAVELVLASCQARDPDFSPWAALEEFPPGTEDGARAQVRDAADHIVHSFESTAPRLAFALDSDEEGGDDGADDSDDEADDPGASD

SEQ ID NO: 183523 - protein, 742 aa, Oryza sativa
  unsure (1)..(742): unsure at all Xaa locations
  Clone ID: PAT_MRT4530_80606C.1.pep
MRTHQGRKWDWDPEDFRIVVQRVLNLSSVEASLIPQGVLPLCSDPERANILTIMQAVGASGERAPRGHDGASGSRRGGTQSTSGGGRASGPRDGGPGGSRPADARGKRKQEDTPSPSPPRGGGAVRASSRHPEGAAPTSXPEGERKKKRLRKMGGXTEPCRGNLISPPRCEIPSRPSRHSKSGRSEAEETVTAEARRREADRREAANCLREAEEAAQEAVRARQAEEAAREEARLRRAEESVRETEAAHARRAACQAPDPTPPEATTTSEAAHDEAAGAPLGPDPSGDVRDEPASGDAPEFGTSIGGPSRAASLPRRLSPTPSAAPLSAEPLLQALAAANTTVLDGLSAQMEVLQAERAELDAAWARVEEGRRSVEAMVEAGRKAHRRHASELEARRRDLAEIAREVEEERETALIATAVFNTARDDLCLQYGSRAAELEKKLDASRQREEALEARATVLEELARTLDTKERELVGREAAVAIREATLAVHEAACAEEESALRLREDELTERERALKEAEVAAQLREEQARLNLEGARAERAALDQRAAEFEARAKELDARARSGGAAAGDGDLAARLAAAEHTIAELQGALDSSAGEVEALRLMGEVGPGMLRDAVSRLDRAGRQAGLWGGRTAKYAANQGGLAQRLSEMAGTIQRLPEELEETIKSSSRDLARGAAALDEFPPGTEDGARAQVRDAADHIVHSFEGTAPRLAFALDSDEEGDDGGADDSDDEAGSPGASA

SEQ ID NO: 183524 - protein, 954 aa, Oryza sativa
  unsure (1)..(954): unsure at all Xaa locations
  Clone ID: PAT_MRT4530_80607C.1.pep
MARGSAPLDGSVLPPSRIVSERQAGLPRRFMPESATGREVVALGEGRPAPHYPGRSVFFLSFAMAGLVPPFSSFFMDVLELYDLQMAHLTPNAVMTLAIFAHLCEMFIGVHPSLRLFRWFFTVQPVSPPSVVGGCYFPPRGPGLTRAMVYGDYLRRRIAPLQRRARGAWEYTGSEDYMRTHQGVKWDWVPEDFKVVIQRVLNLSSVEASFIPQGVLPLCSDPERANILTIMQAVGASGERAPRGHDGAGGSRRGEQSTPGGGRASGPRDGGPGGSRPADARGKRKQEDTPSPSPPRGGGAVRASSRRPEGAVPTSQPEGERKKKRLRKIGGTEPCRGNLISPPRWSFSRPPRSEIPSRPSRHSKSGRSEAEETATAEARRREADRREAADRLREAEEAAQEAVRARQAEEAVREEARLRRAEESVRETEAARARQAACQAPDPTPPEATTTSESSHDEAAGAPLGPDPSGDAQDEPTSGDVPESGTSIGRPSRAASLPRRLSPMPSAAPLSAEPLLQALAATNTTVLDGLSAQMEVLQAERAELDAAWARVEEGRRSVEAMVETGRKAHRRHTSELEAHRRELAEIAREVEEERETALIATAVFNAARDDFYLQYGSRAAELEKKLDASRQREEALEARATALEERARALDAKERDLADREAAVATREATLAAHEAACAEEESALRLREDALTERGRALEEAEAAAQRLADSLFLREAAREEQACRNLEGTRAERAALDQRAAELEARAKELDARAHSGGAAAGHGNLAARLAAAEHTIAELQGALDSSAGEVEALRLASEVGPGMLRDAVSCLDRAGRQAGLWDGRYAKYAANXGGLAQRLSEMAGALERLPEELEETIKSSSRDLARGAVELVLASYQARDPDFSPWAALEEFPPGTEDGARAQVRDAADHIVHSFEGTAPRLAFALVFDEEGGDDGADDSDDEAGNPGASE

SEQ ID NO: 183525 - protein, 677 aa, Oryza sativa
  Clone ID: PAT_MRT4530_80608C.1.pep
MESVAVNAARWVVGKALSPLSGGFVEAWAATTELGPNVDAIKMELLYAQGMLHNARSRETSNPALQQLLLKLRGLAYDAEDVLDELDYFRIQDELDGTYEAAEEHAKGCLYGLVLNTRRTVRNIKKKACSCGDNGEASRHTNDGEALAGSSCIHKLFSNARERSQFLCCAYPCKASHIEHTMKTPKLKFDRVDLSTRMKHIVEQLKPVCAKVSTILNLELLESNRNIGLMSLNAALSRMPGQAPFLPSSVAMSRPVTTSEFIDPKFHGRMSEINKIIGITRGDYCGKDLTIIPIVGSEEIAKLMPELKDEKSGGPDDLIEQRLKSKRFLLVLDDMWNCGNEDEWRRLLAPLRKAQSTGNIILVTTRFLAVAEMVKTIDHSIQLEGLESEVFWELFQACVFGDEKSIGNHVDLLVTGKKIAEKLKGSPLAAKTVGRLLRNHLDLEHWTSVLESREWELQTGENDIMPALKLSYDYLPFHLQHCFTYCALFPEDYRFESDEMIHLWIGLDILQSRNQNKKVEEIGLSYLNDLVNYGFFRKDMNKNGSPYYTMHDLLHELALKVSSYEYLAISSSSVRSVQIPPSVRHLSIVIDDTDVNHRVTFENVKKDFSTLHKRLDVEKLQSLMLFGQYHGSFVIPFGNLLSKAKALRVILMFNASYDMENMLRNFSKLVHLRYLLM

SEQ ID NO: 183526 - protein, 1189 aa, Oryza sativa
  unsure (1)..(1189): unsure at all Xaa locations
  Clone ID: PAT_MRT4530_80609C.1.pep
MANYLPVALADSARSWLHGLPRGTIGSWAELRDHFIANFQGTFERPGTHFDLYNIVQKSGESLRDYIRRFSEQRNKISDITDDIIIAAFTKGIRHEDLVGKFGRKPPKTVKQMFEKANEYAKAEDAITASKQSGTTWKPKKDTPTAGGSGSNNHKDRKRKPEELMATTSPSSRQRSRVNTFDKIMNSQCPHHPNSNHVAKDCFVYKQFAEQYVKNARKPSDGDQGTSKKKDDEDDAPTGFQDHRKELNHIFGGPLAYESKRKQKLTEWEINAVQPNTPQYLRWSEIAIKFDRSDHPDRVVHPGRYPLVLDLVVRNVKLRRTLIDGGSALNILFAKTLDDMQIPRTELKPSNAPFHGVIPGLSATPLGQITLPVTFGTRENFRTENVCFEVADFETAYHAILGRPALAKFMAVPHYTYMMMKMPGPRGVISLRSDIKQAVTCDKESCEMAQTHETTLAREEIRLAATTASEGEVPATKLKKTKESNAKTKKIPLDPSDPDKTANNKDIFAWKPSDMPGIPREVIEHSLHVKEDAKPVKQRLRRFAQDRKDAIKEELTKLLTAGFIKEVLHPDWLANLVLVRKKTGQWRMCVDYTDLNKSCPKDPFGLPRIDQTSFITPFGAYCYITMPFGLKNAGATYQRMIQRCFSTQIGRNVEAYVDDVVVKTKQKDDLIADLEETFTSIRAFKMKLNPEKCIFGVPSGKLLGFMVSQRGIQANPEKINTILNMKPPSSQKDIQKLTGCMAAPSRLTGTGARVVLISPTGERLSYVLWIHFSASHNVAEYEALLHGLRIAISLGIHRLIVRGDSQLIVNQVMKEWSCLDDNMTAYRQEVRKLEDKFDGLELTHVLRHNNEAADRLANFGSKREAAPSDVFVEHLYEPTVPKKETVEAMDTQGPKSCKPSRCPGHWRSGGXTWSARLKGXVGGYTHLFVAIDKFSKWIEAKPVITITTDKARDFFINIVHRFGVPNRIITDNGTQFTGGAFRDFCEDFGIKICYASMAHPMSNGQVERANGMILQGIKARVFDRLHPYAGKWVDQLPSVLWSLRTTPSRATGQSPFFLVYGAEAMLPSEMEFESLRFRNFNEEGYEEGRVDDINRLEEAREAALIQSTRYLQGLHRYHNRNVRSRAFLVGDLVLRKIQTTQDQHKLSPLWEGPFIIAEVTRPGSYRLKREDGTLINNSWNIEHLRRFYA

SEQ ID NO: 183527 - protein, 377 aa, Oryza sativa
  Clone ID: PAT_MRT4530_8060C.1.pep
MAAHSHVIPFLSPAATSARCSPYGHRRRGRAGLLRCAAAAGQAGFFTRLGRLIQEKAKSDVEKLFSGFSKTRESLSVVDELLTYWNLADTDRVLDELEEARPLLHCSACCSLLLHCSALLLSSFFLNVSCLVSCTQALLVSDFGPKISFRIVDTLREEIRDGKLKSGAEIKEALKRCILELLTSKGGNPELQLGFRKPAVIMIVGVNGGGKTTSLGKLAYRFKNEGVKVLMAAGDTFRAAARDQLEVWAERTGSEIVIDNDKKAKPASGLHTNYGLMEELVSCKKVIAKALPGAPNEILLVLDGTTGLNMLQQAREFNDVVGVTGFVLTKLDGTARGGCVVSVVDELGIPVKFIGVGEGMEDLQPFDAEAFVEAIFP

SEQ ID NO: 183528 - protein, 942 aa, Oryza sativa
  Clone ID: PAT_MRT4530_80610C.1.pep
MARGSAPLDGSVLPPSRIVSERQAGLPRRFMPESATGREVVALGEGRPAPHYPGRSVFFLSFAMAGLVPPFSIFFMDILEFYDLQMAHLTPNAIMTLAIFAHLCEMFIGVRPSLRLVGWCFTVQPVSPPTVVGGCNFQPRGQVLNRYIPCVLRKKWDDWKSDWFYTPLADEARLRLLSQPPAQASSWRAAVDLGDGYNAVLDRLAGLRSQGLTGSMEYTGPEDYVRTHQGRKWDWDPEDFRMVVQRVLNLSSVEASLIPQGVLPLCYDPERAKILAIMQVVGASGERAPRGHDGVGGSRRGEQSTPGGGRASGPRDGGPGGSRPADARGKRKQEGTPLPSPPRGGGAVHASSRRPEGAVPTPQPEGERKKKRPRKTGWIVPCRGNLISPPRWSFSRLPRRSRRAPPPQPPGHSKSGRSEAEETATAEARRREADRREAADRLREAEEATQEAVRVRQAEEAAREEARLRWAGESVREAEAARARQAACQTPDPTPPEATTTSEATHDEAAGAPLGPDPSGDAWDEPASGDAPESGTSIGGPSRVAPTPRRLSPRPSAAPLSVEPLLQALAAVNSMVLDGLSAHMEAVQAERAELDAEWARVEEGRRSVEAMVEAGRKAHRRHASQLEARRRDLAEIAREVEEERETALIATAVLDEARDDLRLQYGSRAAELEQKLDAAQGESALRLREDALTERGRALEEAEPAAQRLADSLFLREAAREEQARRNLEGARAERAALDQRAAELEARAKELDARAHSGRAAAGHGDLAARLAATEHTIAELQGALDSSAGEVEALRLASEVGPRRAAGGPLGGRYAKYAANQGGLAQRLSEMAGALERLPEELEETIKSSSRDLARGAVELVLASYQARDPDFSPWAALEEFPPGTEDGARAQVRDAADHIVHSFEGTAPRLAFALDSDEEGGDDGADDSDDEAGNPGASE

SEQ ID NO: 183529 - protein, 55 aa, Oryza sativa
  Clone ID: PAT_MRT4530_80611C.1.pep
MFRVFGKDKETASSPLPSPATSCPMHQEILTDEEVDEMFREADGDRQTNYKGFRN

SEQ ID NO: 183530 - protein, 894 aa, Oryza sativa
  Clone ID: PAT_MRT4530_80612C.1.pep
MKPGIYLTGTNVPSPGANTPALARDECLEALILMGWGEAVMARGSAPLDGSVLPPSRIVSERQAGLPRRFMPESATGREIVSLGERCPAPRYSGWSVFFLPFAMAGLVPPFSSFFMDVMEFYDLQMAHLIPNAVMTLAIFAHLCEMFIGVRPSLRLFRWFFTVQPVSPPSVVGGCYFQPRGPVLNRYIPCVLRKKWDDWKSDWFYTPLADEARLRLPSQPPAQASSWRAPVDLGDGYDAVLNRLAGLRSQGLTGAMVYGDYLRRRIAPLQRRARGAWEYTGSEDCMGTHRGVKWDWVPEDFKVMIQRVLNLSSVEASLIPQGVLPLCSDPDRANILTIMMAVGASEERAPKGLDGASGSRKGDQSTPGGGRASGPRDGGSGGCRPADARGKRKQEGTSSPSPPRGGGVARVSSRRPEGAAPTPQPEGERKKKRLRKMGGTEPSRGNLISPPRWSFNRPPRSEIPSRPSCQSKSGQSEAENAATTEARRRESDRREAADRLREAEEAAREAARARQAEEAAREEARLRQAEATTSSEATRETDRQEAADRLREAEEAAQVAVQARQAEEAAREEARLRQAEATTTSGAARDEAAGASLGPTPSGDTQDKPGPGDVPEPGTSIGGPSRAASSLRRLSPTPSAAPLSAEPLLQALAVANTTVLDGLSAQMEALQAERAELDAAWARVEEGRRSVEAMVEVGRKAHRRHASELEARRKVLGEIAREVEEERGAALIATTVMNEAQDDLRLQYGSWEAELGKKLDAARGVLDAAAARERRAAETEVASRRREEALEARAMALEERACVVERDLADREAAVAIREVTLAAHEAACAEEESALRLREDTLTERERALEEAEAAAQRLAESASLREAAQEEQARRNLEGARAERAALNHAGR

SEQ ID NO: 183531 - protein, 897 aa, Oryza sativa
  unsure (1)..(897): unsure at all Xaa locations
  Clone ID: PAT_MRT4530_80613C.1.pep
MARGSAPLDGSVLPPSRIVSERQAGLPRRFMPESATGREIVSLGEGCPAPRYPGRSVFFLPFAMAGLVPPFSSFFMDVLEFYDLQMAHLTPNAVMTLAIFAHLCEMFIGVRPSLRLFRWFFTVQPVSPPSVVGGCYFQPRGPVLNRYIPCVLRKKWDDWKSDWFYTPLADEARLRLPSQPPAQASNWRAPVDLGDGYDAVLNRLAGLRSQGLTGAMVFGDYLRRRIAPLQRRARGAWEYTGSEDCMRTHQGVRWDWAPEDFKIVVQRVLNLSSVEASLIPQGVLPLCSDPDRASILTIMQAVGASEEQAPRGHDGAGGSRRGEQSTPGGGRASGPRDGGPGSGRPANARGKRKQEETPPPSPPRGGGAARASSRRPEGATPTSQPEGERKKKRLRKMGGTEPSRGNLISPPRWSFNRPPRSEIPSRPSRHSKSGQSEAEDPATTEARRRESDRREAADRLREAEEAAQVAVRARQAEEAAREEARLRQAEAAMTSEAARDESAGASLGPTPSGDAQDKPGPGDIPESGTSIGGPSRAASSPRRLFPTPSVAPLSAEPLLQALAVANTTVLDGLSAQVEALQAERAELDAAWARVEEGRHSVEAMVEVGRKAHRRHVSELEARRKVLGEIAKEVEEERGAALIATTMMNEAQDTLRLQYGSWEAELGKKLDAARGVLDAAAARERRAAETEVASRRREEALEARAMALEERACAVERDLADREAAVAIREVTLAVHEAACAEEESALRLREDALTEREXRAGRQVGLWGGRTAKYAANXGGLAQRLSEIAGTLQRLPEELERTIKSSSRDLARGAVELVLASYQARDPDFSPWTALDEFPPGTEDGARAQVRDVADHIVHSFEGSAPRLAFALNSDEEDDDGGVGDGGDEAGDPGASE

SEQ ID NO: 183532 - protein, 549 aa, Oryza sativa
  Clone ID: PAT_MRT4530_80614C.1.pep
MATSEAARDEAAGASLGPTSSGDAQATASRMARDEAAGASLGPTPSGDAQDQTGPGDIPEAGTSIGGPSRAASSPRQLFPTPSVAPLSAEPLLQALAAANTAVLDGLSAQVEALQAERAELDAAWARVEEGRRSVEAMVEAGRKAHRRHVSDLEARKTALAEIAREVEEERGAALIATTVMNEAQDSLRLQHGSWEAELKKKLDAAQEVLDAAAAREQRATETEAALRRREEALEARAMALEERACVAEKDLADREAAVTSREATLAAHESACAEEESALRLREDALTERERALEEAEAEAQRLADSLSLREAALTEQARRNLESVRAERATLEQRAADLEAREKELDARARIGGAAAGESDLAARLADAEHIVTDMQRALDSSAGEAEALRLAGEIGPGMLWDAVSRLDRAGRQAGLWKGQTMKYSTNLGGLAQHLSKMAGALQQLPEELEKIIKSSSRDLAQGAVELVLASYQARDPNFSPWMALDEFPPGTEDDARVRVRDAADHIVHSFEGSAPQLAFAPNSDEEGDASGADDRDDEAGDPGASD

SEQ ID NO: 183533 - protein, 1555 aa, Oryza sativa
  unsure (1)..(1555): unsure at all Xaa locations
  Clone ID: PAT_MRT4530_80615C.1.pep
MSNKQILQVYHGPGNVRYGPTGVDLSDFIVSERGIDRPAERSVPSIKGWLMRGLRVDPQTSDITINVIVSRATEGFYWELMPVQNSRVWIWYLENALQREWPLALVPFVHPKDPGVQMNMDDGEGPSAEVNETSVEEVNAREDGGVVAPVGIQPSGVADEGETVGAIVDEMEREDSDNERVEEGDSSDDETDINPAEWASEDFSGLIVSEEDSVRWEYKENEVIQGAIYSRAEDMKEAVKHFAVSLHREFWVAKSNRSQYEVRCVKEKDGYPWRVHAYKGKWKDYWTVSVVTKHTCFLPGVQKYHRNITCAFVASEMYAHVIDNLTYEPRSIIQHIEETYKYTISYAKYWXTYEASYDNLPRLLGVIEERNPGSSYEVKKFPSIEHPGKSVLQRAFLALHACKMTFVNCRPVLCIDGTFLTGKYRGQILTAIGVDGNNQVLPLAFAFVESENTDSWYWFLKLVKTKVVGMRPNVCLIHDRHAGILRAIEELQFGSMERGYPSVWEDVQSRWCMRHMGANFFKQFKNKELMNMFKRLCNQNQEKKFNELWKRLDELIAKCSDQRAAAPSTAVADPPQALGPLPTDSPTLVRRTGLEIGKFSQWILHEPKEKWAKAYDTGGAKYGIMTTNLAEVYNWVMRGVRGLPLVGIMEFILHGTLSYFRDRFQAVLPSMSNNSILFGTFMQKKLEDLRKKAMKHRALVQGTQQHRFKILCQDKAGRGIYRKTVKQECVLKADGTCHCSCAKPKLLHRPCIHVIAAAAECGIPDAVYVSQYFSKQAIYHTWSGEIYGFGIAGEFTETNNEVLNIPDPSKLRGKAGRRRTRRIRNDMDXWEAGRVKRCSKCDEHGHTYKHCPKDKEKPSAAEAGLSGSAADGARPDTPQLLDPAIDHRHRSHLTAVQGAQLGTFRARTCGELLTVHDSFVERLHEVGLLPMCRLVEAAAGDADPARRWTVDRSLLAALVDRWRPKTHTFHLPCGEVAPTLQDVSYLLGLPLARDTVGPVTTAVDWQDDMTARFALVQRAPHLPLEPLAHHRNTGPTKRWLLQFTVEQLQAEADEYSYSHCLEAYLLXLFGWVMFCGGHGHAVDKGLVHYARSIADATVGEVPQWSWGSALLAALYRALCEACTKTDPSATFGGCPLFLSIWAAERIVIGRPEVDQHAYESLYEERPEVDYPTMGTLWCRRQRRWAHVQVRRSYPEFVMEFDRLLPTDVVWXPTVPRLPKLVRHWFGFRQPFPVPFPTTVPAAVHRYSRKGQQSAGDWPAKLATFIEDWLLATEEVVDHEGEPHTEEAYQAYLRWYQPRTRTRVTFAPLEQQPHVASTRDLYARNRDQDFARAVNDINRVVVDGSTMIQRLGAGIPVPVEEHLTTYTRMVESMRSILRVLTCRADDVARADAAIQRPPIPTGPHLAAHVPRPTPLPHGGFAQFAMTQAAHFSQAAGSASQEAASTSHSAQFWQYTETSSQAAGTSSQGPPLDRAGTSSDRLLPSTLLFDITDFDFASGSTEDVIGPSQLGGAPPVQTQDRRRPLLRGTLVLPMLCHRIVSPTPRTTCEHRPGGPSV

SEQ ID NO: 183534 - protein, 1329 aa, Oryza sativa
  unsure (1)..(1329): unsure at all Xaa locations
  Clone ID: PAT_MRT4530_80616C.1.pep
MSNKQIFQVYHGPGNVRYGPTGVDLSDFIVSERGIDRPAERSVPSIKGWLMKGLRVDPQTSDITINVIVSRATEGFYWELMPVQNSRVWRWYLENALQRGWPLALVPFVHPKDPGVQMNMDDGEGPSAEVNETSVEEVNAREDGGVVAPVGIQPGGVADEGETVGAIVDEIERENSDNERVEEGDSLDDETDINPAEWASEDFSGLIVSEEDSVRWEYKENEVIQGAIYSRAEDMKEAVKHFAVSLHREFWVAKSNRSQYEVRNITCAFVASEMYAHVIDNLTYEPRSIIRHIEETYKYTISYAKAWRAKQKIIEMRFGTYEASYDNLPRLLGVIEERNPGSSYEVKKFPSIEYPSKSVLQRAFLALHVCKMAFVNCRPVLCIDGTFLTGKYRGQILTAIGVDGNNQVLPLAFAFVESENTDSWYWFLKLVKTKVVGMRPNVCLIHDRHAGILRVIEELQFGSMERGYPGVWEDVQSRWCMRHMGANFFKQFKNKELMNMFKRLCNQNQEKKFNELWKRLDELTAKCSDQRAAAPSTAVADPPQALGPLPTDSPTLVRRTGLEIRKFSQWILHEPKEKWAKAYDTGGARYGIMTTNLAEVYNWVMRGVRGLPLVGIVEFILHGTCRYFRDRFQAVLPSMPNNSILFGAFMQKKLEELRKKAMKHRALVQGTQQHRPCTHVIAAAAECGIPDAVYVSQYFSKQAIYHTWSGEIYGFGIAGEFTETNDEVLNIPDPSKLRGKAGRRRTRRIRNDMDESEAGMVKRCSKCDEHGHTYKHCPKDKEKPSATEAGLSGSAADGARPTEMARQDTPQLLDPAIDHRHRSHLTTVQGAQLGTFRARTCGELLTVHDSFVERLREAGLLPMRRLVEAAAGDADPARRWTVDRSLLAALVDRWRPKTHTFHLPCAERIAIGRPEVDQHAYEESLYEERPEVDYPTMGTLWCRRQRRWAHVQVRRSYPEFVMEFDRLLPTDVVWXPTVPRLPRLMRRWFGFRQPFPVPFPTTVPAAVHRYSRKGQQSAGDWPAKLATFVEDWLLATEEVMDHEGEPHTEESYQAYLRWYQPRTRTRVTFAPLEQQPHVASTRDLYARHRDQDFARAVDDINRVVVDGSTTIQRLGAGIPVPVEEHLTTYTRMVESMRSILRVLTCRADDIARADVAVQRPPVPTSPHPAAHVPRPTPPPHGGFRFAQFAMTQAAHFSQAAGSASQAAVSTSHSAQFWQYTGTSSQAAGTSSQGPPLDHAGTSSDRLLPSTLLFDITDFDFASGSTEDIIGPSQLGGAPPVQTQDQAQATPPRDTRATRAMPPDRFTYSQDHVRAQARRTKRGRGAGQGQ

SEQ ID NO: 183535 - protein, 1456 aa, Oryza sativa
  unsure (1)..(1456): unsure at all Xaa locations
  Clone ID: PAT_MRT4530_80617C.1.pep
MSNKQIFQVYHGPGNVRYGPTGVDLSDFIVSERGIERPAERSVPSIKGWLMRGLRVDPQTSDITINVIVSRATESFYWELMPVQNSRVWRWYLENTLQRGWPLALVPFVHPKDPGVQTNMDDGEGPSAEVNETSVEEVNAREDGGVVAPVGIQPGGVADEGETVGAIVDEMEREDSDNERVEEGDSSDDETDINPAEWASEDFSGLIVSEEDSVRWEYKENEVIQGAIYSRAEDMKEAVKHFAVSLHREFWVAKSNRPQYEVRCVKEKDGCPWRVHAYKGKWKDYWTVSVVTKHTCFLPGVQKYHRNITCAFVASEMYVHVIDNLTYEPSYAKAWRAKQKIIEMRFGTYEASYDNLPRLLGVIEERNPGSSYEVKKFPSIEHPGKSVLQRAFLALHACKMAFVNCRPVLCIDGTFLTGKYRGQILTAIGVDGNNQVLPLAFAFVESENTDSWYWFLKLVKTKVVGMRPNVCLIHDRHAGILRAIGELQFGSMERGYPGVWEDVQSRWCMRHMGANFFKQFKNKELMNMFKRLCNQNQEKKFNEFWKRLDELTAKCSDQRAAAPSTAVADPPQALGPLPTDSPTLVRRTRLEIRKFSQWILHEPKEKWAKAYDTGGARYGIMTTNLAEVYNWVMRGVRGLPLVGIVEFILHGTCRYFRDRFQAVLPSMPNNSILFGAFMQKKLEELRKKAMKHRALVQGTQQHRFEILCQDKAGRGIYRKRVKQECVLKDDGTCHCSCAKPKLLHRPCTHVIAAAVECGIPHTVYVSQYFNKQAIYHTWSGEIYGFGIAGEFTETNDEVLNIPDPSKLRGKAGRRRTRRIRNDMDESEAGRVKRCSKCDEHGHTYKHCPKDKEKPSAAEAGLSGSAADGARPTEMARQDTPQLLDPAIDYRHRSHLTAVQGAQLGTFRARTCGELLTVHDSFVERLREAGLLPMCRLVEQLQAEADEYSYSRCLEAYLLWLFGWVMFCGGHGHAVDKGLVHYARSIADAAVGEVPQWSWGSALLAALYRALCESCTKTDPSATFGGCPLFLSIWATERIAIGRPEVDQHAYEESLYEERPEVDYPTMGTLWCRRQRRWAHVQVRRSYPEFVMEFDRLLTTDVVWEPYSAAATQARAPLGLSTLCTRDQAYWMTTVPMVFDICVEPHAPFRVMRLFGFRQPFPVPFPTTVPAAVHRYSRKGQHSAGDWPAKLATFVEDWLLATEEVVDHEGEPHTEESYQAYLRWYQPRTRTRVTFAPLEQQPHVASTRDLYARHRDQDFARVVDDINRVVVDGSTTIQRLDAGIPXDVARADAAVQRPPVPTGPRPAAHVPRPTPPPHGGFRAPFSTPPSSARPSVVPPTGXHFSQAAGSASQAAGTSSQGPPLDHAGTSSDPFLSSTVLFDITDFDFASGSTEDVIGPSQLGGAPPVQTQDQAQATPPRDTRATRAVPPDRFTFSQDHVRAQARRTKRGRGAGQGQ

SEQ ID NO: 183536 - protein, 1245 aa, Oryza sativa
  unsure (1)..(1245): unsure at all Xaa locations
  Clone ID: PAT_MRT4530_80618C.1.pep
MSNKQIFQVYHGPGNVRYGPTGVDLSDFIVSERGIDRLAERSVPSIKGWLMRGLRVDPQISDITINVIMNMDDGEGPSAEVNETSVEEVNAREDGGVVAPVGIQPGGVANEGETVGAIVDEMEREDSDNERVEEGDSSDDETDINPAEWASEDFSALVVSEEDSVRWEYNENAVIQGAIYSRAEDMKEVVKHFAVSLHREFWVAKSNRSQYEVRCVKEKDGCPWKVHAYKGKWKDYWTVSVVTKHTCYLPGVQKYHRNITCAFVASEMYAHVIDNLTYELRKESGLDTNNNRGGNNQVLPLAFAFVESENTDSWYWFLKLVKTKVVGMRPNVCLIHDRHAGILRAIEELQFGSMERGYPGEWEDVQSRWCMRHMGANFFKQFKNKELMNMFKRLCNQNQEKKFNELWKRLDELTAKCSDQRAAAPLTADADPPQTXGPLPTDSPTLVRRTGLEIRKFSQWILHEPKEKWAKAYDTXKLEELRKKAMKHRALVQGTQQHRFEILCQDKAGRGIYRKRVKQECVLKADGTCHCSCAKPKLLHRPCTHVIAAVAECGIPDAVYVSQYFSKQAIYHTWSGEIYGFGIAGEFIETNDEGLNIPDPSQLRGKAGRRKTHRIRNDMDESEAGRVKRCSKCDERGHTYKHCPKDKEKPSAAEAGLSGSTTDGARPTXMARQDTTQLLDPVIDHQHRSHLTAVQGAQLGTFRERTCGXREAGLLPMCRLVEVAAGDADPARRWTVDRSLLAALVDRWRPETHTFHLPCGEVEQLQAEADEYTYSRCLEVYLLWLFGWVMFCGGHGHAVDKGLVHYARSIADAAVGEVPQWSWGSALLAALYRGLCEACTKTDPSVTFGGCPLFLSIWAAERIAIGRPEVDQHAYEESLYAERPEVDYPTMCTLWCHRQRRWAHVQVRWSYPEFVMEFDRLLPTDVLWEPYSAAATQARAPLGLSTLCTRDQALIRSYSRKGQQSAGDWPAKLATFVEDWLLATEEVVDHEGEPHTEEAVTFAKSLEKQPHVASTRDLYARHRDQDFARAVDDINRVIVDGSTMIQRLGAGIPXDVARADAAVQRPPVPTGPRPAAHVPRPTPPPHGGFRAPFSTPPSSARPSVVPPTGXHFSQVAGSASQAAASTSHSAQFWQYTGTSSHAAGTSSQGPPLDHAGTSLDRLLPSTLLFDITDFDFASGLTEDVIGPSQLGGAPPVQTQDQALATPPPDTRATRVVPPDRFTYSHDHVRAQAWRTKRGRGAGQGQ

SEQ ID NO: 183537 - protein, 325 aa, Oryza sativa
  Clone ID: PAT_MRT4530_80619C.1.pep
MPPPPPMMPTGGYPGHRGCGGDRCGSGRDAWPLHNVRHQGVFCRLCSSCVLLYHPAAFCSACLLLLPPAAAPVAAPPGPVSACSSCGLFVAHHSCVPDPVSFVCPTCADAAVGRVYSYTPAAAAGRRRTMDERAARVLLVAARLAHESISRAAAAAREEADRAAREAAVARKHARELLDAACRAAEPEALEAKKKAEAPVAPAAAPPPPPPQPKKKAPPKSSEASRDRDNKPLKLTATQQPALAFAAAAAAAASSMPLSMPSPMEVDEKPVIEELQGSGDGSLIYDRGSLFGTLQRFASLSSPCVCDVGIGLGWLDRPTSSEQIF

SEQ ID NO: 183538 - protein, 71 aa, Oryza sativa
  Clone ID: PAT_MRT4530_8061C.1.pep
MPEGLSDDDGAVDGPAMHRGGRNAEMVLTVAQRARSGVTEDRDDGELCLTTYGNSSFLAADDEEDGEEDDM

SEQ ID NO: 183539 - protein, 83 aa, Oryza sativa
  Clone ID: PAT_MRT4530_80620C.1.pep
LPLIHSSTKLPPTIGNSCIEIFVETSYRLCESVCSLITQLIHQDSKDGAAHSTIDKARTSSLLLRKSLTYLVEVCILPIPIPL

SEQ ID NO: 183540 - protein, 1489 aa, Oryza sativa
  Clone ID: PAT_MRT4530_80621C.1.pep
MPVQNSRVWRWYLENALQRGWPLALVPFVHPKDPGVQMNMDDGEGPRAEVNETSVEEVNAREDGGVVAPVGIQPGGVADEGETVGAIVDEMEREDSDNERVEEGDSSDDETDINPAEWASKDFSGLIVSEEDSVRWEYKENEVIQGAIYSRAEDMNEAVKHFAVSLHREFWVAKSNRSQYEVRCVKEKDGCPWRVHAYKGKWKDYWTVSVVTKHTCFLPGVQKYHRNITCAFVASEMYAHVIDNLTYEARSIIRHIEETYKYTISYAKAWRAKQKIIEMRFGTYEASYNNLPRLLGVIEERNPGSSYEVKKFPSIEHPSKSVLQRAFLALHACKMAFVNCRPVLCIDGTFLTGKYRGQILTAIGVDGNNQILPLAFAFVESENTDSWYWFLKLVKTKVVGMRPNVCLIHDRHAGILRAIEELQFGSMERGYPGVWEDVQSRWCMRHMGANFFKQFKNKELKNMFKRLCNQNQEKKFNELWKRLDELTAKCSDQRAAAPSTAVADPPQALGPLPTDSPTLVRRTGLEIRKFSQWILHEPKEKWAKAYDTGGARYGIMTTNLAEVYNWVMRGVRGLPLVGIVEFILHGTCRYFRDRFQAVLPSMPNNSILFGAFMQKKLEELRKKAMKHRAVVQGTQQHRFEILCQDKAGRGIYRKRVKQECVLKADGTCHCSCAKPKLLHRPCTHVIAAAAECGIPDAVYMSQYFSKQAIYHTWSGKIYGFGIAGEFTETNDEVLNIPDPSKLRGKAGRRRTRRIHNDMDETEASKVKRCSKCDEHGHTYKHCPKDKEKPSAAEAGLSGSAADGARPTEMACQDTPQLLDPAIDHRHRSHLTAVQGAQLGTFRARTCGELLTVHDSFVERLREAGLLPMCRLVEAAAGDADPARQWTVDRSLLAALVDRWRPETHTFHLPCGEVEQLQAEADEYSYSRCLEAYLLWLFGWVMFCGGHGHAVDKGLVHYARSIADAAVGEVTQWSWGSALLAALYRALCESCTKTDPSATFGGCPLFLSIWAAERIAIGRPEVDQHAYEESLYEERPEVDYPTMGTLWCRRQRRWAHVQVRRSYPEFVMEFDRLLPTDVVWEPYSAAATQARAPLGLSTLCTRDQAYWMTTVPMVFDICVEPHAPFRVMRQFGFRQPFPVLFPTIVPAAVHRYSRKGQQSAGDWPAKLATFVEDWLLATEEVVDHEGEPHTEESYQAYLRWYQPRTRTRVTFAPLEQQPHVASTRDLYARHRDQDFARAVDDINRVVVDGSTTIQRLGAGIPVPVEEHLTTYTRMVESMRSILRVLTCRADDIARADAAVQRPPVPTGPRPAAHVPRPTPPPHRGFRAPFSTPPSSARPSVVPPTGFAQFAMTKAAHFSQAAGSASQAAVSTSHSAQFWQYTGTSSQAAGTSSQGPPLDHAGTSSDRLLPSTLLFDITDFDFASGSTEDVIGPSQLGGAPPVQTQDQAQATPPRDTRATRAVPPDRFTYSQDHVRAQARRTKRGRSAGQGQ

SEQ ID NO: 183541 - protein, 130 aa, Oryza sativa
  unsure (1)..(130): unsure at all Xaa locations
  Clone ID: PAT_MRT4530_80622C.1.pep
ATRTVCHSLGGGTGSVMGSLLIFEITRRGGRRMMLTFSVFPSPTVXDTDDEPYNATLSVHHSEENADECMDLDNEALYDICLRTIKLTTDSYGYLNHLISATTKGVTCXLRLPGQLNYDLRKLAANLIPF

SEQ ID NO: 183542 - protein, 1527 aa, Oryza sativa
  unsure (1)..(1527): unsure at all Xaa locations
  Clone ID: PAT_MRT4530_80623C.1.pep
MSNKQIFQVYHGPGNVRYGPTGVDLSNFIVSERGIDRPAERSVPSIKGWLMRGLRVDPQTSDITINVIVSRATEGFYWELMPVQNSRVWRWYVENALQRGWPLAMVPFVHPKDPCVQMNMDDGEGPSAEVNETSVEEVNAREDGGVVAPVGIQPGGVADEGETVGAIVDEMEREDSDNERVEEGDSSDDETDINPAEWASEDFSGLVVSEEDSVRWEYKENEIIQGAIYSRAEDMKEAVKHFAVSLHREFWVAKSNRCVKEKDGCPWRVHAYKGKWKDYWTVSVVTKHTCFLPGVQKYHRNITCAFVASEMYAHVIDNLTYEPRSIIRHIEETYKYTISYAKAWRAKQKIIEMRFGTYEASYDNLPRLLGVIEERNPGSSYKVKKFPSIEHPGKSVLQRAFLALHACKMAFVNCRPVLCIDGTFMTGKYRGQILTAIGVDGNNQVLPLAFAFVESENTDSWYWFLKLVKTKVVGMRPNVCLIHHRHAGILRAIEELQFGSMERGYPGEWEDVQSRWCMRHMGANFFKQFKNKELMNMFKRLCNQNQEKKFNELWKRLDELIAKCSDQRAAAPSTTDADPPQALGPLPTDSPTLVRRTGLEIRKFSQWILHEPKEKWAKAYDTGGARYEIMTTNLAEVYNWVMRGVHGLPLVGIVEFILHGTCRYFRDRFQAVLPSMPNNSILFGTFMQKKLEELRKKAMKHRALVQGTQQHRFEILCQDKAGRGIYRKRVKQECVLKADGTCHCSYAKPKLLHRPCTHVIAAAAECGIPDAVYVSQYFSKQAIYHTWSGEIYGFGIAGEFIETNDEVLNISDPSKLRGKAGRRKTRRIRNDMDESEAGRVKHCSKCDERGHTYKHCPKDKEKPSVAEAGLLGSAADGARPTEMARQDTPQLLDPAIDHRHQSHLTAVQGAQLGTFRARTCGELLMVHDSFVERLREAGLLPMCRLVEAAAGDADPARRWTVDRSLLAALVDRWRPETHTFHLPCGEVAPILQDVSYLLGLPLAGDDVGPVTTGVDWQDDLTARFALVQRAPHLPLEPLAHHRNTGPMKRWLLQFSIEQLQAEADEYSYSRCLEAYLLWLFGWVMFCGGHGHAVDKGLVHYARSIADAAVGEVPQWSWGSALLAALYRGLCEACTKTDPSATFGGCPLFLSIWAAERIAIGRPEVDQHAYEVSLYAERPERRWAHVQVRRSYPEFVMEFDRLLPTDVVWEPYSAAATQPQAPLGLSTLCTRDQAYWMTTVPMVYDICVEPHAPFRVMRQFGFRQPFPVPFPTTVPAAVHRYSRKGQQSAGDWPAKLATFVEDWLLATEEVVDHEGEPHTEEAYQAYLRWYQPRTRTRVTFAPLEQQPHVASTRDLYARHRDQDFARAVDDINRVVIDGSTTIQRLGAGIPXNVTRADAAVQRPPVPTGPRPTAHVPRPTPPPHGGXGTSSQGPPLDHAGTSSDRLLPSTLLFDITDFDFASGSTEDVIGPSQLGGAPLVQTQDQAQATPPPDTRATRAVPPDRFTYSQDHVRAQARRTKRGRGVGQGQ

SEQ ID NO: 183543 - protein, 751 aa, Oryza sativa
  unsure (1)..(751): unsure at all Xaa locations
  Clone ID: PAT_MRT4530_80624C.1.pep
MELGRPGCPVDRLPDSPRHERGAARCLLGTGANPKGFNTQNSLEIWAKFLGVTILHEPKEKWAKAYDTGGASYGIMTTNLAEVYNWVMHGVRGLPLVGIVEFILHGTCRYFRDRFQAILPSMPNNSILFGTFMQKKLEELRKKAMKHRALVQGTQQQRFEILCQDKAGRGIYRKRVKQECVLKANGTCHCSCAKPKLLHRPCTHVIAAAAECGIPDAVYVSQYFSKQAIYHTWSSEIYGFGIAGEFTETNDEVLNIPDPSKLRGKARRRRTRRIRNDMDESDAGRVKHCSKCDERGHTYKHCPKDKEKPNAAEAGLSGSAVDGARPTDGTSGYTSVVGPGDRSPTPXVLPYCGTGGSXWDVPGTDVRLREAGLLPMCRLVEAAAGDVDPARRWTVDRSLLAALVDRWRPETHTFHLPCGEVAPTLQDISYLLGLPLAGDAVRPVTTGVDWQDDLTARFALVQRAPHLPLEPLAHHRNTGPTKRWLLQFTVEQLQAEADEYSYSRCLEAYLLWLFGWVMFCGGHGHGYKSYRLSSMARRRGVEDPNWRSDPCVYLLPPWCQRPLCLCGDRCQLMASRNPDIRGRHFFRCPNYDRETRTTACAYIEWVDTENPVLDLTTCLQEGRWYFASESTEQYLQRKAAYERQCREQQSDWRVLTTALPPWEARPRCRCGDRCQVLRSIKPTTLGRRFFVCLNILDDDFMEPPRRCQYREWIDTRRVLTPPSHVVQXELPEQYRVTKARFERGEGSSRRG

SEQ ID NO: 183544 - protein, 147 aa, Oryza sativa
  Clone ID: PAT_MRT4530_80625C.1.pep
MASARGRAAPWARALVARHAAERRNEPLLRRIMGGDVYERAVSSAGAAVARSRRIVRRSQRVACSSRRKRRSLAMAAASGGGGALAARRMVKGRLRLLRRLVPGGEALRGFSLLSETLDYVVCLKTQVELMHSLCKGSQQKLHLQLG

SEQ ID NO: 183545 - protein, 1326 aa, Oryza sativa
  unsure (1)..(1326): unsure at all Xaa locations
  Clone ID: PAT_MRT4530_80626C.1.pep
MSNKQIFQVYHGPGNVRYGPTEVDLSDFIVSERGIDRPAERSVPSIKGWLMKGLRVDPQTSDITINVIDPGVQMNMDDGEGSSAEVNETSVEEVNAREDGGVVAPVGIQPGGVADEGETVGAIVDEMEREDSDNERVEEGDSSDDETDINPAEWASEDFSGLIISEEDSVRWEYKENEKYHRNITCAFVASEMYAHVIDNLTYEPRSIIRHIEETYKYTISYAKAWRAKQKIIEMRFGTYEASYDNLPRLLGVIEERNPGSSYEVKKFPSIEHPSKSVLQRAFLALHACKMAFVNCRPVLCIDGTFLTGKYRGQILTAIGVDVNNQVLPLAFAFVESENTDSWYWFLKLVKTKVVGMRPNVCLIHDRHAGILRAIEELQFGSMERGYPGVWEDVQSRWCMRHMGANFFKQFKNKELMNMLKRLCNQNQEKKFNELWKRLDELTAKCSDQHAAAPSTAVADPPQALGPLPTDSPTLVRRTGLEIRKFSQWILHEPKEKWAKAYDTGGARYGIMTTNLAEVYNWVMRGVRGLPLVGIVEFILHGTCRYFRDRFQAVLPSMPNNSILFGAFMQKKLEELRKKAMKHRALVQGTQHYRFEILCQDKTSRGIYRKRVKQEPCTHVIAAATECGIPDAVYVSQYFSKQAIYHTWSGEIYGFGIAGEFTETNDEVLNIPDPSKLRGKAGRRRTRRIRNDMDESEAGRVKRCSKCDEHGHTYKHCSKDKEKPSAAEAGLSGSVADGARPTEMARQDTPQLLDPAIDHRHRSHLTAVQGAQLGTFRARTCGELLTVHDSFVERLREAGLLPMCRLVEAAAGHADPARRWTVDWSLLAALVDRWRPETHTFHLPCGEVEQLQAEADEYSYSRCLEAYLLWLFGWVMFCGGHGHAVDKGLVHYARSIADAAVGEVPQWSWGSALLVALYRALCESCTKTDPSATFGGCPLFLSIWAAERIAIGRPKVDQHAYEESQYEEQPERRWAHVQVRRSYPEFVMEFDRLLPTDVVWEPYSAAATQARAPLGLSILCTRDQAYWMTTVPMVFDICVEPHAPFRVMRQFGFRQPFPVPFPTTVPAAVHRYSRKGQQLADDWPAKLATFVEDWLLATKEVVDHEGEPHTEESYQAYLRWYQPRTRTRVTFAPLEQQPHVASTRDLYARHHDQDFARSXDVARADAAVQRPPVPTGPRPAAHVPRPTPPPHGGXHFSQAAGSASQAAASTSHSAQFWQYTGTSSPAAGTSSQGPPLDHAGTSSDRLLPSTLLFDITDFDFASGSTEDVIGPSQLGGAPPVQTQDQAQATPPRDTRATRAVPPDRFTYSKDHVRAQARRTKRGRGAG

SEQ ID NO: 183546 - protein, 1428 aa, Oryza sativa
  unsure (1)..(1428): unsure at all Xaa locations
  Clone ID: PAT_MRT4530_80627C.1.pep
MSNKQVFQVYHGPGNVRYGPTGVDLSDFIVSERGIDRPAERSVPSIKGWLIKGLRVDPQTSDITINVIVSRATEGFYWELMPVQNSRVWRWYLENALQRGWPLALVPFVHPKDPGGVADEGETVGAIVDEMEREDSDNERVEEGDSSDDETDINPAEWASEDFSGLIVSEEDSVRWEYKENEVIQGAIYSRAEDMKEAKYHRNITCAFVASEMYVHVIDNLTYEPRSIIRHIEETYKYTISYAKERNPGSSYEVKKFPSIEHPSKSVLQRAFLALHACKMAFVNCRPVLCIDGTFLTGKYRGQILTAIGVDGNNQVLPLAFASVESENTDSWYWLLKLVKTKVVGMRPNVCLIHDRHAGILRAIEELQFGSMERVYPGVWEDVQSRWCMRHMGANFFKQFKNKELMNMFKRLCNQNQEKKFNELWKRLDELTAKCSDQRAAAPSTAVAEPPQALGPLPTDSPTLVRKTGLEIRKFSQWILHEPKEKWGKAYDIGGARYGIMTTNLTEVYNWVMRGVRGLPLVGIVEFILHGTCRYFRDRFQAVLPSMPNNSILFGAFMQKKLEELRKKAMKHRAVVQGTQQHRFEILCQDKAGRGIYRKRVKQECVLKADGTCHCSCAKPKLLHRPCTHVIAAAAECGIPDAVYVSQYFSNQAIYHTWSGEIYGFGIAGEFTETNDEVLNIPDPSKLRGKAGRRRTRRIRNDMDESETGRVKRCSKCDEHGHTYKHCPKDKEKPSAAEAGLSGSAADGARPTEMGAQLGTFRARTCGELLTVHDSFVERLREAGLVPMCRLVEAAAGDADPARRWTVDRSLLAALVDRWRPETHTFHLPCGEVAPTLQDVSYLLGLPLARDAVGPVTTAVDWQDNLMARFALVQRAPHLPLEPLAHHRNTGPTKRWLLQFTVEQLQAEADEYSYSRCLEAYLLWLFGWVMFCGGHGHAVDKGLVHYARSIADAAVGEVPQWSWGSALLAALYRALCESCTKTDPSATFGGCPLFLFIWAAERIAIGRPEVDQHAYEESLYEERPEVDYPTMGTLWCRRQRRWAHVQVRQSYPEFVMEFDRLLPTDVVWXPTVQRLPRLVRRWFGFRQPFPVPFPTTVPAAVHRYSRKGQHSAGDWPAWPAKLATFVEYWLLTTEEVVDHEGEPHTEESYQAYLRWYQPRTRSRVTFAPLEQQPHVASTRDLYARHHDQDFARAVDDINRVIVDGSTTIQRLGAGIPVPVEEHLTTYTRMVESMRSILRVLTCRADDVARAHAAVQRPPVPTGPRPAAHVPRLTPPPHGGFRAPFSTPPFSARPSVVPPTGSASQAAVSTSHSAQFWQYTGTSSQAAGTSSQGPPLDHAGTSSDRLLPSTLLFDITDFDFASGSTEDVIGPSQLGGAPPVQTQDQAQATPPRDTRATRAVLPDRFTYSQDHVRAQARRTKRGRGAGQGQ

SEQ ID NO: 183547 - protein, 739 aa, Oryza sativa
  unsure (1)..(739): unsure at all Xaa locations
  Clone ID: PAT_MRT4530_80628C.1.pep
MGQYHAGRSKAAPCRPLAGRKASLPIKGLPPSPQPSFLPSNPVKKNKKKGEEKRRRGEALPDSDADFRGIDRPAERSVPSIKGWLMRGLRVDPQTSDITINVIMNMDDGEGPSAEVNETSVEEVNAREDGGVVAPVGIQPGVVADEGETVGAIVDEMEREDSDNERVEEGKYRGQILTAIGVDGNNQVLPLAFAFVESENTDSRYWFLKLVKTKIVGMRPNVCQIHDRHAGILRAIEELQFGNMEQGYPGEWEDVQSRWCMRHMGANFFKQFKNKELMNMFKRLCDQNQEKKFNELWKRLDELTAKCKTNDEVLNIPDTSKLRGKAGRRKTRRIRNDMDESEAGXGLSGSTADGARPTDXALPPLDHVLGVVVPPERIAIGRPEVDQHAYKESLYAERPEVDYPTIGTLWCRRQRRWAHVQVRRSYPEFVMEFDRLLPTDVVWEPYSAAATQARAPLGLSTVCTRDQAYWMTTVPMVFDICVEPHAPFRVMRQFGFCQPFPQSAGDWPAKLATFVEDWLLTTEEVVDHEGEPHTEEAYQAYLRWYQPRTRTRVTFAPLEQQPHVASTRDLYARHRDQDFARAXDVARADAAVQRPPVPTGPRPAMHVPRPTPPPHGGFRAPFSTPPSSARPSVVPPTGXHFSQAAASVSQAAASTSHSVQFWQYTGTSSQAAGTSKDVIGPSQLRGAPPVQTQDQAQATPPPDTRATRAVPPDRFTYSQDHVRAQARRTKRGRGAGQGQ

SEQ ID NO: 183548 - protein, 48 aa, Oryza sativa
  Clone ID: PAT_MRT4530_80629C.1.pep
RAHIACQEAGRASIRLTFLQRLQYSLSSLTFGSVSDNNMHTCVLTWVF

SEQ ID NO: 183549 - protein, 86 aa, Oryza sativa
  Clone ID: PAT_MRT4530_8062C.1.pep
LLHGPFPPPVGIFKTLFGKPLGFSGKTRFPTFVEGHFISWLWSFCWEYAILPLPIASLLLLIAFTSPSWFGLWSSPAEYPYANGKK

SEQ ID NO: 183550 - protein, 73 aa, Oryza sativa
  Clone ID: PAT_MRT4530_80630C.1.pep
RKRRQIRQKVFSIEVKQPPMVFKVVSNTRYPQTGYMRNWCKSTPPIKGRALNHACVPAHICAKYPCSFGINCP

SEQ ID NO: 183551 - protein, 94 aa, Oryza sativa
  Clone ID: PAT_MRT4530_80631C.1.pep
MAMAVLLRKVWGSVLARAAAGAVPAEAFAGVAYPSRPQAGGEYGSLGALDVILIDVLPQILCLLRHADAARFTDGCQAWRLVAFDNGLWDFSIL

SEQ ID NO: 183552 - protein, 66 aa, Oryza sativa
  Clone ID: PAT_MRT4530_80632C.1.pep
LFSPSKYLTYGRCKENTYYFSRDDMDVNLIDQHYITTCNRKKNIGSSEEFPTWNFDVYASPHRSAN

SEQ ID NO: 183553 - protein, 407 aa, Oryza sativa
  Clone ID: PAT_MRT4530_80633C.1.pep
LSAPRQTKKNQSLIIGVSAGGAFVVVSLLVLFTVLFFRRNKRPKLQPQPRSPSYASWDIKSTSISTPHLQGARVFTFDELKKITNSFSDANDIGTGGYGKVYRGVLPNGHLIAVKRSEQGSLQGNLEFRTEIELLSRVHHKNLVSLVGFCFDQGEQMLVYEYVPNGTLKDSLTGKSGVRLDWKRRLRVVLGAAKGIAYLHELADPPIVHRDIKSSNILLDGNLHTKVSDFGLSKPLNQDGRGQVTTQVKGTMGYLDPEYYMTQQLTEKSDVYSFGVLLLEVITARKPLERGRYIVREVKGAMDRTKDLYGLHELLDPMLAPTSLAGFELYVDLALKCVEEAGMDRPSMSEVVAEIEKIMKMAGVNPKVDSASNSMSYNSRTPRHPYSGESQFDYSGGIPSSSRVEPK

SEQ ID NO: 183554 - protein, 650 aa, Oryza sativa
  unsure (1)..(650): unsure at all Xaa locations
  Clone ID: PAT_MRT4530_80634C.1.pep
MGLASDSPASFPFSAAKLAASPRVCNPISRRIFSDVAGDLTVSVDGQSFLLHKFPLVSRCGRIRRMVAESKDPDLSKLELVNVPGGALAFELAAKFCYGSNFEINTVNVAHLRCIAEYLEMTEVYQXLEAEQWGWPATALRRSPSXAVKLAASPRLCNPISRRIFSDVAGDLXVDAIAINASKEQLVSGLAHLECDVGSGKLRMHCQDWWVEDLSALRIDYYQRVIIAMRRTGVRPESIGTSIVHYAQTALKGIERRHVWDSGPLVGDNQRVIVETLIDLLATEKITSVTLSFLFGMLRMAIEVDAGLDYRIEVEKRIGLQLEMASLDDLLIPATQTSDSMFDVDTVHRILVNFLQRIEEDDSGNLSPCGYESDDGLKSPSHSSVLKVGRLMDGYLAEIAPDPYLKLQKFMALIELLPDYARIVDDGLYRAIDIYLKAHPSLMESECKKVCKLIDCQKLSQDASSHAAQNDRLPIQTVVRVLYFEQLRLKSTVSSTTPHTTSLGGDGCGGSLSQRMMMTGGSGVASSCVSPQRDNYASLRRENRELKLEIARMRVRLTELEREQGVMRQGMRDGRGGGEHGRALLASISRGIGRIAMLGGAQGGAERRRKTKTKKSSHSQSQWSSDGGGKTMMMSNRRRHKASSVTYAAS

SEQ ID NO: 183555 - protein, 43 aa, Oryza sativa
  Clone ID: PAT_MRT4530_80635C.1.pep
TRFILPHLTALKRGDLYKSASVLHTPNPAYHQVRGCSFNPGMS

SEQ ID NO: 183556 - protein, 565 aa, Oryza sativa
  Clone ID: PAT_MRT4530_80636C.1.pep
MSKGAIIGASTVLVVAVVAAVCVVSFKNGSSNAKEDGELSTSVKSIKSFCQPVDYRETCETTLEQTAGNATNPTDLAKAIFKATSERIEKAVRESAVLNDLKNDPRTSDALKDCEELLDYAIDDLKTTFDKLGGFQTSNFKRAVDDVKTWLSSALTYQETCLDGFENSTSTEASEKMRKALKSSQELTENILAIVDQFADTLANLDITGFSRRLLGDDGVPVWMSNAKRRLLEATPGSKEFKPDVTVAADGSGDFKTINEALAKVPVKSTGTYVMYVKAGTYKEYVSVARNVTNLVMIGDGATKTIITGNKSFMLNITTKDTATMEAIGNGFFMRGIGVENTAGSKNHQAVALRVQSDQSAFYECQFDGHQDTLYTHTSRQYYRDCTITGTIDFIFGNAQVVLQNCRIQVRRCMDNQQNIVTAQGRKEKHSAGGTVIHNCTIEPHEDFKADAAKFKTFLGRPWKEYSRTLYIQSDIGGFIDPQGWLPWLGDFGLNTCYYAEVENRGDGADMSKRAKWRGVKTVTYQQAQQKYTVERFIQGQTWLPKFGVPFIPGLLPQEQSGRIH

SEQ ID NO: 183557 - protein, 60 aa, Oryza sativa
  Clone ID: PAT_MRT4530_80637C.1.pep
ETITQTQCPSIELKEYRWLHMLIDTNSTIPHSYTRNENERICTRIDSELIHCTVLTALHD

SEQ ID NO: 183558 - protein, 78 aa, Oryza sativa
  Clone ID: PAT_MRT4530_80638C.1.pep
TPNPLPSSYQTSREGMGVGLWREKGSCQGLRAAAAAALNCTPLVFCVYVQLSWMKMMNLAGCSFTSYAFMLNFDVLNY

SEQ ID NO: 183559 - protein, 77 aa, Oryza sativa
  Clone ID: PAT_MRT4530_80639C.1.pep
ATTKRDTTNDQTRQPLIHWGRQIGRLVNTYTVAALMDEDLLATTEAEHQVMCGLLTDVKSGTLLSYLSCLQAKMRRC

SEQ ID NO: 183560 - protein, 66 aa, Oryza sativa
  Clone ID: PAT_MRT4530_8063C.1.pep
SRSSLNEDSWSMAMDRSINQSVLSSPSARRHRASSSRYIEPVQLFMCVIARVNVRVVGRVDARVGV

SEQ ID NO: 183561 - protein, 234 aa, Oryza sativa
  unsure (1)..(234): unsure at all Xaa locations
  Clone ID: PAT_MRT4530_80640C.1.pep
MPCGYGVPIISTGGLREACGTGLYSTVIISFLTDFGGGNYKLNLAGHAWSAVGPDVKYCRSKGVLVLLSIGGGVGRYSLASQADAKAVADHLWNFYLGGTSTMSWPFGDAVLDGVDFDIELGSNAHYGDLARYLKAYSGRKPGGRKVWLTAAPQCPFPDRMLGEALRTGLFDRVHVQFYNNPVCNYRASNVAAFTSAWNKWAXALPGSSVYLSLPAASAAGNNGYGDSGTLKET

SEQ ID NO: 183562 - protein, 36 aa, Oryza sativa
  Clone ID: PAT_MRT4530_80641C.1.pep
VSQYVLRTFYGRLYDYVVLPLQSCGVYVIKNAVLCP

SEQ ID NO: 183563 - protein, 311 aa, Oryza sativa
  Clone ID: PAT_MRT4530_80642C.1.pep
MVKQLFPEARCQNWPPTAVQPMWKTVWETKSSCLREGVFRTTCDPRLIEALPPESHNARVAFLTPKSVSPEKMACVIHLAGTGDHSFERRLRLGGPLLKDNIATMVLESPYYGQRRPSMQHGSKLQCVSDLLLLGKATIDEARSLLYWLQNEAGYGKMGICGLSMGGVHAAMVGSLHPTPIATLPFLAPHSAVVPFCDGLYRHATAWDALRKDAATLAQDVTSLTEDMAQKSGITIEQVRERLRSVLSLTDVTRFPVPKNPQAVIFVGATDDGYIPKHSIMELQKAWPGSEWCSSVDAGPLDLQGQWMDVV

SEQ ID NO: 183564 - protein, 94 aa, Oryza sativa
  Clone ID: PAT_MRT4530_80643C.1.pep
MSPLLPCTWIQWAGPSPSTWILPPLPPLHRAWIRRCASTARRRNNDYGNGGRESLLDFLAAATGGAMGDMETGNGIGGGNDDDRCHTLKFSSQA

SEQ ID NO: 183565 - protein, 672 aa, Oryza sativa
  unsure (1)..(672): unsure at all Xaa locations
  Clone ID: PAT_MRT4530_80644C.1.pep
MKVARSTRAMEERDWSSLPLDVLAAILERLRWSSHPSVALTCRHWRSAPCXPFYPAWITPLLLSTARVGAANLRYYSPYYHKSFEVGDDEGGSPALGGVARGARICCASAGRHLALGMSGAVLDADLVTGVVRKVPHAHKDMFDFIIYSDDAHRMFGINAVLPLSVAYVNQNNDGDWEDWTLTEFDPTRPWLRASPITNPVIHRGLIYLLDEQGRLAVYDPCKHEEGFEILDKPMSFGIFKHYDSHNIYMFESDQDELMVVLVGQRGAPVHVVKLNENTMEWDKVDSLQGRALFTGTHASMMKKIELEWMQNRKVLLAPRKRGKQELCCCFFFILFLLPFVSVPSRLLLVSSLSVLHRLLRLLASRGVFSEHTSSSPRRFSLTTVSRTLVPAGGGSSAASYADYVLQHHQDELVRAWSLLHEAVLDPAGSEPFARANAGALTCEPVVPDTTDGSTRTRALLENDIFVMATYRTQGRERSEEEFRPRTACSRTHRREEPRLPGDGAGRRREAPAADRGRHVARATPKPGGPSGDSASGKSRAERPREREPTAGLGSAASTRRRHVARVTKAAVGGHGESRVGVVAWRLGDAWLGPGRRLGATEVDAARWRSEHWATVGRSPGASRQAGVGRGRRWLIEARRIRRRWRWEGRIWRPLPLPRRPQIPSPLRPPRA

SEQ ID NO: 183566 - protein, 1028 aa, Oryza sativa
  unsure (1)..(1028): unsure at all Xaa locations
  Clone ID: PAT_MRT4530_80645C.1.pep
MARGSAPLDGSVLPPSRIVSERQAGLPRRFMPESATGREIVSLGEGCPAPRYPGRSVFFLPFAMAGLVPPFSSFFMDVLEFYDLQMAHLTPNAVMTLAIFAHLCEMFIGVRPSLRLFRWFFTVQPVSPPSVVGGCYFQPRGPVLNRYIPCVLRKKWDDWKSDWFYTPLADEARLRLPSQPPAQASNWRAPVDLGDGYDAVLDRLAGLRSQGLTGAMVFGDYLRRRIAPLQRRARGAWEYTGSEDCMRTHRGVKWDWVPEDFKVMIQRVLNLSSAEASLIPQGVLPLCSDPDRANILSIIMAXGASEERAPKGHDGASGSHKGDQSTPGGGCASGPRDGGSGGSRPADARGKRKQEGTSSPSPPRGGGAARVSSRRPEGAAPTPQPEGERKKKRLRKMGGXQNHPGETSFPLQGGRLTDPLAGSSHAHCGCIHSSNTSFHSPILFVFWLFFCFSEIPSRPSCQFKSGQSEAENAATTEARRRESDRREAADRLREAEEAAQVAVRTRQAEEAAREEARLRQAEAATTSEAARDEAAGASLGPTPSGDAQDKPGPGDIPESGTSIGGPSRATSSPRRLSPTPSAAPLSAEPLLQALAVANTTVLDGLSAQMEALQAERVELDAAWARVEEGRRSVEAMVEVGRKAHRRHVSELEARRKMLGEIAREVEEERGAALIATTVMNEAQDDLRLQYGSWEAELGKKLDAARGVLDAAAARERRAAETERACVVERDLADREAAVAIREVTLAVHEAACAEEESALRLREDTLTERERALEEAEAAAQRLAESASLREAAQEEQARRNLESARAERAALNQRAAELEAQARKLDARARSGGAATGDSDLAARLAAAEHTIADLQGALDSSTGEVEALRLAGEIGPSMLRDAVSRLDRAGRQASLWGGRTVKYAANQGGLAQRLSEMAGTLQRLPEELEGTIKSSSRDLARGAVELVLASYQARDPDFSPWTALDEFPPGTEDGARAQVRDAADHIVHSFEGSAPRLAFALNSDEEGDDGGVGDSGDEAGDPGASE

SEQ ID NO: 183567 - protein, 102 aa, Oryza sativa
  Clone ID: PAT_MRT4530_80646C.1.pep
INAYSMQKQGAAVRGGNQYFFSACRRQQAEDQRMIFHKYLLMQKTYTGLRDPLSSSAGPKNLNIGDVIILLRDYQISLLTISYVRAMAAMQPCRVGYICPPG

SEQ ID NO: 183568 - protein, 967 aa, Oryza sativa
  unsure (1)..(967): unsure at all Xaa locations
  Clone ID: PAT_MRT4530_80647C.1.pep
MARGSAPLDGSVLPPSRIVSERQAGLPRRFMPESATGREVVALGEGRPAPHYPGRSVFFLSFAMAGLVPPFSSFFMDVLELYDLQMAYLTPNAVMTLAIFPHLCEMFIGVRLSLRLFRWFFTVQPVSPPSVVGGCYFQPRGQVLNRYIPCVLRKKWDYWKSDWFYTPLADEARLRLPSQPPAQASSWRAAVDLGDGYDAVLDRLAGLRSQGLTGAMVFGDYLRRRIAPLQRRVRGAWEYTGPEDIMRTHQGRKWDWDPEDFRMVVQRVLNLSSLEASLNPQGVLPLCSDPERANILTIMQAVXASGERAPRGHDGAGGSRRGEQSTPGGGRASGPRDGGPGGSRPADARGKRKQEDTPSPSPPRGGGAXEIPSRPSHHSKSGRSEAEETAIAEARRREADRREAADRLREAEEAAQEAVRARQAEEAAWEEARLRRTEESVRETEAARARWAACQAPDPTPPEVTTTSEATHDEAAGAPLGPDPSGDTWDEPASRDAPESGTSIGGPSRAAPTPRRLSPLSSAAPLSEEPFLQALAAANSTVLDGLSAQMEALQAERAELDTAWERVEEGRRSVEAMVEAGRKAHRRHTSQLEARRRELAEIAREVEEERETALIVTAVLDEARNDLRLQYGSRAAELEEKLDAARGVLDAAAAREWRAAEKEAASRQREEALEAAVATREATLAAHEAAYAEEESALRLREDALTERERALEEAEAAAQRLADSLFLREAAREEQARRNLEGARAERAALDQRAAELEARAKELDARAHSGGVAAGHGDLAARLAAAEHTIAELQGALDSSAGEVEALRLASEVGPGMLRDAVSCLDRAGRQAGLWGGRHAKYAANQGGLAQRLSEMAGVLQRLPEELEETIKSSSRDLARGAVELVLASYQARDPDFSPWAALEEFPHGTEDGARARVRDAADYIVHSFEGTAPRLAFALDSDEEGGDDGADDSGDEADGPGAPE

SEQ ID NO: 183569 - protein, 1033 aa, Oryza sativa
  Clone ID: PAT_MRT4530_80648C.1.pep
MARGSALLDGSVLPPSRIVSERHAGLPRRFMPESATGREIVMLGEGRPAPDYPGRSIFFLPFAMAGLVPPFSSFFMDVLEFYDLQMAHLTPNAVMTLAIFAHLCEMFIGVRPSLQLFRWFFTVQSVSPPSVVGGCYFQPRGPVLNRYIPCVLRKKWDDWKSDWFYTPLANEARLRLPSQPPAQVSSWRAPVDLGEDYDAVLDRLAGLRSQGLTGAMVYGDYLRRRIAPLQRRARSAWEYTGPEDYMRTHQGARWDWAPEDFKIVVQRVLNLSSVEASRIPQEILPLCSDPDRASILTIMMGVGASEERAPKGHDGAGERRRGEQSAPGGGRASGPRVGGSGSSRPADAQGKRKLGGTPPPSPPRGGGAARASSRRPEGAAPTSQPEGERKKKRLRKTGETEPCRGNLISPPRWSFNRPPRSDVPSHSSRHPKSGQSEAEDPAAAEERRRESDRREAADRLREAEEAAREAARIRQAEEAAREEAARARQAEATTAAGASTGPTPSGNPQATASGEAHDEAAGTSPGPTSPGDAQDQTGPGDIPEPSTSSGGPSRIAFSPRRLFSSSSVAPLSAEPILQALAAANTAVLDGFSAQVEALRAERAELEAAWARVEEGRRSVDAMVEVGRKAHRRHVSELEARKAALTEIAREVEEERAAALIATTTMIEAQDALRLQNANREAELKEKLDAAQGVLDSAAARERRVTESEAASRRREESLEARAMALEEHAGAVEEGLTDREAAAALREATLAAHEAACAEEECALRLREDALAERERALEEAEATTKRLADSLSLREAAQEEQARRNLECVRAERAALEQRAADLEAREKELDARAHIGGAAAGESDLAARLAAAEHTVADMQRALDSSTGEAEALRLAGEIGPDMLWDAVSRLKRAGRQAGLWKGQTTVPPTNLEGLAPHLNRMAWVLEQLPEELEKTIKSSSRDLARGAVELVLASYQARDPNFSPWMALEEFPPGTEDDARARVRDAANHIVQSFEGSAPRLAFAPSSDEEGNTSSADDGGDEAVDSGASE

SEQ ID NO: 183570 - protein, 1027 aa, Oryza sativa
  Clone ID: PAT_MRT4530_80649C.1.pep
MARGSALLDGSVLPSSRIVSERQAGLPRRFMPESATGREIVTLGEGRPAPCYPGRSVFFLPFAMAGLVPPFSSFFMDVLEFYDLQMAHLTPNAVMTLAIFAHLCEMFIGVRPSLRLFRWFFTVQPVSPPSVVGGCYFQPRGPVLNRYIPCVLRKKWDDWKSDWFYTPLADEARLRLPSQPPAQASNWRAPVDLGDGYDAVLDRLAGLRSQGLTGAMVFGDYLRRRIAPLQRRARGAWEYTGSEDYMRTHQGVRWDWAPEDFKIVVQRVLNLSSVEASLIPQGVLPLCSDPDRASILTIMQAVGASEERAPRGHDGAGGSRRGDQSTPGGGRASGPRDGGPGSSRPADARGKRKQEGTPPPSPPRGGGAARASSRRPEGATPTSEIPSRPSHHSKSGQSEAEDPAAAEARRRESDRREAADRLREAEEAAREAARARQAEEAAREEAGLRQAEATTSSEATRETDRQEATDRLREAEEAAQVAVRARQAEEAAREEARLRQAEATTTSEAARDEAAGASLGPTPSGDAQDNPGPGDIPESGTSIGGPSRAASSPRRLFPTPSVAPLNAEPLLQALAVANTTVLDGLSAQVKALQAERAELDAAWARVEEGRCSVEAMVEVGRKAHRRHVSDLEARRKVLAEIAKEVEEERGAALIATTVMNEAQDTLRLQHGSWEAELGKKLDAARGVLDAAAARERRAAETEVASRRREEALEARAMALKERACVVERDLADREAVVSIREATLAAHEAVCAEEESALRLREDALTERERALEEAEAAAQRLADSLSLREAAREEQARRNLEGVRAERAALNQRAAELEAQAKELDARARSGGAAVGESDLAARLAAAEHTIADLQGALDSSAGEVEALRLAGEVGPGMLRDAVSGLDRAGRQAGLWGGRTAKYAANQGGLAQRLLEMAGTLQRLPEELERTIKSSSRDLARGAVELVLASYQARDPDFSPWTALDEFPPGTEDGARAQVRDAANHIVHSFEGSAPRLAFALNSDEEDDDGGMGGSGDEADDPGASD

SEQ ID NO: 183571 - protein, 91 aa, Oryza sativa
  Clone ID: PAT_MRT4530_8064C.1.pep
GLRDDDSTTRAVRGGRSLVIIVVALHISEAFEPPFSASQGKPHRSVALYQEAAASSFVLFKAFKQEANSSRSGAAKADFITAATSAGDSTA

SEQ ID NO: 183572 - protein, 214 aa, Oryza sativa
  Clone ID: PAT_MRT4530_80650C.1.pep
MRGGGGGAGRRLWFGDTWRRAAAQRCVAAAAVRWRSGEVVRRRVAAATLGGGSAMRGGGEVRGGSNGERQFGGLHPRPRGGGERRRRGLNPRPPGAGSVVLNCRASSPPSAGCVPNCRVQIRPYAASRVQKAKRAASSSNGDEVASRPSSRRSSMPRSSSPSWYDSISTCDLNPDLISASISLVVILVFDELLACHGCFMCDMFIKTFICDEMF

SEQ ID NO: 183573 - protein, 152 aa, Oryza sativa
  unsure (1)..(152): unsure at all Xaa locations
  Clone ID: PAT_MRT4530_80651C.1.pep
MSVYALKSPKGPLFPLRSILVFLIALFGFYVCYFSFNQIDLENKENLISGEEQIRTLCRRHTIPNELMQYVHFPKPTSYSRGECACTPVRFFVIISMQRSGSGWFETLLNSHPNVSSNGEIFSIRERREDISSILRTXDKLYNLDCTPVQQK

SEQ ID NO: 183574 - protein, 61 aa, Oryza sativa
  unsure (1)..(61): unsure at all Xaa locations
  Clone ID: PAT_MRT4530_80652C.1.pep
PFLQPXMVSLGKRGNIKKGAFRAPSGDEKQQSLLXXFPKKKKPPKKKIYKNTPRHTGRRXY

SEQ ID NO: 183575 - protein, 85 aa, Oryza sativa
  Clone ID: PAT_MRT4530_80653C.1.pep
SVKRPAHNSHGSAWSPGTYDESTCLSFSFPIKACWNCSDISFTYKIPGFYPHHTSRSAVKRTENRQCSSTVHSRLDNYASGVNLA

SEQ ID NO: 183576 - protein, 1773 aa, Oryza sativa
  Clone ID: PAT_MRT4530_80654C.1.pep
MPLDDYWPAAVAVAVAGNGMATAPSLTTTTTTLSGLPPRLSMSRPRPDAANHWRSSSPRRLVPARSHPSSMASLSPATTDAEQSANVAATNLPWLDLGHANPFAMMDHYAGVLDELRWSDYFDGAYQAFRFSSLDFITNDFGKISLLDSDSNQSGRNQVPVPFGIPNSAEAYSKIISPKSVSSHSDEIQSIPPRSDQDDGSYPSILMKLPDDLAAVFTAKTSPTRRSRRAPAPAPIQSTSREVGVILQPLGTVSTEELDGYLSSPGVSSRPTEILDYDDFGYHYDHGDFDNFDDSYEDNYTPLFFGVFMADNETEEQRRAREAEQDRARQEAEHRERIAKEAEDRRHRALVSGRRARELIGQQDVDGTAVFRTPQQNVVAAITLLDTLLKEDALNQADHVVNILNQTKTMIATSVPANSASTRTPTGSRVPHHQPSLSITGTGSSRRSRGHDERSVHSLPERHRERRAERPRSPPRQRPVDLRDTINQRRAARGHRHSPNRYDDDVDGVAAFTNDLRRVDWPVGFKPTGIEKYDGTTNLESWLTVYGLAIRAAGGDSKAMANYLPVALADSARSWLHGLPRGMIGSWAKLRDHFIANFQGTFERPGTQFDLYNVIQKSGESLRDYIRRFSEQRNKISDITDDVIIATFTKGIRHEDLVRGSGNNNHKDRKRKPEELVATTSPSSRQRPRVNTFDKIMNSQCPHHPNSNHVAKDCFVYKQFAEQYVKNARKPADGDQGTSKKKDDEDDAPTGFQDHRKELNHIFGGPLAYESKRKQKLTEREINAVQPNTPQYLRWSETAIKFDRSDHPDRVVHPGRYPLVLDPVVRNVKLRRTLIDGGSALNILFAKTLDDMQIPRTELKPSNAPFHGVIPGLSATPLGQITLPVTFGTRENFRTENVCFEVADFETAYHAILGRPALAKFMAVPHYTYMMMKMPGPRGVISLRSDIKQAVTCDKESYEMAQTHETTLAREEIRLSATTAGEGEVPATKLTKTEESDAKAKKIPLDPSDPDKTANNKDIFAWKPSDMPGIPREVIEHSLHVKEDAKPIKQRLRRFAQDRKDAIKEELTKLLAAGFIKEVLHPDWLANPVLVRKKTGQWRMCVDYTDLKKSCPKDPFGLHRIDQVVDSTAGCELLSFLDCYSGYHQIRLKESDYLKTSFITPFGAYCYITMPFGLKNAGATYQRMIQRKLSHYFQSHSVTVVTSFPLGDILHNREANGRIAKWALELMSLDISFKPRTSIKSQALADFLAEWTECQEDMPEEKMEYWTMHFDGSKRLTGTGAGVVLISPTGERLSYVLWIHFSASHNVAEYEALLHGLRIAISLGIRRLIVRGDSQLGVNQVTKEWSCLDVNMTAYRQEVRKLEDKFDGLELTHVLRHNNEAADRLANFGSKLEAAPSDVFVEHLYEPTVPRKEITEAMDTQGVGMLEADWREPFIKFLSKQELPQDKNEVERISRRSRLYIIHETELYKKSPSGILQCYVSLEEGKQLLKDIHSGICGNHAAARTIVGKAYRQGFFWPTAVSDVDKIVRTCEGCQFFARQTHLPAQELQTIPLSWPFAIWGLDMVGPFKRAVGGYTHLFVAIDKFSKWIEAKPVITITADKARDFFINIVHQFGVPNRIITDNGTQFTGGTFKDFCEDFGIKICYASMAHPMSNGQVERANSMILQGIKARVFDRLRPYAGKWVDQLPSVLWSLRTTPSRATGQSPFFLVYGAEAMLPSEVEFESLRFRNFNEEGYEEGRVDDINRLEEAREAALIQSTRYLQGLRRYHNRNV

SEQ ID NO: 183577 - protein, 134 aa, Oryza sativa
  unsure (1)..(134): unsure at all Xaa locations
  Clone ID: PAT_MRT4530_80655C.1.pep
QEVQTIPLSWXWGLDMVGPFKKAVGGYTHLFVAVDKFSKWIEAKPVITITVDKPRDFFINIVHRFGVPNRIITDNGTQFTGGVFKDFCEDFGIKICYASIAHPMSNXQVERANGMVRLKREDGTPIDNSWNIEH

SEQ ID NO: 183578 - protein, 377 aa, Oryza sativa
  Clone ID: PAT_MRT4530_80656C.1.pep
MMTFQAKGHSEGCRAAATCGRLQPGGGGGESSSTTTTRTTQMDPSCPPFPQPEAPPLPLQLQLQPGLPRLELPTLDLERVGGEDRAALVAACRDLGAFRVVNHGVPGELRRRLLELGKQLLGRDTFELKKARPGYFWGTAALKSLRVKEVNWLEGLHVDLVPGSSSSSSQVGDGDDDDDDGWMRIRALMAEYGDHMARIARKLFDALAAELGLDHHQAASYLAERQGFLRLYRYPPCPSSASCLGMEPHTDSSVLSIILGQDHVGGLQVIRDGAWRDVAPAPGELLVNLGDMMTAISGGSYQSVRHRVLASRPSTERVSCCYFAFPQEDAVVEAPSGIGGGVYRPFSYREFREQVQADIKAVGTKVGLSRFYATATR

SEQ ID NO: 183579 - protein, 950 aa, Oryza sativa
  Clone ID: PAT_MRT4530_80657C.1.pep
MARGSALLDGSVLPPSRIVSERQGGLPRRFMPESATGREIVTLGEGHPAPCYPGRSVFFLPFAMAGLVPPFSSFFMDVLKFYDLQMAHLTPNAVMTLAIFAHLCEMFIGVRPSLRLFRWFFTIQSVSPPSVVGGCYFQPRGPVLNRYIPCVLRKKWDDWKSDWFYTPLADEARLRLPSQPPAQASSWRAPVDLGDGYDAVLDRLAGLRSLGLTGAMVYGDYLRRRIAPLQRRARGAWEYTGSEDCMRTHRGVKWDWAPEDFKIVVQRVLNLSSVEASLIPQGVLPLCSDPDRASILTIMQAVGASEERAPRGHDGAGGSRRGEQSTPGGGRASGPRDGGPGSGHPADAREKRKQEGTPPPSPPRGGGAARAGSRRPEGATPTSQPEGERKKKRLRKMGGTEPSRGNLISPPRWSIPSRPSRHSKSGQSEAEDPATTEAQRRESDRREAADRLREAEKAAQVAVRARQAEEAAREEARLRQAEAATTSEAARDEAAGASLGPTPSGDAQDKPGPGDIPESGTSIGGPSRAASSPRRLFPTPSVAPLSAEPLLQALAVANTTVLDGLSAQVEALQAERAELDAAWARVEEGRRSVEAMVEVGRKAHRRHVSELETRRKVLGEIAKEVEEERGAALIATTVMNEAQDTLRLQYGSWEAELGKKLDAARGVLDAAAARERRAAETEVASRRREETLEARAMALEERASAVERDLADRKAAVAIREVTLAVHEAACAEEESALRLREDALTERERALDEAEAAAQRLADSLSLREAAQEEQARRNLEDSSAGEVEALRLAGEVGPGMLRDAVSRLDRAGRQAGLWGGRTAKYAANQGGLAQRLSEIAGTLQRLPEELERTIKSSSRDLARGAVELVLASYQARDPDFSPWTALDEFPPETEDGARAQVWDAADHIVHSFEGSAPRLAFALNSDEEDDDDGVGDSGDEAGDLGASE

SEQ ID NO: 183580 - protein, 429 aa, Oryza sativa
  Clone ID: PAT_MRT4530_80658C.1.pep
MADGESPPWAELVPDIVREIGRHLLCEIDRHHADGLCRSWRDALLQLRPPPPPLPRLVLPEADGPAFYCVPSGCRPHPFVLPPAALRARCFGSYDGAWIFQAVDQAANHVLLNLITHQQLNLPNLLRFHSFMLPALTFDFEVAFVAATLSSRPTDQGCVGAGIISFNRVPHDPRHIAFWCMGDEAFSWSIQMTRNIGGALELDVVDLLYSSHGAGAFLFLTRREDIHVFRQPIFPQGDVMQSTPLYFERRGDDDDDDGRPVLDRYLVESRGKLLMVVRLGDREPARLPTTTFRVFEREDELFNNYWTKLPDLGGRMLFVGRGCSRSYEAADGYPGMEGVYFLDDRSFHDPMVVHMNAADRQYPCSDNGRWSGAQPPAEVELCFPEQAQKCLSADDILNVVFGLLALIGREDADTVAHPADRAGCFFLSA

SEQ ID NO: 183581 - protein, 88 aa, Oryza sativa
  Clone ID: PAT_MRT4530_80659C.1.pep
MENLQLKEDIRRLQTFVDEGEREMMHEQIIVLQDKLLEALDWKLMHEKDPINKDLSFLGESADEEMEFIRLQAIQNEREIESLRKNLS

SEQ ID NO: 183582 - protein, 271 aa, Oryza sativa
  Clone ID: PAT_MRT4530_8065C.1.pep
MAVNISTGVMNSLLVKLEEVCRYDLAEFQFSTQFDFKNNIWNLKEELSCMNALLEKLPDMEALNIQERELRNKVRELAYFVEDKIDMFMHSFGTAVDKATLLTDTMELMLPNLFAKIDEIKDYYAVEELLMEDMEGESGQHPKVLSIVGLGGLGKSTLAIQPARGVLDDSEVERSVVIGSGGCGFRLGGDGLGACPRGCGINGGRRWTGLEPSVGEEADDEEGDSEEDEVLVTAGGAVLGGVEGGGAGEVVKAVMGAAGFSPHRLQMRDSG

SEQ ID NO: 183583 - protein, 87 aa, Oryza sativa
  Clone ID: PAT_MRT4530_80660C.1.pep
MTSRDRMPICYGLQWTHKGEAIRDELFSPSLVGIRQHSYVFNYYRVYKRTSGMTMVKETDNREMFARRESCGIHGGVRSSGGLARHL

SEQ ID NO: 183584 - protein, 567 aa, Oryza sativa
  Clone ID: PAT_MRT4530_80661C.1.pep
MPSRGCSCWLLSLALLCSLAAAKEQYHEFVIRETTVKRLCKSHNIMTVNGQFPGPTLEINEGDSLIINLINRGRYNMTLHWHGVRQMRTGWSDGPEYVTQCPVRPGQSYRYRFTVAAQEGTLWWHAHSSWLRATVYGALLIRPRDGTSYPFDVQPTRELAPILLGEWWDMNPVDVVRAATRTGAAPNISDALTVNAQPGDLYSCSSHDTAVFPVTSGETNLLRFINAALNTELFVSLAGHNMTVVAADASYTKPYTTSLLLLAPGQTTDVLVTFDQPPGRYYLAARAYASAQGVPFDNTTTTAIFDYGAANNASSAAIAMPTLPAYNDTTAATAFTTNLRGLRKAELPSRVDESLFFTVGVGLFNCTNATAQQCGGPNGTRFAASINNVSFVLPSSTSILQAHHHGAPGGVFTADFPANPPVQFDYTAQNVSRALWQPVAGTKVYKLKYGSAVQVVLQGTNIFAGENHPIHLHGYDFYILAEGLGNFDAGADTGKFNVEDPPMRNTVGVPVNGWAVIRFVADNPGVWLMHCHLDVHITWGLAMAFLVDDGVGELQSLEAPPPDLPLC

SEQ ID NO: 183585 - protein, 1070 aa, Oryza sativa
  unsure (1)..(1070): unsure at all Xaa locations
  Clone ID: PAT_MRT4530_80662C.1.pep
MARGSALLDGSVLPPSRIVSERQAGLPRRFMPESATGREIVMLGEARPAPDYPGRSIFFLPFAMAGLVPPFSSFFMDVLEFYDLQMAHLTPNAVMTLAIFAHLCEMFIGVRPSLRLXFRWFFTVQSVSPPSVVGGCYFLPRGPVLNRYIPCALRKKWDDWKSDWFYTPLADEAHLRLPSQPPVQASSWRAPVDLGDGYDAVLDRLAGLRSQGLTGAMVYGDYLRRRIAPLQRRARAAWEYIGPEDYIRTHQGVRWDWAPEDFKILIQRVLNLNSVEASLIPHGILPLCSDPDRVSILTIMTTVGASEEQAPKGHGGAGGSRRGDQSTPGGGRASGPRVGGSGSNRPTDARGKRKLGGTPPPSPPRGGGAARASSRRPEGAAPTSQPEGERKKKRLRKMGGTEPSQGNLISPPRWSFNRPPRSDVPSRPSRHPKSGQSEAEDPAAAEERRRESDRREAADRLREAEEAAREAARARQAEDTAREEAARARQAEEAAREEAARARQAEEAAREEAARARQTEAMASFEAAHDKAAGASLGPTPSGDAQATASGAARDEAAGGSPGPAPSGDAQDQTGPGDIPELSASSGGPSRVAFSPRRLFSSSSAAPLSAEPLLQALAAANTAVLDGFSAQVEALRAERAELEAAWARVEEGRRSVDAMVEVGRKAHRRHISELEARKAALAEIAREVEEEREAALIATTAMIEAQDSLRLQHGRWEAELKKKLDAAQGVLDAAAAREQRATEAEAASRRREEALEARAMALEDHAGAVETSLADREAAAAIREATLAAHEAACAEEESALRLREDALAERERALEESEAATQRLADSLSLREAAQEEQAHRNLECVRAERAALEQRAAYLEAREKELDARERSGGAATGESDLVARLAAAEHTVADMQCALDSSTGEAEALRLSGEIGPGMLWDAVFRLDRAGREAGLWKSQTISRSTNLEGLAPHLRRMAWAVQQLPEELEKTIKSSSRDLAQGAVELVLASYQARDPGFSPWMALEEFPPGTEDDARARVRDAANHVVQSFEGSAPRLAFAPSSDEEGDASGEDDGGDEASDPGALE

SEQ ID NO: 183586 - protein, 401 aa, Oryza sativa
  Clone ID: PAT_MRT4530_80663C.1.pep
MADGESPPWAELVPDIVRKIGRHLLCEIDRHHADGLCRSWRDALLQLRPPPPPLPRLVLPEADGPAFYCVPSGCRPHPFVLPPAALRARCFGSYNGAWIFQAVDQAANHVLLNLITHQQLNLPNLIRFPSFRLPGLTFDFEVAFVAATLSSQPTDQGCVGASIIGFKRRPLNPRHIAFWRMGDEAFSQSIESRWIDEELELDVVDLLYSGHGAGAFLFLTRGENIRVFRQPIFPLGDMQTTVLYFERRGDDDDDDGRPVLDRYLVESRGKLLMVVRLGDREPGRLPTTTFRVFEREDELFNNYWTKLPDLGGRMLFVGRGCSRSYEAADGYPGMEGVYFLDDRSFHDPMVVYKDAAQRRYPCSDNGRWSGAPPPAEVERCFPEQALMICSAEFSSTSWQKY

SEQ ID NO: 183587 - protein, 598 aa, Oryza sativa
  unsure (1)..(598): unsure at all Xaa locations
  Clone ID: PAT_MRT4530_80664C.1.pep
MARGSAPLDGSVLPPSRIVSERQAGLPRRFMPESATGREVVALGEGRPTPHYLGRSVFFLSFAMAGLVPPFSSFFMDILEFYDLQMAHLTPNAVMTLAIFAHLCEMFIGVRPSLWLFRWFFTVQPVSPPSVVGGCYFQPRGQVLHRYIPCVLRKKWDDWKSDWFYTPLADEARLRLPSQPPAQASSWRATVDLGNGYDAVLDRLAGLRSQGLTGAMVFGDYLRRRIAPLQRRARGAWEYTGPEDSMRTHQGRKWDWVPEDFKMVVQRVLNLSSVEASLIPQGVLPLCCDSERANILTXMQAVGASGERAPRGHDGAGGSRRGEQSTPGGGRASGPRDGGPGGSRLADARGKRKQEGTPSPSPPRGGGAPPLPPHRSVVRSRRRLLQHRSCLPFPGLPSVSRGDPRSCVPAVALPFPPRRPPSAASISLPERRSTSPPPPSAPRRRPHPRHHLLLARISPEHRRPRRLLLPPRRHLLRLPLSPCPCVSRRCRPLPRHGDRQGRPRHRFPSIQTPPGSISVVSDRSRRRRPIGRPARRLAAPPPSSASQRRGPRHPRLRAAADGSPHRLLAGPGRCRRRRPLVASGRRGVQPSDRPLSYV

SEQ ID NO: 183588 - protein, 1031 aa, Oryza sativa
  Clone ID: PAT_MRT4530_80665C.1.pep
MARGSALLDGSVLPPSRIVSEKQAGLPRRFMPESATGREIVMLGEGRPAPDYPGRSVFFLPFAMAGLVPPFSSFFMDVLEFYDLQMAHLTPNAVMTLAIFAHLCEMFIGVRPSLRLFRWFFTVQSVSPPSVVGGCYFLPRGPVLNRYIPCVLRKKWDDWKSDWFYTPLADEARLRLPSQPPAQASSWRAPVDLGDGYDAVLDRLAGLRSQGLTGAMVYGDYLRRRIAPLQRRARGAWEYTGSEDYMRTHQGVRWDWAPEDFKILVQRVLNLNSVEASLIPHGILPLCSDPDRASILTIMTAVGASEEQAPKGHDGAGGSRRGEQSTPGGGRASGPRVGGSGSNRPTDARGKRKLGGTPLPSPPRGGGAVRPTLIATVFLLSQKQVFSYPSCLSSGFSFRFSDVPSRSSRHPKSGQCEAEDLAAAEARRRESDRREAADRLREAEEAARARQAEDTAREEAARARQAEEAAREEAARARQAEAMATSEAARDEAAGASLGPTSSGDVQATASGVARDEAAGASLGPTPSGDAQDQTGPGDIPESGTSIGGPSRAASSPRQLFPTPSVAPLSAEPLLQALAAANTAVLDGLSAQVEALQAERAELDAAWARVEEGRRSVEAMVEAGRKAHRRHVSDLEARKTALAEIAREVEEERGAALIATTVMNEAQDTLRLQYGSWEAELKKKLDAAQGVLDAAAAREQRATETEAALRRREEALEARAMALEERACVAEKDLADREAAVTTREATLAAHESACAEEESALRLREDALTERERALEEAEAAAQRLADSLSLREAALAEQARRNLECVRAERAALDQRAADLEAREKELDSRARSGGAAAGESDLATRLAAAELTIADMQRALDSSTGEAEALRLAGEIGPGMLWDAVSRLDRAGRRVGLWRGQTIKSAANQGGLAQRLSKMAGALQQLPEELERTIKSSSRDLAQGAVELVLASYQARDPNFSPWMALDEFPPGTEDSARAQVRDAADHIVHSFEGSAPRLAFAPNSDEEGDASGADDSDDEAGDPGASD

SEQ ID NO: 183589 - protein, 1524 aa, Oryza sativa
  unsure (1)..(1524): unsure at all Xaa locations
  Clone ID: PAT_MRT4530_80666C.1.pep
MSNKYTFQVYHGSGNVRYGPTGVDLSEFFVTPKGIDRPAERSVPSIKGWLMRGLRVDPQASDITINVIVSRATEGFYWELMLIQNSRMWRWYVENALQRGXPLTTVPFVHPKDLGVQMNMEDGEGLSAEVNETYVEEVNAAEEGGVVAPVGIQPGGVADVGETVSAIVDEMEREDSDNERVKESDSSDDETDIDPAEWASEDFSGLVVSEEDSVRWEYKENEVIQGAIYTRAEDMKEAVKHFAVSLHREFWVAKSNRSQYEVRCVKEKDGCPWRVHPYKQKWKDYWTVSVVTKHTCFLPGVXKYHRNITCAFVASEXYAHVIDNLTYKPKSIIRHIKETYKYTISYAKAWRAIQKIIEMRFGTYEGSYDNLPRLLGVIKQRNPESSYAVKKFPSVEHPGKSVLQRTFLALHACKMAFVHCRPILCIDGTFLTGKYRGQILTAIGVDGNNQILPLAFAFVESENTDSWYWFLKLVKTEVVGMRPXVCLIHDRHAGMLRAIEELXFGSKDRGYPGEWEDVQSRWCMRHMGAXFFKQFKNKELMNMFKRLCNQNXEKKFNELWKRLDELTAKCSDQRAVGPATAVPDPPQALGHLPMDSPTLVRRTGVEIRKFSQWILHEPKEKWAKAYDTGGARYEIMTTNLAEVYNWVMRGXRGLPLVGIVEFILHGTCRYFRDLFXAVLPSMPNNSILFGTFMQKKLEEWCKKAMKHRALVQGTQQHRFEILCQDKTGRGIYRKRVKQECVLKADDTCHCSCAKPKLLHRPCTHVIAAALECGIPDAVYVSQYFSKQAIYHTXSGEIYGFDIAGVFTQTNNEVINIPDPWKLRGKAGRRKTRRIRNDMDESEAGRVKRCSKCDERGHTYKHCPKDKEKPSAAEAGLSGSAADGARPTEMASQDTPELLDPAIDHRHRSHLTAVQGAQLGTFRXRMCGELLTVHDSFIERLREAGLLPLCRLVEAATGHADPPRRWNADRSLLAALVDRWRPETHTFHLPCGEVAPTLQDVSYLLGLPLAGDAVGPVHTTVDWKDDLTARFAPVQRAPHLPLEPLAHHHNTGPTKKWLLQFTAEQQQDEADEYSYSRCLKAYLLWLFGWVMFCCGHVHAVDKGLVHYARSIADAAVGEVPQWSWGSALLVAQYRGLCEACTKMDPSATFGGCPLFLSIWAAEGIAIGRPEVDQHTYEGSLYEERPEVDYPTMGTLWCRRQRRWAHVQVRWSYPEFVMEFDRLLPTDVVWEPXVPWLPRVVRCWFNFRQPFPVPFPTTVPAAVHWYSRKGQQLVGDWPAKLGTFVEDWLLATEEVVEHEGEPHTEEAYQAYLRWYQPRTRTRVTFAPLEQQAHVASTRDLYARYHDQDFARAVVDINRVVVDGSTTIQRLGAGIPVPVEEHLTTYTRMVESMRSVLRLLTCRADDVARADXRPPLPTGPRPAVHVXRCLGFTQFATTQAAHFSQAVGSASQLAASTSHSRQFWQYTGTSSQAAGTSSQGPPLDHAGTSSDYGVASALLFSMSHFDFALTSTEDVIGPSQLGGAPPV

SEQ ID NO: 183590 - protein, 107 aa, Oryza sativa
  unsure (1)..(107): unsure at all Xaa locations
  Clone ID: PAT_MRT4530_80667C.1.pep
RXSXXGXXMXXGXXNXXGXXTXXXRAXXXXSXSGSXXAVSGXXVXVXDPTXXGXGXXXEWXXXRVTXXXXXXXSPSKGAXVXADEAXTEXXCXRLXVXSXXXSADRX

SEQ ID NO: 183591 - protein, 1569 aa, Oryza sativa
  unsure (1)..(1569): unsure at all Xaa locations
  Clone ID: PAT_MRT4530_80668C.1.pep
ISNKQIFQVYHGPENVRYGPTRVDLSEFIVSKRGIDRLAERSVHSIKGWLMRGLRVDPQTSDITINVIVSRATEGFYWELMSVQNSRVWRWYVENALQRGWPLAMVPFVHPKDPGVQMNMDDGEGPSAEVNETSVEEVNAREDGGVVAPVGIQPGGVADEGETVGAIVDEMEREDSDNERVEEGDSLDDETDINPAEXASEDFSGLVVSEEDSVRWEYKENKDIQGAIYTRAEDMKEAVKHFAVSLHREFWVAKSNRSQYEVGCVKEKDGCPWRVHAYKGKWKDYWTVSVVTKHTCFLPGVQKYHRNITCVFVASEMYAHVIDNLTYEPRSIIRHIEETYKYTISYAKAWRAKQKIIEMRFGTCEASYDNLPRLLGVIEERNPGSSYAVKKFPSIEHPGKSVLQRAFLALHACKMAFVNCRPVLYIDGTFLTGKCRGQILTAIGVDGNNQVLPLAFAFFESENTDSWYWFLKLVKTKIVGMRPNMCLIHDRHAGILXAIEELQFGSMERGYPGEWEDVQSRWCMRHMGANFFKQFKNKDLMNMFKRLCNQNQEKKFNELWKRLDELTAKCGDQRAAAPSTAVADPPQALGPLPTDSPTLVRKTGLEIRKFSQWILHEPKEKWAKAYDTGGARYGIMTTNLAEVYNWVMRGVRGLPLVGIVEFILHGTCRYFRDRFQAVLPSMPNNSILFGAFMQKKLEELRKKAMKHXAVVQGTQQHRFEILCQDKASRGIYHKRVKQECVLKADGTCHCSCAKPKLLHRPCTHVIAAAAECGIPDAVYVSQYFSKQAIYHTWSGEIYGFGIAGEFTETNDEVLNIPDPSKLRGKAGRRRTRRIHNDMDESEAGRVKRCSKCDEHGHTYKHCPKDKEKPSAAEAGLLGLAADGARPTEMARQDTPQLLDPAIDHRHRSHLTVVQGAQLGTFRARTCGELLTVHDSFVERLREAGLLPMCRLVEAAAGDADPARRXTVDRSLLAALVDRWRPETRTFHLPCGEVEQLQAEADEYSYSRCLEAYLLWLFGWVMFCGGHGHAVDKGLVHYARSIADAAVGEVPQWSWGSALLAALYRALCESCTKTDPSATFGGCPLFLSIWAAERIPIGRPEVDQHAXEESLYEERPEVDYPTMGTLWCRRQRRWAHVQVRRSYPEFVMEFDRLLPTDVVWEPYSAAATXARAPLGLSTLCTRDQACWMTMVPMVFDICVEPHAPFRVMRQFGFRQPFPVPFPTTVPAAVHRYSRKGQQSAGDWPAKLATFVEDWLLATEEVVDHEGEPHTEESYYVYLRWYQPRTRTRVTFAPLEQQPHVASTRILYARHRDQDFARAVDDINRVVVDGSTTIQRLGAGIPVPVEEHLTTYTRMVESMRSILRVLTCRADDVARADAAVQRPPVPTSPRPAAHVPRPTPPLHGGFRAPFSTPPSSARPSVVPPTGFAQFAMTQAAHFSQAAGSASQAAVSTSHSAQFWQYTGTSSQAAGTSSQGPPLDHAGTSSDRLLPSTLLFDITDFDFASGSTEDVFGPSQLGGAPPLQTQDQTQATPPRDTHATRAVPPDRFTYSQDHVRAQARRTKRGRSAGQGQ

SEQ ID NO: 183592 - protein, 1528 aa, Oryza sativa
  unsure (1)..(1528): unsure at all Xaa locations
  Clone ID: PAT_MRT4530_80669C.1.pep
MSNKQIFQVYHGPGNVRYGPTGVDLSDFIVSERGIDRPAERSVPSIKGWLMRGLRVDPXTSDITINVIVSRATEGFYWELMPVQNSQLWRWYVENALQRGWPLAMVPFVHPKDPGVQMNMDDGEGPSAEVNETSVEEVNAREDGGVVAPVGIQPGGVADEGETVGAIVDEMEREDSDNERVEEGDSSDDETDINPAEWASEDFSGLVVSEEDSVRWEYKENEVIQGAIYSRAEDMKEAVKHFVVSLHREFWVAKSNRSQYEVRCVKEKDGCPWRVHAYKGKWKDYWILSVVTKHTCFLPGVQKYHRNITCAFVASEMYAHVIDNLTYEPRSIIRHIEETYKYTISYAKAWRAKQKIIEMRFGTYEASYDNLPRLLGVIEERNPRSSYAVKKFPSIEHPGKSVLQRAFLALHACKMAFVNCRPVLCIDGTFLTGKYRGQILTAIGVDGNNQVLPLAFAFVESENTDSWYWFLKLVKTKVVGMRPNVCLIHDRHAGILRAIEELQFGSMERGYPGVWEDVQSRWXMHHMGANFFXKQFKNKELMNMFKRLCNQNXEKKINELWKRLDELTAKCSDQRAAAPSTAVANPPQALGPLPTNSPTLVRRTGLEIRKFSQXIMHEPKEKWAKAYDTGGARYGIMTTNLAEVYNWVMRGVRGLPLVGIVEFILHGTCSYFRDRFQAVLPSIPNNSILFGTFMQKKLEELRKKAMKHRALVQGTQQHRFEILCQDKAGRGIYRKRVKQECVLKADDTCHCSYAKPKLLHRPCTHVIAAATECGIPDAVYVSQYFNKQAIYHTWSGEIYGFGIAGEFTETNDEVLNIPDPSKLRGKAGRRKTRRIHNDMDESEAGRVKRCSKCDERGHTYKHCPKDKEKPSAAEAGLSGSAADGARPTEMARQDTPQLLDPAIDHRHRSHLTAVQGAQLGTFRARTCGELLTVHDSFVERYEQCITITXLRCTNFYNDILICYYRLREARDAHFSLAVRWRPETHTFHLPCGEVAPTLQDVSYLLGLPLAGDAVGPVTAGVDWQDDLTACFALVQRAPHLPLEPLAHHRNTGPTKRXLLQFTVEQLQAEADEYSYSRCLEAYLLWLFGXVMFCGGHGHAVDKGLVHXARSIADAAVGEVPQWSWGSALLAALYRGLCEACTKTDPSATFGGCPLFLPIWTAERIAIGXEVDQHAYEESLYAERPEVNYPTIGTLWCRRQHRWAHVQVRRSYPEFVMEFDRLLPIDVVWXPTVSRLPRLVRRWFGFRQPFPVPFPTTVPAVVHRYSRKGQQSAGDWPAKLATFVEDWLLATEEVVDHEGEPHTEEAYQAYLRWYQPRTRTRVTFAPLEQQPHVVSTRDLYARHRDQDFARAVDDINRVVVDGSTTIQRLGAGIPVPVEEHLTTYTQMVESMRSILRVLTCRADDVARADVAVQRPPVPTGPRPAAHVPRPTPPPHGGFAQFAMTQAAHFSQAAGSASQAAASTSHSAQFWQYTGTLSQAAGTSSQGPPLDHAGTSSDRLVPSTLLFDITDFDFASGSTEERGRDAGQGQ

SEQ ID NO: 183593 - protein, 113 aa, Oryza sativa
  Clone ID: PAT_MRT4530_8066C.1.pep
MAPLASRARALSAPRRRALALAAGPAHLSAFPSRLAPPRCVPHDRVQLAAFRPTRVPAVAPPAPGVTPSSMSTIVQASRASNIDNEMPITFNLIDFSPEKKTLTDRTNVVLTI

SEQ ID NO: 183594 - protein, 1420 aa, Oryza sativa
  unsure (1)..(1420): unsure at all Xaa locations
  Clone ID: PAT_MRT4530_80670C.1.pep
MSWHRAGVLLLGGSILPACPGGSGLGLGWLGTSWDPGSGCQFGLNHRRPWVKAGNVRYGPTGVDLSDFIVSERGIDRPAERSVPSIKGWLMRGLRVDPQTSDITINVIVSRATEGFYWELMPVQNSRVWRWYLENALQRGWPLALVPFVHPKDPGVQMNMDDGEGPSAEVNETSVEEVNAREDGGVVAPVGIQPGGVADEGETVGAIVDEMEREDSNNERVEEGDSSDDEMDINPAEWASEDFSGLIVSEEDSVRWEYKENEVIQGAIYSRAEDMKEAVKHFAVSLHREFRVAKSNRSQYEVRCVKEKDGCPWRVHAYKGKWKDYWTVSVVTKHTCFLPGVQKYHRNITCAFVASEMYAHVIDNLTYEPRSIIRHIEETYKYTISYAKAWRAKQKIIEMRFGTYEASYDNLPRLLGVIEERNPGSSYEVKKFPSIEHPGKSVLQRAFLALHACKMAFVNCRPVLCIDRTFLTGKYRGQILTAIGVDGNNQVLPLAFAFVESENTDSWYWFLKLVKTKVVGMRPNVCLIHDRHAGILRAIGELQFGSMERGYPGVWEDVQSRWCMRHMGANFFKQFKNKELMNMFKRLCNQNQEKKFNELWKRLDELTAKCSDQRAAAPSTAVADPPQALGPLLTDSPTLVRRTGLEIRKFSQWILHEPKEKWAKAYDTGGARYGIMTTNLAEVYNWVMRGVCGLPLVGIVEFILHGTCRQKKLEELRKKAMKHRALVQGTQQHRFEILCQDKAGRGIYRKRVKQEYVLKDDGTCHCSCAKPKLLHRPCTHVIAAAAECGIPDTVYVSQYFSKQAIYHTWSGEIYGFGIAGEFTETNDEVLNIPDPSKLRGKAGRRRTRRIRNDMDESEAGRVKRCSKCDEHGHTYKHCPKDKEKPSAAEAGLSGSAADGARPTEIARQDTPQLLDPAIDHRHRSHLTAVQGAQLGTFRARTCGELLTVHDAAVGEVPQWSWGSALLAALYRALCESCTKTDPSATFGGCPLFLSIWAAERIAIGRPEVDQHAYEESLYEERPEVDYPTMGTLWCRRQRRWAHVQVRRSYPEFVMEFDRLLTTDVVWXPTVPRLPRLVRRWFGFRQPFPVPFPTTVPAAVHRYSRKGQQSAGDWPAKLATFVEDWLLATEEVVDHEGEPHTEESYQAYLRWYQPRTRTRVTFAPLEQQPHVASTRDLYARHRDQDFACVVDDINRVVVDGSTTIQRLDAGIPVPVLEHLTTYTRMVESMRSILRVLTCRADDVARADAAVQRPPVPTGLRPAAHVPRPTPLPHGGFRAPFSTPPSSARPSVVPPTGFAQFAMTQATHFSQAAGSASQAAGTSSQGPPLDHAGTSLDPFLSSTVLFDITDFDFASGSTEDVIGSSQLGGAPPVQTQDQAQATPLRDTRATRAVPPDRFTYSQDHVRAQARRTKRGRGAGQGQ

SEQ ID NO: 183595 - protein, 1578 aa, Oryza sativa
  unsure (1)..(1578): unsure at all Xaa locations
  Clone ID: PAT_MRT4530_80671C.1.pep
MASASSQFSLPKHTLPGSITRAAAGHSSGVVAEMKAGYVPVLVGKSGGGGGEAATRFLVPVGLLNDPCMEALLELAADEMGYGQEGVLIIPCDADFFRRVVTAIPSANKANLICSPNSQTDCYEVDPGVQMNMDDGDGPSAEVNETSVEEVNAREDGGVVALVGIQPGGVADERETVGAIVDEMEREDSDNKRVEEGDSSDDESDINPAEWASEEFSGLVVSKEDSVRWEYKENEVIQGAIYSRAEDMKEAAKHFAVSLHREFWVAKSNRSQYEVRCVKEKDGCPWRVHAYKGKWKDYWTVSVVTKHTCFLPGVQKYHRNITCAFVASEMYAHVIDNLTYEPRSIIRHIEETYKYTISYAKAWRAKQKIIEIRFRTYEASYDNLPRLLGVIEERNPGSSYEVKKFPSIEHPGKSVLQRAFLALHACKMAFVNCRPVLCIDGTFLTGKYRGQILTAIGVDGNNQVLPLAFAFVESENTDSWYWFLKLVKTKVVGMRPNVCLIHDRHAGILRAIEELQFGSMEQGYPGVWDDVQSRWCMRHMGANFFKQFKNKELMNMFKRLCNQNQEKKFNELWKRLDELTAKCSDQRAAAPSTAVADPPQALGPLPTXSPTLVRRTGLEIRKFSQWILHEPKEKWAKAYDXQKKLEELRKKAMKHRALVQGTQQHRFEILCQDKAGRGIYHKRVKQECVLKADDTCHCSCSKPKLLHRPCTHVIAAAAECSIPDVVYVSQYFTREFTETNDEVLNIPDPSKLRGKAGRRRTRRIRNDMDESEAGRVKRCSKCDERGHTYKHCPKDKEKPSAAEAGLSGSAADGARPTEMARQDTPQLLDPVIDHRHRSHLTAVQGAQLGTFRARTCGELLTVDDSFVERLREASLLPMCRLVEAAAGHADPARRWTVDRSLLAALVDRWRPETHTFHLPCGEVAPTLQDVSYLLGLPLAGDAVGPVTTAVDWQDDLTARFALVQRAPHLPLEPLAHHRNTGPTKRWLLQFTVDQLQAEADEYSYSRCLKAYLLWLFGWVMFCGGHGHAVDKGLVHYARSIADAAVGEVPQWSWGSALLAALYRGLCEACTTTDPSATFGGCPLFLSIWAAERIAIGRPEVDQHAYEESLYKERPEVDYPTMGTLWCRRQRRWAHVQVRRSYPEFVMEFDRLLPTDVVWXPTVPRLPRLVRRWFGFRQPFPVPFPTTVPAAVQRYSRKGQQSAGDWPAKLATFVEDWLLATEEVVDHEGEPHTEEAYRPTYADDVARADAAVQRPPVPTGPRPAAHVPRPTPPPHGGFRFAQFAMMQDFSQATGSASQAAVSTSHSAQFCQYTGTSSQAAGTSSQGPPLDHAGTSSDRLLPSTVLFDITDFDSASGSAEDVIGPSQLGGAPPTRTMACTYIEWVDTENPVLDLTTCLQEGRWYFASESTEQYLQRKAVYERQYREQQSDWRVLTTALPPWEARPRCRCGDRCQVLRSINPTTLGRRFFVCPNILDDDFMEPPRRCQYREWIDTRRVLTPPSRVVQLELPEQYRKNLLTVLFTSGSLAALYWPQKVRPQALRGRPKLQLAPCRPLYGRQGSNRNFGRRRQTARSTHRLPC

SEQ ID NO: 183596 - protein, 53 aa, Oryza sativa
  Clone ID: PAT_MRT4530_80672C.1.pep
LILKCSYFQDVKCMFCKRVFCSVGGQIHLIESGGVMPIEMEFCIYSKKEKRTQ

SEQ ID NO: 183597 - protein, 1339 aa, Oryza sativa
  unsure (1)..(1339): unsure at all Xaa locations
  Clone ID: PAT_MRT4530_80673C.1.pep
MRGLRVDPQTSDITINVIVSRATEGFYWELIPVQNSQVWRWYVENAMQRGWPLALVPFVHPKDPGVQMNMDDGEGPSAKVNETSVEEVNAGVDGGVVAPVGIQPGGVADEGETVAAIVDEMEREDSDNERVEEGDSSDEETDINPAEWASQDFFGLIVNEEDSVRWEYKENEVIQGAIYSRTEDMKEAKYHRNITCAFVASEMYAHVIDNLTYEPRSIIRHIEETYKYTISYAKAWRAKQKIIEMRFGTYEASYDNLPRLLGVIEERNPGSSYEVKKFPSIEHPGKSVLQRTFLALHACKMAFVNCRPVLCIDGTFLTGKYRGQILTAIGVDGNNQVLPLAFAFVESENTDSWYWFLKLVKTKVVGMRPNVCLIHDRHAGILRAIEELQFGSMERGYPGVWDDVQSRWCMRHMGANFFKQFKNKELMNMFKRLCNQNQEKKFNELWKRLDELTAKCSDQRVAAPSTAVDDHPQALGPLPTDSPTLVRRTGLEIRKFSQWILHEPKEKWAKAYDTGGARCGIMTPNLAEVYNWVMRGVRGLPLVGIVEFILHGTCRYFRDRFQAVLLSMPNNSILFGTFMHKKLEELRKKAMKHRALVHGTQQHRFEILCQDKAGRGIYRKRVKQECVLKADGTCHCSCSKPKLLHRPCTHVNAAAAECGIPDAVYVSQYFSKQAIYHTWSGEIYGFGIAGEFIETNDEVLNIPDPSKLRGKAGRRRTRRFRNNMDESEAGRVKRCSKCDERGHTYKHCPKDKEKPSAAEAGLSGSAADGARPTEMARQDTPQLLDPAIDLRHWSHLTAVQGAQLGTFRARTCGELLTVHDSFVERLREAGLLPMCRLVEAAAGHADPARRWTVDRSLLAALVDRWRPETHTFHLPCGEVALTLQDVSYLLGLPLAGDAVGLVTTAVDWQDDLTARFALVQRAPHLPLQPLAHHRNTGPTKRWLLQFTVDQLQAEADEYSYSRCLEAYLLWLFGWVMFCGGHGHAVDKGLVHYARSIADAARRWAHVQVRRSYPEFVMEFDRLLLTDVVWXPTVPRLPRLVRRWFGFHQPFPVPFPTTVPAAVHRYTRKGQQLAGDWPAKLATFVEDWLLATEEVVEHEGEPHTEEAYQAYLRWYQPRTRTRVTFAPLEQQPHIASTRDLYARHRDQDFARCVDDINRVVVDGSTTIQRLDAGIPXDVARADAAVRRPPVPTGPRPAAHVPRPTPPPHGGFRAPFSTPPXAQFAMTQAAYFSHAAGXAGTSSQGPPLDHAGTSSDRLLSSTVLFDITDFDFASGSAEDVIGPSQLGGAPPVQTQDQAQATPPPDTRATHAVPPDRFTYSQDHVRAQARRTKRGRGAGQGQ

SEQ ID NO: 183598 - protein, 1322 aa, Oryza sativa
  unsure (1)..(1322): unsure at all Xaa locations
  Clone ID: PAT_MRT4530_80674C.1.pep
MSNKQTFQVYHGPGNVRYGPTGVDLSDFIVSERGIDRPAERSVPSIKGWLMRGLRVDPQTSDITINVIDPGVQMNMDDGEGPSAEVNETSVEEVNAREDGGVVAPVGIQPGGVADEGETVGAIVDEMEREDSDNERVEEGDSSDDETDINPAEWASQDFSGLIVSEEDSVRWEYKKNEVIQGAIYSRAEDMKEAVKHFAVSLHREFRVAKSNRSQYEVRCVKEKDGCPWRVHAYKGKWKDYWTVSVVTKHTCFLPGVQKYHRNITCAFVASEMYAHVIDNLTYEPRSIIRHIEETYKYTISYAKAWRAKQKIIEMRFGTYEASYDNLPRLLGVIEERNPGSSYEVKKFPSIEHPGKSVLQRAFLALHACKMAFVNCHPVLCIDGTFLTGKYRGQILTATGVDGTIRHAGILRAIGELQFGSMERGYTGVWEHVQSRWCMRHLGATFFKQFKNKELMNMFKRLCNQNQEKKFNELWKRLDELTAKCSDQRAAAPSTAVADPPQALGPLPTDSPTLKKLEELRKKAMKHRVLVQGTQQHRXECGIPDTVYVSQYFSKQAIYHTXWSGEIYGFGIAGEFTETNDEVLNIPDPSKLRGKAGRRRTRRIRNDMDESEAGRVKLCSKCDEHGHTYKHCPKDKEKPSAAEAGLSGSAADGARPTXMARQDTPQLLDPAIDHRHRSHXTAVQGAQLGTFRARTCGELLTVHDSFVERLREAGLLPMCRLVEAAAGDADPARRWTVDRSLVAALVDRWRPETHTFHLPCGEVAPTLQDVSYLLGLPLAGDAVGPVTTAVDWQDDLTARFALVQRAPHLPLEPLAHHRNTGPTKRWLLQLTVEQLQAEADEYSYSRCLEAYLLWLFGWVMFCGGHGHAVDKGLVHYARSIADAAVGEVPQWSWGSALLAALYRALCESCTKTDPSATFGGCPLFLSIWAAERIAIGRPEVDQHAYEESLYEERPEVDYPTMGTLWCRRQRRWAHVQVRRSYPEFVMEFDRLLTTDVVWXPTVPRLPRLVRRWFGFRQPFPVPFPTTVPAAVHRYSRKGQQSAGDWPAKLATFVEDWLLATEEVVDHEGEPHTEESYQAYLRWYQPRTRTRVDDINRVVVDGSTTIQRLDAGIPVPVEEYLTTYTRMVESMRSILRVLTCRADDVARADAAVQWPPVPTGPCPAAHVPRPTPPPHGGFRAPFSTPPSSARPSVVPPTGFAQFAMTQAAHFSQAAGSASQAAGTSSQGPPLDHAGTSSDPFLSSTVLFDITDFDFASGSTEDVIGPSQLGGAPPVQTQDQAQATPPRDTRATRAVPPDRFTYSQDHVRAQARRTKHGRGAGQGQ

SEQ ID NO: 183599 - protein, 51 aa, Oryza sativa
  Clone ID: PAT_MRT4530_80675C.1.pep
MGAEAARGGCIHTAGYGETSANMSWLQELTELLLQQHTVAVLGTECKLYRL

SEQ ID NO: 183600 - protein, 166 aa, Oryza sativa
  Clone ID: PAT_MRT4530_80676C.1.pep
EETLVRGRNGGAGAPAQAHAPFFRRGTAQRAKEEGGGAQQPPEIEEAEDQSRRRPGRLTHHQPPKPAGAATPPCEHRRILPPARRQPHCCTCPPPRECRRTRRAAMRQGTAPTQRLTAAPPPRSAARRRRLRIWRRRAQICRRPAWRSHCHLRTPRPPRRDRAPPP

SEQ ID NO: 183601 - protein, 1366 aa, Oryza sativa
  Clone ID: PAT_MRT4530_80677C.1.pep
MSNKKIFQVYHRPGNVRYGPTGVDLSDFIVSERGIDRPAERSVPSIKGWLMKGLRVDPQTSDITINVIVSRATEGFYWELMPVQNSRVWRWYLENALQHGWPLALVPFVHPKDPGVQMNMDDGEGPSAEVNETSVEEVNAREDGGVVAPVGIQPGGVADEGETVGAIVDEMEREDSDNERVEEGDSSDDETDINPAEWASEDFSGLIVSEEDSVRWEYKENEVIQGAIYSRAEDMKEAVKHFAVSLHREFWVAKSNWSQYEVRCVKEKDGCPWRVHAYKGKWKDYWTVSVVTKHTYFLPGVQKYHRNITCAFVASEMYAHVIDNLTYEPRSIIRHIEETYKYTISYAKAWRAKQKIIEMRFGTYEASYDNLPRLLGVIEERNPGSSYEVKKFPSIEHPSKSVLQRAFLALHACKMAFVNCRPVLCIDGTFLTGKYRGQILTAIGVDGNNQVLPLAFAFVENENTDSWYWFLKLVKTKVVGMRPNVCLIHDRHAGILRAIEELQFGSMERGYPGVWEDVQSRWCMRHMGANFFKQFKNKELMNMFKRLCNQNQEKKFNELWKRLDELTAKCSDQRAAAPSTAVADPPQALGPLPTDSPTLVRKTGLEIRKFSQWILHEPKEKWAKAYDTGGARYGLMTTNLAEVYNWVMRGVRGLPLVGIVEFILHGTCRYFRDRFQAVLPSMPNNSSLFGAFMQKKLEELCKKAMKHRAVVQGTQQHRFEILCQDKAGRGIYRKRVKQECVLKADGTCHCSCAKPKLLHRPCTHVIAAAAECGIPDTVYVSQYFSKQAIYHTWSGEIYGFGIAGEFTETNDEVLNIPDPSKLRGKAGRRRTRRIRNDMDESEAGRVKRCSKCDEHGHTYKHCPKDKEKPSAAEAGLSGSAADGARPTAERIAIGRPEVDQHAYEESLYEERPEVDYPTMGTLWCRRQRRWAYVQVRRSYPEFVMEFDRLLPTDVVWEPYSAAATQARAPLGLSTLCTRDQAYWMTTVPMVFDICVEPHAHFRVMRQFGFRQPFPVPFPTTVPAAVHRYSRKGQHSAGDWPAKLATFVEDWLLATEEVVDHEGEPHTEESYQAYLRWYQPRTRTRVTFAPLEQQPHVASTRDLYARHRDQDFARAVDDINRVVVDGSTTIQRLGAGIPVPVEEHLTTYTRMVESMRSILRVLTCRADDVARADAAVQRPPVPTGPRPAAHVPRPTPPPHGGFRAPFSTPPSSARPSVVPPTGFAQFAITQAAHFSQAAGSASQVAVSTSHSAQFWQYTGTSSQAAGTSSQGPPLDHAGTSSDRLLPCTLLFDITDFDFASGSTEDVIGPSQLGGAPPVQTQDQAQATPPRDTRATRAVPPDRFTYSQDHVRAQARRTKRGRGAGQGQ

SEQ ID NO: 183602 - protein, 72 aa, Oryza sativa
  Clone ID: PAT_MRT4530_80678C.1.pep
WAVTGWVPLANKDGQKWKRDGNGVFCIKPAEKGGCVQGIKLGKKGFFSQTLKTRTVIELGALIIVISCMYCM

SEQ ID NO: 183603 - protein, 1274 aa, Oryza sativa
  Clone ID: PAT_MRT4530_80679C.1.pep
MSNKQIFQVYHGPGNIRYGPTGVDLSDFIVSERGIDRPAERSVPSIKGWLMRGLRVDPQTSDITINVIVSRATEGFYWELMPVQNSRVWRWYLENALQRGWPLALVLFVHPKDPGVQMNMDDGEGPSAEVNETSVEEVNAREDGGVVAPVGIQPGGVADEGETVGAIVDEMEREDSDNERVEEGDSSDDETDINPAEWASEDFSGLIISEEDSVRWEYKENEVIQGAIYSRAEDMKEAVKHFAVSLHREFWVAKSNRSQYEVRSIIRHIEETYKYTISYAKAWRAKQKIIEMRFGTYEASYDNLPRLLGVIEERNPGSSYEVKKFPSIEHPSKSVLQRAFLALHACKMAFVNCRPVLCIDGTFLTGKYRGQILTAIGVDGNNQEDVQSRWCMRHMGANFFKQFKNKELMNMFKRLCNQNQEKKFNELWKRLDELTAKCSDQRAAAPSTAVADPPQALGPLPTDSPTLVRRTGLEIWKFSQWILHEPKEKWAKAYDTGGARYGIMTTNLAEVYNWVMRGVRGLPLVGIVEFILHGTCRYFRDRFQAVLPSMPNNSILFGAFMQKKLEELRKKAMKHRALVQGTQQHRFEILCQDKAGRGIYRKRVKQECVLKADGTCHCSCAKPKLLHRPCTHVIAAAAECGIPDAVYVSQYFNKQAIYHTWSGEIYGFGIAGEFTETNDEVLNIPDPSKLRGKAGRRRTRRIRNDMDESEAGRVKRCSKCDEHGHTYKHCPKDKEKPSAAEAGLSGSAADGARPTEMARQDTPQLLDPAIDHRHRSYLTAVQGAQLGTFRARTCGELLTVHDSFVERLCEAGLLPMCRLVEAAAGDADPARRWTVDRSLLAALVDRWRPETHTFHLPCAERIAIGRPEVDQHAYEESLYEERPEVDYPTMGTLWCRRQRRWAHVQVRRSYPEFVMEFDRLLPTDVVWEPYSAAATQARALLGTRARDSSQLATFVEDWLLATEEVVDHEGEPHTEESYQAYLRWYQPRTRTRVTFAPLEQQPHVASTRDLYARHRDQDFARAVDDINRVVVDGSTTIQRLGAGIPVPVEEHLTTYTRMVESMRSILRVLTCRADDVARADAAVQRPPVPTGPRPAAHVPTPTPPPHGGFRAPFSTPPSSARPSVVPPTGFAQFAMTQAAHFSQAAGSASQAAVSTSHSAQFWQYTGTSSQAAGTSSQGPPLDHAGTSSDRLLPSTLLFDITDFDFASGSTEDVIGPSQLGGAPPVQTQDQAQATPPRDTRATRAVPPDRFTYSQDHVRAQARRTKRGRGAGQGQ

SEQ ID NO: 183604 - protein, 254 aa, Oryza sativa
  Clone ID: PAT_MRT4530_8067C.1.pep
MRKFVTVQHREWYPNKELILGADRKRRGGGALQGGPGGGAQGGASGGSDGGVVALQGRHGKRRQWRICGSMPAPSGGRRGGSGRGRGKEQQRQIAHVHDHESPHLDRALAHVPPRCDANTDEATFTTVIPVMPVIALRSTEASSPPPRRHLELTPSRTPFPLLPPPPGESPHSRLSQLAANLFPLPIRACRQPEPPICAHCRLPSHAQRQHHRGEVTKKRGSLGGVGEAGALTSWGRFKIHRRAMYCLYPFLSP

SEQ ID NO: 183605 - protein, 695 aa, Oryza sativa
  unsure (1)..(695): unsure at all Xaa locations
  Clone ID: PAT_MRT4530_80680C.1.pep
WILHEPKEKWAKVYDTGGARYGIMTTNLAEVYNWVMRGVRGLPLVGIVEFILHGTCRYFRDRFQAVLPSMPNNSILFGTFMQKKLEELRKKAMKHRALVQGTQQHRFEILCQDKAGRGIYRKRVKQECVLKADSIYHCSCSKPKLLHRPCTHVIAAAAECGIPDAVYVSQYFSKQAIYHTWSGEIYGFGIAGEFIETNDEVLNIPDPSKLRGKAGRRRTRRIRNNMDESEAGRVKRCSKCDERGHTYKHCPKDKEKPSAAEAGLSGSAADGARPXMARQDTPQLLDPAIDLRHRSHLTAVQGAQLGTFRAQTXRLREAGLLPMCRLVEAAAGHVDPARRWTMDRSLLAALVDRWRPETHTFHLPCGEVAPTLQDVSYLLGLPLAGDAVGPVTTAADWQDDLMARFALVQRAPHLPLQPLAHHRNTGPTKRWLLQFTGHAVDKGLVHYARSIADAAVGEVPQWSWGSALLAALYRGLCEACTKTDPSATFGGCPLFLSIWAAERIAIGRPEVDQHAYEESLYEERPEVDYPTMGTLWCRRQAAYFSHAAGSASQPAASTSHSAQFQQYTGASSQAAGTSSQGPPLDHAGTSSDRLLSSTVLFDITDFDFASGSAEDVIGPSQLGGAPPVQTQDQAQATPPPDTRATRAVPPDRFTYSQDHVRAQAGGPSVVAARGRASRAVFSLFICFTFQYCMLV

SEQ ID NO: 183606 - protein, 107 aa, Oryza sativa
  Clone ID: PAT_MRT4530_80681C.1.pep
LSLPVGAFVRDLRLSERGGEIVLREGTAARSWVHLGWTFPTGTAVLSTCFLQMPALRMNKMLSTDYLGTQELHSFCKTTEILEDSQSQEIALDRTAVGSTLLSHQNG

SEQ ID NO: 183607 - protein, 138 aa, Oryza sativa
  unsure (1)..(138): unsure at all Xaa locations
  Clone ID: PAT_MRT4530_80682C.1.pep
MNHSMHCRVKLSYTQLIRLCYEEWRSCRGPDQASXISLHKLSCRFHETYVKSXSRVCLLCTTPLLVVXTILLVGVHRRSREQVSGTFVFDVLHQEKVVIRFLGSASLECSLFXVHNGSSSSSLACCALSLTHGTASPS

SEQ ID NO: 183608 - protein, 576 aa, Oryza sativa
  Clone ID: PAT_MRT4530_80683C.1.pep
MAARAPAPGFPFHASGSQWTQPQRRSKRSSAVHVYPTNSMNSQGLQVVTDPTSLTAGPGIYLLSLPVGAFVRDLRLSERGGEIVLREGTAARSWVHLGWTFPTGTAVLSTCFLQMPALRMNKMLSTDYLGTQELHSFCKTTEILEDSQSQEIALDRTAVGSTLLSHQNVCSTSEVSGGNFGIAEVSFLQDEYDAETTGVLPPSFLSCGSRSMLPISVPSSSSSSLETVLFSDSTYSDLQVKETNHNTTAMDENNEFLQLILSSNDEGYNAGSEFQVWDVLDFYFSESFSAVQFDSLMGFTNDVSSSHHDCMNLVDMVERPVALLSLNDTEEQNNSTDEFPDDTSSYLQMKPSDSETESNYASRDVAVTEYVDEKPLSRGLPDLMDVDSPGRLSKSARSKQITLVLDLDETLVHSTLDHCDNVDFTLQVFFNMKNHTVYVRQRPHLKMFLEKVAQMFDLVIFTASQRIYAEQLIDRLDPDGRLISHRIYRESCIFSEGCYTKDLTILGVDLAKVVIVDNTPQVFQLQVDNGIPIKSWFDDPSDQELVELLPFLETLVGVEDVRPIISKTFHHTLEQN

SEQ ID NO: 183609 - protein, 148 aa, Oryza sativa
  unsure (1)..(148): unsure at all Xaa locations
  Clone ID: PAT_MRT4530_80684C.1.pep
PTRPARVGGGGGRDPSNNPAVGRLRELVQRGDAADGWEKSWEAAVTPWDLGKPTPIIEHLVKSGTLPKGRALVPGCGTGYDVVALASPERFVVGLDISSTAVEKAKXFFCALDPSLRLAWAETVSGLLKPHGELITLIYLISDQEGGP

SEQ ID NO: 183610 - protein, 353 aa, Oryza sativa
  unsure (1)..(353): unsure at all Xaa locations
  Clone ID: PAT_MRT4530_80685C.1.pep
LTIWNCWNLYADDAAVFMNTTKSDVRAFIDLLTRFGKVSGLCTNLQKSQVAPIRCDGLDLDDILDGILATRASFPVKYLGLPLSTGRLRKCDFQPLFDKSMNYIEGWRGRHVGLAGRSTLVKVVLTSQPIFLLTGLKASKESLEILDKQRRQFLWVGNETVTGGXCKVNWTRTCLPTASRGLGILNLKKFARALRLKWLXHEWKSPEKAWVGLETPCDETDMLLFAAATTIQVGDGAKASFWDLAWLXGRRLKDVAPLVYVASRKKSRTLQQAAQMDQWLLDLALPTTEGWTTELIDQVIAVWSAIRSVQFTDQEDXITWKLNNHGEYTASSAYKAQILGTTSSNFDNLIWRP

SEQ ID NO: 183611 - protein, 93 aa, Oryza sativa
  Clone ID: PAT_MRT4530_80686C.1.pep
MPRAMYARPGLGSTLMHAYYGEEYRYNQSISAQATLPKTGYTVKQPISDMVYEGKGKTRIATVEDLSPYIYNVGLIGSQNCMQTKQLKLPRAK

SEQ ID NO: 183612 - protein, 112 aa, Oryza sativa
  Clone ID: PAT_MRT4530_80687C.1.pep
MEGVKSLIMCALVLGLVLQQEKIHVEAKSCCPSTSVRNVYNSCRFAGGSREACAKLSTCKHFDGSCQPPYDHLTLHSDTVAANEGVNAAVERCEDACDRFCTNEAQTVTVVS

SEQ ID NO: 183613 - protein, 100 aa, Oryza sativa
  unsure (1)..(100): unsure at all Xaa locations
  Clone ID: PAT_MRT4530_80688C.1.pep
MGHATTPNSTASRPVVAQPXPAQRPPLAAPTPTRTPRATAPPCAEPPRRATPARHPAAPGHRATLPPRLAASSTSAAARPHLAPTRPRPPLAEPPPGRAA

SEQ ID NO: 183614 - protein, 1009 aa, Oryza sativa
  Clone ID: PAT_MRT4530_80689C.1.pep
MPESATGREIVTLGEGRPAPDYPGRSVFFLPFAMAGLVPPFSSFFMDVLEFYDLQMAHLTPNAVMTLAIFAHLCEMFIGVRPSLRLFRWFFTVQSLSPPSVVGGCYFQPRGPVLNRYIPCALRKKWDDWKSDWFYTPLADEARLRLPSQPPAQASSWRAPVDLGDGYDAVLDHLAGLRSQGLTGAMVYGDYLRRRIAPLQRRARGDWEYTGSEDFMRTHQGVRWDWAPEDFKILVQRVLNLNSVEAALIPQGILPLCSDPDRASILTIMMGVGASEERAPKGHDGAGGSRRGEQSTPRGGRASGSRVRGPGSSRPADTRGKRKQGGTPPPSPPRGGGAARASSRRPEGAAPTSQPEGERMKKRPRKMGETEPSRGNLISPPKWSFNRPPRSEIPSRPSRHSKSGQSEAEDPAAAEARRREADRREAVDRLREAEEAAQEAARARQAEEIAREGAARARQAEEAAREEAARAHQAEETAREEAGFRQDEAMATSEAARDEAAGALLGPTPSGDAQATTSGAAGDEAAGASLGPTPSGDAQATTSGAAGDEAAGASLGPTPSGDAQGPNGAQVEALQAERAELDAAWARVEEGRRSVEAMVEVGRKAHRRHVSELETRKKVLAEIAKEVEEERGAALIATTVMNEAQDTLRLQYGSWEAELGKKLDAAQGVLDAAAAREQRAAETEAASRRREETLEARAMALEERACAVERDLADREAAVTIREATLAAHEAACAEEELALRLREDALTEREQALEGAEAAAQQLADSLSLREAAQEEQARRNLEGARAERAALNQRAAELEARAKELDTRARSSGAAAGESDLAARLADAEHTIAGLQGALDSSAGEVEALRLAGEVGPGMLWDAVSRLDRAGRQVGLWRGRTVKYADNQGGLAQHLSKMAGALQRLPEELEKTIKSSSRDLAQGAVELVLASYQARDPNFSPWMALDEFPPGTEDRARAQVRDAADYIVDSFEGSAPRLAFAPNSDEEGNTGGADDSDVEAGDPGASE

SEQ ID NO: 183615 - protein, 55 aa, Oryza sativa
  unsure (1)..(55): unsure at all Xaa locations
  Clone ID: PAT_MRT4530_8068C.1.pep
FFFFFFYAPDIYFHHTARQTGQDSHYMYHFTRKQDLRRHDPGTFSTPKPXYLKDS

SEQ ID NO: 183616 - protein, 83 aa, Oryza sativa
  Clone ID: PAT_MRT4530_80690C.1.pep
MARELSVAKRLVLLSGSNKSSSGDSRSAVFASSSSSVNAPPVTAWVMPHPAEDYHSDEELEDDSQEVPGIQRRTWLYRYIFEI

SEQ ID NO: 183617 - protein, 1046 aa, Oryza sativa
  Clone ID: PAT_MRT4530_80691C.1.pep
MARGSAPLDGSVLPPSRIVSERQAGLPRRFMPEFATGREIVSLGEGCPAPRYPGRSVFFLPFAMAGLVPPFSSFFMDVLEFYDLQMAHLTPNAVMTLAIFAHLCEMFIGVRPSLRLFRWFFTVQPVSPPSVVGGCYFQPRGPVLNRYIPCVLRKKWDDWKSDWFYTPLADEARLRLPSQPPAQASNWRAPVDLGDGYDAVLDRLAGLRSQGLTGAMVFGDYLRRRIAPLQRRARGAWEYTGSEDCMRTHRGVKWDWVPEDFKVMIQRVLNLSSAEASLIPQGVLPLCSDPDRANILSIMMAVGASEERAPKGHDSASGSRKGDQSTPGGGCASGPRDGGSGGSRPADARGKRKQEGTSSPSPPRGGGAARVSSRRPEGAAPTPQPEGERKKKRLRKMGGQNHPGETSFPLQGGRLTDPLAGSSHAHCGYIHSSNTSFHSPILFVFWLFFCFSEIPSRPSCQFKSGQSEAENAATTEARRRESDRREAADRLREAEEAAQVAIRARQAEEAAREEAKLRQAEAATTSEAARDEAAGASLGPTPSGDAQDKPGPGDIPESGTSIGGPSRAASSPRRLSPTPSAAPLSAEPLLQALAVANTTVLDGLSAQMEALQAERVELDAAWARVEEGRRSVEAMVEVGRKAHRRHVSELEARRKMLGEIAREVEEERGAALIATTVMNEAQDDLRLQYGSWEAELGKKLNAARGVLDAAAARERRAAETEVASRRREETLEARAMALEERACVVERDLADREAAVAIREVTLAVHEAACAEEESALRLREDTLTERERALEEAEAAAQRLAESASLREAAQEEQARRNLESARAERAALNQRAAELEAQARELDARARSGGAATGDSDLAARLAVAEHTIADLQGALDSSTGEVEALHLAGEIGPSMLRDAVSRLDRAGRQAGLWGGRTVKYAANQGGLAQRLSEMAGTLQRLPEELEGTIKSSSRDLARGAVELVLASYQARDPDFSPWTALDEFPPGTEDGARAQVRDAADHIVHSFEGSAPRLAFALNSDEEGDDGGVGDSGDEAGDPGASE

SEQ ID NO: 183618 - protein, 92 aa, Oryza sativa
  Clone ID: PAT_MRT4530_80692C.1.pep
MEGNRAAAVALCCMISLLSDATGSSTQSAGRTYLGSSACMDDCSPNKNKVVACDCATFCQLAICGTASNGAADVASCVDGCTKNRNLYTKFL

SEQ ID NO: 183619 - protein, 862 aa, Oryza sativa
  Clone ID: PAT_MRT4530_80693C.1.pep
MARGSALLDGSVLPPSRIVSERQAGLPRRFMPESATGREIVTLGEGRPAPDYPGRSVFFLPFAMAGLVPPFSSFFMDVLEFYDLQMAHLTPNAVMTLAIFAHLCEMFIGVRPSLRLFRWFFTVQSVSPPSVVGGCYFQPRGPVPNRYIPCALRKKWDDWKSDWFYTPLADEVRLRLPSQPPAQASSWRAPVDLGDSYDAVLDRLAGLRSQGLTGAMVYGDYLRRRIAPLQRRARGAWEYTGSEDFMRTHQGVRWDWAPEDFKILVQRVLNLNSVEAALIPQGILPLCSDPDRASILTIMMAVGASEERAPKGHDGAGGSRRGEQSTPRGGRASGSRDRGPGSSRPADARGKRKQGGTPPPSPRGGGAARASSRRPEGAAPTSQPEGERKKKRPRKMGETEPSRGNLISPPLKWSFNRPPRSAQVEALQAERAELDAAWARVEEGRRSVEAMVEVGCKAHRRHISELETRKKVLAEIAKEVEEERGAALIATTVMNEAQDTLRLQYGSWEAELGKKLDAAQGVLDAAAAREQRAAETEAASRRREEALEARAMALEERACVVERDLADREAAVTIREATLAAHEAACAEEELALRLREDALTERERALEGAEAAAQQLADSLSLREAAQEEQARRNLEGARAERAALNQRAAELEARAKELDARARSGGAAAGESDLAARLAAAEHTIADLQGALDSSAGEVEALRLAGEVGPGMLWDAVSRLDCAGRQVGLWRGRTVKYAANQGGLAQRLSKMAGALQRLPEELEKTIKSSSRDLAQGAVELVLASYQTRDPNFSPWMALEEFPPGTEDRARAQVRDAADHIVDSFEGSAPRLAFAPNSDEEGNAGGADNSDDEAGDPGASD

SEQ ID NO: 183620 - protein, 1068 aa, Oryza sativa
  Clone ID: PAT_MRT4530_80694C.1.pep
MARGSALLDGSVLSPSRIVSERQAGLPRRFMPESATGREIVMLGEGRPAPDYPGRSVFFLPFAMAGLVPPFSSFFMDVLEFYDLQMAHLTPNAVMTLAIFAHLCEMFIGVRPSLRLFRWFFTVQSVSPPSVVGGCYFQPRGPVLNRYIPCVLRKKWDDWKSDWFYTPLADEARLRLPSQPPAQASSWRAPVDLGDGYDAVLDRLAGLRSQGLTGAMVYGDYLRRRIAPLQRRARGAWEYTGSEDYMRTHQGVRWDWAPEDFKIVVQRVLNLSSVDASLIPQGVLPLCSDPDRASIRTIMMAVGASEERAPKGHDGAGGSRRGEQSTPGGGRASGPRDGGPGSSRPADARGKRKQGGTPPPSPPRGGGAARASSRRPEGATPTSQPEGERKKKRLRKIGGTEPSRGNLISPPRWSFNRPPRSEIPSRPSRHSKSGQSEAEDPAAAEARRRESDRREAADRLREAEEAAQEAARARQAEENAREEAARARQAEEAAREEAARARQAEEAAREEAGFRQDEVMATSEAARDEAAGASLGPTPSGDAQATTSGAAGDEAAGASLGPTPSGDAQDQPGPGDIPESGMSIGGPSRAASSPRRLFPTPSVAPLSAKPLLQALAAANTAVLDGLSAQVEALQAERAELDAAWARVEEGRRSVEAMVEVGRKAHRRHVSEIEARQKVLAEIAKEVEEERGAALIATTVMNEAQDTLRLQYGSWEAELGKKLDAAQGVLDAAAARERRAAETEVASCRREETLEARAMALEERACVVERDLADREAAVSIREATLAVHEAACAEEESGLRLREDALTERERALEEAEAATQRLADSLSLREAAREEQARRNLEGVRAERAALNQRAAELEARAEELDARARSGGAAAGESDLAARLAAAEHTIADLQGALDSSAGEVEALRLAGEVGLGMLRDAVSHLDRAGRQAGLWGGRTMKYAANQGGLAQRLSEMAGTLQRLPDELERTIKSSLRDLARGAVELVLASYQARDPDFSPWMALDEFPPGTEDDARARVRDAADHIVHSFEGSAPRLAFALNSDEEDDDGGAGDSGDEAGEPGASD

SEQ ID NO: 183621 - protein, 2020 aa, Oryza sativa
  unsure (1)..(2020): unsure at all Xaa locations
  Clone ID: PAT_MRT4530_80695C.1.pep
MGFVSGIDDFVFPPRQAFRFGSLDFITNDFGKISLLDSDPNQSRRGXVSAPFGIPNSAEIYPKIISIESASNHLDEIQSTPARPDQDDGPYPSILMRLPNDLAAVFTTKASSPRRPRRDPASASIQSNSREVGVILQPLGTVSTEELDGYLSSPGVSSRPTEILEYDDFGYRYDFSNFDDFDESYEDDYTPLFFGVFMADNETAEQWXTREAEEECTRQEAERHRLEEERQRQERERLQREQQDRERAAKEAEDRRQRTLESGRRARELIRQQDVEGTMVFRTPQQNTVAAITLLDTLLKEGALNQADHVVNILNXTKAMITVSVPVNSTSIRTPTGSRVPPLRSQDYHQPSLSVVGEGSNRRSRDHSERSVHSPPDRHRERRAERAHSPHRRRPIDLRETINQRRATRGYNPHHSPDRYDDDVDGVAAFTNDLRRVDWPAGFKPTGIEKYDGTTNPESWLTVYGLAIRAAGGDNKAMANYLPVALADSTRSCLHGLPRGTIGSWAELHDHFIANFQGTFERPGTQFDLYNIIQKLGESLRDYIRRFSKQRNKIFNITDDVIIAAFTKGIRHELLVGKFGRKPPRTVKXMFEKANEYAKAEDAVTASKQSGSTWKPKKDAPTTGGSGSTNHKDHKRKPEELVATTTPSSRQRSRVNTFNKIMNSQCPHHPNSNHAAKDCFVYKQVAEQYAKNARKPTDGDQGMSKKKDDGDDAPTGFQDSRKELNHIFGGPLAYESKRKQKLTEREINAVXPDMPQYLRWSETTIKFDRSDHPDRVVHPGRYPLVLDPVVCNVKLRRSLIDGGSALNILFAKTLDDMQIPRTELKPSSAPFHGVIPGLSATPLGQITLPVTFGTREXFRTENICFEVADFETAYHAILGRPALAKFMAVPHYTYMMMKMPGPRGVISLQSDIKQAVTGDKESCEMAQNREITLAQEEIRLAASTATEGEVPATKMSKSGESDTKTKKIPLDPSDPTKTANNKDIFAWKPSDMPSIPREVIEHSLHVKEDAKPIKQXLRRFAQDRKDAIKEELTKLLAAGFIKEVLHPDWLANPVLVRKKKGQWHMCVDYTDLNXSCPKDPFGLPRIDQVVDSMASCELLSFLDCYSGYHQIRLKESDCLKTSFITPFGAYCYITMPFGLKNAGAIYQRMIQRCFSRQIGRNVEAYVYDVVVKTKQKDDLTADLEETFVSIRTFRMKLNPEKCIFGVPSGKLLGFMVSHRXNPEKINAILNMKPPSSQKDVQKLTGCMVALCRFVSRLGERGMPFFKLLKKTDNFQWGPEAQKAFEDFKKLLTTPPVLASPHPQEPLLLYVSATSQVVSTVLVVEREEDGHVQKVQRPIYFISEVLANSKTRYPQVQKLLYGVLITVRKLSHYFQSHSVTVVTSFPLGDILHNREANGRITKWALELMSFDLSFKPRTSIKSQALADFVAEWTECQEDTTVEKEEYWTMHFDGSKRLSGTGAGVVMISPTGERLRYVLWIHFSASHYVAEYEVLLHGLRIAISLGIRRLTVHGDSQLVVNQVMKEWSCLDDNMTAYWQEVRKLEDKFDGLELTHVLRHNNEAADRLANFGSKREAAPSDVFVEHLYELTVPRKETTDATDTQEVNMLEADWREPFIKFLTKQELPQDKDEAKRISRXSKLYIMHRAELYKKSPSGILQRCVSLEEGRQLLTDIHSGICGNHAAARTIIGKAYRQGFFWPTAISDADKIVRTCEGCQFFARQTHLPAQELQTIPLSWPFAVWRLDMVGPFKKATGGYTHLFVAIDKFSNWIEAKPVVTITADKARDFLINIVHRFGVSNWIITDNGTQFTGGVFKDFYEDFGIKICYASVAHPMSNGQVERANGMVLQGIKARVFDQLRPYAGKWVDQLPSVLWSLRTTPSRATGQSPFFLVYGAEAMLPTEVEFESLXFRNSREERYEENRVDDLNRLEEAREAALIQSAWYLQGMRRYHNCNVRSRAFLVGDLVLRKIQTTRDRHKLSPLWEGPFIISEVTRPDSYRLKREDSTHVDNSWNIEHLRRFYA

SEQ ID NO: 183622 - protein, 128 aa, Oryza sativa
  Clone ID: PAT_MRT4530_80696C.1.pep
MAGHLLTRHVPYTAGTYNKDVDEEVSVDSSRMNVALAPPSDDGSTIDPVDMITSPRATLRYTDERRHRSRQRGRESRTDDIEERRASRTNNINLDLEGEHHGRMTSHLSMTKRERIMNEQHDDFGLPR

SEQ ID NO: 183623 - protein, 1022 aa, Oryza sativa
  unsure (1)..(1022): unsure at all Xaa locations
  Clone ID: PAT_MRT4530_80697C.1.pep
MARGSALLDGSVLPPSRIVNERHAGLPRRFMPESATGREIVMLGEGRPAPDYPGRSIFFLPFAMAGLVPPFSHFFMDVLEFYDLQMAHLTPNAVMTLAIFAHLCEMFIGVRPSLQLFRWFFTVQSVSPPSVVGGCYFQPRGPVLNRYIPCVLRKKWDDWKSDWFYTPLADEARLRLPSQPPAQVSSWRAPVDLGEEYDAVLDRLAGLRSQGLTGAMVYGDYLRRRIAPLQRRARSAWEYTGPEDYMRTHQGARWDWAPEDFKIVVQRVLNLSSAEASRLPQEILPLCIDPDRVSILTIMLGVGASEERAPKGHDGAGESRPGKKSAPGGGRASGPRVGGSGSSRPADAPGKRKLGGTPPPSPPRGGGAVRTSGRRPEGAAPTSQPEGERKKKRLRKMGETEPARGNLISPPRWSFNRPPRSDVPSHSSRRPKSGQSEVEDPAAAEERRRESDRREAAARLREAEEAAREAARVRQAEEAAREEAARARQAEEAAQEEAARARQAEAAAAAGASLGPTPSGGPQATSFEAARDEGRGASPGPTSPGDAQDQTGPGDIPEPAHSRGAKAGWPFSQAVFLFSSCRPVRREANMEGFGRRNTGVLDGFSAQVEALRAERAELEAAWARVEEGRRSVDAMVEVGRKAHRRHISELEARKAALAEIAREVEEEREAALVATTAMVEAQDTLRLQHASWEAELKSKLDAAQGVLDSAAARERRATEAEAASRRREEALEARAMALEEHAGAVERGLMDREATTALREATLAAHEAACAEEESALRLREDALAERERALEEAEATTRRLADSLSLREAAQEEQARRNLESVRAERAALEQRVANLEAREKELAAGARIXRALDSSTGEAEALRLAGEIGPGMLWXAVSRMKRAGRQAGLWEGQTTVPPTNLEGLAPHLNRMAWVLERLPEELEKTIKASSRDLARGAVELVLASYQARDPNFSPWMALEEFPPGTEDEARARVGDAADHIVNGFEGSAPRLAFAPSSDEEGDTSSEDGGGDEAGDPGAYE

SEQ ID NO: 183624 - protein, 37 aa, Oryza sativa
  Clone ID: PAT_MRT4530_80698C.1.pep
AGEHKTYSISLQEPIQTRLTPLDRKEAIRVLPATGEK

SEQ ID NO: 183625 - protein, 829 aa, Oryza sativa
  unsure (1)..(829): unsure at all Xaa locations
  Clone ID: PAT_MRT4530_80699C.1.pep
MCHVWSVLRLAVAAAAGAMSSNSWWQVFVLGYSAVEIDGGERGKTKPLLKALKELIYTGSQRWGEELNPILWLGIAIRSRAKHQERATYQRIIQRCFSTQIGRNVEAYVDDVVVKIKQKDGLIADLEETFSSIRAFKMKLNLEKCIFGVPSGKLLGFMVSQRGIQANPEKINAILNMKPPSSQKDIQKQTGCMAALSRFVSRLGKRGMPFFKLLKKTNNFPWGPEAQKAFEDFKKLLTTSPVLASPHPQEPLLLYVSATSQVVSAVLVVEREEEGHVQKVQRPIYFVSEVLADSKTRYPQXLSHYFQSHPVTVVTSFPHGDILHNREANGRIAKWXLDYWTMHFDGSKRLTGTGAGVILISPTGERLSYVLWIHFSASHNVAEYEALLHGLRITISLGIRRLIVRGDSQLVVNQVMKEWSCLDDNMTAYRQEVRKLEDKFDGLELTHVLRHKNEAAHRLANFGSKWEAAPSDVFVEHLYEPTVPRKEAIEAMDTQGVSMIEADWREPLIKFLTKQELPQDKNEGERISRRSRLYIIHEAELYKKSPSGILQRCVSLEEGRQLLKDIHSGICGNHAAARTIVGKAYRQGFFSPTAVFDADKIGLDMVGPFKRAVGGYTHLFVAIDKFSKWIEAKPVITITADKARDFFINIVHRFGVPNRIITDNGTQFTGGAFKDFCEDFSIKICYASVAHPMSNGQVERANEAMLPSEVEFESLRFRNFNAEGYEEGRVDDINRLEEAREAALIQSTRYLQGLRRYHNRNVRSRAFLVGDLVLRKIQTTQDRHKLSPLWEGPFIIAEVTRPGSYRLKREDGTLINNSWNIEHLRRFYA

SEQ ID NO: 183626 - protein, 162 aa, Oryza sativa
  Clone ID: PAT_MRT4530_8069C.1.pep
REGRRVARLPPDGGSPGQCCHDDHAARRRVLHSHSHGSRGEAEARSQGATSVEGQQTGRTPPRRERRPRRPSWRRRRRRRRSPRLWPSTTRWPRWWSPRRWPSARRWRRRRRRCSATSRRGGRTPGRQRPARGAGAGSPPRRPTSPAAAAVAEEAVPPRRPP

SEQ ID NO: 183627 - protein, 77 aa, Oryza sativa
  Clone ID: PAT_MRT4530_806C.1.pep
GGVGDLQQDVSPKGEIRTAKFRDEQRDTGAFGAEGLPPAAAAAVGSLWAWLAAPLLLTGVHAACCRRSPAAPPGPRP

SEQ ID NO: 183628 - protein, 297 aa, Oryza sativa
  Clone ID: PAT_MRT4530_80700C.1.pep
MRAYWTVTWPKERGKDGARGIGLICTGKISNPRRGIRKIIGDSCAQHRHLRRDMRRDQHDHYEEVHNHEKEERDMKEPPVPLITLKVEAPPLSEEGIKEQPLVEPTAEIPLSQIDLFAVPCDKEELCDNASLISMPQLVNEHAIPTVNSYCTDFKHVVHIANEVEERELRSSLNNLGYVQFDDFCELDNFKEKLFAKSDLPYPTNVIFHIFGEYNDLGIYFVHRVYICSDLEPHVVVNGLRKEHHMEKPRTVFREEGEDDVTMATTDATIAHIMDEQEDIEIKNRVDLHRQDQQPTE

SEQ ID NO: 183629 - protein, 352 aa, Oryza sativa
  Clone ID: PAT_MRT4530_80701C.1.pep
MHPRGSSPLLHPPASSVLSLRNPGEKRRGEEEEEGLTSDLENGGAEAASEGEGEAWMRRLAGGGGSAAPAVAVAHESGGAGGGGEQKGVCVSPGGRFPAFSSEGKRPGRAAKGRRDLALCRVFRQNTCCDVSQTFSALLSVRKLASTGEGSQECLHLWELLECSICDPRVGVRPGPPVICASFCDMVFKACSEAYFAIDVKTQNCDILCGKAHKWVSNGTELCRSAGFSVQALETTSGGVDDTFCYGGKASFDAISSSWTSSKERPVLSDVASWNLEDFRRWAREMPASERVSWAIGGMVLTAGLIFISLCSKRKSYIPGQKQAAIARNKSSLNKLRTGTAAAFPVGQPREL

SEQ ID NO: 183630 - protein, 1052 aa, Oryza sativa
  Clone ID: PAT_MRT4530_80702C.1.pep
MARGSTLLDGSVLPPSRIVSERQAGLPRRFMPESATGREIVTLGEGRPAPCYPGRSVFFLPFAMAGLVPPFSSFFMDVLEFYDLQMAHLTPNAVMTLAIFAHLCEMFIGVRPSLRLFRWFFTVQSVSPPSVVGGCYFQPRGPVLNRYIPCVLRKKWDDWKSDWFYTPLADEARLQLPSQPPAQASYWRAPVDLGDGYDAVLDRLAGLRSQGLTGAMVYDDYLRRRIAPLQRRARGAWEYTGSEDYMRTHQGVRWDWAPEDFKIVVQRVLNLSSVEASLIPQGVLPLCSDPDRASILTIMQAVGASEERAPRGHNGTGGSHRGEQSTPGGGRASGPRDGGPGSSRPADARGKRKQEGTPPPSPPRGGGAARASSRHLEGATPTSQPEGERKKKRLRKMGGTEPSRGNLISPPRWSFNRPPRSEIPSRSSRHSKSGQSEAEDSAAAEARRRESDRREAADRLREAEEAARETARARQTEEAAREEAGLHQAEATTSSEATRETDRQEAADRLRETEEAAQVAVQARQAEEAAREEARLRSAEATTTSEAARDEAAGASLGPTPSCDAQDQPGPGDIPESGTSIGGLSRAASSPRRLFPTPSVAPLSAEPLLQALAVANTTVLDGLSAQVEALKAERAELDAAWARVEEGRRSVEAMVEVGRKAHRRHVSELEARRKVLGEIAKEVEEERGAALIATTVMNEAQDTLRLQYGSWEAELGKKLDAARGVLDAAAARERRATETEVASRRREEALEARAMALEERACVVERDLADREAAVSIREATLAAHEAACAEEESTLRLREDALTERERALEEAEAAAQRLADSLSLREAAREEAALNQRVTELEAQAKELDARARSGGAAAGESDLAARLAAAEHTIADLQGALDSSAGEVEALRLAGEVGPGMLRDAVSRLDRAGRQAGLWGGRIAKYAANQGGLAQRLSEIAETLQRLLEELERTIKSSSRDLARGAVELVLASYQARDPDFSPWAALDEFPPGTEDDARAQVRDAADHIVHSFEGSAPRLAFALNSDEEDDDGGVGDSGDEAGNPGASE

SEQ ID NO: 183631 - protein, 471 aa, Oryza sativa
  Clone ID: PAT_MRT4530_80703C.1.pep
MAGIRKIIGDSCAQHRHLRRDMRSDQHDHYEASDDALGKIKSALPYFEGNYDPHAYINWELAVDSEFQKHVLSEKQKVMCASSVLIKHASNDWKHLCRHNKIPQSWKDLKRYFRDVYVPMYYADILFNKLQCLKQDTRTVTSYYHDMQACLLRCGLDECEEAKELRFLRGLNKEIQDMLDCQRYTSLSHLLQLACNAESKIEEDMKKQHAMFLSSITNHLQEVHNHVKEERDMKEPPIPLFTLKVEAPPSSEEGIKEEQPLVEPTAEIPLSQVDLFAVPCDKEELCDNASLISMPQLVSEHAIPTVNSYCVVYIANEVEERELRASLNTLGYVQFDDFCELDNLKEKLFAKSDLPYPTNVIFHIFGEYNDLGIYFVHRVYICSDLELPVHVDKTYKLERNVIANQIVSSLPCFDWKKHVVVNGLRKEHHMEKPRTVYREEGEDDVTMATTDASIAHIMDEQEDIEITSSKS

SEQ ID NO: 183632 - protein, 87 aa, Oryza sativa
  Clone ID: PAT_MRT4530_80704C.1.pep
MSEGAAAAAPSPAEMYGDELGDLENKVPINFVLLISRQGKVRLTKWYSPYTQKERTKVIRELSGLILTRGPKLCNFVEWKGYKVVYR

SEQ ID NO: 183633 - protein, 832 aa, Oryza sativa
  Clone ID: PAT_MRT4530_80705C.1.pep
MVYGDYLRRRIAPLQRRARSAWEYTGPEDYMRTHQGARWDWAPEDFKIVVQRVLNLSSAEASRIPQEILPLCSDPDRASILTIMMGVGASEERAPKGHDGAGERRRGEQSAPGGGRASGPRVGVSGSSRPADAPGKRKLGGTPPPSPPRGGGATRASSRRPEGAAPTSQPEGERKKKRLRKTGETEPCRGNLISPPRWSFTRPPRSDVPSHSSRHPKSGQSEAEDPAAAEERRREADRREAADRLREAEEAAREAARARQAEEAAREEAARARQAEEAAREEAARARQAEATAAAGASLGPTPSGGPQATSSEAARDEAAGASPGPTSPGDAQDQTGPGDIPEPSASSGGPSRVAFSPRRLFSSSSVAPLSAEPLLQALAAANTAVLDGFNTQVEALRAERAELEAAWARVEEGRRSVDAMVEVGRKAHRRHISELEARKAALAEIAREVEEERAAALISTTAMIEAQDTLRLQHASWEAELKKKLNAAQGVLDSAAARERRVTETEAASRRREETLEARAMALEEHAGAVERGLTDREVAAALREATLAAHEAACAEEDCALRLREDALAERERALEDAEATTRRLADSLSLREAAQEEQARRNLECVRTERAALEQRAADLEAREKELDARTPVGGAAAGESDLAARLAAAEHTVAEMQRALDSSTGEAEALRLAGEIGPDMLWDAVSRMKRAGRQAGLWRGQTTVPPTNLEGLAPHLNRMAWVLERLPEELEKTIKSSSRDLARGAVELVLASYQARDPSFSPWMALEEFPPGTEDDARARVGDAADHIVNSFEGSAPRLAFAPDSDEEGDASGEDDGGDEAGDPGASE

SEQ ID NO: 183634 - protein, 938 aa, Oryza sativa
  Clone ID: PAT_MRT4530_80706C.1.pep
MEALVGGYTPHLAEGRQAAQTLLDWDSTLELDDFRVASTVSIDIVITRTMAEGHEQKVIEIAITIHDNDYTDQLISLMTKLKINEKPEFYSHAYQWGERWECDMTVKINPPRGERDMYYFRTRHREAFLRLNHIYQDKLQHSRYSYHPMRKPGEDYCTLQDVDYHEQPVKATMSIWMEAADDMYEEALEHMDVQRKRLEEAERREAVLKHKYRILHELYEEREKHNSILNICVARAAFCLHQIPNMGSDDDDDDDGMEGHISPVREDEPHPQDNGEGVLQGLPPSPPPLYPIYSDDEAEEMHSAIDISEPSQEPEVLRPNRDIAKNQGNKGYSAHAEFLRIKPPVFSKSKEPMDAEDWLRAIEKKLTLVRTNEQEKVTFATHQLEGPANEWWEAYQASIEDPTHIITWMEFTIAFRNAFIPTAVIRMKKNEFRGLRQDIQDEKERIERFIEGLRDELRGPMISQDHESFQSLVNKVVRLENDRRMVEGFRKRRMNLQRQSPTRSSLQVRRPYPFKPSLSNARPGMPPILSRPGLRMEDSPCYVCGKFGHFARLCPNRQNMGGQTSYQKPSTTGFIKKNPPIIKSGPNLGRGQVHHIKAEQAQQDPNILMGIGLICTGKINNPRRVVELHLGFADWAFFYFGRACVVHERRKARVSRIRKIIGDSCAQHRHLRRDMRSDQYDHYEEVHNHEKEERDMKEPPVPLFTLKVEAPPSSEEGIKAEQPLVEPTAEIPLSQVDLFAVPCDKEELCDNASLISMPQLVNEHAIPTVNSYCADFKHVVHIANEVEKRELRSSLNTLGYVQFDDFCELDNLKEKLFAKSDLPYPTNIIFHIFGEYNDLGIYFVHRVYICSDLELPVHVDKTYKLERNVIANQIVSTLPCFDWKKQAQGAASPIMGLWACNFIWDPGPGGAHVGCAPTRNRVDLHRQDQQPTERCIDR

SEQ ID NO: 183635 - protein, 42 aa, Oryza sativa
  Clone ID: PAT_MRT4530_80707C.1.pep
LAEGEARRSVFGFGRTFPAASRHLLPRGWLGFLPKGGCRVFW

SEQ ID NO: 183636 - protein, 313 aa, Oryza sativa
  Clone ID: PAT_MRT4530_80708C.1.pep
MARIAAVAATLLLAAAVAATTLPTTSPARGIRLLEGGRSSPAAAVDDEEVATAAVAPTSAGAASEAPLSLMWWLVMALRDGGSAAAMSEGAAAAAPSPAEMYGDELGDLENKKYYTDENIYRNRPCHPSIEQQGDMAHGAVFCLLSGLPEGGRINFVLLISRQGKVRLTKWYSPYTQKERTKVIRELSGLILTRGPKLCNFVEWKGYKVVYRRYASLYFCMCIDAEDNELEVLEIIHHFVEVLDRYFGSVCELDLIFNFHKAYYILDEILIAGELQESSKKNVARLIAAQDSLVEAAKEEASSISNIIAQATK

SEQ ID NO: 183637 - protein, 1073 aa, Oryza sativa
  Clone ID: PAT_MRT4530_80709C.1.pep
MARGSALLDGSVLPPSRIVSEKQAGLPRRFMPESASGREIVMLGEGRPAPDYPGRSVFFLPFAMAGLVPPFSSFFMDVLEFCDLQMAHLTPNAVMTLGIFAHLCEMFIGVRPSLRLFRWFFTVQSVSPPSVVGGCYFLPRGPVLNRYIPCVLRKKWDDWKSDWFYTPLADEARLRLPSQPPAQASSWRAPVDLGDGYDAVLDRLAGLRSQGLTGAMVYGDYLRRRIAPLQRRARAAWEYTGSEDYMRTHQGARWDWAPEDFKILVQRVLNLNSVEASLIPHGILPLCSDPDRTSILTIMTAVGASEEQAPKGHDGAGGSRRGDQSTPGGGRASGPRVGGSGSNRPTDARGKRKLGGTPPPSPPRGGGAVRASSRRPEGAAPTSQPEGERKKKRLRKMGETEPSRGNLISPPRWSFNRPPRSDIPSRSSHHPKSGQSEAEDPAATEARRRESDRREAADRLREAEEAAREAARARQAKDTAREEAARARQAEEAAREEAARVRLAEEAAREEAARARQAEEAAREEAAREEAAREAAREEAARVRRAEAMAASEAVHDEAVDASLGPTPSGDAQDQTGPGVARDEAGASMGGLSHAASSSRQLFPTPSAAPLSAEPLLQALAAANTAVLDGLNAQVVALQAERAELDAAWARVEEGRRSVEAMVEAGRKAHRRHVSDLETRKTALAEIAREVEEERGAALIATSVMIEAQDSLLLQHGNWEAELKKKLDAAQGVLDAAAAREQRATETEAALRRREEVLEARAMALEERACVAEKVLADRETAVTSREATLAAHESACAEEESALRLREDALAERERALEEAEAEAQRLADSLSLREAALTEQARRNLECVRAERAALDQRAADLEAREKEVDARARSGGVAAGESELTARLAAAEHTIADLQGALDSSAGEAEALRLASEVGPGMLRDAVSRLDRAGRQAGLWGRRTAKYAANQGGLAQRLSEIAGTLQRLPEELERTIKSSSRDLAQGAVELVLASYQARNPNFSPWMALDEFPPGTEDDARARVRDAADHIVHSFEGSAPRLAFAPNSDEEGDLSGADDRDDEADDPGASD

SEQ ID NO: 183638 - protein, 99 aa, Oryza sativa
  Clone ID: PAT_MRT4530_8070C.1.pep
IVKAHMIDDSIPPQDRYYHVKKHRLPSKIEILICKERNPIPIHSIVVGVVTSSLAFLLALFSWPVCSWKKDKRQAHKVLSFQRGEPSTSKKPAARGSTS

SEQ ID NO: 183639 - protein, 959 aa, Oryza sativa
  unsure (1)..(959): unsure at all Xaa locations
  Clone ID: PAT_MRT4530_80710C.1.pep
VLPLAFAFVESENTDSWYWFLKLVKTKVVGMRPNVCLIHHRHAGILRAIEELQFGSMERGYPGEWEDVQSRWCMRHMGANFFKQFKNKELMNMFKRLCNQNQEKKFNELWKRLDELIAKCSDQRAAAPSTTDADPPQALGPLPTDSPTLVRRTGLEIRKFSQWILHEPKEKWAKAYDTEVYNWVMXRGVHGLPLVGIVEFILHGTCXHRFEILCQDKAGRGIYRKRVKQECVLKADGTCHCSYAKPKLLHRPCTHVIAAAAECGIPDAVYVSQYFSXQAIYHTWGGKKVPGXEIYGFGIAGEFIETNDEVLNISDPSKLRGKAGRRKTRRIRNDMDESEAGRVKHCSKCDERGHTYKHCPKDKEKPSVAEAGLLGSAADGARPTEMARQDTPQLLDPAIDHRHQSHLTAVQGAQLGTFRARTCGELLMVHDSFVERLREAGLLPMCRLVEAAAGDADPARRWTVDRSLLAALVDRWRPETHTFHLPCGEVAPILQDVSYLLGLPLAGDDVGPVTTGVDWQDDLTARFALVQRAPHLPLEPLAHHRNTGPMKRWLLQFSIEQLQAEADEYSYSRCLEAYLLWLFGWVMFCGGHGHAVDKGLVHYARSIADAARRWAHVQVRRSYPEFVMEFDRLLPTDVVWEPYSAAATQPQAPLGLSTLCTRDQAYWMTTVPMVYDICVEPHAPFRVMRQFGFRQPFPVPFPTTVPAAVHRYSRKGQQSAGDWPAKLATFVEDWLLATEEVVDHEGEPHTEEAYQAYLRWYQPRTRTRVTFAPLEQQPHVASTRDLYARHRDQDFARAVDDINRVVIDGSTTIQRLGAGIPXNVTRADAAVQRPPVPTGPRPTAHVPRPTPPPHGGXGTSSQGPPLDHAGTSSDRLLPSTLLFDITDFDFASGSTEDVIGPSQLGGAPLVQTQDQAQATPPPDTRATRAVPPDRFTYSQDHVRAQARRTKRGRGVGQGQ

SEQ ID NO: 183640 - protein, 343 aa, Oryza sativa
  unsure (1)..(343): unsure at all Xaa locations
  Clone ID: PAT_MRT4530_80711C.1.pep
NEPTELTDNLSPLLLGVRRVPLGKASPCPGRADQMNGSYHGYAVGEVATRPHGSAPERRAGEPVARSGRAERQIWSGSVGEWRRGGGRDSETRARAWPSSGREHLPEEEEEGEAVVAAVGIAGAGDDQAATSAWNRSPNGERRNIILTKIFTEIYPTALGEAAEQAKTAFNSKGPQRKIRTRRRVPSSSRPYDTPFVYGPITGTLFSRSPSSSPYISAGDGAAAAAPSDMAXXXRETCRASCINESANARGEAVCVLGALPLPRSLTRCARSFGCGERYQLTQRRTIKIPGVSPWKLPRALSCSDPAAYRIPVVRSKLGCVHEPPVQPDRCALSGNYRLESNP

SEQ ID NO: 183641 - protein, 1391 aa, Oryza sativa
  unsure (1)..(1391): unsure at all Xaa locations
  Clone ID: PAT_MRT4530_80712C.1.pep
MDRREPQHEECPRLVAAWVIRRSVQSEAQGSWYYLDAKNPKDMSNNQIFQVYHGPVNVRYGPPGVDLSDFIVSERGIDSPAERSVPSITGWLMRGLRVDPQTSDITINVIDPGVHTNMDDSEGPSAEVNETSVEEVNAREDGGVVAPVGIQPGGVADEGETVGAIVDEMEREDSDNERVEEGDSSDDETDINPAEWASEDFSGLIVSEEDSVRWEYKENEVIQRAIYSRAEDMKEAERNPGSSYEVKKFPSIEHPGKSVLQRAFLALHACKMAFVNCRPVLCIDGTFLTGKYRGQILTAIGVDGNNQVLPLAFAFVESENTDSWYWFLKLVKTKVVGMRPNVCLIHDRHAGILRAIGELQFGSMERGYPSVWEDVQSRWCMRHMGANFFKQFKNKELMNMFKRLCNQNQEKKFNELWKRLDELTAKCSDQRAAAPSTAVADPPQALGPLPMDSPTLVRRTGLEIRKLSQWILHEPKEKWAKAYDTGGARYGIMTTNLAEIYNWVMRGVRGLPLVGIVEFILHGTCRYFRDRFQAVLPSMPNNSILFGAFMQKKLEELRKKAMKHRALVQGTQQHRFEILCQDKAGRGIYRKRVKQECVLKADGTCHCSCAKPKLLHRPCTHVIAAAAECGIPDAVYVSQYFSKQAIYHTWSGEIYGFGIAGEFTETNDEVLNIRDPSKLRGKARRRRTHRIRNDMDESEAGMVSGCNVGLRRLTSLGMLMYVGLRHVMGAQLGTFRARTCGELLPVHDSFVERLREAGLLPMCRLVEAAAGDADPARRWTVDRSLLAALVDRWRPETHTFHLPCGEVAPTLQDVSYLLGLPLAGDAVGPVTTAVDWQDDLAARFTLVQRAPHLPFEPLAHHRNTGPTKRWLLQFTVEQLQAEADEYSYSRCLEAYLLWLFGWVMFCGGHGHAVDKGLVHYARSIADAAVGEVPQWSWGSALLAALYRALCESCTKTDPSATFGGCPLFLSIWAAEKIAIGRPEVDQHAYEESLYEERPEVDYPTMGTLWCRRQRRWAHVQVRRSYPEFVMEFDRLLPTDVVWEPYSATATQARAPLGLSTLCTRDQAYWMTTVPMVFDICVEPHAPFRVMRQFGFRTRARVSSQLATFVEDWLLATEEVVDHEGEPHTEESYQAYLRWYQPRTRTRVTFAPLEQQPHVASTRDLYARHRNQDFARAVDDINRVVVDGSTTIQRLGAGIPXDVARADAAVQRPPVPTGPRPAAHVPRPTPPPHGGFRAPFSTPPSSARPSVVPPTGXHFSQAAGSASQAAVSTSHSAQFWQYTGTSSQAAGTSSQGPPLDHAGSSSDHLLPSTFLFDITDFDFASGSTEDVIGPSQLGGAPPVQTQDQAQATPPRDTRATRAVPPDRFTYSQDHVRAQARRTKRGRGAGQGQ

SEQ ID NO: 183642 - protein, 749 aa, Oryza sativa
  Clone ID: PAT_MRT4530_80713C.1.pep
MRNDGGSWIKSDSDALPRFNFKVSQLKFFSFLLCSFVDLSSNINRMEQEENHSADHLSAQPGNGNELEESSVKERCFEQREALVGEPRCVICGRYGEYICDQTDDDICSVECKTILLSKLSAETRPVVKAAKRVNLPVGDESFCIRDENFPKIPSMHDGQIASLRSKLDICVKGEDVPDPIMCFSSSGLPEKLVLNLEAAGYVMPTPVQMQVIPSSICNRSLLVSADTGSGKTASFLVPIIAHCSHVRSERCTDKQGPLAIVLAPTRELCLQVEEQAKVLGKGLPFKTALVVGGDPLAQQIYRIENGIELIVGTPGRLIDLLMKHNVDLNKVDVFVLDEVDCLLERGFRDQVMQIFQALSHPQVMMFSATVNSEVEKMSNSLAKNAIHISCGNPSRPNKSVKQVVIWVESKQKKQKIFEIMTSKQHFKPPAVVFVSSRIGADLLSEAITVATGLKVVSIHGDKTMNERRESLRRFLTGEVSVVVCTGVLGRGMDLLKVRQVILFDMPNSIDEYVHQVGRASRMGVEGMAIVFVNEEDRNLFRELVQILKTAGAPIPRELANSKYTTGIPLGGARQMSSRVENEVLIFKVLEQQWEFNLLDRDERRLIHDILVHLVELEWVKEDLWVGSCLSLRFESGKVALATDLVKLTLVVLSLNSPGLPWQERLCIAFSLLLYTKFMIWGAWSDGLWSCGLGNCCQVDPLYNYYHCYRASNLTLIEAKDGVNVGDQKSITAIRRDKFIASFRNMEVH

SEQ ID NO: 183643 - protein, 367 aa, Oryza sativa
  unsure (1)..(367): unsure at all Xaa locations
  Clone ID: PAT_MRT4530_80714C.1.pep
MAAVLTDDFLLRSILKCLCPRDVVRAALANKSWRRAAALAVPRTPPLVGYLLHPEKIRSAQIPPVFVPSDASFPRLSLPLAPDDLSGMQIKKLTPMDDESQRLVDWLEKGVYDALKKKFLKTIIFSIYDEKGPLLEEYCQLHGSDNTTCTAVKQPLDYEPPFFESYDDMRKRCPLPLHTTLSDYSQDLISLHDVKSVLSNNPFHSNKVFAMDPKSKIQQGHLFCITKKDVHFYFDSGASHHMCDDDKLFKNLHEVPTEHQDTVYDASGDPKNLWVVDSLCCNHMTGIKGLLSDTRHEXAHKCKIQWRGTQEVXGLAHQDENALYYVDYFHYVSDPSLKHTRNDGECIQKLKRPRQDGSSPSSRKRTA

SEQ ID NO: 183644 - protein, 69 aa, Oryza sativa
  Clone ID: PAT_MRT4530_80715C.1.pep
EKEAFPRPFSNFFPRFWVQNLPPGSSPNFFPPKEKAKGRGGGKKKEDRFPNRGPPFKDTLSHFLKLGPF

SEQ ID NO: 183645 - protein, 152 aa, Oryza sativa
  Clone ID: PAT_MRT4530_80716C.1.pep
MWRWYVENALQHGWPLAIVPFVHPKDPSVKMNMDDGEGPSAEVNETSVEEVNAPEDQAYWMTTVPMVFDICIKPHAPYRVMQRFSFRQFFPVPFPTSVPAAVHRYSRKGQQSIGDWPAKLGPFVEDWLLATEEVVDHEGEPHTEEAYQAYLC

SEQ ID NO: 183646 - protein, 496 aa, Oryza sativa
  unsure (1)..(496): unsure at all Xaa locations
  Clone ID: PAT_MRT4530_80717C.1.pep
FISASFPTFFIPSDVPLPSLSLPFDHDDVSGYGIKKQTPMDNESQRLVDWLEKGFYDTLKKKFLXNSIFSIYDEKGSLLEEYCLXFKYFCEITIALRLLGSTXILFIMRKLFHPKVXLETMTMFFFPYXPPLDYEPPFFESYDDMRKRCPLPLHTTLSDYSQDLISLHDVKSVLSNNPFHSNKVFAMDPKSKIQQGHLFCITKKDVHFYFDSGASHHMCDDDKLFKNLHEVPTEHQDTVYDASGDPVCLHMSGEVIYDQIKLSPVFYHSTLKFKVISLGELDDSNTLMYVGDKRIKIFDVNKGEMIGEGYLHEKRNEYIVRSIICRKEEQQAITRSMLSSTAIDEKNLWVVDSLCCNHMTGIKGLLSDTRHEVQSFVTPRGAFLSSKIGNVKTSTVTLFNVLYCKGLRQNLISEGQLDRDGYSCTRLAHKCKIQWRGTQEVVGLAHQDENALYYVDYFHYVSDPSLKHTRNDGECIQKLKRPRQDGSSPSSRKRTA

SEQ ID NO: 183647 - protein, 1601 aa, Oryza sativa
  unsure (1)..(1601): unsure at all Xaa locations
  Clone ID: PAT_MRT4530_80718C.1.pep
MGRQARHSPGTTGLGPRNNLSTKKIAEIAPAAHLWGGKLTWQTGEERAVTEGGFFAGKPLPPSGGAARGPNAKKPVGAGYFAGGPLPPSGRAAGLAAYRRPAAQPPALILLSSIPVKKKEEREGEEKKGRNPAGFRRRFQGFSCTNLEVRIVDIDMSNKQIFQVYHGPGNVRYGPTGVDLSDFIVSEREIDRPAERSVPSIKGWLMRGLRVDPQTSDITINVIDPGVQTNMDDGEGPSAEVNETSVEEVNAREDGGVVAPVGIQPGGVADEGETVGAIVDEMEREDSDNERVEEGDSSDDETDINPAEWASEDFSGLIVSEEDSVRWEYKENKVIQGAIYSRAEDMKEAVKHFAVSLHREFWVAKSNRSQYEVRVQKYHRNITCAFVASEMYAHVIDNLTYEPRSIIRHIEETYKYTISYAKAWRAKQKIIEMRFGTYEASYDNLPHLLGVIEERNPGSSYEVKKFPSIEHPSKSVLQRAFLALHACKMAFVNCRPVLCIDGTFLIGKYRGQILTTIGVDGNNQVLPLAFAFVESENTDSWYWFLKLVKTKVVGMRPNVCLIHDRHAGILRAIGELQFGSMERGYPGVWEDVQSRWCMRHMGANFFKQFKNKELMNMFKRLCNQNQEKKFNELWKRLDELTAKCSDQRAAAPSTAVADPPQALGPLPTDSPTLVRRTGLEIQKFSQWILHEPKEKWAKAYDTGGARYGIMTTNLAEVYNWVMRGVRGLPLVGIVEFILHGTCRYFRDRFQAVLPSMPNNSILFGAFMQKKLEELRKKAMKHRALVQGTQQHRFEILCQDKSGRGIYRKRVKQECVLKADGTCHCSCAKPKLLHRPCTHVIAAAVECGISDAVYVSQYFSKQAIYHTWSGEIYGFGIAGEFTETNDEVLNIPDPSKLRGKAGRRRTRRIRNDMDESEAGRVKRCSKCDEHGHTYKHCPKDKEKPSAAEAGLSGSAADGARPTEMARQDTPQLLDPAIDHRHRSHLTAVQGAQLGTFRARTCGELLTVYDSFVERLREAGLLPMCRLVEAAAGDVDPARRWTVDRSLLAALVDRWRPETHTFHLPYGEVAPTLQDVSYLLGLPLAGDAVGPVTTAVDWQDDLTARFALVQRAPHLPLEPLAHHRNTGPTKRWLLQFTVEQLQAEADEYSYSRCLEAYLLWLFGWVMFCGGHGHAVDKGLVHYARSIADAAVGEVPQWSWGSALLAALYRALCESCTKKDPSATFGGCPLFLSIWAAERIAIGRPEVDQHAYEESLYEERPEVDYPTMGTLWCRRQCRWAHVQVRRSYPEFVMEFDRLLPTDVVWXPTVPRLPRLVRRWAYWMTTVPMVFDICVEPHAPFRVMRYSRKSQQLAGDWPAKLATFVEDWLLATEEVVDHEGEPHTEESYQAYLRWYQPRTRTRVDDINRVVVDGSTTIQRLGAGIPXDVARADAAVQRPPVPTGPRPAAHVPRPTPPPHGGFAQFAITQAAHFSQAAGSASQAAVSTSHSAQFWQYTGTSSQAAGTSSQGPPLDHAGTSSDCLLPSTFLFDITDFDFASGSTEDVIGPSQLGGALPVQTQDQAQATPPRDTRATRTVPPDLFTYSQDHARAQARRTKRGRGAGRGQ

SEQ ID NO: 183648 - protein, 1311 aa, Oryza sativa
  Clone ID: PAT_MRT4530_80719C.1.pep
MSNKQIFQVYHGPGNVRYGPTGVDLSDFIVSERGIDRPAERSVPYIKGWLMRGLRVDPQTSDITINVIVSRATEGFYWELMPVQNSRVWRWYLENALQRGWPLALVPFVHPKDPGVQMNMDDGEGPSAEVNETSVEEVNAQEDGGVVAPVGIQPGGVVDEGETVGAIVDEMEKEDSDNERVEEGDSSDDETDINPAEWASEDFSELIVSEEDMSLHREFWVAKSNRSQYEVRCVKEKDGCPWRVHAYKGKWKDYWTVSVVTKHTCFLPGVQKYHRNITCAFVASEMYAHVIDNLTYEPRSIIRHIEETYKYTISYAKAWRAKQKIIEMRFGTYEASYDNLPHLLGVIEERNPGSSYEVKKFPSIEHPSKSVLQRAFLALHACKMAFVNCRPVLCIDGTFLTGKYRGQILTAIGIDGNNQVLPLAFAFVESENTDSWYWFLKLVKTKVVGMRPNVCLIHDRHAGILRAIEELQFGSMERGYPGVWEDLQSRWCMRHMGANFFKQFKNKELMNMFKRLCNQNQEKKINELWKRLDELTTKCSDQRAAAPSTAVADPPQALGPLPTDSPTLVRRTGLEIRKFSQWILHEPKEKWAKAYDTGGARYGIMTTNLVEVYNWVMRGVRGLPLVGIVEFILHGTCRPCTHVIAAAAECGIPDAVYVSQYFSKQAIYHTWSGEIYGFGIAGEFTETNDEVLNIPDPSKLRGKAGRRRTRRIRNDMDESEAGMVKRCSKCDEHGHTYKHCPKDKEKPSGAEAGLSGSAADGARPTGEGTTSTRPRPRRRRATSGYVVEQLQAEADEYSYSRCLEAYLLWLFGWVMFCGGHGHAVDKGLVHYARSIADAAVGEVPQWSWGSALLAALYRALCESCTKTDPSATFGGYPLFLSIWAAERIAIGRPEVDQHAYEESLYEERPEVDYPMMGTLWCRRQRRWAHVQVRRSYPEFVMEFDRLLPTDVFGFRQPFPVPFPTTVPAAVHRYLRKGQQSAGDWPAKLATFVEDWLLATEEVVDHEGEPHTEESYQAYLRWYQPRTRTRVTFAPLEKQPHVASTRDLYARHRDQDFARAVDDINRVVVDGSTTIQHLGAGIPVPVEEHLTTYTRMVESMRSILRVLTCPADDVARADTAVQRPPVPTGPHPAAHVPRPTPPPYGGFRAPFSTPPSSARPSVVPPTGFAQFAMTQAAHFSQAAGSASQAAVSTSYSAQFWQYTGTSSQVAGTSSQGPPLDHAGTSSDRLLPSTLLFDITDFDFASGSTEDVIGPSQLGGAPPVQTQDQAQATPPRDTRATRAVPPDRFTYSQDHMRAQARRTKRGRGAGQGQ

SEQ ID NO: 183649 - protein, 368 aa, Oryza sativa
  Clone ID: PAT_MRT4530_8071C.1.pep
MAMAGCPDRGVVSPRLEWYMYRFPKPSGPGYRTSAVSKVTVPTRSSPPKRGGGDPGAVGGPYREVVAAVRAGGGGGGGRPRQEVAAAHAGGGRRSGGGIADGAQRQQVILARYQEPDTKVLLPVVPPSTSHAGAHHRWLHPPPSTPHRSSAAVAESSVIHTPRRSSSTTVTSSTVHATSELVASGRVLRHPRPTLELVVDGRILHLPRHVRACRQWPCPCSASIHSDDSTIPDCRDNPSTAAKPRASSSSSASGLHSFVVWSAHGHRHQRPIAWNSSTPAYDWVRFACDAANATVLGLRLPGVSLIGFYLRVLSLRCNHLFGDVPGDLFSLPGSVPPDVAKLTGAPTPCSHASRRSPSPTTSSSAVSR

SEQ ID NO: 183650 - protein, 242 aa, Oryza sativa
  unsure (1)..(242): unsure at all Xaa locations
  Clone ID: PAT_MRT4530_80720C.1.pep
MALSAARRLSSAAGGDAARPGTLSSLFAPRSSPKPRAPRPEPGDGPPQERRKPRARPRPRSRQPWGEEAAALLRRFYDGGYLPGPDLSVAPHVLSPDVVKGAAERFGHDHQVVAKWLSGSDLKKVALFGCPSVERRTVFASKRLRAFFKIQEAKICGSCKMRNSCQFVNQEVSRHDKVILSDTMRILTLFVLDTCPQQLXRFCWPYYIRSTMVHVPLKLQLAWIPLSYQRMLTWERNSLASD

SEQ ID NO: 183651 - protein, 1123 aa, Oryza sativa
  Clone ID: PAT_MRT4530_80721C.1.pep
MSNKQIFQVYHGPGNIRYGPIGVDLSDCIVSERGIDRPAKRSVPSIKGWLMRGLRVDPQTSDITINVIDPGVQMNMDDGEGPSAEVNETSVEEVNTREDGGVVAPVGIQPGGVADEGKTVGAIVDEMEREDSDNERVEEGDSSDDETDINPAEWASEDFSRLVVSKEDSVRWEYKENEERNPGSSYEVKKFPSIEYPGKSVLQRAFLALQACKMAFVNCRPVLCIDGTFLTGKYRGQILTAIGVDGNNQVLPLAFAFVESENTDSWYWFLKLVKTKVVGMRPNVCLIHDRHAGILRAIEELQFGSMERGYPGVWEDVQSRWCMRHMGANFFKQFKNKELMNMFKRLCNQNQEKKFNELWKRLDELTAKCSDQRAAAPSTAVADPPQALGPLPTDSPTLAKAYDTSGARYGIMTTNLAEVYNWVMRGVRGLPLVGIVEFILHGTCRYFRDRFQAVLPSMPNNSILFGTFMQKKLEELRKKAMKHRALVQDKAGRGIYRKRVKQECVLKADGTCHCSCAKPKLLHRPCTHVIAAAAECGIPDTVYVSQYFSKQAIYHTWSGEIYGFGIAGEFTETNDEVLNIPDPSKLRGKAGRRRTRCIRNDMDESEAGRVKRCSKCDERGHTYKHCPKDKEKPSAAEGAQLGMFRARTCGELLTVHDSFVERLCEVGLLPMCRLVEAAAGDADPARRWTVDRSLLAALVDRWRPETHTFHLPCSLAVEQLQAEADEYSYSHCLEAYLLWLFGWVMFCGGHGHAVDKGLVHYAKSIADAAVGEVPQWSWGSALLAALYRGLCEACTKTDPSTTFGGCPLFLSIWAAERIASGRPEVDQHAYEESLYAERPEVDYPTMGTLWCRRQFGFRQPFPVPFPTTVPAAVHRYSRKGQQSAGDWPAKLATFFEYWLLATEEVMDHEGEPHTEEAYQAYLRWYQPRTHTRVTFAPLEQQPHVASTRDLYARHRDQDIARAMSTLHRTIPLCFHVDDINRVVVDGSTTIQRLGAGIPVPVEEHLTTYTRMVESMRSILRVRTSSQGPPLDHAGTSSDRLVPSTLLFDITDFDFASGSTDDVIGPSQLGGAPPVQTQDQAQATPPPDTRATRAVPPDRFIYSQDHVRAQARRTKRGRGAGQGQ

SEQ ID NO: 183652 - protein, 1575 aa, Oryza sativa
  Clone ID: PAT_MRT4530_80722C.1.pep
MELRWISASGKWRPVFFSFLRTQRRQRRPNTTMDGDGRSGWRSKHSGNPLVHGDGQPPVELGTKEPAAGVELDFAKPMVVAAREDVEAANMSNKQIFQVYHGPGNVRYGPTGVDLSDFIVSERGIERPAERSVPSIKGWLMRGLRVDPQTSDITINVIVSRATEGFYWELMPVQNSRVWRWYLENALQRGWPLALVPFVHPKDPGVQTNMDDGEGPSAEVNETSVEEVNAREDGGVVAPVGIQPGGVADEGETVGAIVDEMEREDSDNERVEEGDSSDDETDINPAEWASEDFSGLIVSEEDSVRWEYKENEVIQGAIYSRAEDMKEAVKHFAVSLHREFWVAKSNRSQYEVRCVKEKDGCPWRVHAYKGKWKDYWTVSVVTKHTCFLPGVQKYHRNITCAFVASKMYAHVIDNLTYEPRSIIRHIEETYKYTISYAKAWRAKQKIIEMRFGTYEASYDNLPRLLGVIEERNPGSSYEVKKFPSIEHPGKSVLQRAFLALHACKMAFVNCRPVLCIDGTFLTGKYRGQILTAIGVDGNNQVLPLAFAFVESENTDSWYWFLKLVKTKVVGMRPNVCLIHDRHAGILRAIGELQFGSMERGYPGVWEDVQSRWCMRHIGANFFKQFKNKELMNMFKRLCNQNQEKKFNELWKRLDELTAKCSDQRAAAPSTAVADPPQALGPLPTDSPTLVRRTRLEIRKFSQWILHEPKEKWAKAYDTGGARYGIMTTNLAEVYNWVMRGVRGLPLVGIVEFILHGTCRYFRDRFQAVLPSMPNNSILFGAFMQKKLEELRKKAMKHRALVQGTQQHSGEIYGFGIAGEFTETNDEVLNIPDPSKLRGKAGRRRTRRIRNDMDESEAGRVKRCSKCDEHGHTYKHCPKDKEKSSAAEAGLSGSAADGARPTEMARQDTPQLLDPAIDHRHRSHLTVVHGAQLGTFRARTCGELLTVHDSFVERLREAGLLPMCRLVEAAAGDADPARRWTVDRSLVAALVDRWRPETHTFHLPCGEVAPTLQDVSYLLGLPLAGDAVGPVTTAVDWQDDLTARFALVQRAPHLPLEPLGHHRNTGPTKRWLLQFTVEQLQADADEYSYSRCLEAYLLWLFGWVMFCGGHGHAVDKGLVHYARSIADAAVGEVPQWSWGSALLAALYRALCESCTKTDPSATFGGCPLFLSIWAAERIAIGRPEVDQHAYEESLYEERPEVDYPTMGTLWCRRQRRWAHVQVRRSYPEFVMVFDRLLTTDVVWEPYSAAATQARAPLGLSTLCTRDQAYWMTTVPMVFDICVEPHAPFRVMRQFGFRQPFPVPFPTTVQAAVHRVTFAPLEQQPHVASTRDLYARHRDQDFARVVDDINRVVVDGSTTIQRLDAGIPVTVEEHLTTYTRMVESMRSILRVLTCRADDVARADAAVQRPPVPTGPRPAAHIPRPTPPPHGGFRAPFSTPPSSARPSVVPPTGFAQFAMTQAAHFSQAAWSASQAAGTSSQGPPLDHAGTSSDPFLSSTVLFDITDFDFASGSTEDVIGPSQLGGAPPVQTQDQAQATPPRDTRATRAVPPDRFTYSQDHVRAQARRTKRGRGAGQGQ

SEQ ID NO: 183653 - protein, 987 aa, Oryza sativa
  Clone ID: PAT_MRT4530_80723C.1.pep
MAFMNCRPVLCIDGTFLTGKYRDQILTAIGVDGNNQVLPLAFAFVESENTDSWYWFLKLVKTKVVGMRPNVCLIHDRHAGILRAIEELQFGSMERGYPGEWEDVHSRWCMRHMRANFFKHFKNKELMNMFKRLCNELWKRLDELTAKCSDQRAAAPSTAVADPPQALGPLPTDSPTLVRRTGVEIRKFSQWILHEPKEKWAKAYDTCGARYGIMTTNLAEVYNWVMRSVRGLPLVGIVEFILHGTCSILFGTFMQKKLEELCKKAMKHRALVQGTQQHRFEILCQDKASRGIYRKRVKQECVLKADGTCHCSCAKPKLLHRPCTHVIAAATECGIPDAVYVSQYFSKQAVYHTWGGEIYGFGIAREFTETNDEVLNIPDPSKLRGKAARRKTRRIRNDMDESEAARVKRCSKCDERGHTYKHCPKDKEKPSAAEAGLSGSAADGARPTACTLGEVPQWTWGSALLAAQYRGLCEACTKSDPSATFGGCPLFLSIWAAERIAIGRPEVDQHTYEESLYAERPEVDYPTMGTLWCRRQRRWAHVQVRRSYPEFVMEFDRLLPTDVVWEPYSAAATQARAPLGLSTLCTRDQAYWMTMIPMVFDICVEPHAPFRVMRQFGFRQPFPVLFSTTVPADVHRYSRKGQQSAGNWPTKLGTFVEDWLLATEEVVEHEGEPHTEEVVDINRVVVDSSTTIQRLGAGIPVSVEEHLTTYTWMVESMRSILRVLTCRADDVARADAAPQRPPVPTGPRPAAHVPRLTPPPHGGFRAPFSTPPFSARPFVVPPTGFAQFATTQAAHFSQAAESASQATVSTSHSAQFWQYTGTSSQAAGTSSQGPPLDHAGTSSDHLVASALLFDITDFDFASGSTEDVIGPSQLGGAPPVQTQDQAQATPPPDTRATRAVPPDRFTYSQDHVLRSIKPTILGRRFFVCPNILDDDFMEPPRRCQYREWIDTRRVLTPPSRVVQLELSEQYRVTKAQFERGDGSSYRG

SEQ ID NO: 183654 - protein, 871 aa, Oryza sativa
  Clone ID: PAT_MRT4530_80724C.1.pep
MSNKHTFQVYHGLGNVRYGPTGVDLSKFIVTPRGIDRPAERSVPSIKGWLMRGLRVDPQTSDITINVIVSRATEGFYWELMPVQNSRMWRWYVENALQRGWPLAMVPFVHPKDLGVQMNMDDGEGPSAEVNETFVEEVNAPEEANEGETVGTIVDEMEREDFDNERVEEGGSSDDETDINPAEWASEDFSGLVVSEEDSVRWEYKENEVIQGAIYTRAEEMKEAVKHFVVSLHREFWVAKSNRSQYEVRCVKEKDGCPWRVHAYKGKWKDYWTVSVITSMSISEIPQMYAHVINNLTYEPKSIIRHIEETYKYTISYAKAWRAKQKIIEMRFGTYEASYDNLPRLLGVIKQRYPGSSYAVKKFPSIEHPGKSVLQRVFLALHACKMAFVHCCPVLYIDGTFLTGKYRGHILTAIGVDGNNQVLPLAFAFVESENTDSWYWFLKLVKTEVVGMRPNVCLIHDRHAGMLRAIEELQFGSMDRGYPGEWEDVQTGPSTAVIDHPQALGPLPTDSPTLVRRTGVEIRKFSQWILHEPKEKWAKAYDTGGSRYGIMTTNFAEVYNWVMRGVRGLPLVGIVEFILHGTCRGIYRKRVKQGCVLKADGTCHCSCAKPKLLHGPCTHVIAAASECGIPDAVYVSQYFSKQTIYHTWSGEIYGFGIAGEFTETNDEVINIPDPSKLQGKAGRRKTRHIHNDIDESEAGRVKRCSKCDERGHTYKHCPKDKEKPSAAEAGLSGSVADGARPTGSASQAAASTSHSAQFWQYTGTSSQAVGTSSQGPPLDNARTSSDYGVASTLLFSMSDFDFASVSTEDVIGPSQLGGAPPVQTQDQSPSTPAPDTHATRAVPPNRFTYSQDHVRAQARRTKRGRGAGQGQ

SEQ ID NO: 183655 - protein, 52 aa, Oryza sativa
  Clone ID: PAT_MRT4530_80725C.1.pep
RVAPATAVLVDTRYRRKPPRARATAQAGTLDVPRTAASKLPSHRRRAERTRG

SEQ ID NO: 183656 - protein, 1532 aa, Oryza sativa
  unsure (1)..(1532): unsure at all Xaa locations
  Clone ID: PAT_MRT4530_80726C.1.pep
MSNKQIFQVYHGPGNVRYGPTGVDLSDFIVSERGIDRPAERSVPSIKGWLMRGLRVDPQTSDITINVIVSRATEGFYWELMPVQNSRVWRWYLENALQRGWPLALVPFVHPKDPGVQTNMDDGEGPSAEVNETSVEEVNAREDGGVVAPVGIQPGGVADEGETVGAIVDEMERKDSDNERVEEGDSSDDETDINPAEWASEDFSGLIVSEEDSVRWEYKENEVIQGAIYSRAEDMKEAVKHFAVSLHREFWVAKSNRSQYEVRCVKEKDCCPWRVHAYKGKWKDYWTVSVITKHTCFLPGVQKYHRNITCAFVASEMYAHVIDNLTYEPRSIIRHIEETYKYTISYAKAWRAKQKIIEMRFETYEASYDNLPCLLGVIEERNRRSSYEVKKFPSIEHPGKSVLQRAFLALHVCKMAFVNCRPVLCIDGTFLTGKYQGQILTAIGVDGNNQVLPLAFAFVESENTDSWYWFLKLVKTKVVGMRLNVCLIHDRHAGILRAIGELQFGSMERGYLGVWEDVQSRWCMRHMGANFFKQFKNKELMNMFKRLCNQNQEKKFNALWKRLDELTAKCSDQRAAAPSTAVADPPQALGPLPTDSPTLVRRTGLEIRKFSQWILHEPKEKWAKAYDTGGARYGIMTTNLAEVYNWVMRGVRGLPLVGIVEFILHGTCSILFGAFMQKKLEELRKKAMKHRALVQGTQQHRFEILCQDKAGRGIYRKRVKQECVLKADGTCHCSCAKPKLLHRACTHVIAAAAECGIPDVVYVSQYFTGEFTETNDEVLNIPDPSKLRGKAGRRRTHRIRNDMDESEAGRVKRCSKCDEHGHTYKHCPKDKEKPSAAEAGLSGSAADGARPTEMARQDTPQLLDPAIDHRHRSHLTAVQGAQLGTFRARTCGELLMVHDSFVERLREAGLLPMCRLVEAAAGDADPARRWSVDRSLLAALVDRWRPETHTFHLPCGEVAPTLQDVSYLLGLPLAGDAVGPVTTAVDWQDDLTARFALVQRAPHLPLEPLAHYRNTGPTKRWLLQFTVEQLQAEADEYSYSRCLEAYLLWLFGWVMFCGGHGHAVDKGLVHYARSIADAAVGEVPQWSWGSALLAALYRALCESCTKTDPSATFGRCPLFLSIWAAERIAIGRPEVDQHAYEESLYEERPEVDYPTMGTLWCRRQRRWAHVQVRRSYPEFVMEFDRLLPTDVVWXPTVPRLPRLVRRWFGFRQPFPVPFPTTVPAAVHWYSRKGQQSAGDWPAKLATFVEDWLLATEEVVDHEGEPHTEESYQAYLRWYQPRTRTRVTFAPLEQQPHVASTRDLYARHRDQDFARAVDDINRVVVDGSTTIQRLGAGIPXDVARADAAVQRPPVPTGPRPAAHVPRPTPPPHGGFRLLLCPPQAAHFSQAAGSASQAAVSTSHSTQFWQYTGTSSQAAGTSSQGPPLDHAGTSSDRLLPSTFLFDITDFDFASGLTEDVIGPSQLGGAPPVQTQDQAQATPPWDTRATRAVPPDRSTCEHRPGGPSVVAARGRASRAVFSLFTCFTFQYCMLV

SEQ ID NO: 183657 - protein, 103 aa, Oryza sativa
  Clone ID: PAT_MRT4530_80727C.1.pep
STVYHSAVKLRYQRLSNYSDRIVRADIIKLNCFLWRAMKLRYQRLSTILISSSELTSSSSIVFFGGHVIFIFLLSCSCFCNPGLGIDLVLQDVDLLFELNLDV

SEQ ID NO: 183658 - protein, 53 aa, Oryza sativa
  Clone ID: PAT_MRT4530_80728C.1.pep
LHSLSFPLVSFMVFYPDHHFSQESPLTFFFPSFNTSHYFFFFFSLKSRSKIPG

SEQ ID NO: 183659 - protein, 311 aa, Oryza sativa
  Clone ID: PAT_MRT4530_80729C.1.pep
MKRTNDQPPPPNDDDDRSRLLLMRRGRHRRKLLVQWGMHGMCMQQSKRRRVPNSITYSESSTHMHVGGSTNARNKDACFNASKHTHRPQNVAFDIELYMTRADTNRAARTRCSHSRSCSHRKQLAEQAIAAATARAAVTSQQRCCRHIHIICTRTRSSIARVFKVQTRTQVRMPRRYQILLDASCMHARSLCVWWINWIGNCTAIIGNTDRGGDRTLLLLHVRTYIRQGESEDFSRLTNTDLSMASTQELTIKKVKLKWTKYVTYFRKLYRKASCLENIILQAEFRGFNFTEPDKAGKPTIKKLNSNGRNM

SEQ ID NO: 183660 - protein, 365 aa, Oryza sativa
  Clone ID: PAT_MRT4530_8072C.1.pep
MLDGCGLLAFARCCCVGGGEMESDARVSDEPGCGGGGGGGAGSVVEKGGGVVARRFGWAEIESVTGGFSSRVIGQGGFSTVYLASLTSSRLGAVKVQRSSERLHRAFCQERDVLLSLRHPHVVRLLGYCDERDEGVLVFEYAPNGDLHERLHHRSGGKSRTVLPWARRMAVAFQVAMALEYLHESRDPAVIHGDIKSSNVLLDANHDAKLCDFGFAHVGFSAAVRPPSGATRAWGRPVMGSPGYADPHFLRSGVATKKSDVYSFGVLLLELVTGREAICAQTGHRLTAAVGPSIGEGKLADVVDRRLGGDYDVEEAATVAALALRCVSDGTGLRPSMAEVVRELQEKTTALISAVGSKPSDKMVS

SEQ ID NO: 183661 - protein, 78 aa, Oryza sativa
  unsure (1)..(78): unsure at all Xaa locations
  Clone ID: PAT_MRT4530_80730C.1.pep
RRRRSRVLPPEPPPPPSSSLSGFRSPPLPCAPLPXVTAEPQPPXAPPSXFFGAPPPCHAPSRCAPSLPPLSRAEPPPP

SEQ ID NO: 183662 - protein, 501 aa, Oryza sativa
  Clone ID: PAT_MRT4530_80731C.1.pep
MAWFVAAWSCLLVVVMVSSMRLSRSASSSCGSSCGHGGWGPRSYPVIGCLVAFYRNRRRLLDWYTEMLAASPSQTIVVDRLGARRTVVTANPANVEHILRARFANYPKGKPFTDVLGDLLGMGIFNDVLRRFAFDVICRVSLGVDPGCLDPALPAPRLAAAFDTAAGIIARRGAAPVAAVWKVKRALDAGSERRLREEVGVIHEAVMGLIRSRRKERALLLVNGNGVGGGGGARSDLLSRMIECGYPDEAIRDMVISFIMAGRDTTSSALTWFFWLLMRHRGVEAQVLDEIAATRRARGAGEEGGDDGEGEGLDLDDYRRMRVLHAALCETMRLYPPVAWDSKHAAADDVLPDGTAVGRGDRVTYFQYGMGRMEAIWGADAADFSLDRWLSLPRGGGDGAAAASPAADAFAGVSPFKYPVFQGGPRTCLGKEMAFVQMKFVASAVLRRFELRPVDEGRTPAFVPLMTAHMAGGLNVTVRRRTPAPATSTAANGTGGELTSS

SEQ ID NO: 183663 - protein, 101 aa, Oryza sativa
  unsure (1)..(101): unsure at all Xaa locations
  Clone ID: PAT_MRT4530_80732C.1.pep
YRRVCTFFFFFENSRKAQVRHLSXIIHSCAPPQPFSEGIYGKVLSTIVLPMSVSLAGHTVILNPQDFRDGWGCSRYMVRPIVHHPPFELLAFIFILATNQS

SEQ ID NO: 183664 - protein, 579 aa, Oryza sativa
  Clone ID: PAT_MRT4530_80733C.1.pep
MSSNLFDYVIPACAAGQHCDDRAAAGSLPSCLLATGVRNFSLAGSPAYDALLNFSIQNLRFALPAAGAVPRPAAVVLPRGRSELTSAVLCARHASLRIRVRSGAHSYEGLSYTVGDGGDDADRVRFVVIDLTRMNRVRVDAASATAWVESGATLGEIYYAVASSSSSLAFPAGSCSTVGAGGHISGGGFGLLSRKFKLAADNVLDAILVDADGRVLDRSSMGENVFWAIRGGGGGGWGVVYAWKLRLVQVPNTLTAFTPKRTGSVDAIAGLVHRWQYVGSALPDEFYLSVFLTIGGASSSSPSRDGNVTVSFTGLVLGSKELAMSVLSERFPELGLAEPEMSEMSWVESAARFAGLSSTEELTSRASRTKHYAKSKSDYVRSPIARGAVAAILRYLAGEPAGYVILDPYGGAMAREGSGDTPFPHRAGNLYSVQYGVTWEAGDDGGGGGGGGEARMAWLRALYAYMAPHVSKNPRAAYVNYVDLDLGTNALAGNVSSPSSSVSRARSTWGSAYFSPANFERLVGAKTLIDRSNGDLDDSGRGSEALGSARGIGVVGLRRGSVAGLHEGQRVAATSSARR

SEQ ID NO: 183665 - protein, 556 aa, Oryza sativa
  unsure (1)..(556): unsure at all Xaa locations
  Clone ID: PAT_MRT4530_80734C.1.pep
MAWFVAAWSCLLVVVMVSSMRLSRSASSSCGSSCGHGGWGPRSYPVIGCLVAFYRNRRRLLDWYTEMLAASPSQTIVVDRLGARRTVVTANPANVEHILRARFANYPKGKPFTDVLGDLLGMGIFNVDGELWHAQRKLVSHEFSARALRDLEVTVLEAEARDRLVPALAAASRGGGVVDMQDVLRRFAFDVICRVSLGVDPGCLDPALPAPRLAAAFDTAAGIIARRGAAPVAAVWKVKRALDAGSERRLREEVGVIHEAVMGLIRSRRKERALLLVNGNGVGGGGGARSDLLSRMIECGYPDEAIRDMVISFIMAGRDTTSSALTWFFWLLMRHRGVEAQVLDEIAATRRARGAGEEGGDDGEGEGLDLDDYRRMRVLHAALCETMRLYPPVAWDSKHAAADDVLPDGTAVGRGDRVTYFQYGMGRMEAIWGADAADFSLDRWLSLPRGGGDGAAAASPAAAAFAGVSPFKYPVFQGGPRTCXGKEMAFVQMKFVASAVLRRFELRPVDEGRTPAFVPLMTAHMAGGLNVTVRRRTPAPATSTAANGTGGELTSS

SEQ ID NO: 183666 - protein, 57 aa, Oryza sativa
  Clone ID: PAT_MRT4530_80735C.1.pep
IVECLIRPCLHHSFIVRRSIQSRAVPMGNNNGDRQHTHVEVQKVVRTRASGPMCHPF

SEQ ID NO: 183667 - protein, 75 aa, Oryza sativa
  Clone ID: PAT_MRT4530_80736C.1.pep
MKKRTVMVKVKERMTTKKVEQLLSFVPRTFPRDRKPRSDDPEINQAREELRTKGSVDCWVTKYAAADDDMLASTA

SEQ ID NO: 183668 - protein, 56 aa, Oryza sativa
  unsure (1)..(56): unsure at all Xaa locations
  Clone ID: PAT_MRT4530_80737C.1.pep
RRQKTERSPPRKFLIMPYFYRRAAAGLHRLLFAARIKASERRQRAXRDRGEVRDVC

SEQ ID NO: 183669 - protein, 43 aa, Oryza sativa
  Clone ID: PAT_MRT4530_80738C.1.pep
PIWCFYLGISYASVKCQFHPPPHQYLLLNLKYHVLFIVTTYNF

SEQ ID NO: 183670 - protein, 376 aa, Oryza sativa
  Clone ID: PAT_MRT4530_80739C.1.pep
MASGEEADLEAFQRHVAAHLADLRGGEDELLSIEWIRRLLEAFLLCQEEFRVVVALARRRGALSAAAEKMVGDFYERAVKALDVCNAARDGVDQVRRWERLAGIAASVLLAPGEIHEGQLRRARKALSDLSVLLIDDAAAAAGGGGVASFLSSHRNRSFGRARASPSRSATLASSSSSSSSSSSSSHFRSLSWSVSRNWSAARQLQAIGSGLAAPRAHEGGLVAPVYSMGCLLHLAAWALVAAVPCPDRAAALQAHHLPAAPPRAAFPWAPPLLALQERLTEEGKRKDRRNSCGLLKEIHALEKCTQRLAEAIDAAPVPLSGEREAEVREAAAELAAVCAAMRAGLEPLERQVREVFHRIVRSRMEGLDSPMLNAD

SEQ ID NO: 183671 - protein, 404 aa, Oryza sativa
  Clone ID: PAT_MRT4530_8073C.1.pep
MAAGGGGADGLPPGLRFDPTDGELVSRFLLRRLQGKPLPLNGVILEADPLSVPPWKLLAEHGRGDEGFFFAEARAKNGKGSRQKRTVEGSGLWQGQRVCADGEKLLVPDGGGVEVEIVWRKYLLSFFAEGERGSSGWVMHEYAVTSPAELAASPIRLYRVRFSGHGKKRKREPQSGEDGVGRARAAPQSAGTETALLEERVVPPPQTVSISPPAALVDAVDDADCANQGCSGVMDDSTMVFSHLPDMITLPAEEGDAAGGAALASMDYSWADFEFPEINMDELPNCIDFTTTDPSCLDIELSMGDLHEPQSTGIESDLLEEFVPQPQPEAEADACSAAPAPSLDNQKYSSQGIIDSEAPALSDFEFPETIDEVLNSINFTMADPSCLDMEFSMDDLLDFDPPAD

SEQ ID NO: 183672 - protein, 318 aa, Oryza sativa
  unsure (1)..(318): unsure at all Xaa locations
  Clone ID: PAT_MRT4530_80740C.1.pep
MTARSMLRNHPEASVLDTIRQHLLEEPRGGGGGEAAEASFGSLVADMWSDSLPFRDDDADDMVVFGAMRDAFSCGWLPDGVFAEVKPEPLLSPDSSSYDGSSCCFGFADVSEPVTPSDAASGAAEAAAAAAAATAEHGKEEEAAAAVARGKHYRGVRQRPWGKFAAEIRDPAKNGARVWLGTFDTAEDAALAYDRAAYRMRGSRALLNFPLRIGSEIAAAAAAAAAAAAGDKRPSPEPATSESSFSSSSSCTTTTTSSSTSSSGSPKRRKRGEAAAAXMSMPLVPPPSQLNWPVQAWYPAAAPVEQVAITPRVEQLVI

SEQ ID NO: 183673 - protein, 82 aa, Oryza sativa
  Clone ID: PAT_MRT4530_80741C.1.pep
PGGRRVRKQGEETRVVRVERDMRSQAGAASGRCREREGFGGEGRREMRARFLGREEGHESAGERDSTGSREGSGARRRRRLV

SEQ ID NO: 183674 - protein, 1058 aa, Oryza sativa
  Clone ID: PAT_MRT4530_80742C.1.pep
MARGSALLDGSVLPPSRIVSERQAGLPRRFMPESATGREIVTLGEGRPAPDYPGRSVFFLPFAMAGLVPPFSSFFMDVLEFYDLQMAHLTPNAVMTLAIFAHLCEMFIGVRPSLRLFRWFFTVQSVSPPSVVGGCYFQPRGPVLNRYIPCALRKKWDDWKSDWFYTPLADEARLRLPSQPPAQASSWRAPVDLGDGYDAVLDRLAGLRSQGLTGAMVYGDYLRRRIAPLQRRARGAWEYTGSEDFMRTHQGASLIPQGILPLCSDPDCASILTIMMAVGASEERAPKGHDDAGGSRRGEQSTPGGGRTSGSRDRGPGSSRPADARGKRKQGGTPPPSPPRGGGAVRASSRRPEGAVPTSQPEGERKKKRFRKMGETEPSRGNLISPPKWSFNRPPRSEIPSRPSRHSKPGQSEAEDPAAAEARRRESDRREAADRLREAEEAAQEAARARQAEETAREEAARARQAEEAVREEAARARQAEEAVREEAARARQAEEAAREKAGFRQDEALATSEAARDEAAGASLGPTPSGDAQATASGAAGDEAAGASLGPTPSGDAQDQPGPGDIPESGTSIGGPSRMASSPRRLFPTPSIAPLNAEPLLQALAAANTTVLDGLSAQVEALQAERAELDAAWAHVEEGRRSVEAMVEVGRKAHRRHVSELETRKKVLAEIAKEVEEERGAALIATTVMNEAQDTLRLQYGSWEAELGKKLDAAQGVLDAAAAREQRAAETEAASRRREEALEARAMALEERACVVERDLADREAAVTIREATLAAHEAACAEEELALRLREDALTERERALEGAEAAAQQLADSLSLREAAQKEQARRNLEGARAERAALNQRAAELEARAKELDARARSGGAAAGESDLAARLAAAEHTIADLQGALDSSAGEVEALRLAGEVGPGMLWDAVSRLDCAGRQVGLWRGRTVKYAANQGGLAQRLSKMAGALQRLPEELEKTIKSSSRDLAQGAVELVLASYQARDPNFSPWMALDEFPPGTEDHARAQVRDAADHIVDSFEGSAPRLAFAPNSDEEGNAGGADDSDDEAGDPGASD

SEQ ID NO: 183675 - protein, 1075 aa, Oryza sativa
  Clone ID: PAT_MRT4530_80743C.1.pep
MARGSALLDGSVLPPSRIVSERQAGLPRRFMPESATGREIVTLGEGRPAPCYPGRSVFFLPFAMAGLVPPFSSFFMDVLEFYDLQMAHLTPNAVMTLAIFAHLCEMFIGSVSPPSVVGGCYFQPRGPVLNRYIPCVLRKKWDDWKSDWFYTPLADEARLRLPSQPPAQASSWRAPVDLGDGYDAVLDRLAGLRSLGLTGAMVYGDYLRRRIAPLQRRTRGAWEYTGSEDCMRTHQGVRWDWAPEDFKIVVQRVLNLSSVEASLIPQGVLPLCSDPDRAFILTIMQAVGASEERAPRGHDGAGGSRRGEQSTPGGGRASGPRDRGPGSGRPADARGKRKQEGTPPPSPPRGGGAARASSRRPEGPRRRRSPRGSGRRNGPARWGGQNHLGETLFPLQGGRLTDLLAGSSHAHRGRIHSLNASFHSSILFVFWSFFCFSEIPSRPSRHPKSGQSATTEARRRESDRREAADRLREAEEAAQVAVRARQAEEATREEARLRQAEETTSSEATRETDRQEAADRLREAEEAAQVVVRAGQAEEAAREEARLRQAEATTTSEAARDEAAGASLGPTPSCDAQDKPGPGDIPESGTSIGGPSRAASSSRRLFPTPSVAPLSAEPLLQALAVANTTVLDGLSAQMEALQAERVELDAAWARVEEGRRSVEAMVEVGRKAHRRHVSELEVRQKVLGEIAKEVEEERGAALIATTMMNEAQDTLRLQYGSWEAELGKKLDAARGVLDAAAARERRAAETEVASRRREEALEARAMALEERACAVERDLADREAVVAIREVTLAVHEAACAEEESALRLREDALTERERALEEAEAASQRLVDSLSLREAAQEEQARRNLEGARAERAALNQRAAELEAREELDARARSCGAAAGESDLTARLAAAEHTIADLQGALDSSAGEVEALRLAGEVGPGMLRDAVSRLDRAGRQAGLWGGRTAKYAANQGGLAQRLSEIAGTLQRLPEELERTIKSSSRDLARGAVELVLASYQARDPDFSPWTALDEFPPGTEDGARTQVRDAADHIVHSFEGSAPRLAFALNFDEEDDDGGVGDSGDEAGDPGASE

SEQ ID NO: 183676 - protein, 882 aa, Oryza sativa
  unsure (1)..(882): unsure at all Xaa locations
  Clone ID: PAT_MRT4530_80744C.1.pep
MARGSALLDGSVLPPSRIVSERQAGLPRRFMPESCTGQEIVTLGEGRPAPCYLGRSVFFLPFAMAGLVPPFSSFFMDVLEFYDLQMAHLTPNAVMTLAIFAHLCEMFIGVRPSLRLFRWFFTVQSVSPPSVVGGCYFQPRGPVLNRYIPCVLRKKWDDWKSDWFYTPLADEARLRLPSQPPAQASSWRAPVDLGDGYDAVLDRLAGLRSQGLTGAMVYGDYLRRRIAPLQRRARGAWEYTGSVEASLIPQGVLPLCSDPDRASILTIMQAVGASEERAPRGHDGAGGSRRGEQSTPGGGRASGPRDGGPGSSRPADARGKRKQEGTPPPSPPRGGGAARVSSRRPEGATPTPQPEGERKKKRLRKMGGTEPSRGNLISPPRWSFNRPPRSEIPSRPSRHSKSGQSEAEDPATTEARRRESDRREAVDRLREAEEAAREAARARQTEEAAREEAGLRQAEATTSSEATRETDRQEAADRLREAEEAAQVAVRARQAEETAREEARLRQAEATTTSEAARDEAAGTSLGPTPSCDAQDKPGPGDIPESGTSIGGPSRAASSPRRLFPTPSVAPLSAEPLLQALAIANTTVLDGLSAQVEALQAERAELDAAWVRVEEGRRSVEAMVEVGRKAHRRHVSELEARRKVLGEIAKEVEEERGAALIATTVMNEAQDTLRLQYGSWEAELGKKLDAAWGVLDAAAARERRAAETEVASRRREEAREARAMALEERACAVERDLADCEAAVAIREATLAAHEAACAEEESALRLREDALTERERALEEAEAAAQRLADSLFLREAAREEQARRNLEGARAERAALNQRAAELEAREKELDARARSGGAAAGESDLAACLAAAEHTIADLQGALDSXAGEVEALRLAGEV

SEQ ID NO: 183677 - protein, 121 aa, Oryza sativa
  Clone ID: PAT_MRT4530_80745C.1.pep
MASKDVRESNRREVLTGKEMPIAGNGDKKTSSPREVGSARERGGTPPVPVKASALNRSARRSRVLLLPPRRCFSSTVAAGYRRGGGEDWGMQEEDEFDMWVPRADKEMDEKCNGSGTVSIL

SEQ ID NO: 183678 - protein, 1055 aa, Oryza sativa
  Clone ID: PAT_MRT4530_80746C.1.pep
MARGSALLDGSVLPPSRIVSERQAGLPRRFMPESATGREIVMLGEARPAPDYPGRSIFFLPFAMAGLVPPFSSFFMDVLEFYDLQMAHLTPNAVMTLAIFAHLCEMFIGVRPSLRLFRWFFTVQSVSPPSVVGGCYFQPRGPVLNRYIPCALRKKWDDWKSDWFYTPLANEARLRLPSQPPVQASSWRAPVDLGDGYDAVLDRLAGLRSQGLTGAMVYGDYLRRRIAPLQRRARAAWEYIGPEDYMRTHQGVRWDWAPEDFKILIQRVLNLNSVEASLIPHGILPLCSDPDRVSILTIMTAVGASEEQAPKGHGGAGGSRRGDQSTPGGGRASRPRVGGSGSNRPTDARGKRKLGGTPPPSPPRGGGAARASSRRPEGAAPTSQPEGERKKKRLRKMGETEPSQGNLISPPRWSFNRPPRSDVPSRPSRHPKSGQSEAEDPAAAEERRREFDRREAADRLREAEEAAREAARARQAEEAAREEAARVRQAEETAREEAARARQTEAMASFEAAHDKAAGASLGPTPSGDAQATTSGAACDKAAGASPGPAPSGDAQDQTGPGDIPELSASSGGPSRVAFSPRRLFSSFSATPLSAEPLLQALAAANTAVLDGFSAQVEALRAERAELEAAWARVEEGRHSVDAMVEVGRKAHRRHISELEARKAALAEIAREVEEEREAALVATTAMIEAQDSLRLQHGSWEAELKKKLDAAQGVLDAAAAREQRATEAEAASRRREEALEARAMALEDHAGAVETSLADREAAAAIREATLAAHEAACAEEESALRLREDALAERERALEESEAATQRLADSLSLREAAQEEQARRNLECIRAERAALEQQAANLETREKELDARKRSGGAATGESDLVARLAAAEHNVADMQRALDSSTGEAEALRLSGEIGPGMLWDAVSRLDRAGREAGLWKGQTISRSTNLEGLAPHLRRMAWAVQQLPEELEKTIKSSSRDLAQGAVELVLASYQARDPGFSPWMALEEFPPGTEDDARARVRDAANHIVQSFEGSAPRLAFAPSSDEEGDASGEDDGGDEASDPGALE

SEQ ID NO: 183679 - protein, 81 aa, Oryza sativa
  Clone ID: PAT_MRT4530_80747C.1.pep
FPWGVELGKSLAFPVRKSLPASPLERKPVPGFPPPPPSFFPPFFPVGPSPPFNLSTMPKVFFFVFGPLFFFGLTRVGRPIL

SEQ ID NO: 183680 - protein, 917 aa, Oryza sativa
  Clone ID: PAT_MRT4530_80748C.1.pep
MAGLVPPFSIFFMDILEFYDLQMAHLTPNAIMTLAIFAHLCEMFIGVRPSLRLFRWFFTVQPVSPPTVVGGCYFQPRGQLLNHYAPYVLRKKWDDWKSDWFYTPLADEARLRLPSQPPAQASSWRAAVDLGDGYDAVLDRLAGLRSQGLTGAMVFGDYLHRRIAPLQRRARGAWEYTGPKDYMRTHQGRKWDWDPEDFRMVVQRVLNLSSVEASLIPQGALPLCCDPERAKILAIMQVVGASGERAPRGHDGAGGSSRGEHSTPGGGRASGPRDGGPGGSRPADARGKRKQEGTPPPSPPRGGGARDPVASPPPPRHSKSGRSEAEETATAEARRREADRREAADRLREAEEAAQEAVRARQAEEAAREEARLRRAGESIREAEAARAREAACQTPDPTPPEATMTSEATHDEAAGAPLGPDPSGDAWVEPASGDAPESGTSIGGPSRAAPTPRGLSPLPSAAPLSAEPLLQALAAANITAERAELDAAWARVEEGRRSVEAMVEVGRMAHRRHASQLEARRRDLVEIAREVEEERETALIATAVLDEARDDLRLQYGSRAAELEEKLDAARGALDAAAAQERQAAENEAASRQREEALEARATVLEERARALDAKERDLADREAAVATREATLAAHEAACAEEESALRLREDALTERGRALEEAEATAQRLADSLFLREAAREEQARRNLEGARAERAALDQRAAELEARAKELDARAHSGGAAVGHGDLAARLAAAEHTIAELQGALDSSAGEVEALRLASEVGPGMLRDAVSRLDRAGRQAGLWGGRYAKYAVNQGGLAQRLSEMAGALERFPEELEETIKSSSRDLARGAVELVLASYQARDPDFSPWAALEEFPPGTEDGARAQVWDAADHIVHSFEGTAPRLAFALDSDEEGGDDGADDSDDEADDPGASE

SEQ ID NO: 183681 - protein, 131 aa, Oryza sativa
  Clone ID: PAT_MRT4530_80749C.1.pep
CRGPPVSIDGHVGSLSGRHGPTDAPGCAVPTHVPHSRPRHGPTRLGPCRAGPKVEMAHRQPSMPVGRPRHGPAVRPGRHGPDPSRAMPCLGRAKMPCRGPVLRASGALHRSRAVQPPAAAVSATPAAASRR

SEQ ID NO: 183682 - protein, 143 aa, Oryza sativa
  Clone ID: PAT_MRT4530_8074C.1.pep
WDAGARHGRRRGGGREGEAAHAVDAAAEEEEDAGHRAAAGSGRDEGDDNADERRGSRREERGTGHTDADDHHARHLRLLPTEAASSPTSTPPLPPPNRGRRGLLPPPPPPPPPRLRLPPPRPPAASPRSREGLPPLLPGVPFM

SEQ ID NO: 183683 - protein, 1029 aa, Oryza sativa
  unsure (1)..(1029): unsure at all Xaa locations
  Clone ID: PAT_MRT4530_80750C.1.pep
MARGSALLDGSVLPPSRIVNERHAGLPRRFMPESATGREIVMLGEGRPAPDYPGRSIFFLPFAMAGLVPPFSHFFMDVLEFYDLQMAHLTPNAVMTLAIFAHLCEMFIGVRPSLQLFRWFFTVQSVSPPSVVGGCYFQPRGPVLNRYIPCVLRKKWDDWKSDWFYTPLANEARLRLPSQPPAQVSSWRAPVDLGEDYDAVLDRLAGLRSQGLTGAMVYGDYLRRRIAPLQRRARSAWEYTGPEDYMRTHQGARWDWAPEDFKIVVQRVLNLSSAEASRLPQEILPLCIDPDRVSILTIMLGVGASEERAPKGHDGAGERRRGEQSAPGGGRASGPRVGGSGSSRPADAQGKRKLGGTPPPSPPRGGGAARASSRRPEGAAPTSQPEGERKKKRLRKTGETEPCRGNLISPPKWSFNRPLRSDVPSHSSRHPKSGQSEAEDPAAAEERRREADRREAADRLREAEEAAREAARVRQAEEAAREEAARAEEAAKEEAARARQAEATAAAGASTGPTPSGNPQATASGEARDEAAGTSPGPTSPGDAQDQTGPGDIPEPSASFGGPSRVAFSPRRLFSSSSVAPVSAEPIMQALAAANTAVLDGFSAQVEALRAERAELEAAWARVEEGRRSVDAMVEVGRKAHRRHISELEARKTALAEIAREVEEEREAALVATTAMIEAQDSLRLQHGSWEAELKNKLDAAQGVLDSAAARERRATEAEAASRRREEALEARAMALEEHAGTVEKGFTDREAATALREATLAAHEAACAEEESALRLREDALAERERALEEAEATTQRLADSLSLREAAQEEQARRNLECVRAERAALEQRAANLEAREKELAARARIGGAAAGESDLAARLAAAEHTVADMQRALDSSIGEAEALRLASEMGPDMLWDSVSRMDRAGRQAGLWKGQTRTRPSNLEGLAPHLNRMAWVLERLPVELDKTIKSSSRDLARGAVELVLASYQARDPDFSPWMALEEFPPGTEDDARAXVRDAADHIVDGFEGSAPLLAFAPSSDEEGDASD

SEQ ID NO: 183684 - protein, 963 aa, Oryza sativa
  Clone ID: PAT_MRT4530_80751C.1.pep
MARGSALLDGSVLPPSCIVSERQAGLPRRFMPESATGREIVTLGEGRPAPDYPGRSVFFLPFAMAGLVPPFSSFFMDVLEFYDLQMAHLTPNAVMTLAIFAHLCEMFIGVRPSLRLFRWFFTVQSVSPPSVVGGCYFQPRGPVLNRYIPCALRKKWDDWKSDWFYTPLTDEARHRLPSQPPAQASSWRAPVDLRDGYDAILDRLAGLRSQGLTGAMVYGDYLRRRIAPLQRRARGAWEYTGSEDFMRTHQGVRWDWAPEDFKILVQRVLNLNSVEVSFIPQGILPLCSDPDRASILTIMMAVGASEERAPKGHDGAGGSRRGEQSTPGGGRASGEIPSRPSRHSKSGQSEAEDPAAAEARRRESDRREAADRLREAEEAARARQAEETAREEAARARQAEEAAREKAGFRQDEAMATSEAARDEAAGASLGPTPSGDAQATTFGAAGDEATGTSLGPTPSGDAQGQTGPGNIPESGTSIGGPSRMASFPRRLFPTPSIAPLNAEPLLQALAAANTTVLDGLSAQVEALQAERAELDAAWARVEEGRCSVEAMVEVGRKAHRRHVSELETRKKVLAEIAKEVEEERGAALIATTVMNEAQDTLRLQYGSWEAELGKKLDAAQGVLDAAAAREQRAAETEATSRRREEALEARAMALEERACVVESDLADREAAVTIREATLAAHEAACAEEELALRLRKDALTERERALEGAEAAAQQLADSLSLREAAQEEQARHNLEGARAERAALNQRAAELEVRAKELDARARSGGAAAGESDLAARLAAAEHTIADLQGALDSSAGEVEALRLAGEVGPGMLWDAVSRLDCAGRQVGLWRGRTVKYAANQGGLAQRLSKMAGALQRLPEELEKTIKSSSRDLAQGAVELVLASYQARDPNFSPWMALDEFPPGTEDRARAQVWDAANHIVDSFEGSAPRLAFAPNSDEEGNAGGADDSDDEAGDPGASD

SEQ ID NO: 183685 - protein, 857 aa, Oryza sativa
  Clone ID: PAT_MRT4530_80752C.1.pep
MARGSALLDGSVLPPSRIVSERQGGLPRRFMPESATGREIVTLGEGHPAPCYPGRSVFFLPFAMAGLVPPFSSFFMDVLKFYDLQMAHLTPNAVMTLAIFAHLCEMFIGVRPSLRLFRWFFTIQSVSPPSVVGGCYFQPRGPVLNRYIPCVLRKKWDDWKSDWFYTPLADEARLRLPSQPPAQASSWRAPVDLGDGYDAVLDRLAGLRSLGLTGAMVYGDYLRRRIAPLQRRARGAWEYTGSEDCMRTHRGVKWDWAPEDFKIVVQRVLNLSSVEASLIPQGVLPLCSDPDRASILTIMQAVGASEERAPRGHDGAGGSRRGEQSTPGGGRASGPRDGGPGSGHPADAREKRKQEGTPPPSPPRGGGAARAGSRRPEGATPTSQPEGERKKKRLRKMGGTEPSRGNLISPPRWSFNRPPRRFVPRPSWPYSFPQREFSLIHLVCLLSGQSEAEDPATTEAQRRESDRREAADRLREAEKAAQVAVRARQAEEAAREEARLRQAEAATTSEAARDEAAGASLGPTPSGDAQDKPGPGDIPESGTSIGGPSRAASSPRRLFPTPSVAPLSAEPLLQALAVANTTVLDGLSAQVEALQAERAELDAAWARVEEGRRSVEAMVEVGRKAHRRHVSELETRRKVLGEIAKEVEEERGAALIATTVMNEAQDTLRLQYGSWEAELGKKLDAARGVLDAAAARERRAAETEVASRRREETLEARAMALEERASAVERDLADRKAAVAIREVTLAVHEAACAEEESALRLREDALTERERALDEAEAAAQRLADSLSLREAAQEEQARRNLEGARAERAALNQRAAELEAREKELDARARSGGAAAGESDLIARLAAAEHTIADL

SEQ ID NO: 183686 - protein, 276 aa, Oryza sativa
  Clone ID: PAT_MRT4530_80753C.1.pep
MKGSHSQSQAQAQSQAGRRRRCGWLLPLLVGAAFLAEIAFLGRGGMANNAAAVESWTTSFYARSSAPARDGKAAVVVPGADADDAPPGGGEVVEEDDGDIRLCEERLEREDGVPHDRDFDKDPVLVGGAAKDWNKCSVGCEFGFSATKTPDATFGIAPDPTVESILRSMESSQYYSENNIAVARGRGYKIVMTTSLSSDVPVGYFSWAEYDIMAPVPPKTEEALAAAFISNCGARNFRLQALEMLESLDVKIDSYGSCHRNHDGKVDKVETLKRYK

SEQ ID NO: 183687 - protein, 851 aa, Oryza sativa
  Clone ID: PAT_MRT4530_80754C.1.pep
MARGSALLDGSVLPPSRIVSERQAGLPRRFMPESATGREIVTLGEGRPAPDYPGRSVFFLPFAMAGLVPPFSSFFMDVLKFYDLQMAHLTPNAVMTLAIFAHLCEMFIGVRPSLRLFRWFFTVQSVSPPSVVGGCYFQPWGPASSWRAPVDLGDGYDAVLDRLAGLRSQGLTGAMVYGDYLRRRIAPLQRRARGAWEYTGSEDYMRTHQGVRWDWAPEDFKIVVQRVLNLNSMEASLIPQGILPLCSDPDRASILTIMTAVGASEDEIPSRPSRHSKSGQSEAEDPAAAEARRRESDRREAADRLREAEEAAQEAARARQGEETAREEAARARQAEEAAREEAARAHQAEEAAREKAGFRQDEAMATSEAARDEVAGASLEPASSGDAQATTSGAAGDEAAGASLGPTPSGDAQDQPGLRDIPESGTSIGGPSRVASSPRRLFPTPSIAPLSAEPLLQALAAANIAVLDGLSAQVEALQAEWAELDAAWARVEEGRRSVEAMVEVGRKAHRRHVSELEARKKVLAEIAKEVEEERGAALIATSVMNEAQDTLRLQYGSWEAELGKKLDAAQGVLDVAAAREQRAGETEAASRRREETLEARAMALEERACVVERDLADREAAVTIREATLAAHESACAEEESALRLHEDALTERERALEEAEAAAQRLADSLSLREAAQEEQARRTLECVRAERTALNQRAADLEAREKELDARARSGGAAAGENDLAARLAAAEHTIADLQGTLNSSAGEVEALRLAGEVGPGMLWDAVSRLDRAGRQVGLWRGRTVKYAANHGGLAQRLSKMAGALQRLPEELEKTIKSSSRDLAQGAVELVLASYQARDPNFSMDGAG

SEQ ID NO: 183688 - protein, 570 aa, Oryza sativa
  Clone ID: PAT_MRT4530_80755C.1.pep
MKGSHSQSQAQAQSQAGRRRRCGWLLPLLVGAAFLAEIAFLGRLDMAKNAAAVESWTTSFYARSSAPARDGKAAVVVPGADADDAPPGGGEVVEEDDGDIRLCEERLEREDGVPHDRDFDKDPVLVGGAAKVSYLFSRSAPPRALPFQFGDPPPCALAFELGELLLDCSAQQDWNKCSVGCEFGFSATKTPDATFGIAPDPTVESILRSMESSQYYSENNIAVARGRGYKIVMTTSLSSDVPVGYFSWAEYDIMAPVPPKTEEALAAAFISNCGARNFRLQALEMLESLDVKIDSYGSCHRNHDGKVDKVETLKRYKFSLAFENSNEEDYVTEKFFQSLVTGAIPVVIGAPNIQEFSPGEGAILHIKELDDVPSIAKTMKHIASNQEAFNQSLRWKYDGPSDSFKALIDMAAVHSSCRLCIHVATKIHEKEERTPKFMNRPCSCSSKRGKVYHLFVRERGRFKSSSNNRGFMDAVMVRCRQCQASRSDQLTMGALESAVLAKFRSLNHVPVWKDERPPSIRGGDELKVYKIYPIGLTQRQALYQFRFRDDADLDKYIKDHPCAKLEVIFV

SEQ ID NO: 183689 - protein, 1038 aa, Oryza sativa
  Clone ID: PAT_MRT4530_80756C.1.pep
MARGSALLDGSVLPPSRIVSERQAGLPRRFMPESATGREIVMLGEARPAPDYPGRSIFFLPFAMAGLVPPFSSFFMDVLEFYDLQMAHLTPNAVMTLAIFAHLCEMFIGVRPSLRLFRWFFTVQSVSPPSVVGGCYFQPRGPVLNRYIPCALRKKWDDWKSDWFYTPLANEACLRLPSQPPAPVSSWRAPVDLGDDYDAVLDRLAGLRSQGLTGAMVYGDYLRRRIAPLQRRARSAWEYTGSEDYMRTHWGVRWDWAPDDFKIVVQRVLNLSSVEASLIPQGLLPLCCDPDRASILTIMMGVGASEEVAPKGHDGAGGSRQEESTPGGGRASGPRDGGSGSNRPAAARGKRKQGGTPPPSPPRGGGAVRASSRRPEGAVPTSQPETERKKKRLRKTGETEPSRGNLISPPRWSFNRPPRSDVPSRSSRHPKSGQSEAEDPAAAEERRRESDRREAADRLREAEEAAREAARVRQAEDTAREEAARARQAEEAAREEAAQARQAEEAIREVTARARQAEAMASSEAVHDKTAGASLGPTPSGDAQATTSGAARDKAAGASPGPAPSGDAQDQAGPGDIPELSASSGGPSRVAFSPRRLFSSSSAAPLSAEPLLQALAAANTAVLDGFSAQVGRKAHRRHISELEARKAALAEIAREVEEEREAALIATTAMIEAQDSLRLQHGSWEAELKKKLDAAQGVLDAAAAREQRATEAEAASRRREEALEARAMVLEDHAGAVETSLADREAAAAIREATLAAHEAACAEEESALRLREDALAERERALEESEAATQWLADSLSLREAAQEEQARRNLECVRAERAALEQRAANLEAREKELDARERSGGAATGESDLVARLAAAEHTVADMQRALDSSTGEAEALRLAGEIGPGMLWDAVSRLDRAGREAGLWKGQTISRSTNLEGLAPHLRRMAWAVQQLPEELEKTIKSSSRDLAQGAVELVLASYQARDPGFSPWTALEEFPPGTEDDARARVRDAANHIVQSFEGSAPRLAFAPSSDEEGDASGEDDGGDEAGDPGTLE

SEQ ID NO: 183690 - protein, 199 aa, Oryza sativa
  unsure (1)..(199): unsure at all Xaa locations
  Clone ID: PAT_MRT4530_80757C.1.pep
MDMLDTLAGWRHEMRMHMVYEILTRYVLPRLADNKYSKQYKDFIVASRLIVHIHAKKELDSKLKKRGSHKENEVIQEAIYTRAEDMKEAVKHFAVSLHREFWVAKFNWSQYEVRCVKEKDGCPWRVHVYKGKXWKDYWTVSVEPPRRCQYREWVDTRREWVDTRRVLLHLAVWCSLNYQRNTGLLKGGLREERDPHVGV

SEQ ID NO: 183691 - protein, 577 aa, Oryza sativa
  Clone ID: PAT_MRT4530_80758C.1.pep
MSSPPLGVGTVAGDGVDVRASSPGGLRRIHVHEGGDIGKLPVVEPSSRSGRRIAPLAKEPPSRGVAEPSSRCERHLIKASTRSRVVSNRRGLARRQARQTAVRAPPAVLCVNPRGASPRPAAAEDMGSSRDELVAVYKGGRILYLAYFRTFKRADHPGVTLSPRLSTTPDGDHHGEIVWPAPSRSLLGGCRAEGASRHGVHRRGLRHPSPSARQPPNLYHLLEDSVSGLVDSTIAMQIFDHKSNDNELKFSQEEKKDMIESFGKLKVSKVRSEFLKMEKSFMKLIESSDKAIERQIVDSIYSFAQDNQVVVTKCIMLCHRGWNTKRYLIPVAKVTTLKLIQVITLNLMGMTWNLVILVLSKVAMTVMMMMVVAGMMKKKMTMKRMMTMRRKMKRTMMKRRMRKRTTMKRRTRKRTMKRRTMKEEDEDYDPVHDDDEDDDDEYMNGLANLPPLPPGTEYWNGVTVVNRVSAIRNLNPQFHVLGFGPNLTIHQRVRLWATGDAMGFDFHPTEMLRYVWRMELLLNGQNPGNPLDAVNEPPVPNPGDYDDEGWITDEDMVGGIALDDLGLDSSSSDIGDA

SEQ ID NO: 183692 - protein, 178 aa, Oryza sativa
  Clone ID: PAT_MRT4530_80759C.1.pep
MAVAIDHDRIAAIDDDRVADGSRRSWRPSCWLIPRSICKKKKERILDQSARNTKREKTGWTYQNQSPGNIQIMVVQKPIMSMESRRRHSGRRTSCMGLTMMDFCCVVVRYSPPWPEPSLRPCRWIARIAVVVCYSPPWPKPATLADVSPRRRLQIALISDRSVDFLFGLALRENEIFM

SEQ ID NO: 183693 - protein, 266 aa, Oryza sativa
  Clone ID: PAT_MRT4530_8075C.1.pep
MRKEELDYVLIPLGMALMVGYHAWLLLRIRRRPATTVIGVNAINRRIWVRHIMERDENEIAGVTGFGWIQEASGKHAVLAVQTIRNNIMASTLLASTAITLSSLIAILMSSAGGGGGDGLLPGAPLVVGAAGETALSVKFFAILVCFLVAFLLNVQSIRYYSHTSTLVNVPVRLIQRRRRPGLAVDYVTATLNRGSYFWSLGARAFYFSCPVFLWLFGPIPMFAACAAMVCALYFLDVCDDWEEEHQDHDEQDGSGSDERSGEAKV

SEQ ID NO: 183694 - protein, 1508 aa, Oryza sativa
  unsure (1)..(1508): unsure at all Xaa locations
  Clone ID: PAT_MRT4530_80760C.1.pep
MSNKQIFQVYHGPGNVRYGPTGVDLSDFIVSERGIDRPAERSVPSIKGWLMRGLRVDPQTSDITINVIVSRATEGFYWELMPVQNSRVWRWYLENALQRGWPLALVPFVHPKDPGVQTNMDDGEGPSAEVNETSVEEVNAREDGGVVAPVGIQPGGVADEGETVGAIVDEMERKDSDNERVEEGDSSDDETDINPAEWASEDFSGLIVSEEDSVRWEYKENEVIQGAIYSRAEDMKEAVKHFAVSLHREFWVAKSNRSQYEVRCVKEKDCCPWRVHAYKGKWKDYWTVSVITKHTCFLPGVQKYHRNITCAFVASEMYAHVIDNLTYEPRSIIRHIEETYKYTISYAKAWRAKQKIIEMRFETYEASYDNLPCLLGVIEERNRRSSYEVKKFPSIEHPGKSVLQRAFLALHVCKMAFVNCRPVLCIDGTFLTGKYQGQILTAIGVDGNNQVLPLAFAFVESENTDSWYWFLKLVKTKVVGMRLNVCLIHDRHAGILRAIGELQFGSMERGYLGVWEDVQSRWCMRHMGANFFKQFKNKELMNMFKRLCNQNQEKKFNALWKRLDELTAKCSDQRAAAPSTAVADPPQALGPLPTDSPTLVRRTGLEIRKFSQWILHEPKEKWAKAXVYNWVMRGVRGLPLVGIVEFILHGTCRKXLEELRKKAMKHRALVQGTQQHRFEILCQDKAGRGIYRKRVKQECVLKADGTCHCSCAKPKLLHRACTHVIAAAAECGIPDVVYVSQYFTGEFTETNDEVLNIPDPSKLRGKAGRRRTHRIRNDMDESEAGRVKRCSKCDEHGHTYKHCPKDKEKPSAAEAGLSGSAADGARPTEMARQDTPQLLDPAIDHRHRSHLTAVQGAQLGTFRARTCGELLMVHDSFVERLREAGLLPMCRLVEAAAGDADPARRWSVDRSLLAALVDRWRPETHTFHLPCGEVAPTLQDVSYLLGLPLAGDAVGPVTTAVDWQDDLTARFALVQRAPHLPLEPLAHYRNTGPTKRWLLQFTVEQLQAEADEYSYSRCLEAYLLWLFGWVMFCGGHGHAVDKGLVHYARSIADAAVGEVPQWSWGSALLAALYRALCESCTKTDPSATFGRCPLFLSIWAAERIAIGRPEVDQHAYEESLYEERPEVDYPTMGTLWCRRQRRWAHVQVRRSYPEFVMEFDRLLPTDVVWXPTVPRLPRLVRRWFGFRQPFPVPFPTTVPAAVHWYSRKGQQSAGDWPAKLATFVEDWLLATEEVVDHEGEPHTEESYQAYLRWYQPRTRTRVTFAPLEQQPHVASTRDLYARHRDQDFARAVDDINRVVVDGSTTIQRLGAGIPXDVARADAAVQRPPVPTGPRPAAHVPRPTPPPHGGFRLLLCPPQAAHFSQAAGSASQAAVSTSHSTQFWQYTGTSSQAAGTSSQGPPLDHAGTSSDRLLPSTFLFDITDFDFASGLTEDVIGPSQLGGAPPVQTQDQAQATPPWDTRATRAVPPDRSTCEHRPGGPSVVAARGRASRAVFSLFTCFTFQYCMLV

SEQ ID NO: 183695 - protein, 1057 aa, Oryza sativa
  Clone ID: PAT_MRT4530_80761C.1.pep
MSNKQIFQVYHGPGNVRYGPTRVDLSDFIVSERGIDRPAERSVPSIKGWLMRGFRVDPQTSDITINVIVSRATEGFYWELMPVQNSRVWRWYLENALQRGWPLALVPFVHPKDPGGVADEGETVGAIVDEMEREDSDNERVEEGDSSDDETDINPAEWASEDFSGLIVSEEDSVRWEYKENEVIQGAIYSRAEDIKEAVKHFAVSLHREFWIAKSNRSQYKVRCFKEKDGCPWRVHAYKGKWKDYWTVSVVTKHTCFLPGVQKYHRNITCAFVASEMYAHVIDNLTYEPRSIIRHIEETYKYTISYAKAWRAKQKIIEMRFGTYEASYDNLPRLLGVIEERNPGSSYEVKKFPSIDHPSKSVLQRAFLVLHACKMAFVNCRPVLCIDGTFLTGKYQGQILTAIGVDGNNQVLPLAFAFVESENTDSWYWFLKLVKIKVVGMRPNVCLIHDRHAGILRAIEELQFGSMERGYPGVWEDVQSRWCMRHMGANFFKQFKNKELMNMFKRLCNQNQEKKFNELWKRLDELTAKCSDQRAAAPSTAVADPPQALGPLPTDSPTLVRRTGLEIRKFFQWILHEPKEKWAKAYDTSGARYGIMTTNLAEVYNWVMRGVRGLPLVGIVEFILHGTCRYCRDRFPAVLPSMLNNSILFGAFMQKKLEELRKKAMKHRALVQGTQQHRFEILCQDKAGRGIYRKRVKQECVLKADGTCHCSCAKPKLLHRPCTHVIAAAAECGIPDAVYVSQYFNGTSGYTSVVGPGDRSPTPVSPYCGAGGSAWDVPGTDVRLRKAGLLPMCRLVEAAAGDADPARRWTVDRSLQEALVDRWRPETHTFHLPCGEVEQLQAEADEYSYSRCLEAYLLWLFGWVMFCGGHGHAVDKGLVHYARSIADAAACTKTDPSATFGGCPLFLSIWAAERIAIGRPEVDQHAYEESLYEERPEVDYPTMDVDLNVNIVICVPRPVLDGDFNAHSAWNSIREFLGVTMARSPPSCGAVSSFAPPRAAAPARHPSGACCWHAPPHPLGEEMGEGYPPAFSSPGRRQGGCPPGPRHVAQKHDPLPG

SEQ ID NO: 183696 - protein, 132 aa, Oryza sativa
  Clone ID: PAT_MRT4530_80762C.1.pep
MASRRDVAALALAIMLAMASTLPGAAAAAAAGASPRRGLWGKDMPVNPFCPWDAVKFGACAGVLGVVGVQAGAHLGSKCCALVDGLAAAEAAACFCTTIKESVLRIPTEWTVGVSVLVSTCKTELPDGFKCV

SEQ ID NO: 183697 - protein, 1298 aa, Oryza sativa
  unsure (1)..(1298): unsure at all Xaa locations
  Clone ID: PAT_MRT4530_80763C.1.pep
MEREDFDNERVEEGDSSDEETDINPAEWASQDFSGLIVSEEDSVRWEYKENEVIQGAIYSRAEDMKEAVKHFAVSLHREFWVAKSNRSQYEVRCVKEKDGCPWRVHAYKGKWKDYWTVSVVTKHTCFLPGVQKYHRNITCAFVASEMYAHVIDNLTYEPRSIIRHIEETYKYTISYAKAWRAKQKIIEMRFGTYEASYDNLPRLLGVIEERNPRSSYEVKKFPSIEHPGKSVLQRAFLALHACKMAFVNCRPVLCIDGTFLTGKYRGQILTAIGVDGNNQVLPLAFAFVESENTDSWYWFLKLVKTKVVGMRPNVCLIHDRHAGILRAIEEFLFGSMERGYPGVWDDVQSRWCMRHMGANFFKQFKNKELMNMFKRLCNQNQEKKFNELWKRLDELTAKCSNQRAAAPSTAVDDPPQALGPLPTDSPTLVRRTGLEIRKFSQWILHEPKEKWAKVYDTGGARYVIMTTNLAEVYNWVMRGVRGLPLVGIVEFILHGTCSILFGTFMQKKLEELRKKAMKHRALVQGTQQHRFEILCQDKAGRGIYRKRVKQECVLKADGTCHCSCSKPKLLHRPCTHVIAAAAECGIPDAVYVSQYFSKQAIYHTWSGEIYGFGIAGEFTETNDEVLNIPDPSKLRGKAGRRRTRRIRNNMDESEAGRGAQLGTFRARTCGELLTVHDSFVERLREAGLLPMCRLVEAAAGDADPPRRWTVDRSLLAALVDRWRPETHTFHLPCGEIAPTLQDRAPHLPLEPLAHHRNTGPTKRWLLQFTVEQLQAEADEYSYSRCLEAYLLWLFGWVMFCGGHGHAVDKGLVHYARSIADAAVGEVPQWSWGSALLAALYRALCESCMKTDPSATFGGCPLFLSIWAAERIAIGRPEVDQHAYEESLYEERPEVDYPTMGTLWCRRQRRWAHVQVRRSYPEFVMEFDRLLPTDVVWEPNSAAATQARAPLGLSTLCTRDQAYWMTMVPMVFDICVEPHAPFCVMRQFGFRQPFPVPFPTTVPAAVHRVSSQLATGPAKLATFVEDWLLATEEVVDHEGEPHTEESYQAYLRWYQPRTRTRVTFAPLEQQPHVASTRDLYARHRDQDFARAMSTLHRTIPLCFHVDDINRVVVDGSTTIQHLDAGIPXDVARADAAVQRPPEPTGPHPAAHVPRPRPPPHGGFRAPFSTPPSSARPSVVPPTGXHFSQAAGSASQAAVSTSHSAQFWQYTGTSSQAAGTSSQGPPLDHAGTSSDRLLPSTFLFDITDFDFASGSTEDVIGPSQLGGAPPVQTQDQAQATPPRDTRATRAVPPDRFTYS

SEQ ID NO: 183698 - protein, 1182 aa, Oryza sativa
  Clone ID: PAT_MRT4530_80764C.1.pep
MSNKQIFQVYHGPGNVRYGPTGVDLSDFIVSERGIDRPAERSVPSIKRWLMRGLRVDPQTSDITINVIVSRATEGFYWELMPVQNSRVWRWYLENALQRGWPLALVPFVHPKDPGVQMNMDDGEGPSAEVNETSVEEVNAREDGGIVAPVGIQPGRVADEGETVGAIVDEMEREDSDNERVEEGDSSDDETDINPAEWASEDFSGLIVSEEDSVRWEYKENEVIQGAIYSRAEDMKEAVKHFAVSLHREFRVAKSNRSQYEVRCIKEKDGCPWRVHAYKGKWKDYWTVSVVTKHTCFLPGVQKYHRNITCAFVASEMYAHVIDNLTYEPRSIIRHIEETYKYTISYAKAWRAKQKIIEMRFGTYEASYDNLPRLLGVIEERNPGSSYELKKFPSIEHPSKSVLQRAFLALHACKMAFVNCRPVLCIDGTFLTGKYRGQILTAIGVDGNNQVLPLAFAFVESENTDSWYWFLKLVKTKVVGMRPNVCLIHDRHASILRAIEELQFGSMERGYPGVWEDVQSRWCMRHMGANFFKQFKNKELMNMFKRLCNQNQEKKFNELWKRLDELTAKCSDQRAAAPSTAVADPPQALGPLPTDSPTLVRRTGLEIRKFSQWILHEPKEKWAKAYDTGGARYGIMTTNLAEVYNWVMRGVRGLPLVGIVEFILYGTCRYFRDRFQAVLPSMPNNSILFGAFMQKKLKELRKKAMKHRALVQGTQQHRFEILCQDKAGRGIYRKRVKQECVLKADGTCHCSCAKPKLLHRPCTHVIAAAAECGIPDAVYVSQYFSKQAIYHTWSGEIYGFGIAREFTETNDEVLNIPDPSKLRGKAGRRRTRRIRNDMDELEAGRVKRCSKCDEHGHTYKHCPKDKEKPSVAEAGLSGSAADGARPTGMLMYVGLRHGEPHTEESYQAYLRWYQPRTRTRVTFAPLEQQPHVASTRDLYARHRDQDFARVVDDINRVVVDGSTTIQRLGAGIPVPVEEHLTTYTRMVESMRSILRVLTCRADDVARADAAVQRPPVPTGPRPAAHVPRPTPPPHGGFRAPFSTPPSSARPSVVPPTGFAQFAMTQAAHFSQAAGSASQAAGTSSQGPPLDHAGTSSDRLLPSTVLFDITDFDFASGSTEDVIGPSQLGGAPPVQTQDQAQATPPRDTRATRAVPPDRFTYSQDHVRAQARRTKRGRGAGQGQ

SEQ ID NO: 183699 - protein, 1038 aa, Oryza sativa
  Clone ID: PAT_MRT4530_80765C.1.pep
MSNKQIFQVYHGPGNVRYGPTGVDLSDFIVSERGIDRPAERSVPSIKGWLMRGLRVDPQTSDITINVIVSRATEGFYWELMPVQNSRVWRWYLENALQRGWPLALVPFVHPKDPGVQMNMDDGEGPSAEVNETYVEEVNAREDGGVVAPVGIQPGGVADEGETVGAIVDEMEREDSDNERVEEGDSSDDETDINPAEWASEDFSGLIVSEEDSVRWEYKENEVIQGAIYTRAKDMKEAVKHFAVSLHREFWVAKSNRSQYEVRCVKKKDGCPWRVHAYKGKWKDYWTVSVVTKHTCFLPGVQKYHMNITCAFVAFEMYAHVIDNLTYEPRSIIRHIEETYKYTISYAKAWRAKQKIIEMRFGTYEASYDNLPRLLGVIEERNPGSSYEVKKFPSIEHPGKSVLQRAFLALHACKMAFVNCRPVLCIDGTFLTGKYRGQILTAIGVDGNNQVLPLAFAFVEIVGMRPNVCLIHDRHAGILRAIEELQFGSMERGYPGVWEDVQSRWCMRHMGANFFKQFKNKELMNMFKRLCNQNQEKKFNELWKRLDELTAKCSDQRAAAPSTAVADPPQALGPLPTDSPTLARRTGLEIRKFSQWILHEPKEKWAKAYDTGGARYGIMTTNLAEVYNWVMRGVRGLPLVGIVEFILHGTCRYFRDRFQAVLPSMPNNSILFGTFMQNKPEELRKKAMKHQALVQGTQQHRFEILCQDKAGKGIYRKRVKQECVLKADGTCHCSCSKPKLLHRPCTHVIAAAAECGIPDAVYVSQYFSKQAIYHTWSGEIYGFGIAGEFTETNDEVLNIPDPSKLRGKAGRRRTRRIRNDMDESEAGRVKRCSKCDEHGHTYKHCPKDKEKSSAAMNMDDVARADAAVQRPPVPTGPCPAAHVPRPTPPLHGGFRAPFSTPPSSARPSVVPPTGFAQFAMTQAAHFSQAAGSASQAAASTSHSAQFWQYTGTSSQAAGTSNQGPPLDHARTSSDRLLPSTLLFDITDFDFASGSTEDVISPSQLGGAPPVQTQDQAQATPPRDTRATRAVPPDRFTYS

SEQ ID NO: 183700 - protein, 182 aa, Oryza sativa
  Clone ID: PAT_MRT4530_80766C.1.pep
MGMPSVQAVLRCLPPQIRPHCATANPATLRCLLPLISPSRPPQPCAKQQEEEAPAVLDARHLILTSIRAPPSHALTRKHSDGLARSMTAFSVTGVIISRFAQRTRRLSYPLRQLRALHAKTGRLHLLVGAPDLVSLRFATSLSFLLAHDNTDLTTIVDSFLADPLILMIPDALASLHSLLCP

SEQ ID NO: 183701 - protein, 1530 aa, Oryza sativa
  Clone ID: PAT_MRT4530_80767C.1.pep
MSNKQIFQVYHGPGNVRYGPTEVDLSDFIVSERGIDRPAERSVPSIKGWLMKGLRSQTSDITINVIVSRATEGFYWELMPVQTSRVWRWYLENALQRGWPLALVPFVHPKDPGVQMNMDDGEGPSAEVNETSVEEVNAREDGGVVAPVGIQPGGVADEGETVGAIVDEMEREDSDNERVEEGDSSDDETDINPAEWASEDFSGLIVSEEDSVRWEYKENEVIQGVIYSRAEDMKEAVKHFVVSLHREFWVAKSNRSQYEVRCVKEKDGCPWRVHAYKGKWKDYWTVSVVTKHTCFLPGVQKYHRNITCAFVASEMYAHVIDNLTYEPRSIIRHIEETYKYTISYGKAWRAKQKIIEMRFGTYEASYDNLPRLLGVIEERNPGSSYEVKKFPSIEHPSKSVLQRAFLALHACKMAFVNCRPVLRIDGTFLTGKYRGQILTAIGVDGNNQVLPLAFAFVESENTDSWYWFLKLVKTKVVGMRPNVCLIHDRHAGILRAIEELQFGSMERGYPGVWEHVQSRWCMRHMGANFFKQFKNKELMNMFKRLCNQNQEKKFNELWKRLDELTAKCSDQRAAAPSTAVADPPQALGPLPTDSATLVRKTELEIRKFSQWILHEPKEKWAKAYDTGGARYGIMTTNLAEVYNWVMRGVRGLPLVGIVEFILHGTCRYFRDRFQAVLPSMPNNSILFGAFMQKKLEELRKKAMKHRAVVQGTQQHRFEILCQDKAGRGIYRKRVKQECVLKADGTCHCSCAKPKLLHRPSTHVIAAAAECGIPDAVYVSQYFSKQAIYHTWSGEIYGFGIAGEFTETNDEVLNIPDPSKLRGKAGRRRTRRIRNDMDESEAGRVKRCSKCDEHGHTYKHCPKDKEKPSAAEAGLSGSAADGARPTEMARQDTPQLLDPAIDHRHRSHLTAVQGAQLGTFRARTCGELLTVHDSFVERLREAGLLPMCRLVEAAAGDADPARRWSVDRSLLATLVDRWRPETHTFHLPCGEVAPTLQDVSYLLGLPLAGDAVGPVTTAVDWQDDLTARFALVQRAPHLPLEPLAHYRNTGPTKRWLLQFTVEQLQAEADEYSYSRCLEAYLLWLFGWVMFCGGHGHAVDKGLVHYTRSIADAAVGEVPQWSWGSALLAALYHALCESCTKTDPSATFGGCPLFLSIWAAERIAIGRPEVDQHAYEESLYEERPEVDYPTMGTLWCRRQRRWAHVQVRRSYPEFVMEFDRLLPTDVVWDPTVQRLPRLVRRWFGFRQPFPVPFPTTVPAVVHRYSRKGQHSAGDWPAKLATFVEYWLLATEEVMDHEGEPHTEESYQAYLRWYQPRTRTRVTFAPLEQQPHVASTRDLYARHRDQDFARAVDDINQVVVDGSTTIQRLGAGIPVPIEEHLTTYMRMVESMRSILRVLTCRADDVARADAAVQRPPVPTGPHPAAHIPRPTPPPHGGFAQFAITQAAHFSQAAGSASQAAVSTSHSAQFWQYTGTSSQAAGTSSQGPPLDHAGTSSDRLLPSTLLFNITDFDFASGSTEDVIGPSQLGGAPPV

SEQ ID NO: 183702 - protein, 45 aa, Oryza sativa
  Clone ID: PAT_MRT4530_80768C.1.pep
FCTCSPLWREVVVSASFPLLSSPHRASPARVLDTEIQQPRGGMIT

SEQ ID NO: 183703 - protein, 1526 aa, Oryza sativa
  unsure (1)..(1526): unsure at all Xaa locations
  Clone ID: PAT_MRT4530_80769C.1.pep
CRTNKYSVRYGPTGVDLSDFIVSERGIDRPAERSVPSIKGWLMRGLRVDPQTSDITINVIVSRATEGFYWELMPVQNSRVWRWYLKNALQRGWPLALVPFVHPKDPGVQMNMDDGEGPSAEVNETSVEEVNAXEDGGVVAPMGIQQGGVADEGETVGAIVDEMEREDSDNERVEEGDSSDDEMDINPAEWASEDFSGLIVSEEDSVRWEYKENEVIQGAIYSRAEDMKEAVKHFAVSLHREFRVAKSNRSQYEVRCVKEKDGCPWRVHAYKGKWKDYWTLSVVTKHTCFLPGVQKYHRNITCAFVASEMYAHVIDNLTYEPRSIIRHIEEIYKYTISYAKAWRAKQKIIEMRFGTYEASYDNLPRLLGVIEERNPGSSYELKKFPSIEHPSKSVLQRAFLALHACKMAFVNCRPVLCIDGTFLTGKYRGQIPTAIGVDGNNQVLLLAFAFVESENTDSWYWFLKLVKTKVVGMRPNVCLIHDRHAGILRAIEELQFGSMERGYPGVWEDVQSRWCMRHMGANFFKQFKNKELMNMFKRLCNQNQERKFNELWKRLDELTAKCSVQCAAAPSTAVADPPQALGSLPTDSPTLVRRTGLEIRKFSQWILHEPKEKWAKAYDTGGARYGIMTTNLAEVYNWVMRGVRGLPLVGIVEFILHGTCRYFRDRFQAVLPSMPNNSILFGAFMQKKLEELRKKAMKHRAVVQGTQQHRFEILCQDKAGRGIYRKRVKQECVLKADGTCHCSCAKPKLLHRPCSHVIAAAAECGIPDTVYVSQYFSKQAIYHTWSGEIYGFGIAGEFTETNDEVLNIPDPSKLRGRAGRRRTRRIRNDMDESEAGRVKRCSKCDEHGHTYKHCPKDKEKPSAAEAGLSGSAADGARPTEMARQDTPQLLDPAIDHRHRSHLTAVQGAQLGTFWARTCGELLTVHDSFVERLREAGLLPMCRLVEAAAGDANPARRWTVDRSLLAALVDRWRPKTHTFHLPCSEVAPTLQDVSYLLGLPLAGDAVGPVTTAVDWQDDLTARFALVQRAPHFPLKLLAHHRNTGPTKRWLLQFTVEQLQAEADEYSYSRCLEAYLLWLFGWVMFCGRHGHAVDKGLVHYARSIADAAVGEVPQWSWGSALLAALYHALCESCTKTDPSATFGGCPLFLSIXAAERIAIGRPEVDQHAYEESLYEERPEVDYPTMGTLWCRRQRRWAHVQIRRSYPEFVMEFDRLLPTDVVWXPTVPRLPRLVRHWFGFRQPFPVPFPTTVPAAVHRYSRKGQQSAGDWPAKLATFVEDXLLATEEVVDHEGEPHTEESYQAYLRWYQPHTRTRVTFAPLEQQPHVASTRDLYARHRDQDFARAVDDINRVVVDGSTTIQRLGAGIPVPVEEHLTTYTRMVESMRSILRVLTCRADDVARADAAVQRPPVPTGPRPAAHVPRPTPPPHGGKYFYYYFCTCLAHISEPFHLPSFTQFAMTQAAHFSQAAGXASQAAGTSSQGPPLDHAWTSSDRLLPSTVLFDITDFDFASGSTEDVIGPSQLGGAPQV

SEQ ID NO: 183704 - protein, 139 aa, Oryza sativa
  unsure (1)..(139): unsure at all Xaa locations
  Clone ID: PAT_MRT4530_8076C.1.pep
HQAPLHQAAHPPRALXFPPPPPRPQDQQQEDLSARGARRLSLERLGDYQGLECFAGVLYGSTVMVGSQHLLFRKGSNERRINFSMVFLPSRTAPLGLNQAEAGPHFSDLEFLWDRSNGFKKKCQIPSCATGLLRCVGCF

SEQ ID NO: 183705 - protein, 1163 aa, Oryza sativa
  unsure (1)..(1163): unsure at all Xaa locations
  Clone ID: PAT_MRT4530_80770C.1.pep
MSNKPIFQVYHGPGNVRYGPTGVDLSDFIVSEREIERPAERSVPSIKGWLMRGLRVDPQTSDITINVVVSRATEGFYWELIPVQNSQVWRWYVENAMQRGWPLALVPFVHPKDPGVQMNMDDGEGPSAEVNETSVEEVNAGEDRGVVAPVGIQPGGVADEGKTVAAIVDEMEREDSDNERVEEGDSSDEETDINPAEWASQDFSGLIVSKEDSVRWEYKENEVIQGAIYSRAEDMKEAVKHFAVSLHREFSVAKSNRSQYEVQCVKEKDGCPWRVHAYKGKWKDYWTVSVVTKHTCFLPGVQKYHRNITCAFVASEMYAHVIDNLTYEPRSIIRHIEETYKYTISYAKAWRAKHKIIEMRFGTYEASYDNLPRLLGVIEGRNPGSSYEVKKFPSIEHPGKSVLQRAFLALHACKMAFVNCRPVLCIDGTFLTGKYRGQILTAIGVDGNNQVLPLAFAFVESENTDSWHAGILRVIEELQFGSMEPGYPGVWDDVQSRWCMCHMGANFFKQFKNKELMNMFKRLCNQNQEKKFNELWKRLDELTAKCSDQRAAAPSTAVDDPPQSLGRLPTDSPTLVRRTGLEIRKFSQWILHEPKEKWAKAYDTGGARYGIMTTNLAEVYNWVMRGVRGLPLVGIVEFILHGTCRYLRDRFQAVLPSMPNNSILFGTFMQKKLEELRKKAMKHRALVQGTQQHRFEILCQDKAGRGIYRKRVKQECVLKADGTCHCSCSKPKLLHRPCTHVIAAAAECGIPDAVYVSQYFSKQAIYHTWSGEIYGFGIAGEFTETNDEVLNIPDPSKLRGKAGRRRTRRICNDMDESEAGRVKHCSKCDERGHTYKHCPKDKEKPKMARQDTPQLLDPAIDQRHRSHLTAVQGAQLGTFRARTCGELLTVHDSFVERLREAGLLPMCRLVEAAAGHVDPARRWTVDKSLLAALVDRWRPETHTFHLLCGEVDDINRVVVDGSTTSQRLDAGIPXDVARADTAVQRPPVPTGPRPAAHVPRPTPPPHRAYKVPLSMCRFXAQFAMTQAAHFSQAAGSASQAAASTSHSAQFQQYTGTSSQAAGTSSQGPPLDHAGTSSDCLLSSTVLFDITDFDFASGSAEDVIGPSQLGGAPPVQTQDQAQATPPPDTRATRAVPPDRFTYSQDHVRAQARRTKRGRGAGQGQ

SEQ ID NO: 183706 - protein, 833 aa, Oryza sativa
  Clone ID: PAT_MRT4530_80771C.1.pep
MSNKQIFRYGPTGVDLSDFIVSERGIDRPAERSVPSIKGWLMRGLRVDPQTSDITMNVIVSRATEGFYWELMPVQNSRVWRWYLENALQRGWPLALVPFVHPKDPGVQMNMDDGEGPSAEVNETSVEEVNAREDGGVVAPVGIQPGGVADEGETVGAIVDEMEREDSDNERVEEGDSSDDETDINPAEWASEDFSGLIVSEEDSVRWEYKENEVIQGAIYSRAEDMKEAVKHFAVSLHREFRVAKSNWSQYEVRCVKEKDGCPWRVHAYKGKWKDYWTVSVVTKHTCFLPGVQKYHRNITCAFVASEMYAHVIDNLTYEPRSIIRHIEETYKYTISYAKAWRAKQKIIEMRFGTYEASYDNLPRLLGVIEERNPGSSYELKKFPSIEHPSKSVLQRAFLALHACKMVFVNCRPVLCIDGTFLTGKYRGQILTAIGVDGNNQVLPLAFAFVESENTDSWYWFLKLVKTKVVGMRPNVCLIHDRHAGILRAIEELQFGSMERGYPSVWEDVQSRWCMRHMGANFFKQFKNKELMNMFKRLCNQNHEKKFNELWKKLDELTAKCSDQRAAAPSTAVADPQALGPLPTDSPTLKKLEELRKKAMKHRALVQGTQQHRFEILCQDKAGRGIYRKRVKQECVLKADGTCHCSCAKPKLLHRPCSHVIAAAAECGIPDAVYVSQYFSKQAIYHTWSGEIYGFGIAGEFTETNDEVLNIPDPSKLRGKAGRRRTHRIRNDMDESEAGRVKRCSKCDEHGHTYKHCPKDKEKPCAAEAGLSGSAADGARPTGEGTTSTRPRPRDGMSGYTSVVGPGDRSPTPVSPYCGAGGSAWDVPGTDVR

SEQ ID NO: 183707 - protein, 158 aa, Oryza sativa
  Clone ID: PAT_MRT4530_80772C.1.pep
MGYLTIAEVWSSYPVLLEDFLTAATFQSDHVVALLVAALLVAFAHCHLRRVRKEEAHFICRSSITLYCQNTAIDDDPSYTVISTSSPSPSVVATPLDEFGSSHSTSRYPPFMLPCLIRRRSLGSEQVVAGEDKFDQPMEVYPEDTEFKKDCEDHGMAY

SEQ ID NO: 183708 - protein, 1249 aa, Oryza sativa
  Clone ID: PAT_MRT4530_80773C.1.pep
MEHLACFLLFLTSFTTVSIGQDQFIYNGFSGSNLILDGTAMVTPNGILELTNGASTYETSYALYPTPWQFLKVPLQSFSVNFVLFMAPSIRCPDSMAFMIFPSKGLKNDQRESNLAVNFLSCQDKRFLENNENDISISINSSFSRPLETHPAGFYDDKNGIFNDLPLVGGKAVQIWVDYDGEATQMNVTIAPLKLTKPLRPTLSAILNISTILDEGVSYIGFSSGANNVGALNYVLGWSFGMNSPAPTIDIIKLPKLPRFGPKVRSKTLKIVLPIVITTVILLVGAAVTALVWRRKRYAELYEDWEVEFGPYRFSYKYLFDATEGFNNEKILGVGGFGKVYKGVLPDSKLEVAIKRVSHESKQGIKEFIAEIWEKVVIHRDIKASNVLLDAEMNGHLGDFGLARLYEHGNDPQTTHVAGTFGYIAPEMARTGVDGEGEKGYLPVSPLPSLLKVPKSDCRCHWTGRGEEAAAAFGGGKHKSGTLSPLEPEVAPSMHRPRRWRRGAQIPQPPNRSMKHTSPVILFLTISISLSAISASGDHDQFIYTGFTGSNLTLDGAAKITATGLLGLTNDSFRIKGHASHPAPLRFRKSPNGTVQSFSVSFVFGILSSFGDIRGHGFAFFIAPSNDFSTAFPIQFLGLLNDINNGSSTNHLFAIELDTIRNDEFGDIDNNHVGIDINSLNSVRSSYAGFYNDNNGALTNVSLIGDKPMQVWVDNNGNLSNHVFAVEIDTAQNNEFMDIDGNHVGIDICDLHSATSSSAGYYDDITGSFRNLSLISGEAMQIWINYDGEATWIDVALAPFKMARPTKTLLSMSYNLSAVLTNVAYVGLSAATGQIESRHYILGWSFSMNGLAPPFFTAHLPNLPKARVDGKATQLILLPLISPLATPTFVFLVILAIFFFVRRRLRYAELREDWEIEFGPHRFSFKDLYLATEGFKNSHLLGTGGFGRVYKGLLSKSKSQIAVKRVSHESRQGIREFVAEVVSIGRLRHRNIVQLLGYCRRKGELLLVYDYMPNGSLDNYLYGHSNRPILDWIQRFRIIKGVASGLWYLHGEWEQVVIHRDIKASNVLLDEEMNACLGDFGLARLYDHGTDMQTTRLVGTIGYLAPELLQNGKASPLTDVFAFGIFVLEVTCGRRPIEHKMNSDQLKLVDWVIDCWNERSLLEAMDPKLQNEYDADEAFLALKLGLLCSHQSPAARPSMWHVMQYLNHDLPFPELAPMDMVQNRQVGSPVAYCQSVVSDGTITGLSEGR

SEQ ID NO: 183709 - protein, 608 aa, Oryza sativa
  unsure (1)..(608): unsure at all Xaa locations
  Clone ID: PAT_MRT4530_80774C.1.pep
MEHLACFLLFLTSFTTVSIGQDQFIYNGFSGSNLILDGTAMSFSVNFVLFMAPSIRCPDSMAFMIFPSKGLKNDQRESNLAVNFLSCQDKRFLENNENDISISINSSFSRPLETHPAGFYDDKNGIFNDLPLVGGKAVQIWVDYDGEATQMNVTIAPLKLTKPLRPTLSAILNISTILDEGVSYIGFSSGANNVGALNYVLGWSFGMNSPAPTIDIIKLPKLPRFGPKVRSKTLKIVLPIVITTVILLVGAAVTALVWRRKRYAELYEDWEVEFGPYRFSYKYLFDATEGFNNEKILGVGGFGKVYKGVLPDSKLEVAIKRVSHESKQGIKEFIAEIVSIGRIRHRNLVQLLGYCRRKDELLLVYDYMPNGSLDKYLHCKEGKYTLDWAKRFQIIRGVASGLFYLHEKWEKVVIHRDIKASNVLLDAEMNGHLGDFGLARLYEHGNDPQTTHVAGTFGYIAPEMARTGPPKGLRIVISWALEDLEGCTRHRPPSTPEYXYLAPELLQNDWVIDCWNERSLLEAMDPKLQNEYDADEAFLALKLGLLCSHQSPAARPSMWHVMQYLNHDLPFPELAPMDMVQNRQVGSPVAYCQSVVSDGTITGLSEGR

SEQ ID NO: 183710 - protein, 222 aa, Oryza sativa
  Clone ID: PAT_MRT4530_80775C.1.pep
QIIRVKSERFRSIPPPPPSISGRPAPPPPPPYRSPTTPAPPPSAGIPLLHLRHQCSAPYQPPRRPLHRMSATDPRRRLALHDPPPPRCTRSSRRQVVAAVLLHRSPPHEVLPSLGSHRAVLCIACLHQSPLHRRGELQLWSSSPVGEQQVNPVREYNERGVLGEMSRPAPHLQCMCSGECLWILDLRPPQRLGSSVKLHLEECDHNNDTCCHDFYHSCTHCP

SEQ ID NO: 183711 - protein, 80 aa, Oryza sativa
  Clone ID: PAT_MRT4530_80776C.1.pep
MAGASANIDEGPSTRSKPSTSQHQTKVKVEPTAKDGGMGHRWGRGGVSRLLGCRYTLMATPSVMYNAVAMDTHLMDGIVG

SEQ ID NO: 183712 - protein, 58 aa, Oryza sativa
  Clone ID: PAT_MRT4530_80777C.1.pep
RNGRRQGARRGRPTGQAVWREEEEGGGAAKVYGRCTVEEASTIAESHRFVTPHRLLLT

SEQ ID NO: 183713 - protein, 297 aa, Oryza sativa
  Clone ID: PAT_MRT4530_80778C.1.pep
MDVREKEGGSPAAAAATTAAATVAHGGAGAAARRHGNGGAGTAARRHGNGGAAARERRRGGTRTAAQWRGERGEEGGAGREVATRWASGARVAGRETARGARGDGTGRQRRHDGRAAMGWAGGSGAGRKVRWRRTSGDETVRGAMGRRCGGDGRHWRETTATRGDGDSVAAAARGARQRHGARGGGTGREADGDDGDGGTAGERCKVATRGSGRLGQRRPDTRLAPSRRKDESFQALVPSRSRRGNSWSWHVSPGQIHSRLQHNRAPTMHLPPVEWREIPGVRRETALSLTQGQVVI

SEQ ID NO: 183714 - protein, 321 aa, Oryza sativa
  Clone ID: PAT_MRT4530_80779C.1.pep
MDAREKEGGSPAAAAATTAAATVAHGGARAAARRHGNGGAGTAARWHGNGNAAARERRRGGTRTAARRWRTAAQERRHGGTGTAAQERRRGGTGTATRQHGNGGAAARERRRSGEGRGERRVRWVGENERGGVFVERGGAAGLGAAWCDRDGDATMTRRGSGAGREVATRWASGARVAGRETARGARGDGTGRQRRHDGRAAMGWAGGSGAGRKVRWRRTSGDETVRGAMGRRCGGDGRHWRETTATRGDGDSVAAAARGARQRHGARDGGTGREADGDDGDGGTAGERCKVATRGSGRLGQRWERRGKDVTPRDAPATTN

SEQ ID NO: 183715 - protein, 178 aa, Oryza sativa
  unsure (1)..(178): unsure at all Xaa locations
  Clone ID: PAT_MRT4530_8077C.1.pep
MAGDGELKLLGMWTSAFVLRVRFVLNLKSLPYEFVEENLGDKSDLLLASNPVNKTVPVLLHAGRPVNESQVILQYIDEAWPDRPPAVLPSDPYERAVARFWAAYVDDKVRLAWLGILFRXRTEEERAAAVAQADAALETLRARSGSAPGGSPSSAATASGSSTSCSAATSGGSRRSRS

SEQ ID NO: 183716 - protein, 83 aa, Oryza sativa
  Clone ID: PAT_MRT4530_80780C.1.pep
PISGFAADPLTPLEGLHIDLVPGSVPRYRHRSAMAMMTTYWVRIDQGTHGGVRRSTTWRASPASSLFNALAGRAQAGRRRDGH

SEQ ID NO: 183717 - protein, 94 aa, Oryza sativa
  Clone ID: PAT_MRT4530_80781C.1.pep
MRARLSADDVTGVGPVTDRSFLSTTRQFGMPHTCPSSYSAFLAMVAMKPGMNRAGTDVLIPGVTMLAPARDECQEALIIPTERGEAYDRLPAAI

SEQ ID NO: 183718 - protein, 188 aa, Oryza sativa
  unsure (1)..(188): unsure at all Xaa locations
  Clone ID: PAT_MRT4530_80782C.1.pep
GESCTRPQAPILYSRRDPRVRSVIEGTQHEEDSYQEDIDEKDMLKRELQDERKTLPIYKFRDELLKAVEEYQVIVIVGETGSGKTTQIPQYLHEAGYTAKGKVACTQPRRVAAMSVAARVSQEMGVKLGHEVGYSIRFEDCTSEKTLIKYMTDGMLLREFLGEPDLASYSVVMVDEXAHERTLSTDIL

SEQ ID NO: 183719 - protein, 1537 aa, Oryza sativa
  Clone ID: PAT_MRT4530_80783C.1.pep
MAKARKQKGEEQKPDGGGAGGGGGGATVLHQKLCLSIDMENRLIYGYTEIKVQAENDTFALHADNMTIRNILVDGQAAEFEYSPQWKNAGDQQSWSSVSCSKTAADAACSVYISSLNSEAAPNLIISSERSSKAITEPQYEENGENHEENGEKHEENGEKQNENGEKCEENGGKPAQISDDQAVNGCNGSADKKDKEEETEKDNEKEKEDKEEETEKDNEKEKEDKEEETKKDNEKEKEQLMGTDEKEKEKEKEDENEEEKLEEEEKKDKEEKLEEKEKENEEENGNEKDKENDNEIEKVKNTKLVHIDYILEKAETGLYFTGNILHSNNQIRRAHCWFPCIDSATQRCPFDLEFTVSTNLVAVSNGDLLYQVLSKEDPPRKTYVYKLSTPVSAQWISLVVGPFEVLPDRNDISVSHMCLSQSLSKLENTISFFHSVYSCYEDYLAASFPFGLYKQVFLPPEMIVSPTSLGASTCIFNSDILHDEKVIDQIIDTRIKVAYALARQWFGIYTNAEEATDEWLLDGLAGFLTEHFVKRYLGNNEARYRRFKDVAADLTIFTLLLKPVHESYVAHSFGVDSHINLSFTFQPNSLANYVFASCLAFIHLNLNGWCRAANCIVCEFDVSGATALSSPSASSDLFGTQTIGSYGKIRSLKAVSVLQMLEKQMGPDSFRKILQMIVAPTRASRTLSTKEFRHLANKVGNLERPFLKEFFPRWVESSGCPVMRLGISYSKRRNLVELAVSRGCTTKVDPGPDIRTNGDSREGDTGWPGMMSVRVHETDGVYDHPIVPMAGEALQVVEIQCHSKVAAKRFQKTKKGSKPDGSDENIDASNQDNRASMDAPLLWIRVDPEMEYLAEIHFHQPVQMWINQLEKDKDVISQSQAISVLEKSPQLTFAVTNALNNFLNDTKAFWRVRVEAAYALAVTASEGTELTGLLHLVKFYKSRRFDADIGLPRPNDFHDIPEYFVLEAIPHAVALVRSADKSSPKEAIEFILQLLKYNDNNGNVYSDVYWLSAMVQAIGELEFGQQGVGLLSSLLKRIDRLLQFDNFMPGYNGVLTVSCIRTLARIAQRVSSSICLDRVCELIVPYRNMDKPWKVRMEAGRVLIDLEFHHKGLDAALLLFLKYANEERSLRVGLLCLLAGKKAYNNVYLRHNVFCILQIAAGRSPTLHGVPKVVTPPQVVLEISSDQHTKADSSVPQQSRPQEPSTSTPSVREVLPTSGPLKDADNISNCSERRNVIFIPTKDADNISNCSERRNVISIPTKDADNISNCSERRNVVKIRVKRASSSSKADDADHRDHSHGRNENEAGPCSSMSVDAPMTEAPEPVNVSNHNIEEQNSCHDREQNSCHDRESRMSASIGNVKLMDKHEVSKELQCTADSRLDALPKDHFSPVVNGQEVLDKPRSQLEVVSTSYDGNQAPDSMNGLETKEKKKDKKDKKRHRDKKDDPEYLEKKRLKKEKKRMEKEKGKKQKEGEGVSSSEQKNTAKPSDSQGTSSARPPAPMRIPEPKISNVGTPVDTTRTLTTTKIRIKVKPLQR

SEQ ID NO: 183720 - protein, 1755 aa, Oryza sativa
  Clone ID: PAT_MRT4530_80784C.1.pep
MGFVSGIDDFAFPPGQAFRFGSLDFITNNFGKISLLDSDSDQSGRDQPKHLPLGDLGELRHRPRSSLDPGRSALYSNLLGQSRRKNWMAPSAPPASVLDQPRSSTTTTSATTTTTATSTTSTTAMRITTCPSSSAYSWLTTKRKNSAEPEKRTKIAHGKELNVADWRKCDSDRSENDYSEAEDRRQRALESGRRARELIGQQDVDGTSVFRTAQQNAVAAITLLDTLLKEDALNQADHVVNILNQTKTMIAASVPANSPSLSITGTGSSRRSRGHDERSVHSPPERHRERRVERPRSPPHQRPVDLRDMINQHRAARGHRHSPNRYDDDVDRVATFTNDLRRVDWPVGFKPTGIEKYNGTTNPESWLTVYGIAIRAAGGDSKAMANYLPVALADSARSWLHGLPRRTIGSWAELRDHFIANFQGTFERPGTQFDLYNIVQKSGESLRDYIRRFSEQRNKISDITDDVIIAAFTKGIRHEDLVGKFGRKPPRTVKQMFEKANEYAKAEDAITASKQSGTTWKPKKDAPTAGGSGSNNHKDRKHKPEELVATTSPSYRQRPRVNTFDKIMNSQCPHHPNSNHTEIKAHQRRDDEDDAPTGFQDHRKELNHIFGGPLAYESKRKQKLMEREINAVQPNTPQYLQWSETAIKFDRSDHPDRVVHPGWYPLVLDPVVRNVKLRRTLIDGGSALNILFAKTLDDMQIPRTELKPSNAPFHGVIPGLSATPLGQITLPVTFGTRENFRTENVCFEVADFEIAYHAILRRPALAKFMAVPHYTYMMMKMSGPRGVISLRSDIKQAVTCDKESCEMAQTHETTLAREEIRLAATTASEGEVPATKLTKTEESDAKTKKIPLDPSDPDKTANNKDIFAWKPSDMPGIPREVIEHSLHVKEDAKPIKQRLRRFAQDRKDAIKEELTKLLAAGFIKEVLHPDWLANPVLVRKKTGQWRMCVDYIDLNKSCPKDPFGLPRIDQVVDSTAGCELLSFLDCYSGYHQIRLKESDCLKTSFITPFGAYCYITMPFGLKNAGATYQRMIQKCFSTQIGRNVEAYVDDVVVKTKQKDDLIADLEETFTSIRAFKMKLNPEKCIFGVPSGKLLGFMVSQRGIQANPEKINAILNMKPPSSQKDVQKLTGCMAALSRFVSRLVLASPHPQEPLLLYVSATSQVVSTVLVVEREEEGHIQKVQQPIYFVSEVLADSKTSGPSAKKTCQRKRWNIGLCIFDGSKRLTGTGAGVVLISPTGERLSDVLWIHFSASHNVAEYEALLHGLRIAISLGIRRLIVRGDSQLVVNQVMKEWSCLDDNMTAYRQEVRKLEDKFDGLELTHVLRHNNEAADRLANFGSKREAAPSDVFVEHLYEPTVPRKETTEAMDTQGVSMIEADWREPLIKFLTKQELPQDKNEAERISRRSRLYIIHEAELYKKSPSGILQRCVSLEEGRQLLKDIHSGICGNHAVARTIVGKAYRQGFFWPTAVSDADKIGLDMVGPFKRAVGGYTHLFVAIDKFSKWIEAKPVITITADKVRDFFINIVHRFGVPNRIITDNGTQFTGGAFKDFCEDFGIKICYASVAHPMSNGQVERANGMILQGIKARVFDRLRPYAGKWVDQLPSVLWSLRTTPSRATGQSPFFLVYGAEAMLPSEVEFESLRFWNFNEEGYEEGRVDDINRLEEAREAALIQSTRYLQGLRRYHNRNVRSRAFLVGDLVLRKIQKTQDRHKLSPLWEGPFIIAEVTRPGSYRLKREDGTIINNSWNIEHLRQFYA

SEQ ID NO: 183721 - protein, 206 aa, Oryza sativa
  Clone ID: PAT_MRT4530_80785C.1.pep
MEWKKKEPKWTRESWRGEKKRQAAKPTTGFQPTNADVDPPAGYRPPRTRCTARPRSSTPSTMEIVYATNNVHVHPCRLVAHAQQQELLQKLCFFACFFVFLAGTNLAGDAPDPPCFSSSAAAVNSRWGRELDPDAEVVIWQSVEPRLVVATTGDTRRPDIGGIGVRWYEDLRSTTSSKQKTRIILVQRLRDEGQSSGGDVMEDEQQ

SEQ ID NO: 183722 - protein, 1054 aa, Oryza sativa
  Clone ID: PAT_MRT4530_80786C.1.pep
MARGSALLDGSVLPPSRIVSERQAGLPRRFMPESATGREIVMLGEGRPAPDYPGRSVFFLPFAMAGLVPPFSSFFMDVLEFYDLQMAHLTPNAMMTLGIFAHLCEMFIGVRPSLRLFRWFFTVQSVSPPSVVGGCYFLPRGPVLNRYIPCVLRKKWDDWKSDWFYTPLADEARLRLPSQPPAQASSWRAPVDLGDGYDAVLDRLAGLRSQGLTGAMVYGDYLRRRIAPLQRRARGAWEYTGSEDYMRTHQGVRWDWAPEDFKILVQRVLNLNSVEASLIPHGILPLCSDPDRVSILTIMTAVGASEEQAPKGHDGTGGSRRGDQSTPGGGRASGPRVGGSGSNRPTDARGKRKLGGTPSPSPPRGGGAVRASSRRPERAAPTSQPEGERKKKRLRKMGETEPSRGNLISPPRWSFNRPPRSDIPSRSSRHPKSGQSEAEDPAAAEERRRESDRREAADRLREAEEAAREAARAHQAEDTAREEAARARQAEEAAKEEAARVRQAEEAAQEEAARARQAEAMVSSEAAHDKAAGASLGPTPSGDTQATASGAARDEAAGASPGPTSPSDAQDQTGPGDIPEPSASSGGPSRVAFSPRRLFSSSSVAPLSAEPLLAQVEALRAERAELEAAWARDEEGRRSVDVMVEVGRKAHRRHVSELEARKAALAEIAREVEEEREATLIATTAMIEVQETLRLQHGSWEAELKKKLDAAQGVLDTAAARERRATETEAASRRREEALEARAMALEEHASAVERGLADREAAAAIREATLAVHEAACAEEESALRLREDALAERERALEEAEAAAQRLADSLSLREAAQEEQARHNLECVRAERAALEQRAADLEAREKELDARARIGGAAAGESDLAARLAAAEHTVADMQRALDSSAGEAEALRLAGEIGPGMLWDAVSRLDRAGRQAGLWKGQTTTHSTNLEGLAPHLTKMAWALQQLPEELEKTIKSSSRDLAQGAVELVLASYQARDPNFSPWMALDEFPPGTEDDARARVRDAADHIVHGFEGSAPRFAFAPNSDEEGDASGADDGDDEASDPGTSE

SEQ ID NO: 183723 - protein, 47 aa, Oryza sativa
  unsure (1)..(47): unsure at all Xaa locations
  Clone ID: PAT_MRT4530_80787C.1.pep
XKDSITNLQLHXTLNKANHSTNPNTYFHLQKKGYTTSLTFFCCIHNL

SEQ ID NO: 183724 - protein, 1000 aa, Oryza sativa
  Clone ID: PAT_MRT4530_80788C.1.pep
MARGSALLDGSVLPPSRIVSERQAGLPRRFMPESATGREIVTLGEGRPAPDYPGRSVFFLPFAMAGLVPPFSSFFMDVLEFYDLQMAHLTPNAVMTLAIFAHLCEMFIGPRGPVLNRYIPCTLRKKWDDWKSDWFYTPLADEARLRLPSQPPAQASSWRAPVDLGDGYDAVLDRLAGLRSQGLTGAMVYGDYLRRRIAPLQRRARGAWEYTGSEDFTRTHQGVRWDWAPEDFKILVQRVLNLNSVEAALIPQGILPLCSDPDRASILTIMMAVGASEERAPKGHDGVGGSRRGEQSTPRGGRASGSRDRGPGSSRPADARGKRKQGGTPPPSPPRGGRAARASSRRPEGAAPTSQPEGERKKKRPRKMGETEPSRGNLISPPKWSFNRPPRSEIPSHPSRHSKSGQSKAEDPAAAEALRRESDRREAADRLREAEEAAQEAARARQAEETAREEAARARQAGEAAREEVGFRQDEAMATSEAARDEAAGASLGPTPSGDAQDQPGPGDIPESGTSIGGPSRVASSPRRLFPTPSIAPLNAEPLLQALAAANTTVLDGLSAQVEVLQAERAELDAAWARVEEGRRSVEAMVEVGRKAHRRHVSELETRKKVLAEIAKEVEEERGAALIATTVMNEAQDTLRLQYGSWEAELRKKLDAAQGVLDAAAAREQRAAETEAASRQREEALEARAMALEERACVVERDLADREAAVTIREATLAAHEAACAEEEFTLRLREDVLTERERALEGAEAAAQQLAVSLSLREAAQEEQARRNLEGARAERAVLNQRAAELEARAKELDARARSGGAATGESDLAARLTAAERTIADLQGALDSSAGEVEALRLAGEVGPGMLWDAVSRLDCAGRQVGLWRGRTVKYAANQGGLVQRLSKMAGALQRLPEELEKTIKSSSRDLAQGAVELVLASYQARDPNFSPWMALDEFPPGTEDRARAQVRDAADHIVDSFDGLAPRLAFAPNSDEEGNAGGADDSDVEAGDPGASD

SEQ ID NO: 183725 - protein, 132 aa, Oryza sativa
  Clone ID: PAT_MRT4530_80789C.1.pep
DGAAALPLHTGTSNSNTSSRRGCNAALPLPRLRIPGAKRRPPPPTQSYHSSSSRDEEDLEAGIRVSSGSDTCCCDDEDAPEMLVRSFLSQQQQQQDQGVALALASIGFCMGEMAKEALQLEAYMLDLILLAH

SEQ ID NO: 183726 - protein, 114 aa, Oryza sativa
  unsure (1)..(114): unsure at all Xaa locations
  Clone ID: PAT_MRT4530_8078C.1.pep
SFWFRRGLVSTHGYXLCTRGHCKLSXRSIKILSAYRHHLFRGFYLSSGETWHLTRGCISFRSSVKGXVLLFAGPDSCIGYIGVVQGFIASISCIALVWLVYLPIYLSYILVNLV

SEQ ID NO: 183727 - protein, 1055 aa, Oryza sativa
  Clone ID: PAT_MRT4530_80790C.1.pep
MARGSALLDGSVLPPSRIVSKRQAGLPRRFMPEPATGREIVMLGEGHPAPDYPGRSVFFLPFAMAGLVPPFSSFFMDVLEFYDLQMAHLTPNAVMTLAIFAHLCEMFIGVRPSLRLFRWFFTVQSVSPPSVVGGCYFQPRGPVLNRYIPCVLRKKWDDWKSDWFYTPLADEARLRLPSQPPAQASSWRAPVDLGDGYDAVLDRLAGLRSQGLTGAMVYGDYLRRRIAPLQRRARGAWEYTGSEDYMRTHQGVRWDWAPEDFKIVVQRVLNLSSVEASLIPQGVLPLCSDPDRASILTIMQAIGASEERAPRGHEGAGGSRRGEQSTPRGGRASGPRDGGPGSSRPADARGKRKQGGSPPPSPPRGGGAARANSRRPEGATPTSQPEGERKKKWLRKMGETEPSRGNLISPPRWSFNRPPRSETPSRSSHHSKAGQPEVEDPAAAEARRRESDRREAADRLREAEEAAREAARARQAEETAWEEAARARQAEEAAREEAARARQDEAMATSEAARDEAAGASLGPSPLGDAQATTSGAAGDEAAGVSLGPTPSGDAQDQPGPEDIPESGTFIGGPSRAASSPRRLFPIPSVAPLSAEPLLQALAAANTTVLDGLSAQVEALQAERAELDAAWARVEEGRRSVEAMVEVGRKAHRRHVSELEARKKVLAEIAKEMEEERGAALIATAVMNEAQDTLRLQYGSWEAELGKKLDAAQGVLDAAAARERRAAETEVASRRREETLEARAMALEERACAVERDLADREAAVAIREATLAEHEAACAEEESALRLREDALTKRERALEGAEAASQRLAESLSLREAAQEEQARRNLEGARAERAVLNQRAAELEARAKELDARARSGGAAAGESDLAARLAAAEHTIADLQGALDSSAGEVEALRLAGEVGPGMLRDAVSHLDRAGRQVGLWGGRTVKYAANQGGLAQRLSEMAGTLQRLPEELERTIKLSSRDLAQGAVELVLASYQVRNPDFSPWTALDEFPPWTEDGARAQVRDAADHIVQSFEGSAPRLAFALNSDEEDDDGGVGGNGDEAGDPGASD

SEQ ID NO: 183728 - protein, 537 aa, Oryza sativa
  Clone ID: PAT_MRT4530_80791C.1.pep
MDSLPKRDANYVPLSPITFLHRAASVYADRTSVVYGATSFTWRQTHHRCLRLAAALQSLAVSKNDVVSVIAPNTPALYEMHFAVPMAGAVLNAINTRLDAANVAAIVRHAEPKVLFVDYQFIRVATDALKAVMGDGDGDGGEVRAPLPLLVVIDDADKPTGARVGELEYEQLVAREDPARYPPRPWGVGHEPVYLWSLPMFHCNGWTFTWGVAARGGTNVCIRAPTADAMYAAFAAHGVTHMCAAPVLFNILLDGACREPLRRPVEVLTGGAPPPAALLERVERLGFHVTHAYGMTEATGVVMVCEWREQWDALPPSERARLKARQGVSALTLADADVKDLKTMESVPRDGATMGEVVLRGSNVMKGYFKNPRATADAFRDGWFLTGDVGVVHPDGYVEIKDRSKDVIISGGENISSVEVEAALYQHPAVREAAVVAMPHPHWGETPCAFVALKREFAGAGEVSEQEVVSFCRNRMAHYMVPRKVVFVDELPKNSTGKVQKLALRDMARRLRLRAPDKARPVAAPARHGPLTQTARL

SEQ ID NO: 183729 - protein, 113 aa, Oryza sativa
  Clone ID: PAT_MRT4530_80792C.1.pep
PCRLTRRRPLRYGTPGYTPRGSFWGTHRRTYTPRHTLTLALLTSYRTVGLPSLAASRIKPWANHTIYQARPLSIWSCFPSQPDSPIRVRRLCLSMAHIRATPLCSASIMTAWV

SEQ ID NO: 183730 - protein, 1010 aa, Oryza sativa
  unsure (1)..(1010): unsure at all Xaa locations
  Clone ID: PAT_MRT4530_80793C.1.pep
MARGSAPLEGSVLPPSRIVSERQAGLPRRFMPESVTGREVVALGEGRPAPHYPGRSVFFLSFAMAGLVPPFSSFFMDVLELYDLQMAHLTPNAVMMLAIFAHLCEMFIGVRPSLRLLQWFFTVQPVSPPMVVDGCYFQPRGQVLHRYIPCILRKKWDDWKSDWFYTPLADKARLRLPSQPPAQASSWRAPVDLGDGYDAVLDRLAGLRSQGLTGAMVFGDYLRRRIVPLQRRARGAWEYTGSEDYMRTHQGSKWDWVPEDFKMVVQRVLNLSSVEASLIPQGILPFCSDSERANILTIMQTVGASGERAPRGHDGAGGSRRGEQSTPGGGRASGPRDGGPGGSRPADARGKRKQQGTPSPSPPRGGGAARASXSRRPEGAVPSSQPEGXRKKKWLRKMGGPNHAGETSSPPQGGRLADLLAGSSPRPLRPYSFSHLPRQVFTHPFLFVFWFFFCLSEIPSLPLRHSKSGRSEAEETATAEARRREADRREAADRLREAEEAAQEAVRARQAEENAREEARLRRAEESIREAEAARARQAACQAPDPTPPEATTTSEATHDEATGAPLGPDPSGDAQDEPASGGVPESGTSIGGPSRAATSPRRLSPMPSTAPLSAEPLLQALAAANTTVLDGLSAQMEVLQAERTELDAAWARVEEGRRSVEAMVEAGRKAHRRHTSELEARRRELAEIAREVEEERESALLAAAVLNEARDDLRLQYGSRAAELEKKLDAARGVLDAAAARERRAAESEAASRRREEALEARATALEERARVKERDLADREAVVAIREATLAAHEAACAEEESALRLREDALTERERALEEAEATAQRLADSLFHREAAREEQARRRAGLVRLAGEVGPGMLRDAVSHLDRAGRQAGLWGGRTAKYAANQGGLAQRLSEMAGTLPRLPEELEETIKSSSRDLALGAVELVLASYQARDPDFSPWAALDEFPPGTEDGARTQVRDATDHIVHSFEGTTPRLAFALDSDEEGGDGGADASGDEAGDPGASE

SEQ ID NO: 183731 - protein, 367 aa, Oryza sativa
  Clone ID: PAT_MRT4530_80794C.1.pep
MLAVWDFARQDTNRVTFALKVGLACLLVSLLILFRAPYDIFGANIIWSILTVAIMFEYTVGATFNRGFNRAVGSVFAGVFAVVVIQVAMSSGHIAEPYIIGFSIFLIGEQLHRELVNSFNSLADSLEECVKKYLSDDGSEHPEFSKTVMDNFPDEPAFRKCRATLNSSAKFDSLAPYNLRCAFKSEILDATKQAAELLRGLAKDLNNMKWSLQTSLLKHVHVSTERLQHSIDLHSYLFTASQEDNYAKPQLKISRVVSFKNQSGEPESKTTETRTPMAMEVESYHEMMKRQQRKLHSWPSREVDDFEDDENVVSDLIPRMRALESTTALSLATFTSLLIEFVARLDHLVEAAERLATMARFKQQIAN

SEQ ID NO: 183732 - protein, 376 aa, Oryza sativa
  Clone ID: PAT_MRT4530_80795C.1.pep
MAVRLRACGFCNGGREQWRRRVASRQPPSSCRPSPAADALVLSLLSPPKAATHRRPPQLPTQTGEEATGLPEEDEREKKIVIPRVPWMATCQDAETRGSTGARWSLLRDVTLFGAEDGRGEREAHHPRLASAPRAARSRSDGPRAPRPAAETRSRTPRNPGAREAGTCSAHEAAWIDGAEAQGHATVFVAKFFGRAGLMSFLTAVPEPQRAAVFQSLLYEAAGRTINPVGGAVGLLSGGSWHLCQAAVDTVLRGGGIQPLPDQVDAAAAGGRDVFASTARRAMGGCSTFSTAKRSTTTTTTKNPGTPHDAAAAAPQPEPSCDLGLWLSPGSPPAPGDRRSGGRRADTPSMNSEGSVTTCGVVGDGEREPELLNLFV

SEQ ID NO: 183733 - protein, 966 aa, Oryza sativa
  unsure (1)..(966): unsure at all Xaa locations
  Clone ID: PAT_MRT4530_80796C.1.pep
MARGSALLDGSVLPPSRIVGERQAGLPRRFMPESATGREIVMLGEARPAPDYPGRSIFFLPLAMAGLVPPFSSFFMDVLEFYDLQMAHLTPNAVMTLAIFAHLCEMFIGVRPSLRLFRWFFTVQSVSPPSVVGGCYFQPRGPVLNRYIPCALRKKWDDWKSDWFYTPLANEARLRLPSQPPAPVSSWRAPVDLGDDYDAVLDRLAGLRSQGLTGAMVYGDYLRRRIAPLQRRARSAWEYTGSEDYMRTHRGVRWDWAPDDFKIVVQRVLNLSSVEASLIPQGLLPLCCDPDRASILTIMMGVGASEEVAPKGHDGAGGSRQEESTPGGGRASGPRDGGSGSNRPAAARGKRKQGGTPPPSPPRGGGAVRASSRRPEGAAPTSQPETERKKKRLRKTGETEPSRGNLISPPRWSFNRPPRSDVPSRSSRHPKSGQSEAKDPAAAEERRRESDRREAADRLREAEEAAREAARVRQAEDTAREEAARARQAEEAAREEAARARQAEEATREETARARQAEAMASSEAVHDKTAGASLGPTPSGDAQATTSGAARDKAAGASPGPAPSGDAQDQTGPGDIPELXAQVEALRAERAELEAAWARVEEGRRSVDAMXGGRKAHRRHISELEARKAALAEIAREVEEEREAALIATTAMIEAQDSLRLQHGSWEAELKKKLDAAQGVLDAAAAREQRATEAEAASRRREEALEARAMALEDHAGAVEISLADREAAAAIREATLAAHEAACAEEESALRLREDALAERERALEESEAATQRLADSLSLREAAQEEQARRNLECIRAERAALEQRAANLEAREKELDARERSGGAATGKSDLVARLAAAEHTVADMQRALDSSTGEAEALRLSELEKTIKSSSRDLAQGAVELVLASYQARDPGFSPWMALEEFPPGTEDDARARVRDAANHIVQSFEGSAPRLAFAPSSDEEGDASGEDDGGDEAGDPGALE

SEQ ID NO: 183734 - protein, 948 aa, Oryza sativa
  unsure (1)..(948): unsure at all Xaa locations
  Clone ID: PAT_MRT4530_80797C.1.pep
MARGSAPLDGSVLPPSRIVSERQAGLPRRFMPESTTGREVVALGEGRPAPHYPGRSVFFLSFAMVGLVLPFSSFFMDVLELYDLQMAHLTPNAVMTLAIFAHLCEMFIGVRPSLRLFRWFFTVQPVSPPSVVGGCYFQPRGPVLNRYIPCVLHKKWDDWKSDWFYTPLADEVRLRLPSQPPAQASSWRAPVDLGDGYDAVLDRLAGLRSQGLTGAMVYGDYLRRRIAPLQRRARGAWEYTESEDYMRTHQGVKWDWVPEDFKMVIQRVLNLSSVEASLIPQGVLPLCSDPERANILIIMQAVGASGEQAPRGHDGAGGSRRGEQSTPGGGHASGPRDGGPGGSRPADARGKRKQEGTSSPSPPQGGGARDPVAPLHPPPPRHSKSGRSEAGETATAEARRREADQREAADRLREAEEAAQEAVRARQAEEAAREEARLRRAEESVREAEAARTRQAACQAPDPTPPEATTTSEATHDEAAGAPLGPDPSGDTQDEPASGDIPESGTSIGGPSRAAPSPRRLSPMPSAAPLSAEPLLQALAAANTTAERAELDAAWARVEEGRRSVEAMVEAGRKAHRRHTSELEARWRELAEIAREVEEERETALIATAVLNEARDDLRLQYGSRAAELEKKLDAARGVLDAAAARERRAAENEAASRRREEALEARATALEERARVKERDLAHREAAVAIREATLAAHEAACAEEESALRLREDALTKRERALEEAEAAAQRLADSLSLREATREEQARRNLEGARAERAALDQRAAELEAQAKELDARARSGGAAAGDSDLVARLAAAEHTIAKLQGALDSSAGXDRAGRQAGLWGXRTAKYAANQGGLAQRLSEMARTLQRLPEELEETIKSSSRDLARGAVELVLASYQARDPDFSPWAALDEFPPGTEEGARAQVRDAADHIVHSFEGTAPRLAFALDSDEEVGDGGADDSDD

SEQ ID NO: 183735 - protein, 99 aa, Oryza sativa
  Clone ID: PAT_MRT4530_80798C.1.pep
MTAELGRSIARAAEGEHCIGGLGSDQFDEGFRGKVCNGRHQYKSLNWLIKSFFEYDKCAQCESQGSSGVGQYKSTADAAGRDDNVDGASSSSIATGRSS

SEQ ID NO: 183736 - protein, 72 aa, Oryza sativa
  Clone ID: PAT_MRT4530_80799C.1.pep
MEATNSAQHYDRRYTALRREPSVANLRARASGQIGTEHMHISLRLGTRLKYMYLQKLQRIVVILSSHPHLAI

SEQ ID NO: 183737 - protein, 482 aa, Oryza sativa
  Clone ID: PAT_MRT4530_8079C.1.pep
MEHLSEELIIEILKRITRTSDLNSVSLVSKQLYAIDAEQRATICIDCGLSTEDFSALCSRFPNLLKVEIDNSGSTPGNGNHIDNQGLFVLTSSCNSLNDLTLSFCSKINDAGIASLTYCKKLMSLKLNSIPDVTSSGLLLVAFGCKALSSLYLNDCKGIAASTEWLEYLGSDGSLEELVVNNCPGISQYDFLKFGRGWMKLKKFVFVNKETMVNHFITRHDPSYNANCVYKYDLCCENLEDLRLARLRTEPEGPEIGLRFLLRKCKALEKLCLEYVGGLIDKDMIVLSQSCKNLKSISLWMMPRRFHEHEVLRMGFTDESLEMLAHNCPLLQDLELTFAGVEDLEYPEIGFTQEGLVKLMHSCPIRSLTLNGTLFFNDKGMKGLSSAPFLKTLRLVDCKKITDYGMCFLVHYPCLADLKLQYCSGLTDVGIAELVHAQKLQSLVVEGCSNISEHAVQGSARSVQYFPNSARSGATHLKRLVD

SEQ ID NO: 183738 - protein, 221 aa, Oryza sativa
  Clone ID: PAT_MRT4530_807C.1.pep
GREKSTAPPPLHRSPSPAHPPPPHLPSSRRLPSNLRRRRHDDEPPSPTTGNGANPAFRTPHLRTAYRKPVPPVAATGEGEAVLAVAPHSPLLTFLFPIGLLPDRLPRPTTPPFQRSAATVILFQTRARRRWLPPSSKRSRRLWAVRSGAAELSTMKAEEARRTSTVAPRLPIFLSLPDLARGLEEWRGGGATVMLWSLAESPLSAASGKVHSDLTYPRAST

SEQ ID NO: 183739 - protein, 1045 aa, Oryza sativa
  unsure (1)..(1045): unsure at all Xaa locations
  Clone ID: PAT_MRT4530_80800C.1.pep
MARGSAPLDGSVLPPSRIVSERQAGLPRRFMPESATGREVVALGEGRPAPHYPGRSVFFLSFAMAGLVPPFSSFFMDVLELYDLQMADLTPNVVMTLAIFAHLCEMFIGVRPSLRQFRWFFTVQPVSPPSVVGGCYFQPRGPVLNRYIPCVLHKKWDDWKSDWFNTPLADEARLRLPSQPPAQASSWRAPVDLGDGYDAVLDRLAGLRSQGLTGAMVYGDYLRHRIAPPQRCARGAWEYTGPEDIMRTHHGRKWDWDPEDFKIVIQRVLNLSSVEAFLIPQGVLPLCSDPERANILTIMQAVGASGERAPRGHDGAGGSRRGEQSTPGGGRASGPRDGGPGGSRPVDARGKRKQEDTPSPSPPRGGGAVRASSRRPEGAVPTSQPEGERKKKRLRKIGGIEPCRGKLIXPPRWSFSRPPRSEIPSRPSCHSKSGRSEAEETATAEARRREADRREATNHLQEAEEAAQEAVRARQADEAVWEETRLRRAEESVRETEAARARQAACQAPDPTPPEATMTSEATHDEAAGAPLGPDPSGDAQDEPASGDVPESGTSIGGPSRAASLPRRLSPMPSAAPLSAELLLQALAAANTTVLDGLSAQMEVLQAERAELDAAWARVEEGRRXRDRRSVEAMVEAGRKAHRRHTSELEAHRRELAEIAREVEEERETALIATAVLNEARDDLRLQYGNRAAELEKKLDAARGVLDAAAARERRAAENEAASRRREEALEARAAALEERARAKERDLADREAAVAIREATLAAHEAACAEEESALRLREDALTERERALEEAEAAAQRLVDSLSLREAAREEQARHNLEGARAERAALDQRAAKLEARARELDARARSGGAAAGDGDLAARLAAAEHTIAELQGALDSSAGEVEALRLAGEVGPGMLRDAVSRLDRAGRQAGLWGGRTAKYAANQGGLAQRLSEMAGTLQRLPEELEETIKSSSRDLARGTVELVLASYQAKDPDFSPWAALDEFPPGTEDGARAQVRDAADHIVHSFEGTAPRLVFALDSDEEGGDGGADDSDDEAGDPGASA

SEQ ID NO: 183740 - protein, 662 aa, Oryza sativa
  Clone ID: PAT_MRT4530_80801C.1.pep
MGPVSGIDDFIFPPGQAFRFSSLNFITNDFGKISLLDSDSNQSGRDQVPVPFGIPNSAEAYSKIISPESASNHSDEIQSTLPRPDQDDGSYPPILMKLPDDLATVFTVKISPTRRSRRAPASAPIQSRSREVGVILQPLGTVSTEELDGYLSSPGVSSRPTEILDYDDFGYHYDHGDLDNFDDSYEDNYTPLFFGVFMADNETEEQRQAREADQDRARQEAERRRLEEERQRQERERLQREQQDREQIAKEAEDRRQHILESGQRARELIGQQDVDGTAVFRTPQQNAVAAITLLDTLLKEVALNQADHPTPQALAPRLVAESLIFDLKTITSQASALPAPDLVAGAGDMMNASFKPTGIEKYDGTTNPESWLTVYGLAIRAAGGDNKAMANYLPVALADSARSWLHGLPRGTIGSWAELRDHFIANFQGTFKRPSTQFDLYNVVQKPGESLRDYIRRFSEKRNKISDITDDVIIAAFTKGIRHDDLVGKFGRKPPRTVKQMFEKVNEYAKSKDAITASKQSGTIWKPKKDKPTAGGSGSNNHKDRKCKPEELVATTSPSSRQRSRVNTFDKIMNSQCPHHPNSNHMAKDCFVYKQLAEQYVKNAHKPSDGDQGTSKKKDDEDDAPTGFQDHRKELNHIFGGPLTYESKRKQKLTELEINAV

SEQ ID NO: 183741 - protein, 1017 aa, Oryza sativa
  unsure (1)..(1017): unsure at all Xaa locations
  Clone ID: PAT_MRT4530_80802C.1.pep
MARGSALLDGSMLPPSRIVSERQAGLLRRFMPESATGREVVELGEGRPAPHYPGRSVFFLSFAMAGLVPPFSSFFMDVMEFYNLQMAHLTPNVVMMLAIFAHLCEMFIGVRPSLRLFRWFFTAQPVSPPSVVGGCYFQPRGPVLSRYIPCVLRKKWDDWKSDWFYTPXADEARLRLPSQPLAQASSWRAXGAMVYGDYLRRRIAPLQRRARGAWEYTGSEDYMRTHQGGRWDWAPEDFKMVVQRVLNLSSVEASLIPQGVLPLCSDPDRANILTIMQAVGASEERAPRGHDGAGGSRRGEQSTPGGGRASGPRDGGPRGSRPADARGKRKQEGTPSPSPPRGGGAVRASSRRPESAVPTPRPEGERKKKRLRKMGETETCRGNLISPPRWSFSRPPRSEIPSRPPRHSKSGRSEAEEAATAEARRREADRREAADRLREAEEAAQEAVPVRQAEEVAREEARLRRAEESVREVEAARAHQAVCQSPDPTPPEATATSEATHDEAAGAPLGSDPSDDVRNEPTSGDAPESGTSIGGPSRAAPTPRRLSPLPSAALPSAEPLLQALAAANTTVLDGLSAQMEVLQAERVELDAAWARVEEGRRSVEAMVEAGRKAHRRHASELEARRRELAEIAREVEEERETALIATAVLDEVRDDLRLQYGSRAVELEKKLDAARGVLDAAAARERRAAENEAASRRREEALEARSTALEERARAKERDLADREAALAIWEATLAAHEAACAEEESALCLCEDTLTERERALEEAEAAAQRLADNLFFREAAQEEQARRNLEGARAERAALARRAAELEARAKELDARARSGGAAAGDSDLAARLAAAEHTIAELQGALDSSAGEVEALRLAGEVGPGMLRDAVSRLDHAGRQAGLWGERTAKYAANQGGLAQRLSEMAGTLQRLLEELEKTIKSSSRDLARGAVELVLASYQARDPDFSPWAALDEFPPGTEDGARAQVRDAADYIVHSFEGTAPRLAFALDSDEEGGDGGADDSDDEAGDPGASK

SEQ ID NO: 183742 - protein, 393 aa, Oryza sativa
  Clone ID: PAT_MRT4530_80803C.1.pep
PPRPGLQGSGKTTTCTKYAYYHQRKGFKPALVCADTFRAGAFDQLKQNATKAKIPFYGSYMESDPVKIAVEGVERFKKENCDLIIVDTSGRHKQEAALFEEMRQVSEATKPDLVIFVMDSSIGQAAFDQAQAFKQSVSVGAVIVTKMDGHAKGGGALSAVAATKSPVIFIGTGEHIDEFEVFDVKPFVSRLLGMGDWSGFMDKIHEVVPTDQQPELLQKLSEGTFTLRLMYEQFQNILKMGPIGQVFSMLPGFSSELMPKGHEKESQAKIKRYMTMMDSMTDGELDSTNPKLMTESRILRIARGSGRPVRDVVDMLEEYKRLAKIWSKMKGLKIPKKGEMSALSRNMNVQHMSKVLPPQMLKQIGGMGGLQSLMKQMGSKEMGGMFGGMGGDK

SEQ ID NO: 183743 - protein, 1528 aa, Oryza sativa
  unsure (1)..(1528): unsure at all Xaa locations
  Clone ID: PAT_MRT4530_80804C.1.pep
MSNKPIFQVYHGPGNVRYGPTGVDLSDFIVSERGIERPAERSVPSIKGWLMRGLRVDPQTSDITINVIVSRAXWELMPVQNSQVWRWYVENAMQRGWPLALVPFVHPKDPGVQMNMDDSEGPSAEVNETSVEEVNAGVDGGVVAPVGIQPGGVADEGETVAAIVDEMEREDSDNGRVEEGDSSDEETDINPAEWASQDFSGLIVSEEDSVRWEYKENEVIQGAIYSRTEDMKEAVKHFAVSLHREFWAAKSNRSQYEVRCVKEKDGCPWRVHAYKGKWKDYWTVSVVTKHTCFLPGVQKYHRNITCAFVASEMYAHVIDNLTYEPRSIIRHIEETYKYTISYAKAWRAKQKIIEMRFGTYEVSYDNLPRLLGVIEERNPGSSYEVKKFPSIEHPGKSVLQRAFLALHACKMAFVNCRPVICIDGTFLTGKYRGQILTAIGVNGNNQVFPLAFAFVESENTDSWYWFLKLVKTKVVSMRPNVCLIHDRHAGILRTIEELQFGSMERGYPGVWDDVQSRWCMRHMGANFFKQFKNKELVNMFRRLCNQNQEKKFNELWKRLDELTAKCSDQRAAAPSTAVDDPPQALGPLPTDSPTLVRRTGLEIRKFSQWILHEPKEKWAKAYDTGGARYGIMTTNLAEVYNWVMRGVRGLPLVGIVEFILHGTYRYFRDRFQAILPSMPNNSILFGTFMQKKLEELHKKAMKHRALVQGTQQHRFEILCQDKAGRGIYRKRVKQECVLKTDGTCHCSCSKPKLLHRPCTHVIAAAAECGIPDAVYVSQYFSKQAIYHTWSGEIYRFGIAGEFTETNDEVLNIPDPSKLRGKAGRRRTRRICNNMDESEAGRVKRCSKCDERGHTYKHCPKDKEKPSAAEAXLSGSAADGARPTEMARQDTPQLLDPAIDLRHRSHLTAVQGAQLGTFRARTCGELLTVHDSFVERLREAGLLPMCRLVEAAAGHADPARRWTVDRSLLAALVDRWRPETHTFHLPXGEVAPTLQDVSCLLGLPLAGDAVGPVTTAVDWQDELTARFALVQRAPHLPLQPLAHHRNTGPTKRWLLQFTVEQLQAEADEYSYSRCLEAYLLWLFGWVMFCGRHGHAVDKGLVHDARSIADAAVGEVPQWSWGSALLAALYRALCESCTKTDPSATFGGCPLFLSIWAAERIAIGRPEVDQHAYEESLYEERPEVDYPTMGTLWCRRQRRWAHVQIRRSYPEFVMEFDRLLPIDVVWXPTVPRLPRLVRRWFGFRQPFPVPFPTTVPAAVHRYSRKGQQSAGDWPAKLATFVEDWLLATEEVVDHEGEPHTEESYQAYLRWYQPHTRTRVTFAPLEQQPHVASTRDLYARHRDQDFARAVDDINRVVVDGSTTIQRLDAGIPVPVEEHLTTYTRMVESMRSILRVLTCRADDIARADAAVQRPPVPTGPRPAAHVPRPTPPPHGGFAQFAMTQAAYFSHAAGSASQPAASTSHSAQFQQYTGASSQAAGTSSQGPPLDHARTSSDRLLSSTVLFDITDFDFASGSAEDVIGPSQLGGAPPV

SEQ ID NO: 183744 - protein, 291 aa, Oryza sativa
  Clone ID: PAT_MRT4530_80805C.1.pep
MGENPAKRGKMITGDQGIQPQHYEQYMAWYSLQNRIRLLPPQDTDKRGPPTIGQIYDMQLAPPAHLTSDIAGELVKEAKTLWEKLRDGISCTNQEVMAAVDYLRRKAQPKRVPPHSSTPITSQWQSGFASFAEGARMVRPVPQMPLARPHMIPQMAPDVATSHWQGGFAPFAGTSFGAGVQGYMDLLQQGSYCPELMSGFRPYTASYGDISSFDGGSSSVPDELRASQTNEAPQATQPTQPEVGDLQGNDNDPHRSNHEHLEPNRLSLSGPRHAAVARKKTKKSELQHLEL

SEQ ID NO: 183745 - protein, 1513 aa, Oryza sativa
  unsure (1)..(1513): unsure at all Xaa locations
  Clone ID: PAT_MRT4530_80806C.1.pep
MSNKQIFQVYHGPGNVRYGPTGVDLSNFIVSERGIDRPAERSVPSIKGWLMRGLRVDPQTSDITINVIVSRATEGFYWELMPVQNSRVWRWYLENALQRGWPLALVPFVHPKDPGVQMNMDDGEGPSAEVNETSVEEVNARDDGGIVAPVGIQPGGVADEGETVGAIVDEMEKEDSDNERVEEGDSSDDETDINPAEWASEDFSGLIVSEEDSVRWEYKENEVIQGAIYSRAEDMKEAKYHRNITCAFVASEMYAHVIDNLTYEPRSIIRHIEETYKYTISYAKAWRAKQKIIEMRFGTYEASYDNLPRLLGVIEERNPGSSYEVKKFPSIEHPSKSVLQRAFLALHACKMAFVNCRPVLCIDGTFLTGKYRGQILTAIRVDGNNQVLPLAFAFVESENTDSWYWFLKLVKTKVIGMRPNVCLIHDRHAGILRAIEELQFGSMERGYPGVWEDVQSRWCMRHMGANFFKQFKNKELMNMFKRLCNQNQEKKFNELWKRLDELTAKCSDQRAAAPSTAVADPPQALGPLPTDSPILVRRTGLEIRKFSQWILHEPKEKWAKAYDTGGARYGIMTTNLAEVYNWVMRGVRGLPLVGIVEFILHGTCRYFRDRFQAVLPSMPNNSILFGAFIQKKLEELRKKAMKHRALVQGTQQHRFEILCQDKAGRGIYRKRVKQECVLKADGTCHCSCAKPKLLHRPCTHVIAAAAECGIPDAVYVSQYFSKQAIYHTWSGQIYGFGIAGEFTETNDEVLNIPDPSKLRGKAGRRRTRRIRNDMDESEAGMVKRCSKCDEHGHTYKHCPKDKEKPSAAEAGLSGSAADGARPMGEGTTSTRPRPRRRRATSGYVGAQLGTFRARTCGELLTVHDSFVERLREAGLLPMCRLVEAAAGDADPARRWTVDRSLLAALVDRWRPETHTFHLPCGEVAPTLQDVSYLLGLPLAGDAVGPVTTAVDWQDDLTARFALVQRAPHLPLEPLAHHRNTGPTKRWLLQFTVEQLQAEADEYSYSRCLEAYLLWLFGWVMFCGGHGHAVDKGLVHYARSIADAAVGEVPQWSWGSALLAALYRALCESCTKTDPSATFGGCPLFLSIWAAERIAIGRPEVDQHAYEESLYEERPEVDYPTMSTLWCRRQRRWAHVQVRRSYPEFVMEFDRLLPTDVVWXPTVPRLPRLVRRWFGFRQPFPVPFPTTVPAAVHRYSRKGQQSAGDWPAKLATFVEDWLLATEEVVDHEGEPHTEESYQAYLRWYQPRTRTRVTFAPLEQQPHVASTRDLYARHHDQDFPRAVDDINRVVVDGSTTIQRLGAGIPVPVEEHLTTYTRMVESMRSILRVLTCHADDVARADAAVQRPPVPTGPHPAAHVPRPTLPPHGGFRFAQFAMTQAAHFSQAAGSASQAAVSTSHSAQFWQYTGTSSQAAGTSSQGPPLDHAGTSSDRLLPSTLLFDITDFDFASGSTEDVIGPSQLRGAPPVQTQDQAQATPPQDTRATRAVPPDRFTYSQDHVRAQARRTKRGRGAGQGQ

SEQ ID NO: 183746 - protein, 1526 aa, Oryza sativa
  unsure (1)..(1526): unsure at all Xaa locations
  Clone ID: PAT_MRT4530_80807C.1.pep
MSNKQIFQVYHGPGNVRYGPTGVDLSNFIVSERGIERPAERSVPSIKGWLMRGLRVDPQTSDITVNVIVSRATEGFYWELMPVQNSRVWRWYLENALQRGWPLALVPFVHPKDPGVQMNMDDGEGPSAEVNETSVEEVNAREDGGVVAPVGIQPGGVADEGETVGAIVDEMEREDSDNERVEEGDSSDDKTDINPAEWASEDFSGLIVSEEDSVRWEYKENEVIQGAIYSRAEDMKEAVKHFAVSLHREFWVAKSNRSQYEVRCVKEKDGCPWRVHAYKGKWKDYWTVSVVTKHTCFLPGVQKYHRNITCAFVASEMYAHVIDNFTYEPRSIIRHIEETYKYTISYAKAWRAKQKIIEMRFGTYEASYDNLPRLLGVIEERNPGSSYEVKKFPSIEHPSKSVLQRAFLALHACKMAFVNCRRVLCIDGTFLAGKYRGQILTAIGVDGNNQVLPLAFAFVESENTDSWYWFLKMVKTKVVRMRPNVCLIHDRHAGILRAIEELQFGSMERGYPGVWEDVQSRWCMRHMGANFFKQFKNKELMNMFKRLCNQNQEKKFNELWKILDELTAKCSDQRAAAPSTAVANPPQALGPLPTDSPTLAKAYDTGGARYGIMTTNLAEVYNWVMRGVRGLPLVGIVEFILHGTCRYFRDRFQAVLPSMPNNNILFGAFMQKKLEELRKKAMKHRALVQGTQQHRFEILCQDKAGRGIYRKRVKQECVLKADGTCHYSCAKPKLLHRPCTHVIAAAAECGILDAVYVSQYFSKQAIYHTWSGEIYGFCIAGEFTETNDEVLNIPDPSKLRGKAGRRRTRRIRNDMDESEAGRVKRCSKCDEHGHTYKHCPKDKEKPSAAEAGLSGSAADGARPTEMARQDTPQLLDPAIDHRHRSHLTAVQGAQLGTFRARTCGELLTVHDSFVERLREVGLLPMCRLVEATAGDADPARRWTVDRSLLAALVDRWRPETHTFHMPCGEVAPTLHDVSYLLGLPLAGDAVGPVTTAVDWQDDLTVEQLQAEADEYSYSRCLEAYLLWLFGWVMFCGGHGHAVDKGLVHYARSIADSAVGEVPQWSWGSALLASLYRALCESCTKTDPSVTFGGCPLFLSIWAAERIAIGRPEVDQHAYEESLYEERPEVDYPTMGTLWCRRQRRWAHVQVRRSYPEFVMEFDRLLPTDVVWXPTVQRLPRLVRRWFGFRQPFPVPFPSTVPAAVHRYSRKGQYSAGDWPAKLATFIEDWLLATEEVVDHEGEPHTEESYQAYLRWYQPRTCTRVTFAPLEQQPHVASTRDLYAKHRDQDFACAVDDINRVVVDGSTTIQRLGAGIPVPVEDHLTTYTRMVESMRSILRVLTCRADNVARADAAVQRPPVPTGPRPAAHVPRPTPPPHGGFRFAQFAMTHAAHFSQAAGSASQAAVSTSHSAQFWQYTGTSSQAAGTSSQGPPLDHAGTSSDRLLPSTLLLDITDFDFASGSTEDVIGPSQLGGASPVQTQDQAQATPPRDTRATRAVPPDRFTYSQDHVRAQARRTKRGRGAGQGQ

SEQ ID NO: 183747 - protein, 1347 aa, Oryza sativa
  unsure (1)..(1347): unsure at all Xaa locations
  Clone ID: PAT_MRT4530_80808C.1.pep
MVPWGGSDARVHCDKCNQGLDAEEKRSIRASERSQARWLQRVASAGARKIGGKIELNFLYGYQKANVNMGSLKPAIKMRGMHCIARTKFKLEYLHTNARVVSHNVVHYGDEIHRNNLSARKFAKIDPAAPMVGGKLTWQTGEERAVTEGVQMNMDDGEGPSAEVNETSVEEVNAGVDRGVVAPVGIQPGGVADEGETVAAIVDEMEREDSDNKRVEEGDSSDEETDINPAEWASQDFSGLIVSEEDSVRWEYKENEVIQGAIYSRAEDMKEAVLPLAFAFVESENTDSWYWFLKLVKTKVVGMRPNVCLIHDRHTGILRAIEELQFGSMERGYPGVWDDVQSRWCMRHMGANFFKQFKNKELMNMFKRLCNQNQEKKFNELWKRLDELTAKCSDQRAAAPSTAVDDPPQALGPLPTDSPTLVRRTGLEIQKFSQWILHEPKEKWAKVYDTGGARYRIMTTNLAEVYNWVMRGVRGLPLVGIVEFILHGTCRYFRDRFQAVLPSMPNNNILFGTFMQKKLEELRKKAMKHRALVQGTQQHRFEILCQDKAGRGIYRKRVKQECVLKADGTCHCSCSKPKLLHRPCTHVIAAAAECGIPDAVYVSQYFSKQAIYHTWSGEIYGFGIAGEFTETNDEVLNIPDPSKLRGKAGRRRTRRIRNNMDESEAGRMELALRVKALPPLDHVLGVVVPQMARQDTPQLLDPAIDHRHRSHLTAVQGAQLGTFRARTCGELLTVHDSFVERLREAGLLPMCRLVEAAAGDADPARRWTVDRSLLAALVDRWRPETHTFHLPCGEVAPTLQDVSYLLGLPLAGDAVGPVTTAVDWQDDLTARFALVQRAPHLPLEPLAHHRNTGPTKRWLLQFTVEQLQAEADEYSYSRCLEAYLLWLFGWVMFCGSHGHAVDKGLVHYARSIADAAVGEVPQWSWGSALLAALYRALCESCTKTDPSATFGGCPLFLSIWAAERIAIGRPEVDQHAYEESLYEERPEVDYPTMGTLWCRRQRRWAHVQVRRSYPEFVMEFDRLLPTDVVWXPTVPRLPRLVRRWFGFRQPFPVSFPTTVPAAVHRYSRKGQHLAGDWPAKLATFVEDWLLATEEVVDHEGEPHTEESYQAYLRWYQPRTRTRVTFAPLEQQPHVASTRDLYARHRDQDFARAIDDINRVVVDGSTTIQRLGAGIPXDVARADAAVQRPPVPTGPRPAAHVPRPTPPPHGGXSHFSQAAGSASQAAASTSHSAQFWQYTGTSSQAAGTSSQGPPLDHAGTSSDRLLPSTLLFDITDFDFASGSTEDVIGPSQLGGAPPVQTQDQAQATPPPDTRATRAVPPDRFTYSQDHVRAQARRTKRGRGAGQGQ

SEQ ID NO: 183748 - protein, 76 aa, Oryza sativa
  unsure (1)..(76): unsure at all Xaa locations
  Clone ID: PAT_MRT4530_80809C.1.pep
LHLGTVSDVPSQLPCCVHKPCRFSSPSSIYYVMSLLLWSHHLLNCTPAPVRVDLCGARQHAGIIHRVNGQIXMDAI

SEQ ID NO: 183749 - protein, 53 aa, Oryza sativa
  Clone ID: PAT_MRT4530_8080C.1.pep
LGHEAEAEVEAQGGSPGRRRGWKFRAGRESQQGAVLQGRSVARHEPAHVPGAT

SEQ ID NO: 183750 - protein, 1528 aa, Oryza sativa
  unsure (1)..(1528): unsure at all Xaa locations
  Clone ID: PAT_MRT4530_80810C.1.pep
MSNKQIFQVYHGPXNVRYGPTGVDLSEFIVSERGIDRPAERSVPSIKGWLMRGLRVDPQTSDITINVIVSRATEGFYWELMPVQNSRVWRWYVENALQRGWSLAMVPFVHPKDPGVQMNMNDGEGPSAEVNETFVEEVNAXEDGGVVPPVGIQPSGVVDEGETVGAIVDEMKREDSDNERVEEGDSSDDETDINLAEWASEDFFGLVVSEEDSVRWEYKENEVIQGAIYTRAEDMKEAVKHFLVSLRRDFWVAKSNWLQYEVRCVKEKDGCPWRVHAYKGKWKDYWTVSVVTKHTCFLPGVQKYHRNITCAFVASEMYAHVIDNLTYEPRSIMRHIEETYKYTISYAKAWRAKQKIIEMRFGTYEASYDNLPCLLGVIEERNPGSSYAVKKFPSIEHPGKSVLQRVFLALHACKMAFVNCRPVLCIDGTFLTGKYRGQILTAIGVDGNNQVLPLAFAFVESENTDSWYWFLKLVKTKVIGMRPNVYLIHDRHAGILRAIEELQFGSMERGYLGEWKDVQSRWCMHHMGADFFKQFKNKELMNIFKRLCNQNQEKKFNELWKRLDELLAKCSNQRAAAPSTTVADPPQSLGPLPTDSPTLVRRTGVEIRKFSQWILHEPKEKWAKAYDTGDARYGIMITNLAEVYNWVMHGVRGLPLVGIVEFILQGTCRYFRDRFQAVLPSMPNNSILFGTFMQKKLEELRKKAMKHRALVQGTQQHRFEILCQDKAGRGIYRKRVKQECVLKADGTCHCSCAKPKLLHRPCTHVIAAATECGIPYAVYVSQYFSKQAVYHTWSGEIYGFGIAGEFTETNNEVLNIPDPSKLRGKAGRRKTRRIRNDMDESEAGRVKRCSKCNECGHTYKHCPKDKEKPNAAEAGLSGSAANGARPTGEGTTSTXYVLGVVVPRLATWCSSCVLCWHVAXACNLFRTYRCVYVSRLREAGLLPMCRLVEAAAGHADPAKRWNVDRSLLAALVDRWRPETHTFHLPCGEVAPTLQDVSYLLGLPLAGDAVGPVTTGVDWKDDLTARFTPVHRAPHLPLQPLAHHRNTGPTKRWLLQFIVEQLQAEADEYSYSRCLEAYLLLLFGWVMFCGGHGHAFDKGLVHYARSIADAVVGEVPQWSXGSALLVAQYRGLCEACTKSDPSTTFGGCPLFLSIWAAERITIGHPEVDQHAYEESLYAERPEVDYPTMGTLWCRRQRRWAHVQVRRSYPEFVMEFDRLLPTDVVWXPTVPRLPRLVRRWFGFRQPFPVPFPTTVPAAVHRYSHKGQQSAGDXPAKLGTFVENWLLATKEVVEHEGEPHTEEAYQAYLRWYQPRTRTRVTFAPLEQQTHVAITRDLYARHRDXDFACAVIDINRVVVDGSTTIQRLGAGIPIPVEEHLTTYTLMVESMRSILRVLTCRADDVARADAAPQRPPVPTGPRPTAHVPRPTPPPHEGFAQFAMTQAAHFSQAAGSASQAAASTSHSAQFWQYIGTSSHAAGTSSQGPPLDHVGTSSDHLVASALLFDITDFDFASGSTEDVIGPSQLRGALPV

SEQ ID NO: 183751 - protein, 53 aa, Oryza sativa
  Clone ID: PAT_MRT4530_80811C.1.pep
MVVAGGGGAMHGTEQNLSSTELGQQMEQIRAAAVEEANLQAQHKIQLHRRQVG

SEQ ID NO: 183752 - protein, 763 aa, Oryza sativa
  Clone ID: PAT_MRT4530_80812C.1.pep
MSRRPSVAPEPAPRLVCNATTGDLPAGCNLGLLARIELLVLFCSAILALLVFLGSSRRRSSSATVRLVVWGAFTVSYPVAAYTIGLMQSSPFHHELFVVWSCFFLFVLASSDSITAYTLADIKSPATVLLNRGLQVIYVSVLLHYYASVLSPKLKIYLFIVWLVSLGKIALSALGYRLALRSDRLEADNKLVADYMTYEHDLSRQGGSDGDPVTMEGYKYIVRGEETDVMELTAPDYVKKIKVDGARALVTVESVWRCKGRLLMGSSVADASAAARRDLCLSFALFKLLRRRCSNYPLAESGQPKTRDFVLRGLLGQGKDDDDDGDGDRRSRRDGRAFRVIEVELGFLYDLFYTRYPFICHAAVSTAPHLAMCALVMTIGVLTLSSHSLRHYHPTHHRSIEVNGVNLDVALTMFIIALVIVLEAYQFVAVLFSDWQKVKMLCRYVLRPSWQGNPFFEAVLRVLCYCGSGVYWKKTMSQYSIVRHASPGHAVKDWLSRATRRWLDRLMFNGGKARSVKVSAAVESALASALRDRDDDDGVLGGGGRAALRQHRLDWAWGGATWRTCAHAILIWHIATCLCDMQMPAAITHKKTRPRARKAAGGGDGDGDRAVATSLSRYCAYLVSSAPELLPEHQYTTRTIAEAVLLELRVCLRGCASDKEVLDRLKAVAETATASSPESGIHVHGARLWTQLMVIPDQEMTWKLLARVWAELMLFVTPADNATAHVQHLTMGGEHITHLWALLTHAGIVDRPNSPSPHPHPAP

SEQ ID NO: 183753 - protein, 1548 aa, Oryza sativa
  Clone ID: PAT_MRT4530_80813C.1.pep
MSWHRAGVLLLGGSILPACPGGSGLGLGWLGTSWDPGSGCQFGLNHRRPWVKAGNVRYGPTGVDLSDFIVSERGIDRPAERSVPSIKGWLMRGLRVDPQTSDITINVIVSRATEGFYWELMPVQNSRVWRWYLENALQRGWPLALVPFVHPKDPGVQMNMDDGEGPSAEVNETSVEEVNAREDGGVVAPVGIQPGGVADEGETVGAIVDEMEREDSNNERVEEGDSSDDEMDINPAEWASEDFSGLIVSEEDSVRWEYKENEVIQGAIYSRAEDMKEAVKHFAVSLHREFRVAKSNRSQYEVRCVKEKDGCPWRVHAYKGKWKDYWTVSVVTKQTCFLPGVQKYHRNITCAFVASEMYAHVIDNLTYEPRSIIRHIEETYKYTISYAKAWRAKQKIIEMRFGTYEASYDNLPRLLGVIEERNPGSSYEVKKFPSIEHPGKSVLQRAFLALHACKMAFVNCRPVLCIDRTFLTGKYRGQILTAIGVDGNNQVLPLAFAFVESENTDSWYWFLKLVKTKVVGMRPNVCLIHDRHAGILRAIGELQFGSMERGYPGVWEDVQSRWCMRHMGANFFKQFKNKELMNMFKRLCNQNQEKKFNELWKRLDELTAKCSDQRAAAPSTAVADPPQALGPLLTDSPTLVRRTGLEIRKFSQWILHEPKEKWAKAYDTGGARYGIMTTNLAEVYNWVMRGVCGLPLVGIVEFILHGTCRYFRDRIQAVLPSMPNNSILFGAFRQKKLEELRKKAMKHRALVQGTQQHRFEILCQDKAGRGIYRKRVKQEYVLKDDGTCHCSCAKPKLLHRPCTHVIAAAAECGIPDTVYVSQYFSKQAIYHTWSGEIYGFGIAGEFTETNDEVLNIPDPSKLRSKAGRRRTRRIRNDMDESEAGRVKRCSKCDEHGHTYKHCPKDKEKPSAAEAGLSGSAADGARPTEMARQGTPQLLDPAIDHRHRSHLTAVQGAQLGTFRARTCGELLTVHDSFVERLREAGLLPMCRLVEQLQADADEYSYSRCLEAYLLWLFGWVMFCGGHGHAVDKGLVHYAWSIADAAVGEVPQWSWGSALLAALYRALCESCTKTDPSATFGGCPLFLSNWAAERIAIGRPEVDQHAYEESLYEERPEVDYPTMGTLWCRRQRRWAHVQVRRSYPEFVMEFDRLLTTDVVWEPYSAAATQARAPLGLSTLCTRDQAYWMTTVPMVFDICVEPHAPFRVMWQFGFRQPFPVPFPTTVPAAVHRYSRKGQHSVGDWPAKLATFVEDWLLATEEVVDHEGEPHTEESYQAYLRWYQPRTRTRVTFAPLEQQPHVASTKDLYARHRDQDFARVVDDINRVVVDGSTTIQRLDAGIPVPVEEHLTTYTRMVESMRSILRVLTCRADDVARADAAVQRPPVPTGPRPAAHVPRPTPPPHGGFRAPFSTPPSSARPSVVPPTGFAQFAITQAAHFSQAAWSASQAAGMSSQGPPLDHAGTSSDPFLSSTVLFDINDFDFASGSTEDVIGPSQLGGTPPVQTQDQAQATPPRDTRATRVVPPDRFTYSQDHVRAQARRTKRGRGAGQGQ

SEQ ID NO: 183754 - protein, 1438 aa, Oryza sativa
  unsure (1)..(1438): unsure at all Xaa locations
  Clone ID: PAT_MRT4530_80814C.1.pep
MSQHHRRSWPRIRWVKGCRIWWLRELVVGSWHWSFTCRVGAGRKAIAVGEDDTRENRDCHVSAGRKATTIGEDGACENKDCRVGARRKASAIDEDNTCKNKEKWRKMMVAEGFSCTNLEVRIVDIGNVRYGPTGVDLSDFIVSERGIDRPAERSVPSIKGWLMRGFRVDPQTSDITINVIVSRATEGFYWELMPVQNSRVWRWYLENALQRGWPLALVPFVHPKDPGVQTNMDDGKGPSAEVNETSVEEVNAREDGGVVAPVGIQPGGVADEGETVGAIVDEMEREDSDNERVEKGDSSDDETDINPAEWASEDFSGLIVSEEDSVRWEYKENEVIQGAIYSRAEDMKEAVKHFAVSLHREFWVAKSNRSQYEVRSIIQHIEETYKYTISYAKAWRAKQKIIEMRFGTYEASYDNLPRLLGVIEERNPGSSYEVKKFPSIEHPGKSVLQRAFLALHACKMAFVNCRPVLCIDGTFLTGKYRGQILTAIGVDGNNQVLPLAFAFVESENTDSWYWFLKLIKTKVVGMSPNVCLIHDRHAGILRAIGELQFGSMERGYPGVWEDVQSRWCMRHMGANFFKQFKNKELMNMFKRLCNQNQEKKFNELWKRLDELTAKCSDQRAAAPSTAVADPPQALGPLPTDSPTLVRRTGLEIRKFSQWILHEPKEKWAKAYDTGGARYGIMTTILAEVYNWVMRGVRGLPLVGIVEFILHGTCRFEILCQDKAGRGIYRKRVKQECVLKADGTCYCSCAKPKLLHRPCTHVIAAAAECGIPDAVYVSQYFSKQAIYHTWSGEIYGFGIAGEFTETNDEVLNIPDPSKLRGKAGRRRTRRIRNDMDESEAGRVKRCSKCDEHGHTYKHCPKDKEKPSAAEAGLSGSAANGARPTEMARQDTPQLLDPAIDHRHRSHLTAVQGAQLGTFRARTCGELLTVHDSFVERLREAGLLPMCRLVEAAAGDADPARRWTVDRSLLAALVDRWRPETHTFHLPCGEVEQLQEEADEYSYSRCLEAYLLWLFGWVMFCGGHGHAVDKGLVHYARSITDAAVGEVPQWSWGSALLAALYRALCESCTKTDPSATFGGCPLFLSIWAAERIAIGRPEVDQHAYEESLYEEQPEVDYPTMGTLWCRRQRRWAHVQVRRSYPEFVMEFDRLLPTDVVWEPYSATATQARAPLGLSTLCTRDQAYWMTTVPMVFDICVEPHAPFRVMRQFGFRQPFPVPFPTTVPAAVHGVTFAPLEQQPHVASTRDLYARHRDQDFARAVDDINRVVVDGSTTIQRLGAGIPXDVARADTAVRRPPVPTGPRPAAHVPRPTPPPHGGFRAPFSTPPSSARPSVVPPTGXGTSSQGPPLDHAGTSSDHLLPSTFLFDITDFDFASGSTEDVIGPSQLGGAPPVQTQDQAQATPPRDTRATRAVPPDRFTYSQDHVRAQARRTKRGRGAGQGQ

SEQ ID NO: 183755 - protein, 1248 aa, Oryza sativa
  unsure (1)..(1248): unsure at all Xaa locations
  Clone ID: PAT_MRT4530_80815C.1.pep
MSNKQIFQVYHGPGNVRYGPTGVDLSDFIVSERGIDRPAERSVPSIKGWLMRGLRVDPQTSDIKINVIVSRATEGFYWELMPVQNSRVWRWYLENALQRGWPLALVPFVHPKDPGVQTNMDDGEGPSAEVNETSVEEVNAREDGGVVALVGIQPGGVADEGETVGAIVDKMEREDSDNERVEEGDSSDDETDINPEEWASEDFSGLIVSEEDSVRWEYKENEVIQGAIYSKAEDMKEAKYHRNITCAFVASEMYAHVIDNLTYEPRSIIRHIEETYKYTISYAKAWRAKQKIIEMIFGTYEASYDNLPRLLGVIEERNPGSSYKVKKLPSIEHPGKSVLQRAFLALHACKMAFVNCRPVLCIDGTFLTGKYRGQILTAIGVDGNNQVLPLAFAFVESENTDSWYWFLKLVKTKVVGMRPNWILHESKEKWAKVYDTGGARYGIMTTNLAEVYNWVMRGVRGLPLVGIVEFILHGTCRYFRDQFQAVLPSMPNNSILFGAFVQKKLEELRKKAMKHRALVQGTQQLMFEILCQDKAGRGIYRKSEAGPKLLHRPCTHVIAAAAECGIPDAVYVSQYFTGEFTETNDEVLNIPDPSKLRGKAGRRRTRRIRNDMDESEAGRVKRCSKCDEHGHTYKHCPKDKEKPSAAEAGLSGSAADGARPTEMARQDTPQLLDPAIDHRHRSHLTAVQGAQLGTIRARTCGELLTVHDSFVERLREAGLLPMCRLVEAAAGDADPARRWTVDRPETHTFHLPCGEVAPTLQDISYLLGLPLAGDAVGPVTTAVDWQDDLTARFALVQRAPHLPLEPLAHHRNTGPTKRWLLQFTLQAEADEYSYSRCLEAYLLWLFGWVMFCGGHGHSVDKGLVHYARSIADAAVGVVPQWSWGSALLAALYRALCESCTKTDPSATFGGCPLFLSIWAAERIAIGRPEVDQHAYEESLYEERPEVDYPTMGTLWCCRQRRWAHVQVRRSYPEFVMEFDRLLPTDVVWXPTVPRLPRLVCRWFGFRQPFPVPFPTTVPAAVHRYSRKGQQSAGDWPAKLATFVEDWLLATEEVVDHEGEPHTEESYQAYLRWYQPRTRTRVTFAPLEQQPHVASTRDLYARHRDQDFARAXDVARADAAVQRPPVPTGPRPAAHVPRPTPPPHGGFRLLLCPPQAAHFSQAAGSVSQAAVSTSHSAQFWQYTGTSSQAAGTSSQGPPLDHAGTSSDCLLPSTFLFDITDFDFASGSTEDVIGPSQLGGAPPVQTQDQA

SEQ ID NO: 183756 - protein, 158 aa, Oryza sativa
  Clone ID: PAT_MRT4530_80816C.1.pep
VSDGNEIGAPSESAPCPENFPSNGSEWVELLVNEMTTASNMDDAKSRATRVLEAFEKAVVSHVNAQGPHDFQKENAVLKGQMESLTRENTILKRAFAIQHERQDYDAKNQELQDEKQRIAEFQEQVRNLELNNYRLSMLLRQAQQGSSIPGRFNPDVF

SEQ ID NO: 183757 - protein, 532 aa, Oryza sativa
  Clone ID: PAT_MRT4530_80817C.1.pep
MAAIYLLIAALIASSHALAAHGAGGGVPLAAAAPLPFPGDLAASGKLRTDPNATVPASMDFGNITAALPAAVLFPGSPGDVAELLRAAYAAPGRPFTVSFRGRGHSTMGQALAAGGVVVHMQSMGGGGAPRINVSADGAYVDAGGEQLWVDVLRAALARGVAPRSWTDYLHLTVGGTLSNAGVSGQTYRHGPQISNVLELDVITGHGGTEPRATGENSDLFDAVLGGLGQFGVITRARVAVEPAPARARWVRLVYADFAAFSADQERLVAARPDGSHGPWSYVEGAVYLAGRGLAVALKSSGGFFSDADAARVVALAAARNATAVYSIEATLNYAANATPSSVDAAVAAALGDLHFEEGFSFSRDVTYEEFLDRVYGEEEALEKAGLWRVPHPWLNLFVPGSRIADFDRGVFKGILQTATDIAGPLIIYPVNKSKWDAAMSAVTPEGEEEVFYVVSLLFSAVANDVAALEAQNRRILRFCDLAGIGYKAYLAHYDSRGDWVRHFGAKWDRFVQRKDKYDPKKLLSPGQDIFN

SEQ ID NO: 183758 - protein, 1406 aa, Oryza sativa
  Clone ID: PAT_MRT4530_80818C.1.pep
MSNKQIFQVYHGPGNVRYGPTGVDLSDFIVSERGIDRSAERSVPSIKGWLMKGLRVDPQTSDITINVIVSWATEGFYWELMPVQNSRVWRWYLENALQRGWPLALVPFVHPKDPGVQMNMDDGEGPSAEVNETSVEEVNAREDGGVVAPVGIQPGGVADEGETVGAIVDEMEREDSDNERVEEGDSSDDETDINPAEWAKDSVRWEYKENEVIQGAIYSRAEDMKEAKYHRNITCAFVASEMYAHVIDNLTYEPRSIIRHIEETYKYTISYAKAWRAKQKIIEMRFGTYEASYDNLPRLLGVIEERNPGSSYEVKKFPSIEHPSKSVLQRAFLALHACKMAFVNCRPVLCIDGTFLTGKYRGQILTAIGVDGNNQVLPLAFAFVESENTDSWYWFLKLVKTKVVAKCSDQRAAAPSTAVADPPQALGPLPTDSPTLVRKTGLEIRKFSQWILHEPKEKWAKAYDTGGARYGIMTTNLAEVYNWVMRGVRGLPLVGIVEFILHGTCRYFRDRFQAVLPSMPNNSILFGAFMQKKLEELRKKAMKHRAVVQGTQQHRFEILCQDKAGRGIYRKRVKQECVLKADGTCHCSCAKPKLLHRPCTHVIAAAAECGIPDAVYVSQYFSKQVIYHTWSGEIYGFGIAGEFTETNDEVLNIPDPSKLRGKAGRRRTRRIRNDMDESEAGRVKRCSKCDEHGHTYKHCPKDKEKPSAAEAGLSESAADGARLTEMARQDTPQLLDPAIDHRHRSHLTAVQGAQLGTFRARTCGELLTVHDSFVERLREAGLLPMCRLVEAAAGDADPARRWTVDRSLLAALVDRWRPEMHTFHLPCGEVEQLQEEADEYSYSRCLEAYLLWLFGWVMFCGGHGHAVDKGLVHYARSIADAAVGEVPQWSWGSALLAALYRALCESCTKTDPSATFGGCPLFLSIWAAERIAIGRPEVDQHAYEESLYEERPEVDYPTMGTLWCRRQRRWAHVQVRRSYPEFVMEFDRLLPTDVVWEPYSAAATQARAPLGLSTLCTRDQAYWMTTVPMVFDICVKPHAPFRVMRQFGFRQPFPVPFPTTVPAAVHRYSRKGQHSASDWPAKLATFVEDWLLATEEVVDHEGEPHTEESYQAYLCWYQPRTRTRVTFAPLEQQPHVASTRDLYARHRDQDFARAVDDINRVVIDGSTTIQRLGAGIPVPVEEHLTTYTRMVESMRSILRVLTCRADDVARADAAVQRPPVPTGPRPAAHVPRPTPPPHGGFRAPFSTPPSSARPSVVPPTGFAQFAMTQAAHFSQAAGSASQAAVSTSHSAQFWQYTGTSSQAAGTSSQGPPLDHAGTSSDRLLPSTLLFDITDFDFASGSTEDVIGPSQLGGAPPVQTQDQAQATPPQDTRATRAVPPDRFTYSQDHVRAQARRTKRGRGAGQGQ

SEQ ID NO: 183759 - protein, 1447 aa, Oryza sativa
  unsure (1)..(1447): unsure at all Xaa locations
  Clone ID: PAT_MRT4530_80819C.1.pep
MSNKQIFQVYHGPGNVRYGPTGVDLSDFIVSERGIDRPAERSVPSIKGWLMRGLRVDPQTSDITINVIVSRATEGFYWELMPVQNSRVWRWYLENALQRGWPLALVPFVHPKDLGVQMNMDDGEGPSAEVNETSVEEVNAREDGGVVAPVGIQPGGVADEGETVGAIVDEMEREDSDNERVEEGDSSDDETDINPAEWASEDFSGLIVSEEDSVRWEYKENEVIQGAIYSRAEDMKEAVKHFAVSLHREFRVAKSNRSQYEVQCVKEKDGCPWRVHAYKGKWKDYWTVSVVTKHICFLPGVQKYHRNITCAFVASEMYAHVIDNLTYELRSIIRHIEESYKYTISYAKAWRAKQKIIEMRFRTYEASYDNLPRLLGVIEERNPGSSYELKKFPSIEHPIKSVLQKAFLALHACKMAFVNCRPVLCIDGTFLTGKYQGQILTAIGVDGNNQVLPLAFAFVESENTDSWYWFLKLVKTKVVGIRPNVCLIHDRHAGILRAIEELQFGSMERGYPGVWEDVQSRWCMRHMGANFFKQFKNKELMNMFKRLCNQNQEKKFNELWKRLDELTAKCSDQRAAAPSTAVADPPQALGPLPTDSPTLVRRTGLEIRKFSQWILHEPKEKWAKAYDTGGARYGIMTTNLAEVYNWVMRGVRGLPLVGIVEFILHGTCNILFGAFMQKKLEELRKKAMKHRALVQGTQQHRFEILCQDKAGRGIYRKRVKQEYVLKDDGTCHCSCAKPKLLHRPCTHVIAAAAECGIPDTVYVSQYFSKQAIYHTWSGEIYGFGIAGEFTETNDEVLNIPDPSKLRGKAGRRRTRRIRNDMDESEAGRLREAGLLPMCRLVEAAAGDADPARRWTVDRSLVAALVDRWRPETHTFHLPCGEVAPTLQDVSYLLGLPLAGDAVGPVTTAVDWQDDLTARFALVQRAPHLPLEPLAHHRNTGPTKRWLLQFTVEQLQAEADEYSYSRCLEAYLLWLFGWVMFCGGHGHAVDKGLVHYARSIADAAVGETDPSATFGGCPLFLSIWAAERIAIGRPEVDQHAYEESLYEERPEVDYPTMGTLWCRRQRRWAHVQVRRSYPEFVMEFDRLLTTDVVWXPTVPRLPRLVRRWFGFRQPFPVPFPTTVPAAVHRYSRKGQQSAGDWPAKLATFVEDWLLATEEVVDHEGEPHTEESYQAYLRWYQPRTRTRVTFAPLEQQPHVASTRDLYARHRDQDFARVVDDINRVVVDSSTTIQRLDAGIPVPVEEHLTTYTRMVESMRSIRRVLTCRADDVARADAAVQRPPVPTGPRPAAHVPRPTPPPHGGFRAPFSTPPSSASPSVVPPTGFAQFAMTQAAHFSQAAGSASQAAGTSSQGPPLDHAGTSSDPFLSSTVLFDITDFDFASGSTEDVIGPSQLGGAPPVQTQDQAQATPPQDTRATRAVPPDRFTYSQDHVRAQARRTKRGRGAGQGQ

SEQ ID NO: 183760 - protein, 163 aa, Oryza sativa
  Clone ID: PAT_MRT4530_8081C.1.pep
MTLYTTVATPAEAAGVPSSQHPVFAGHGPIGHHSGGWLRVLTRPGALQPGAAAVVDERFHGKKEFGMPLAGKLQGVLVTGLEDDDDSRIVAVTALFSGDGEEDSIRFFGVHRDDQEESHIAVVGGTGRYDGATGFAVVRAADAHKAGRNVSSNSVLSFRVHLK

SEQ ID NO: 183761 - protein, 127 aa, Oryza sativa
  Clone ID: PAT_MRT4530_80820C.1.pep
NLSFGRNGLNPRASGSVQFWGHEEPLFARDPGKCPPGVDFHDWGPFAFMGRPNFPRIWLSPAPLFYRGGFFHLVCFQKRSAPSGYPPPLLLKCSFFFQQVTCLPSSFMYLETVAPPFLSHGNQIFPP

SEQ ID NO: 183762 - protein, 77 aa, Oryza sativa
  unsure (1)..(77): unsure at all Xaa locations
  Clone ID: PAT_MRT4530_80821C.1.pep
LXPKKVRKTKHXXCXWKFTMDVXQCLTXXAFDXRXIXGXGXGXXLXFHXVSHXGISHIHXDVDKSRHIYLSRFIKSI

SEQ ID NO: 183763 - protein, 154 aa, Oryza sativa
  unsure (1)..(154): unsure at all Xaa locations
  Clone ID: PAT_MRT4530_80822C.1.pep
SLSTSHGRPGSASPIRSSSWALHRHHAREGDGVRWPRWWCTTPRRRRPPRRRSPPRRRPRLPLCLLPLHPLPRRSPLPPRPFPRRPPPCLRPSRHPPSPPRHPEASLTAAIAAPLLQPRDPDTASAGGVGEASPAPPAPPRHPLPPXPSPPPPT

SEQ ID NO: 183764 - protein, 95 aa, Oryza sativa
  unsure (1)..(95): unsure at all Xaa locations
  Clone ID: PAT_MRT4530_80823C.1.pep
LANIDGHVGRRGLSGRHGPTDAPGRAVPAHSLYFVCRAXPAGPSCRAGPTVPGQPSVPVGRPRHGSVAEPCLGRAKKXCRGPGLRASGLMAIYTC

SEQ ID NO: 183765 - protein, 111 aa, Oryza sativa
  unsure (1)..(111): unsure at all Xaa locations
  Clone ID: PAT_MRT4530_80824C.1.pep
MHRKNFNVSHLFFXCSFAVQCWTFLHIRWHTTREFMNMVTTAKRDFAHSFFIEVIAIAFXNIWKRRNDLIFRNDLAIFQXWKFCFREDFILLLNRIKVHERPLWKSWLDNL

SEQ ID NO: 183766 - protein, 83 aa, Oryza sativa
  unsure (1)..(83): unsure at all Xaa locations
  Clone ID: PAT_MRT4530_80825C.1.pep
GRGXXRLGHSGAYFXMQELFYXYLXPTISVKLRVCLVPRQNWKFEESWNDVTEKLEVCVCRKIRCDVLRVQTLQLNTASFLCY

SEQ ID NO: 183767 - protein, 249 aa, Oryza sativa
  unsure (1)..(249): unsure at all Xaa locations
  Clone ID: PAT_MRT4530_80826C.1.pep
MARGSAPLDGSVLPPSRIVSERQAGLPRRFMPESATGREMVALGEGRPAPRYPGRSVFFLSFAMAGLVPPFSSFFMDVLEHYDLQMAHLTPNAVMTLAIFAHLCEMFIGVRPSLRLFRWFFTVQPVSPPSVVGGCYFQPRGPVLSRYIPCVLRKKWDDWKSDWFYTPLADEARLRLPSQPPAQASSWRVPGLTGAMVYDDYLRRRIAPLQRRARGAWEYTGSKDYMRTHQGGRWDWXPEDFKMVVQRVL

SEQ ID NO: 183768 - protein, 915 aa, Oryza sativa
  unsure (1)..(915): unsure at all Xaa locations
  Clone ID: PAT_MRT4530_80827C.1.pep
MDTFVKKDREILDYSTPDRIMSNGHLNFVYPSILQNNSDLLAKMRRNXYHQEQAKEPISCFXGISIEIPFMGVLRRNTIVAYFDNPRYKNDKKDLRIVKFRYRTLEDEYRNREKDSENKYRSPENEYRTREDKYGTLEEDSEDEHGTLEEDSEEDSEDEYGNPEEDSVLKKGVLIEHRGTKEFSLKYXQKEVDRFFFILQELHILPRSSSLKVLDNSIIGVDTQLTKNTRSRLGGLVRVKRKKSHTELKIFSGDIHFPEEADKILGGSLIPLEREKKXDSKESKKRENWVYVQWKKILKSKEKYFVLVRPXVAYEMNEGRNLATLFPQDLLQEEGNLQLRLVNFISHENSKLTQRIYHTNSQFVRTCLVLNWEQEEKEEARASLVEIRANGLIRDFLRIGLIKSTISYTRKRYDSRSAGLILHNRLDRTNTNSFYSKAKIQSLSQHQEAIGTLLNRNKEYQSLMVLSASNCSRIGFFKNSKNPNGVKESNPRIPIPKFLGLFRNFSGLLGTIAPSISNFSSSYYLLTYNQILLKKHLLLDNLKQNFKVLQGLKHSLINENQRTSNFDSNIMLDPFQLNWHFLPHDSWEETSAKIHLGQFICENVCLFKSHIKKSGQIFIVNIDSFVIRAAKPYLATTGATVHGHYGEILYKGDRLVTFIYEKARSSDITQGLPKVEQIFEARSIDSLSPNLERRIEDWNERIPRILGGPWGFLIGAELTIAQSRISLVNKIQKVYRSQGVQIHNRHIEIIIRQVTSKVRVSEDGMSNVFSPGELIGLLRAERAGRALDESIYYRAILLGITRVSLNTQSFISEASFQETARVLAKAALRGRIDWLKGLKENVVLGGIIPVGTGFQKFVHRYPQDKNLYFEIQKKKXLFASEMRDILFLHTELVSSDSDVTNNFYETSESPFTPFI

SEQ ID NO: 183769 - protein, 485 aa, Oryza sativa
  unsure (1)..(485): unsure at all Xaa locations
  Clone ID: PAT_MRT4530_80828C.1.pep
VTHIDKDGVIWKLFLTDNSKWIRNRKFRLGLRVAPGSFEGIRVREAKTEAFTVKDHRGELYKKHYPPALKDDVWRLEKIGKDGAFHKKLNASGIYTVEDFLQLLVKDQQRLRSILGSGMSNKMWESLVEHAKTCVLSGKHYVYYAIDSRNVGAIFNNIYEFTGLIADDQFISAENLTDNQKIYADGLVKKAYEDWMHVVEYDGKALLSFKQKKKSVTTRSDTAAAATNSPVSYGSSNTHKQLSQPAKAGQTSTGTTSEADGSTSAYNGNQAGRYAVNSQSIPANVTTQYERSSLTPESQFNGCXTSLHNIERSSLTPESQFNGSALPNQVSRGSNILALGTTXLKPFSESSQTSEALGGVDDYLMEEIRMRSHEILENEEMQQMLRILSMGGMQSQRDIGDTKRCNRCSRILSMGGASTNLTEDGFAFPNYMPSTPPNFNFGDDRARPPGKAVVGWLKIKAAMRWGIFVRKKAAERRAQLVELED

SEQ ID NO: 183770 - protein, 280 aa, Oryza sativa
  Clone ID: PAT_MRT4530_80829C.1.pep
MEQSAATAFTKCVVGKLLEVLDTRYKMLRDLSHESASMQNDLLLLAAFMDDQLRRSSSSPAAERPTAVLRAYTELMRELTHDMEDSIERFLHRVAPRDDHGGAGAPSWPRRAARWVATLRTRLRFAAEIRKLKTRLEDETKRLRNAVEAAAAAGGGGHSSATPALAAAAPRGGHVEPNPVGMEKPIEHLVQLLDEAGAGGGPQQLRVIAIVGFRGSGKTTLARAVYSRSGRQFRERAWVDASRWTDVGDLLADIVRQVCLGEYDVSESHEENLRNRLKNK

SEQ ID NO: 183771 - protein, 61 aa, Oryza sativa
  Clone ID: PAT_MRT4530_8082C.1.pep
METNLHSAFSATLKVLDLSPNPHLLGESSEWTIIQDKYIWLYYHLKMTEVHTSTELMSRME

SEQ ID NO: 183772 - protein, 1065 aa, Oryza sativa
  Clone ID: PAT_MRT4530_80830C.1.pep
MARGSALLDGSVLPPSRIVSERQAGLPRRFMPESATGREIVTLGEGRPVPCYPGRSVFFLPFAMAGLVPPFSSFFMDVLEFYDLQMAHLTPNAVMTLAIFAHLCEMFIGVRPSLRLFRWFFTVQSVSPPSVVGGCYFQPRGPVLNRYIPCVLRKKWDDWKSDWFYTPLADEARLRLPSQPPAQASSWRAPVDLGDGYDAVLDRLAGLRSLGLTGAMVYGDYLRRRIAPLQRRARGAWEYTGSEDCMRTHRGVKWDWVPEDFKVMIQRMLNLSSAEASLIPQGVLPLCSDPYRANILTIMQAVGASEERAPRGHDGSGGSRRGEQSTPGGGRASGPRDGGSGGSRPADARGKRKQEGTSSPSPPRGGGAARVSSRRPEGAAPTPQLERERKKKRLRKMGGTEPSRGNLISPPRWSFNRPPRSEIPSRPSRHSKSGQSEAEDPATTEARRRKSDRREAADRLREAEEAAREAARARQTEEAAREEAGLCQAEATTSSEATRETDRQEAVDRLREAEEAAQVAVRARQAEEAAREEARLRQAEATTTSEATRGEAAGASLGPTPSCDAQDKPGPGNIPESGTSIGGPSRAASSSRRLFPTPSVAPLSAEPLLQALAVANTTVLDGLNAQVEALQAERAELDAAWARVEEGRRSVEAMVEVGRKAHRRHVSELEARRKVLGEIAKEVEEERGAALIATTVMNEAQDTLRLQYGSWEVELGKKLDAAQGVLDAAAARERRAAETEVASRRREEALEARAMALEERACAVERDLADREAAVAIREATLTAHEAACAEEESALRLREDALTERERALKEAEAAAQRLADSLSLREAVREEQARRNLEGARAERAALNQRAAELEAREREMDARARSGGAAAGESDLTARLAATEHTIADLQGALDSSAGEVEALRLAGEVGPGMLRDAVSRLDRAGRQAGLWGGRTAKYAANQGGLAQRLSEIAGTLQRLPEELERTIKSSSRDLARGAVELVLASYQARDPDFSPWTALDEFPPWTEDGARAQVRDAADHIVHNFEGSAPRLAFALNSDEEDDDGGVGDNGDEAGDPGASE

SEQ ID NO: 183773 - protein, 564 aa, Oryza sativa
  Clone ID: PAT_MRT4530_80831C.1.pep
MADDEDEYRTREEESEDEYGSPENKYRHREDKYGTLEEDSKDEHGTLEEDSENEYGNPEEDSVLKKGVLIKHRGTKEFSLKYQKEVDRFFFILQELHILPRSSSLKVLDNSIIGVDTQLTKNTRSRLGGLVRVKRKKSHAHPAFDYSGPEDTTRVSPRGLDSDTVGRRVGQIMISVPTKAGDIPIALCDKDVTERAAVINALPLTDVIGPLMDHQAAASLKESVAKEPSNVVAATTSGSNIPKRERKFSSVLGTRRKAPTSADSNTSPPPQRRQRLVTIGEKVAWEKVAQGGADAASSASPAATSSGVLVTAKDQEAAPSGPAVSPVPTRGPSTDALTWGEVQAEMERILQAGAHGVGREIEEARAAALSANQCADQLARDLAEAREDLLKMRELVAGNEMQRRGLKHRMSELEGHMINICGSLYVDVEDVQQRGQPDMPVIVPALTLEPFVLREETSQSLSAEASVAMTSLDRRMRYWKTKLEVAKLEKTMVEVKKDQAVEALRGREVWFNSYLKSCCMAMARVCKELRVPRGDPEESAAGYISWLNGACAQLEGIASASTMS

SEQ ID NO: 183774 - protein, 166 aa, Oryza sativa
  Clone ID: PAT_MRT4530_80832C.1.pep
TTSAYNGNQAGRYAGNSQSIPANVTTQYERSSLTPESQFNGSALQNQVSRGSNILALGPPQQQHQQNFEFSALGGQSMQPTGLNPFDDWSQPQENRSGVDDYLMEEIRMRSHEILENEEMQQMLRILSMGGASTNLTEDGFAFPNYMPSTAPNFNCGDDRARPPGK

SEQ ID NO: 183775 - protein, 901 aa, Oryza sativa
  Clone ID: PAT_MRT4530_80833C.1.pep
MARGSAPLDGSVLPPSRIVSERQAGLPRRFMPESATGREVVALGEGRPAPHYPGRSVFFLSFAMAGLVPPFSSFFMDVLELYDLQMAHLTPNAVMTLAIFAHLCEMFIGVRPSLRLFRWFFTVQPVSPPSVVGGCYFQPRGPVLNRYIPCVLRKKWDDWKSDWFYTPLADETRLRLPSQPPAQASSWRAPVDLGDGYDAVLDRLAGLRSQGLTRAMVYGDYLHRQIAPLQRRARGAWEYTGSEDYMRTHQGGRWDWAPEDFKMVVQRVLNLSSVEASLIPQGVLPLCSDPDRANILTIIEIPSRSSRHSKSGQSEAEETATAEARRREADRREAADRLREAEEAAQEAVRVRQAEEAAREEAKLRRAEESVREAEVARARQAACQTPDPTPPEATMTSEATHDEVAGAPLGPDPSGDVWDEPASGVAPGSGTSIGGPSRAAPIPRRLSPLPSAAPLNAEPLLQALAAANTTVLDELGAQMEVLLAERTELDAAWARVEEGRRSVEAMVEAGRKAHRRHASELEARRRELAEIAREVEEERETALIATAVLNEARDDLRLQYGSRAAELEKKLDAARGVLDAAAARERRAAENEAVSRRREEALEARAKALEERARARERDLADREAAVAIREATLAAHEAACAEEESTLSLSEDALTERERALGEAESAAHRLSDSLSLRRGSAGGAGAPELEARVKELDARARSGGAAAGDGDLAARLAAAEHTIAELQGALDSSAGEVEALRLAGEVGPGMLRDAVSRIDRAGRQAGLWGGRTAKYAANQGGLAQRLSEMAGTLQRLPEELEETIKSSSRDLARGAVELVLASYQARDPDFSPWAALDEFPPGTEDDARAQVRDAADHIVHSFEGTAPRLAFALDSDEEGGDGGAGDSGDEAGDPGASE

SEQ ID NO: 183776 - protein, 74 aa, Oryza sativa
  Clone ID: PAT_MRT4530_80834C.1.pep
MVEFDPSGRGVGVGAHRGVEEKRVGGGGGLGIGGAAARLRWLGLGWLAGWLRCCAALRVGSPAPALLPALDHTS

SEQ ID NO: 183777 - protein, 1646 aa, Oryza sativa
  Clone ID: PAT_MRT4530_80835C.1.pep
MGSVSGIDDFVFPPGQAFRFGSLDFITNNFGKISFLDSDSNQSGKNQVSAPFGIPNSAKIYPKYISIESASNHSDEIPSSPTPPDQDDGAYPPILMKLPDDLAAVFTTTASSPRRPRRKSALTPIPPSSREVGVILQPLGTVSTDQLEGYFSSPGVDSRPTEIVEYDEFGYRHDNHDLDDFDESLEDNYTPLYFGVFMADNETEEQRQAREAEARRVQQEAERRRLEEERQVQEQERLRCEQQERERAAKEAEDRQQRALDAWRRAQDLIGQQNVEGTPVFRTPQQNAIAAITLLDTLLKENELNQSDHVVNILNQTKTMIAATIPVNSESVRTPTGSRVPHLRSQDYHQPSLSIAGAGSNRRSRGHNERSVHSPPERHRERRVERPRSPPRRRPVDLRNTIIQRRAARGHRHSPDRCDDDVDGVAAFTNDLRRVDWPASFKLTRIEKYDGTTNPESWLTVYGLAIRAAGGDSKAMANYLPVALADSARSWLHGLPRGTIGSWAELRDHFIANFQGTFERPGTQFDLYNVIQKSGESLRDYIRRFSEQRNKISDITDDVIIAAFTKGIRHEEVVGKFGRKPPKTVKLMFEKANEYAKAKDPIIASKQSGPSWKPKKDAPTTGGGGSNNHKDHKRKPEELVATTTHSSRHRSCVNMYDKIMNSQCPHHPNSNHTAKDCFVYKQFAEQYAKNTRKNSDGEQSTSKKKDDDDARQPDTPQYLRWLETTIKFDRSDHPDRVVHPGRYPLVLDPVVRNVKLRRTLIDGGSVLNILFAKILDDMQIPRTELKPSNAPFHGVIPGLSATPLGQITLPVTFGTRENFRMENICFEVADFETAYHAILGRPALAKFMAVPHYTYMMIKKPGPRGVLSLRSNIKQAVTCDKESCEMAQTREIATAIEDIRLAATTASEGEESALITFLQNNKDIFAWKPSDMPSIPREVIEHSLHVKEDAKPIKQRLRRFAQDRKDAIKEELTKLLAAGFIKEVLHPDWLANPVLVRKKTGQWRMCVDYTDLNKSCPKYPFGLPRIDQVVDSTASCELLSFLDCYSGYHQIRLKESDCLKTSFITPFGAYCYITMSFGLKNAGATYQRMIQRCFSTQIGRNVEAYVDDVVVKTKQKGDLISDLEETFASIRAFRMILKPEKCTFGVPSGKLLGFMMSHRVIQANPEKGMPFFKLLKKADNFQWGPEAQKAFEDFKKLLTTPPVLASPHPQEPLLLYVSATSQVVSTVLVVEREENGHVQKVQRPIYFVSEVLADSKTRYPQVQKLLYGVLITVRKLSHYFQSHSVTVVTSFPLGDILHNREANGRIAKWALELMSLDISFKPRTSIKSQALADFVAEWTECKEDTPEEKIEHWTMHFDGSNRLSGTGAGVVLISLTGERLCYVLWIHFSASHNVAEYEALLHGLRIAISLGIRRLIVRGDSQLVVNQVMKEWSCLDDNMMAYRQEVRKLEDKFDRLELTHVLRHNNEAADRLANFGSKREAAPSDVFVEHLYEPTVPKKETVEAADTQDIAMVEANKREPLIRFLTSQELPQDKDEAERISRRSRLYIIHEAELYKKSPSGILQRYVSLEEGRQLLKDIHSGICGNHAAARTIVGKAYRQGFFWPTAVSDADKIVRTCEGCQFFARQIHLPAQELQTILLSWPFAV

SEQ ID NO: 183778 - protein, 1631 aa, Oryza sativa
  Clone ID: PAT_MRT4530_80836C.1.pep
MGFVSGIDDFAFPPGQAFRFGSLNFITNDFGKISLLDSDSNQSGIDQVPVPFGIPNSAEAYPKIISPESASNHSDEIQSTLPRPDQDDESYPSILMKLPDDLAAVFTVKTSPTRRSRRAQASAPIRSRSREVGVILQPLGTVSTEELDGYLSSPGISSRPTEILDYDDFGYHYDHGDLDNFDDNYEDNYTPLFFGVFMADNETEEQRQAREADQDRARQEAERRRLEEERQRQERERLQPPAARGHHSPDRYDDNVDGVAAFTSDLRRVDWPAGFKPTGIEKYDGTTNPESWLTVYGLAIRAAGGDSKAMTNYLPVALADSARSWLHGLPRGTIGSWAELRDHFIANFQGTFERPGTHFDLYNIVQKSGESLRDYIRRFSEQRNKISDITDDVIIAAFTKGIRHEDLVGKFGHKPPKTVKQMFEKANEYAKAEDAITASKQSGTTWKPKKDTPTARGSGRNNHKDRKRKPEELVATTSPSSRQRSRVNTFDKIMNSQCPHHPNSNHVAKDCFVYKQFAEQYVKNARLSATPLGQITLPVTFGTRENFRTENVCFKVADFETAYRAIHGRPALAKFMAVPHYTYMMMKMPGPRGVISLRSDIKQAVTCDKESCEMAQTHETTLAREEIRLAATTASEGEVPATKLTKTEESDAKTKKIPLDPSDPDKTANNKDIFAWKPSDMPGIPKEVIEHSLHVKEDAKPIKQRLRRFAQDRKDAIKEELTKLLAAGFIKEVLHPDWLANPVLVRKKTGQWRMCVDYTDLNKSCPKDPFGLPRIDQIGRNVEAYVDDVVVKTKQKDDLIADLEETFRSIRAFKMKLNPEKCIFGVPSGKLLGFMVSQRGIQANPEKINAILNMKPPSSEKDVQKLTGSMAALSRFVSRLGERGMPFFKLLKKTDNFQWGPEAQKAFEDFKKLLTTPPVLASPHPQEPLLLYVSATSQVVSTVLVVEREEEGHIQNVQRPIYFVSEVLVDSKTRYPQVQKLLYGVLITVRKLSHYFQSHSVTVVTSFPLGDILHNREANGRIAKWALELMSLDISFKPRTSIKSQALADFLTEWTECQEDMPEEKMEHWTMHFDGSKRLTGTGAGVVLISPTGERLSYVLWIHFSASHNVAEYEALLHGLRIAISLGIRRLIVRGDSQLVVNQVMKEWSCLDDNMTAYRQEVRRLEDKFDGLELTHVLRHNNEAADRLANFGSKREAAPSDVFVEHLFEPTVPRKETLEAMDTQGVSMIETDWREPLIKFFTKQELPQDKNEAEMISRCSRLYVIHKTELYKKSPSGILQRCVSLEEGRQLLKDIHSGICGNHAAARTIVGKAYRQGFFWPTAVSDADKIVRTCEAQELQTIPLSWPFAVWGLDMVGPFKRAVGGYTHLFVAIDKFYKWIEAKQVITITADKARDFFINIVHQFGVPNRIITDNGTQFTGGAFRYFCEDFGIKICYASVAHPMSNGQVECANGMILQGIKARVFDRLRPYAGKWVDQLPSVLWSLRTTPSRATGQSPFFLVYGAEAMLPSEVEFESLRFRNFNEEGYEEGRVDDINRLEEAREAALIQSTRYLQGLRRYHNRNVRSRAFLVGDLVLRKIQTTQDRHKLSPLWEGPFIIAEVTQPGSYRLKREDGTLINNSWNIEHLRRFYA

SEQ ID NO: 183779 - protein, 337 aa, Oryza sativa
  unsure (1)..(337): unsure at all Xaa locations
  Clone ID: PAT_MRT4530_80837C.1.pep
MSFFFRAASRPARPSPQELVRSIKESLLALDTRTGAKALEDVEKNVSTLRQTLSGDGEVEPNQEQVLQIALEICKEDVLSLFVQNMPSLGWEGRKDLAHCWSILLRQKVDEAYCCVQYIENHFDLLDFLVVCYKNLEVALNCGNMLRECIKYPTLAKYILESSSFELFFQYVELSNFDIASDALNTFKDLLTKHEAAVSEFLCSHYEQFFELYTRLLTSTNYVTRRQSVKFLSEFLLEAPNAQIMKRYIVEVSYLNIMIGLLKFSXKNIRICAFHIFKVFVANPNKPRDIIQVLVDNHRELLKLLGNLPTSKGEDEQLEEERDLIIKEIEKLVHSSV

SEQ ID NO: 183780 - protein, 1339 aa, Oryza sativa
  unsure (1)..(1339): unsure at all Xaa locations
  Clone ID: PAT_MRT4530_80838C.1.pep
MRITTRPSSSAYSWLTTKRRNNAKPEKRTKIAHGKKLNIADWRKSDSDKSENDYSVSSKIASGLQRRLKIDDNTPWNLGAERESSLGNKTSMEQRGLAKPTGIEKYDGTTNPESWLTVYRLAIRAAGVDSKAMANYLPVALADSARSWLHGLPRGMIGLWAELRDHFIANFQGTFERPGTQFDLYNISDITDDVIIAAFTKGIRHEDLVGKFGRKPPSTVKQMFEKANEYAKAEDAITASKQSGTTWKPKKDTPTAGGSGSNNHKDRKRKPEELVATTSPSSRQRPRVNTFDKIMNSQCPHHPNSNHVAKDCFVYKQFAEQYVKNARKPADGDQGTSKKKDDEDDAPTGFQDHRKELNHIFGGPLAYESKKKQKLTEREINAVQPNTPQYLRWSETAIKFDRSDHPDRVVHPGRYPLVLDPVVRNVKLRRTLIDGGSALNILFAKTLDDMQIPRTELKPSNAPFHGVIPGLSATPLGQITLPVTFGTRENFCTENVCFEVADFETAYHAILGRPALAKFMAVPHYTYMMMKMPGPRGVISLRSDIKQAVTCDKESCEMAQTHETTLAREEIRLAATTASDGEVPATKLTKTEESDAKTKKIPLDPSDLDKIAIIGAELDYVIEHSLHVKEDAKPIKQRLRRFAQDRKDAIKEELTKLLAAGFIKEVLHPDWLANPVLVRKKTGQWRMCVNYTDLNKSCPKDPFGLPRIDQVVDSTAGCELLSFLDCYSGYHQIRLKESDCLKTSFITPFGAYCYITMPFGLKNAGATFQRMIQRCFSTQIGRNVEAYVDDVVVKTKRKDDLIADLEETFTSIRAFKMKLNPEKCIFGVPSGKLLGFMVSQRGIQANPDKINAILNMKPPSSQKDVQKLTGCMAALSRFVSRLGERGMPFFKVLKKTDNFQWVPEAQKAFEDFKKLLTTPPVLASPHPQEPLLLYVSATSQVVSTVLVVEREEEGHIQKVQRPIYFVSEVLANSKTSAVYLWRKGELLKDIHSXVFVVIMLLHGLSSAKLTDKVFSGLQLCPMRTRLCGHAKVVNFLPDKLICQPKSCKPSRCPGRLRSGGLTWSAHLKGXVGGYTHLFVAIDKFSKWIEAKPVITITADKARDFFINIVHRFGVPNRIITDNGTQFTGGAFKDFCEDFGIKICYASVAHPMSNGQVERANGMILQGIKARVFDRLRPYAGKWVDQLPSVLWSLRTTPSRATSQSPFFLVYGAEAMLPSEVEFESLRFRNFNEEGYEEGRVDDINRLEEAREAALIQSTRYLQGLRRYHNRNVRSRAFLVGDLVLRKIQTTHDRHKLSPLWEGPFIIAKVTRPGSYRLKRDDDTLINNSWNIEHLRRFYA

SEQ ID NO: 183781 - protein, 96 aa, Oryza sativa
  unsure (1)..(96): unsure at all Xaa locations
  Clone ID: PAT_MRT4530_80839C.1.pep
EILQKLVILSKFWYCQNLIRFILDTIQTCPLSFLDNGCKQDYVVEQIPGGVYQTNKALXLHHKISXSXIRYDTXLNLFKXIXXGXXTXXILTXFGM

SEQ ID NO: 183782 - protein, 233 aa, Oryza sativa
  unsure (1)..(233): unsure at all Xaa locations
  Clone ID: PAT_MRT4530_8083C.1.pep
MLTVTDDASNTSSASASTQRLAVHESHHNPNVTTLSLVPCTYRAALGIDHGRGVHCVASQLHLGIGSLSQRPGIDFDETFIPVVKPSTVRTVLSLTVSRHCPLVCRLNESLYGPKEAPRVWNNRFASYLLTLGFNHFLGISVTQRGTGLLLSQRQYNIEILERAGMSDFTQPDISYVVXQVCLHMHDPRDSHLAALKRILRYVRGTLDYGLHVQHSSTANLVAYSDADWAGCP

SEQ ID NO: 183783 - protein, 1080 aa, Oryza sativa
  Clone ID: PAT_MRT4530_80840C.1.pep
MARGSALLDGSVLPPSRIVSERQAGLPRRFMPESATGREIVMLGEGRPAPDYPGRSVFFLPFAMAGLVPPFSSFFMDVLEFYDLQMAHLTPNAVMTLAIFAHLCEMFIGVRPSLRLFRWFFTVQSVSPPSVVGGCYFLPRGPVLNRYIPCVLRKKWDDWKSDWFYTPLADEAHLRLPSQPPVQASSWRAPVDLGDGYDAVLDRLAGLRSQGLTGAMVYGDYLRRRIAPLQRRARAAWEYIGPEDYMRTHQGVRWDWAPEDFKILIQRVLNLNSVEASLIPHGILPLCSDPDRVSILTIMTAVGASEEQAPKGHGGAGGSRRGDQSTPGGGRASGPRVGGSGSNRPTDARGKRKLGGTPPPSPPRGGGAARASSRRPEGAAPTSQPEGERKKKRLRKMGETEPSQGNLISPPRWSFNRPPRSDVPSRPSRHPKSGQSEAEDPAAAEERRRESDRREAADRLREAEEAAREAARVRQAEDTAREEAARARQAEEVTREETARARQAEAMASSEAVYDKTAGASLGPTPSGDAQATTSGAACDKAAGASPGPAPSGDAQATTSGAACDKAAGASPGPAPSGDAQDQTGPGDIPELSASSGGPSRVAFSPRRLFSSSSATPLSAEPLLQALAAANTEVLDGFSAQVEALRAERAELEAAWARVEEGRRSVDAMVEVGRKAHRRHISELEARKAALAEIAREVEEEREAALVATTAMIEAQDSLRLQHGSWEAELKKKLDAAQGVLDAAAAREQRATEAEAASRRREEALEARAMALEDHAGAVETSLADREAAAAIREATLAAHEAACAEEESALRLREDALAERERALEESEAATQRLADSLSLREAAQEEQARRNLECIRAERAALEQQAANLEAREKELDARKRSGGAATGESDLVARLAAAEHNVADMQRALDSSTGEAEALRLSGEIGPGMLWDAVSRLDRAGREAGLWKGQTISRSTNLEGLAPHLRRMAWAVQQLPEELEKTIKSSSRDLAQGAVELVLASYQVRDPGFSPWMALEEFPPGTEDDARAWVRDAANHIVQSFEGSAPRLAFAPSSDEEGDASGEDDGGDEASDPGALE

SEQ ID NO: 183784 - protein, 217 aa, Oryza sativa
  unsure (1)..(217): unsure at all Xaa locations
  Clone ID: PAT_MRT4530_80841C.1.pep
SQTRRHSPHITLELKKPRERFSASPSSSTSPPVVVTTTFAISVXESSASPGTQATSTTPWSTHRSAAASTIIVVRPFSFTSEKAAAPLSLPQPPLQNASRTPAGNIKNTENTSXFLHRRQSRIASAVIVDYRCLGEPLFDSLRIHHLLDLTTLVHACLKQLIVPFEPSSFTRGGAPSPSRSTSHRCRQDLDNPSSTHEPPPLTLAIGATPMSSNQEN

SEQ ID NO: 183785 - protein, 875 aa, Oryza sativa
  unsure (1)..(875): unsure at all Xaa locations
  Clone ID: PAT_MRT4530_80842C.1.pep
MARGSAPLDGSVLPPSRIVSERQAGLPRRFMPESATGREVVALGEGRPAPHYPGRSVFFLSFAMAGLVPPFSSFFMDVLELYNLQMAHLTPNAVMTLAIFAHLCEMFIGVRPSLRLFRWFFTVQPVSPPSVVGGCYFQPRGPVLNRYIPCVLRKKWDDWKSNWFYTPLADEARLRLPNQPPAQASSWRAPVDLGDGYDAVLDRLAGLRSQGLTGAMVYGDYLRRRIAPLQRRARGAWEYTGXVGASGERTPRGHDGAGGSRRGEQSTLGGGRASGPRDGGPGGSRPADARGKRKQEDTPSPSPPRGGGAVRASSRRPEGAVPTSQPEGERKXKRLRKMGGTEPCRGNLISPPRCEIPSRPSRHSKSGRSEAEETATAEARRRGADRREAADRLREAEEAAQEAVRARQAEEAAWEEARLRRAEEFVRETEAARVRRAACQAPDPTPPEATTTSEAAHDEAAGTPLGPDPSGDAWGEPASGNAPESGTSIGGPSRAAPTPRRLSHLPSAAPLSAEPLLQALAAANTTVLDGLSAQMEVLQAERAEVDAAWARVEEGRRSVEAMVEAGRKAHHRHASELEARRRDLAEIAREVEEERETALIATAVFNAARDDLCLQYGSRAAELEKKLDASRQREEALEARATVLEERARALDTKERELAGREAAVAIREATLAAHEAACAEEESALRLREDELTERERALEEAEAAAQRREEQARLNLEGACAERAALDQRAAEFEARAKELDARARSGGAAAGNGDLAARLAAAEHTITELQGALDSSAREVEALRLAGEVGPGMLRDAVSRLDRAGRQAGLWGGRTAKYAANQGGLAQRLSEMAGTLQRLPEELEEAIKSSSRDLAXGGAVELVLASYQARDP

SEQ ID NO: 183786 - protein, 216 aa, Oryza sativa
  unsure (1)..(216): unsure at all Xaa locations
  Clone ID: PAT_MRT4530_80843C.1.pep
RERLRADRVITLELKKPRERSSASPSSSTSPLVVVTTTFAISVXESSASPGTQATPTTPWSMHRSAAASTIVVVRPFSTTSEQATAPSSSPQPPLQHASRTPAGDVKDLENASFLHRRRSRIASAVIIDYRCLGEPLFDSLRIHHLLDLTTLVHACLKQLIVPFEPSSFTRGGAPSPSRSTSHCCCLPCTHALSPQEPLPLTLAIGATPMSSNQEN

SEQ ID NO: 183787 - protein, 822 aa, Oryza sativa
  unsure (1)..(822): unsure at all Xaa locations
  Clone ID: PAT_MRT4530_80844C.1.pep
MARGSAPLDGSVLPPSRIVSERQAGLPRRFMPESATGREVVALGEGRPAPHYPGRSVFFLSFAMAGLVPPFSSFFMDVLELYNLQMAHLTPNAVMTLAIFAHLCEMFIGVRPSLRLFRWFFTVQPVSPPSVVGGCYFQPRGPVLNRYIPCVLRKKWDDWKSDWFYTPLADEARLRLPSQPPAQASSWRAPVDLGDGYDAVLDRLAGLRSQGLTGAMVYGDYLRRRIAPLQRXRSRRALPAIPSPAGLRPRRRRPRRPGGGELTGEKPQTASGKPKKLPRRPSGXRQAEEAAWEEARLRRAEESVRETEAARVRRAACQVPDPTPPEATTTSEAAHDEAAGAPLGPDPSGDAWGEPASGNAPESGTSIGGPSRAAPTPRRLSPLPSAAPLSAEPLLQALAAANTTVLDGLRAQMEVLQAERAEVDAAWARVEEGRRSVEAMVEAGRKAHRRHASELEARRRDLAEIAREVEDERETALIATAVFNAVRDDLCLLYGSQAAELEKKLDASRQREEALEARATVLEERARALDTKERELAGREAAVAIREATLAAHEAACAEEESALRLREDELTEQERALEEAEAAAQRREELARLNLEGARAERAALDQRAAEFEARAKELDARACSGGAAAGDGDLAARLAAAEHTITELQGALDSSAGEVEALRLAGEVGPGMLRDAVSRLDRAGRQVGLWGGRTMKYAANQGGLAQRLSEMAGTLQRLPEELEEAIKSSSRDLARGAVELALASYQARNPDFSPWAALEEFPPGTEDGARARVRDAADHIVHSFEGTAPRLAFALDSDEEGGDDGADDSDDEADGPGASE

SEQ ID NO: 183788 - protein, 605 aa, Oryza sativa
  Clone ID: PAT_MRT4530_80845C.1.pep
MAESGSSGLEEKLAGLSAGCGEEPQQLSKNAKKREEKRKKQEEERRLKEEEKKKKQYYENRLKALDSLKATGVNPYPHKFLANITVADYIEKYKSMNVGDKLVDVTECLAGRIMTKRAQSSKLLFYDLYGGGEKVQVFADARTSELEDNEFIKFHSTLKRGDIVGVCGYPGKSKRGELSIFPKKIVVLSPCLHMMPRQKSEGSAVPTPWAPGMGRNIEKYVLRDQETRYRQRYLDLMVNHEVRHIFKTRSKVVSFIRKFLDGLDFLEVETPMMNMIAGGAAARPFVTHHNELNMRLYMRIAPELYLKELVVGGLDRVYEIGKQFRNEGIDLTHNPEFTTCEFYMAYADYNDLIELTETMLSGMVKELTGGYKIKYHANGVEKPPIEIDFTPPFRKIDMIEELEAMAKLNIPKDLSSDEANKYLIDACAKYDVKCPPPQTTTRLLDKLVGHFLEETCVNPTFIINHPEIMSPLAKWHRSRPGLTERFELFVNKHEVCNAYTELNDPVVQRQRFEEQLKDRQSGDDEAMALDETFCTALEYGLPPTGGWGLGIDRLTMLLTDSQNIKLRYLKCSFDANSGSSSIPGYEASRLDMSTKQEPVRRIKAD

SEQ ID NO: 183789 - protein, 148 aa, Oryza sativa
  Clone ID: PAT_MRT4530_80846C.1.pep
MPTTPWSMHRSTAASTIVVVRPFSTTSEQAAAPLSSPQPPLQYASRTPAGDVNDLENASFLHRRRSRIASAVIIDYRCLGEPLFDSLRIYHLLDLTTLVHACLKQLIVPFEPSSFTRGGAPSPSRSTSHRCRQDLDNPSSTHGEHPEG

SEQ ID NO: 183790 - protein, 107 aa, Oryza sativa
  unsure (1)..(107): unsure at all Xaa locations
  Clone ID: PAT_MRT4530_80847C.1.pep
HXVXVEVVGGVXAHXXFXEHVGXASXVLXVPVDGAGXXGDSXXSFSSXTDRXXRXXXWXXPTRTXGGAXGWRWXRSTPXGGSCTXAXEXTGGDMWRXGAGEXXCAXS

SEQ ID NO: 183791 - protein, 868 aa, Oryza sativa
  Clone ID: PAT_MRT4530_80848C.1.pep
MARGSALLDGSVLPPSRIVSEKQAGLPRRFMPESATGREIVMLGEGRPAPDYPGRSVFFLPFAMAGLVPPFSSFFMDVLEFYDLQMTHLTPNAVMTLGIFAHLCEMFIGVRPSLRLFRWFFTVQSVSPPSVVGGCYFLPRGPVLNRYIPCVLRKKWDDWKSDWFYTPLANEARLRLPSQPPAQASSWRAPVDLGDGYDAVLDRLAGLRSQGLTGAMVYGDYLRRRIAPLQRRARAAWEYTGSEDYMRTHQGVRWDWAPEDFKILVQRVLNLNSVEASLIPHGILPLCSDPDRASILTIMTAVGASEEQAPKGHDGAGGSRRGDQSTPGGGRASGPRVGGSGSNRPTDARGKRKLGGTPPPSPPRGGGAVRASSRRPEGAAPTSQPEGERKKKRLRKMGETEPSRGNLISPPRWSFNRPPRSDIPSRSSHHPKSGQSEAEDPAAAEARRRESDRREAADRLREAEEAAREAARARQAEDTAREEAARARQVEEAAREEAARVRQAEEAAREEAARARQAEETAREEAARARQAEETAREEAARARQAEEAAREEASRVRRAEAMAASEAVHDEAADASLGPTPSGDAQDQTGPGVARDEAGASIGGPSRAASSSRQLFPTPSAAPLSAEPLLQALAAANTAVLDGFNAQVEALQAERAELDAAWVRVEEGRRSVEAMIETGRKAHRRHVSDLEARKTALAEIAREVEEERGAALIATTVMIEAQDSLRLQHGNWEAELKKKLDAAQGVLDAAAAREQRATETEAALRRREEALEARAMALEERACVAEKVLADREAAVTSREATLAAHESACAEEESALRLREDALAERERALEEAEAEAQRGLPISRRGKKSWTRGRASAGRLRAKAT

SEQ ID NO: 183792 - protein, 630 aa, Oryza sativa
  Clone ID: PAT_MRT4530_80849C.1.pep
MAESGSSGLEEKLAGLSAGCGEEPQQLSKNAKKREEKRKKQEEERRLKEEEKKKKAAATAAASGEPPKESAADDEEMDPTQYYENRLKALDSLKATGVNPYPHKFLANITVADYIEKYKSMNVGDKLVDVTECLAGRIMTKRAQSSKLLFYDLYGGGEKVQVFADARTSELEDNEFIKFHSTLKRGDIVGVCGYPGKSKRGELSIFPKKIVVLSPCLHMMPRQKSEGSAVPTPWAPGMGRNIEKYVLRDQETRYRQRYLDLMVNHEVRHIFKTRSKVVSFIRKFLDGLDFLEVETPMMNMIAGGAAARPFVTHHNELNMRLYMRIAPELYLKELVVGGLDRVYEIGKQFRNEGIDLTHNPEFTTCEFYMAYADYNDLIELTETMLSGMVKELTGGYKIKYHANGVEKPPIEIDFTPPFRKIDMIEELEAMAKLNIPKDLSSDEANKYLIDACAKYDVKCPPPQTTTRLLDKLVGHFLEETCVNPTFIINHPEIMSPLAKWHRSRPGLTERFELFVNKHEVCNAYTELNDPVVQRQRFEEQLKDRQSGDDEAMALDETFCTALEYGLPPTGGWGLGIDRLTMLLTDSQNIKLRYLKCSFDANSGSSSIPGYEASRLDMSTKQEPVRRIKAD

SEQ ID NO: 183793 - protein, 270 aa, Oryza sativa
  Clone ID: PAT_MRT4530_8084C.1.pep
MDPEPHRVDASLAPNPSRRQPLLRPGKSTAFKREERRKRKERKQQERLALDLERWEPLGAPPRPAAAAASPSRAALPDKPWVCDPPPEPEPSASWGCGWGPPAAEPPREPPVPAAVSPQAAAVEACRAFFGEHVDHDDGDDEDEEEEEGNVARFFQELLEKDAGLRGFYEAEREKGRFLCLVCEGIGARAGKRFAGCAALVQHAGSVARAGRRMAHRAFADAVGRLLGWSAGRTTALQMQTDSDNAGMCDEDIHCEDVPQSAEMEMCPHQ

SEQ ID NO: 183794 - protein, 1428 aa, Oryza sativa
  unsure (1)..(1428): unsure at all Xaa locations
  Clone ID: PAT_MRT4530_80850C.1.pep
MSNKQIFQVXPHGPGNVRYGPTGVDLSEFIVSEWGIDRPAERSVPSIKGWLMRGLRVDPQISDITINVIVSRATEGFYWELMPVQNSRVWRLYVENALQRGWPLAMVPFVHQKDPGVQMNMDDGEGPIAEVNETSVKDVNAQEDGGVVAPVGIQLGGVADEGETVGAIVDEMEREDSDNERVEEGDSSDDETDINPAEWASEDFSGLVVSEEDSVRWEYKENEVIQGAIYSRAEDMKEAVKHFAVSLHREFWVAKSNRSQYEVRCVKEKDGCPWRVHVYKGKWKDYWTVSVVTKHTCFLPSVQKYHRNITCAFVASEMYAHVIDNLTYEPRSIIRHIEEIYKYTISYAKAWRAKQKIIEMRFGTYEASYDNLPRLLGVIEERNPGSSYEVKKFPSIEHPGKSVLQRAFLALHACKMAFMNCRPVLCIDGTFLTGKYRGQILTTIGVDGNNQVLPLAFAFVESENTDSWYWFLKLVKTKVVGMRPNVCLIHDRHAGILRAIEELQFRSMERGYPGVWEDVQSRWCMRHMGANFFKQFKNKELMNMFKRLCNQNQEKKFNELWKRLDELTAKCSDQRAAAPSTAVADPPQALGPFPTDSSTLVRRTGLEIRKFSQWILHEPKEKWAKAYDTGGARYGIMTTNLAEVYNWVMRGVRGLPLVGIVEFILHGTCRYFRDRFQAVLPSMPNNNILFGTFMQKKLEELRKKAMKHRALVQGTQQHRFEILCQDKAGRGIYRNRVKQECVLKADGTCHCSCAKPKLLHRPCTHVIAAAAECGIPDAVYVSQYFTGEFTETNDEVLNIPDPSKLRGKAGRRRTRRIRNDMDESEAGRVKRCSKCDEHGHTYKHCPKDKEKPNAAEAGLSGSAADGARPTVQGAQLGTFRARTCGELLTVHDSFVERLREAGLLPMCRLVEAAAGDADSVRRWTMDRSLLAALVDRWRPETHTFHLPCGEVAPTLQDVSYLLGLPLAGEAVGPVTTAVDWQDDLTARFALVQRAPHLPLEPLAHHRNTGPTKRWLLQFTVEQLQAEADEYSYTRCLEAYLLWLFRRVMFCGGHGHAVDKGLVHYARSIADAARIAIGRPEVDQHAYEESLYEERPEVDYPTMGTLWCRRQFGFRQPFPVPFPTTVPAAIHRYSRKGQQSAGDWPAKLATFVEDWLLATEEVVDHEGEPHTEEAYQAYLRWYQPRTRTRVTFAPLEQQPHVASTRDLYARHHDQDFARAVDDINRVVVDGSTTIQRLGAGIPVPVEEHLTTYTWMVESMRSILRVLTCRADDVARVDAAVQQPPVPTGPRPAAHVPRPTPPSHGGSTEDVISPSQLGGAPPVQTQDQAQATPPRDTRATRAVPPDRFTYSQDHVLRSINPTTLGRRFFVCPNILDDNFMEPLRRCQYREWIDTRRVLTPPSRVVQLELPEQYRVIKAQFERGEGSSRRG

SEQ ID NO: 183795 - protein, 1344 aa, Oryza sativa
  unsure (1)..(1344): unsure at all Xaa locations
  Clone ID: PAT_MRT4530_80851C.1.pep
MSNKQIFQVYHGPGNVRYGPTGVDLSDFIVSERGIDRPAERSVPFIKGWLMRGLRVDPQTSDITINVIVSRATEGFYWELMPVQNSRVWRWYLENALQRGWPLALVLFVHPKDPGVQMNMDDGEGPSAEVNETSVEEVNAREDGGVVAPVGIQPGGVADEGETVGAIVDEMEREDSDNERVEEGDSSDDETDINPAEWASEDFSGLIVSEEDSVRWEYKENEVIQGAIYSRAEDMKEAVKHFAVSLHREFWVAKSNRSQYEVRCVKEKDGCPWRVHAYKGKWKDYWTVSVITKHTCFLPGVQKYHRNITCAFVASEMYAHVIDNLTYEPRSIIRHIEETYKYTISYAKAWRAKQKIIEMRFGTYEASYDNLPRLLGVIEERNPGSSYEVKKFPSIEHPGKSVLQRAFLALHACKMAFVNCRPVLCIDGTFLTGKYRGQILTAIGVDGNNQVLPLAFAFVESENTDSWYWFLKLVKTKVVGMRPNVCLIHDRHAGILRAIEELQFGSMERGYPGVWEDVQSRWCMRHMGANFFKQFKNKELMNMFKRLCNQNQEKKFNELWKRLDELTAKCSDQRAAAPSTAVADPPQALGPLPTDSPTLVRRTGLEIRKFSQWILHEPKEKWAKAYDTGGARYGIMTTNLAEVYNWVMRGVRGLPLVGIVEFILHGTCRYFRDRFQAVLPSMPNNNILFGTFMQKKLEELRKKAMKHRALVQGTQQHRFEILCQDKAGRGIYRKRVKQECVLKADGTCHCSCAKPKLLHRPCTHVIAAAAECGIPDAVYVSQYFSKQAIYHTWSGEIYGFGIAGEFTETNDEVLNIPDPSKLRGKAGRRRTRRIRNDMDESEAGRVKRCSKCDEHGHTYKHCPKDKEKPSAAEAGLSGSAADGARPTEMARQDTPQLLDPAIDHRHRSHLTAVQGAQLGTFRARTCGELLTVHDSFVERLREAGLLPMCRLVEAAAGDADPARRWTVDRSLLAALVDRWRPETHTFHLPCGEVEQLQAEADEYSYSRCLEAYLLWLFGWVMFCGGHGHAVDKGLVHYARSIADATCRWAHVQVRRSYPEFVMEFDRLLPTDVVWXPTVPRLPRLVHHWVCPHSAPGTRXYSRKGQQSAGDWPAKLATFVEDWLLATEEVVDHEGEPHTEESYQAYLRWYQPRTRTRVTFAPLEQQPHVASTRDLYARHRDQDFARAGFVHRSAPHLPRLGLLLCPPQAAHFSQAAGSASQAAVSTSHSAQFWQYTGTSSQAAGTSSQGPPLDHAGTSSDRLLPSTLLFDITDFDFASGLTEDVIGPSQLGGAPPVQTQDQAQATPPRDTRATRAVPLDRFTYSQDHVRAQARRTKRGRGAGQGQ

SEQ ID NO: 183796 - protein, 53 aa, Oryza sativa
  unsure (1)..(53): unsure at all Xaa locations
  Clone ID: PAT_MRT4530_80852C.1.pep
NRDPPPXIAPAQRTPHVCYXSYHHPLTEXIKGADKHCCRXPPLXXLSLGSPHY

SEQ ID NO: 183797 - protein, 1687 aa, Oryza sativa
  unsure (1)..(1687): unsure at all Xaa locations
  Clone ID: PAT_MRT4530_80853C.1.pep
MVVSAASAGGSVGGGGGRGPAAAVPAGGSGRGGGGCGRIRRRRLPSPLSPPSCPRSGGDGGVGGVGGWVRWRWRRSQAAAGGGSLLPSRLPPDLDPAAMDPAAGGGGVGGGRGWIPLPLPVDLDGDGAFSTAATTASASSEGGSVGGGGHRGRIRHRRSLRRLSSPSGGVQTNMDDGEGPSAEVNETSVEEVNAREDGGVVAPVGIQPGGVADEGETVGAIVDEMEREDSDNERVEEGDSSDDETDINPAEWASEDFSGLIVSEEDRKYRGQILTAIGVDGNNQVLPLAFAFVESENTDSWYWFLKLVKTKVVGMRPNVCLIHDRHAGILRAIGELQFGSMERGYPSVWEDVQSRWCMRHMGANFFKQFKNKELMNMFKRLCNQNQEKKFNELWKRLDELTAKCSDQRAAAPSTAVADPPQALGPLPMDSPTLVRRTGLEIRKLSQWILHEPKEKWAKAYDTGGARYGIMTTNLAEIYNWVMRGVRGLPLVGIVEFILHGTCRYFRDRFQAVLPSMPNNSILFGAFMQKKLEELRKKAMKHRALVQGTQQHRFEILCQDKAGRGIYRKRVKQECVLKADGTCHCSCAKPKLLHRPCTHVIAAAAECGIPDAVYVSQYFSKQAIYHTWSGEIYGFGIAGEFTETNDEVLNIPDPSKLRGKARRRRTHRIRNDMDESEAGMVKRCSKCDEHGHTYKHCPKDKEKPSAAEARLLGSVADGARPXEMARQDTPQLLDPAIDHRHRSHLTAVQGAQLGTFRARTCGXREAGLLPMCRLVEAAAGDADPARRWTVDRSLLAALVDRWRPETHTFHLPCGEVAPTLQDVSYLLGLPLAGDAVGPVTTAVDWQDDLAARFTLVQRAPHLPFEPLAHHRNTGPTKRWLLQFTVEQLQAEADEYSYSRCLEAYLLWLFGWVMFCGGHGHAVDKGLVHYARSIADAAVGEVPQWSWGSALLAALYRALCESCTKTDPSATFGGCPLFLSIWAAEKIAIGRPEVDQHAYEESLYEERPEVDYPTMGTLWCRRQRRWAHVQVRRSYPEFVMEFDRLLPTDVVWEPYSATATQARAPLGLSTLCTRDQAYWMTTVPMVFDICVEPHAPFRVMRQFGFRTRARVSSQLATGPPSWRLLLRTGCSQPRRSWTTRESHTLRRRTRPTXRWYQPRTRTRVTFAPLEQQPHVVSTRDLYARHRDQDFARAESVEEKPLSLLAYLALMGLSLGRSGHGRAVSYLRFTTPLSRGCVRPETHTFHLPCGEHRWAHVQVRRSYPEFVMEFDRLLPIDVVWEPYSVAATQARAPLGQSTLCTRDQAYWMTTVPMVFDICVEPHAPFHVMRQFGFRQPFPVPFPTTVPAVVHRYSRKGQQSAGDWPAKLATFVEDWLLATEEVVDHEGEPHTEEAYQAYLRWYQPRTRTRVTFAPLEQQPHVVSTRDLYARHRDQDFARAVDDINRVVVDGSTTIQRLGAGIPVPVEEHLTTYTQMVESMRSILRVLTCRADDVARADVAVQRPPVPTGPRPAAHVPRPTPPPHGGFRAPFSTPPSSARPSVVPPTGFAQFAMTQAAHFSQAAGSASQAAASTSHSAQFWQYTGTLSQAAGTSSQGPPLDHAGTSSDRLVPSTLLFDITDFDFASGSTEDVIGPSQLGGAPPVQTQDQAQATPPRDTRATRAVPPDRFTYSQDHVRAQARRTKRGRGAGQGQ

SEQ ID NO: 183798 - protein, 1549 aa, Oryza sativa
  unsure (1)..(1549): unsure at all Xaa locations
  Clone ID: PAT_MRT4530_80854C.1.pep
MSNKQIFQVYHGPGNVRYGPTGVDLSDFIVLERGIDRPAERSVPSIKGWLMRGLRVDPQTSDISINIIVSRATEGFYWELMPVQNSRVWKWYVENALQRGWPLAMVPFVHPKDPGVQMNMDDGEGPSAEVNETSVEEVNAREDGGVVAPVGIQPGGVADEGETVGAIVDEIDREDSDNERVEKGDSSDDETDINPAEWASEDFSEMVVSEEDSVRWEYKENEVIQGAIYSRAEDMKEAVKHFAVSIHREFWVAKSNRSQYEVRCVKEKDGCPWRVHAYKGKWKDYWTVSVCRDREKYILSNASKYHRNITCAFVASEMYAHVIDNLTYEPRSIIRHIEETYKYTISYAKARRAKQKIIEMRFGTYEASYDNLPRLLGVIEERNPGSSYEVKKFPSIEHPGKSVLQRAFLALHACKMAFVNCRPVLCIDGTFLTGKYRGQILTAIGVDGNNQVLPLAFAFVESENTDSWYWFLKLVKTKVVGMRPNSRWCMRHMGANFFKQFKNKELMNMFKRLCNQNQEKKFNELWKRLDELTAKCSDQRAAAPSTAVAYPPQALGPLPTDSPTLVRRTGLEIRKFSQWILHEPKEKWAKAYDTGGARYGIMTTNLAEVYNWVMRGVRGLPLVGIVEFILHGTCRYFRDRFQAVLPSMPNNSILFGAFMQKKLEELRKKAMKHRALVQGTQQHRFEILCQDKAGRGIYRKRVKQECVLKADGTCHCSCAKPKLLHRPCTHVIAAAAECGIPDAVYVSQYFSKQAIYHTWSGEIYGFGIAGEFTETNDEVLNIPDPSKLRGKAGRRRTRRIRNDMDESEAGRVKRCSKCDEHGHTYKHCPKDKEKPSVAEAGLSGSAADGARPTEMARQDTPQLLDPAIDHRHRSHLTAVQGAQLGTFRARTCGELLTVHDSFVERLREAGLLPMCRLVEAAAGDVDPAKRWTVDRSLLAALVERWRPETHTFHLPCGEVAPTLQDVSYLLGLPLAGDAVGPVTTAVDWQDDLTARFALVQRAPHLPFEPLAHHRNTGPTKRWLLQFTVEQLQAEADEYSYSRCLEAYLLWLFGWVMFCGDHGHAVDKGFVHYARSIADAAVGEVPQWSWGSALLAALYRALCESCTKTDPSATFGGCPLFLSIWAAERIAIGLPEVDQHAYEESLYEERPEVDYPTMGTLWCRRQRRWAHVQVRRSYPEFVMEFDRLLPTDVVWXPTVPRLPRLVRRWFGFRQPFPVPFPTTVPAAVHRYSRKGQQSAGDWPAKLATFVEDWLLATEEVVDHEGEPHTEESYQAYLRWYQPRTRTRVTFAPLEQQPHVASTRDLYVRHRDQDFARAVDDINRVIVDGSTTIQRLGAGIPVPVEEHLTTYTRMVESMRSILRVLTCRADDVARADAAVQRPPVPTGPRPAAHVPRPTPPPHGGFRFAQFAMTQAAHFSQAAGSASQAAVSTSHSAQFWQYTGTSSQAAGTSSQGPPLDHAGTSSDHLLPSTFLFDITDFDFASGSTEDVIGPSQLGGAPPVQTQDQAQATPPRDTRATRAVPPDRFTYSQDHVRAQARRTKRGRGAGQGQ

SEQ ID NO: 183799 - protein, 1513 aa, Oryza sativa
  unsure (1)..(1513): unsure at all Xaa locations
  Clone ID: PAT_MRT4530_80855C.1.pep
MSNKQIFQVYHGPGNVRYGPTGVDLSNFIVLERGIERPAERSVPSIKGWLMRGLRVDPQTSDITVNVIVSRATEGFYWELMPVQNSRVWRWYLENALQRGWPLALVPFVHPKDPGVQMNMDDGEGPSAEVNETSVEEVNAREDGGVVAPVGIQPGGVADEGETVGAIVDEMEREDSDNERRVEEGDSSDDKTDINPAEWASEDFSGLIVSEEDSVRWEYKENEVIQGAIYSRAEDMKEAVKHFAVSLHREFWVAKSNRSQYEVRCVKEKDGCPWRVHAYKGKWKDYWTVSVVTKHTCFLPGVQKYHRNITCAFVASEMYVHVIDNLTYEPRPGGPNKIIEMRFGTCEASYDNLPRLLGVIEERNPGSSYEVKKFPSIEHLGKSVLQRAFLALHACKMAFVNCRPVLCIDGTFLTGKYRGQILTAIGVDGNNQVLPLAFAFVESENTDSWYWFLKLVKTKVVGMRPNVCLIHDRHAGILRAIGELQFGSMERGYPGVWEDVQSRWCMRHMGANFFKQFKNKELMNMFKRLCNQNQEKKFNELWKRLDELTAKCSDQRAAAPSTAVADPPQALGPLPTDSPTLARRTGLEIRKFSQWILHEPKEKWAKAYDTGGARYGIMTTNLAEVYNWVMRGVRGLPLVGIVEFILHGTCRYFRDRFQAVLPSMPNNSILFGTFMQNKPEELRKKAMKHQALVQGTQQHRFEILCQDKAGKGIYRKRVKQECVLKADGTCHCSCAKPKLLHRPCTHVIAAAAECGIPDAVYVSQYFSKQAIYHTWSGEIYGFGIAGEFTETNDEVLNIPDPSKLRGKAGRRRTRRIRNDMDESEAGRVKRCSKCDEHGHTYKHCPKDKEKPSAAEAGLSGSAADGARPTEMARQDTPQLLDPAIDHRHRSHLTAVQGAQLGTFRARTCSELLTVHHSFVERLREAGLLPMCRLVEAAAGDADPARRWTVDRSLLAALVDRWRPKTHTFHLSCGEVAHTLQDVSYLLGLPLAGDAVGPVTTAVDWQDDLTACFALVQRAPYLPLEPLAHHRNTGPTKRWLLQFTVEQLQAEADEYSYSRCLEAYLLWLFGWVMFCGGHGHAVDKGLVHYARSIADAAVGEVPQWSWGSTLLAALYRALCESCTKTDPNATFGGCPLFLSIWAAERIAIGRPEVDQHTYEESLYEERPEVDYPTMGTLWCRRQRRWAHVQVRRSYPEFVMEFDRLLPTDVVWXPTVPWLPRLVRRWFGFRQPFPVPFPTTVPAAVHRYSRKGQHSAGDWPAKLATFVEDWLLATEEVVDHEGEPHTEESYQAYLRWYQPRTCTRVTFAPLEQQPHVASTRDLYARHRDQDFAHVXDVARADAAVQRPPVPTGPRPAAHVPRPTPPPHGGFRLLLCPPQAAHFSQAAGSASQAAVSTSHSAQFWQYTGTSSQAAGTSSQGPPLDHAGTSSDHLLPSTFLFDITDFDFASGSTKDVIGPSQLGGAPPVQTQDHAQATPPRDTRATRAVPPDRFTYSQDHVRAQARRTRRGRGAGQGQ

SEQ ID NO: 183800 - protein, 251 aa, Oryza sativa
  Clone ID: PAT_MRT4530_80856C.1.pep
MAWSNRSIHPSHPRSFIPARRRARERRRRSEMAGSGWRRIPAVRRPPMSRPASVCLWIVLVAATLALAQAKKSKADLTEVTHKVYFDVEIDGKPAGRVVMGLFGKTVPKTAENFRALCTGEKGTGKSGKALHFKGSAFHRIIPSFMIQGGDFTLGDGRGGESIYGTKFADENFKIKHTGPGLLSMANAGRDTNGSQFFITTVTTSWLDGKHVVFGKVLSGMDVVYKIEAEGQQSGSPKSKVVIADSGELPM

SEQ ID NO: 183801 - protein, 1724 aa, Oryza sativa
  unsure (1)..(1724): unsure at all Xaa locations
  Clone ID: PAT_MRT4530_80857C.1.pep
MVTAIGKAVSSYRKHNSNQIRHLVQLLIDALDGIVTLWQVQPKGPAISLLSTTDCFSPKHRWPEDVAWHPDGELIFAMYSADNGGSQVSVMNHSISGQAALVDDYCYMLGAVVNSHKAHNRSGCHKAHGAGARSDISNKQIFQVYHGPGNVRYGPTGVDLSDFIVSERGIDRPAERSVPSIKGWLMRGLRVDPQTSDITINVIVSRATEGFYWELMPVQNSRVWRWNLENALQRGWPLALVPFVHPKDPGIQTNMDDGEGPSAEVNETSVEEVNAREDGGVVAPVGIQPGGVADEGETVDAIVDEMEREDSDNERVEEGNSSDDETDINPAEWTSEDFSGLIVSEEDSVRWEYKENEVIQGAIYSRAEDMKEVVKHFAVSLHREFWVAKSNRSQYEVRCVKEKDGCPWRVHAYKGKWKDYWTVSVVTKHTCFLPGVQKYHRNITCAFVASEMYAHVIDNLTYEPRHAGILRAIGELQFGSMERGYPGVWEDVQSRWCMRHMGANFFKQFKNKELMNMFKRLCNQNQEKKFNELWKRLDELTAKCSDQRAAAPSTAVADPPQALGPLPTDSPTLVRRTGLEIRKFSLWILHEPKEKWAKAYDTVGIVEFILHGTCRYFRDRFQAVLPSMPNNSILFGAFMQKKLEELRKKAMKHRALVQDKAGRGIYRKRVKQECVLKADGTCHCSCAKPKLIHRPCTHVIAAAAECGIPDAVYVSQYFSKQAIYHIWSGEIYGFGIAGEFTETNDEVLNIPDPSKLRGKAGRRRTRRIRNDMDESEASRVKRCSKCDEHGHTYKHCPKDKEKPSAAEAGLSGSAADGARPTVLFFRNTIFFXEMARQDTPQLLDPAIDHRHRSHLTAVQGAQLGTFRARTCGELLTVHDSFVERLCEAGLLPMCRLVEAAAGDADPARRWTVDRSLLAALVDRWRPETHTFHLPCGEVAPTLQDVSYLLGLPLAGDAVGPVTTAVDWQDDLTARFALVQRAPHLPLKPLAHHRNTGPTKRWLLQFTVEQLQAEADEYSYSRCLEAYLLWLFGWVMFYGGHGHAVDKGLVHYARSIADAAVGEVPQWSWGSALLAALYRALCESCTKTDPSATFGGCPLFLSIWAAERIAIGRPEVDQHAYEESLYEERPEVDYPTMGTLWCRRQRRWAHVQVRRSYPEFVMEFDRLLPTDVVWXPTVPRLPRLVRRWFSFRQPFLVPFPTTVPAAVHRYSRKGQQSAGDWPAKLATFVEDCLLATEEVVDHEGEPHTEESYQAYLRWYQPRTRTRVTFAPLEQQPHVASIRDLYARHRDQDFARAVDDINRVIVDGSTTIQRLGAGIPVPVEEHLTTYTRMVESMRSILRVLTCCADDVARANAAVQRPPVPTGPRPAAHVPRPTPTPHGGFRFAQFAMTQAAHFSQAAGSASQAAVSTSHLAQFWQYTGTSSQADGTSSQGPPLDHAGTSSDHLLPSTFLFDITDFEFASGSTEDRRCRRRTRRRPLLCGTLVLPVLCHRIVSPTPRTTCEHRRRGVEDPNWRSDPCVYLLPPWCQRPLCLCGDRCQLMASRNPDIRGRRFFRCPNYDRETRTTACAYIEWVDTENPVLDLTTCLQEGRWYFASESTEQYLQRKAAYERQCREQQSDWRVLTTALPPWEARPRCRCGDRCQVLRSINPTTLGRRFFVCPNILDDDFMEPPRRCQYREWIDTRRVLTPPSRVVQLELPEHGTSERSCDNTPCTNNPLQRTFPGS

SEQ ID NO: 183802 - protein, 94 aa, Oryza sativa
  Clone ID: PAT_MRT4530_80858C.1.pep
FSWPVFLYRGWGEKPWGLPQFSRSGKISPFGWLGYCALGRPFWPFLRGGHPNGDWDPPLCGGFSPGGCVVSPLGPLSFFYPLSPLSWVFFRFFF

SEQ ID NO: 183803 - protein, 179 aa, Oryza sativa
  Clone ID: PAT_MRT4530_80859C.1.pep
MTSSPAAAQHLALAGERRCSAANGGHLHIDGDAANSPRARTTTDGNGWQRRRGRSGGGVRVDDDGNAPAVFGGNRGRDEDGDDLAIPTAAFPRCYERREDKARVAADGGGLGGPYIGARGRRWRPTVAGGGDGSGLRALGRGYGERRKTALIGSSKQKPVAQPVNRPRREKQPNSRFPA

SEQ ID NO: 183804 - protein, 456 aa, Oryza sativa
  Clone ID: PAT_MRT4530_8085C.1.pep
MVAAAVGEATPPPGGPPSRVSVSSSSSTPRRRCAALTSRFREPASPRRHAWVSLQGRLVGAEEATSAASAAPGLPPDEAVAWELFSPLHRVLLVATVAAASSRSHEARRVEQLQRSIHIRDEVLQSMQQKLDDLFDEMNSLQQQYVKCNTFISSEQGKSELVGSKKVGDYDGARCCACAKPEIAATPHKTKDICGMDDAKSDVVDRSSVSHMDHEERRMSDLSDFCWSVVSSVDNHVNGDNQLSSLAAEQELYNLQKECEEKDAIIKELAATAHTSSTADAKRIAELQEILKRKNMVISKLKKDMSALKQMVVELTRAKRTSSVNLSTSCSELPVMSSNVLYDMSSTSPSSSDSESPVAPREYLDDHLKVDDGIAGDSEYKGSSRFSMESACFPTKNSSAGKLRSTSPLKENRIDPNVETSLVGRQKQRISTNGDFKRTRRQSQQDSRNRATKRWM

SEQ ID NO: 183805 - protein, 827 aa, Oryza sativa
  Clone ID: PAT_MRT4530_80860C.1.pep
MAAEPAAAEAMDVEAPARPTTTTSTVSTSKGKSPHDLLAETRASVEEVAARILAIKKDDAPRTELRELVAQMSLLLITLRQANREILMEEDRVKAETEAAKAPVDSTTLQLHNLLYEKNHYVKAIRACLDFQTKYPGIELVPTEEFHRAAPADIRDKTLAADASHDLMLKRLNFELVQRKELCKLHEKLEQRKSSLLDTIANQKKFLSSLPTHLKSLKKASLPVQQQLGMQHTKKLKQHHAAELLPTPLYIVYTQFLGQKEAFGENIEVEITGSTKDAQMFAQQQAKQENAGTLSNGDNRVDDDAIDDEEDAQRRRSRSRKSVVKEASNSVVAYQLHPLKVILHVYDTEESGAKRRKLMVLRFDYLAKLNVVCVGIEDSKGLDHDILCNLFPDDTGLELPHQMAKLYAGEVPNFSEKDSRPYKWAQHLAGIDFLPEVPLSVGDDSNRASRSADLSSGLALYRQQNRAQTILQRIRSRKVAQMALTWQLDYLTKLKWPQIEHENAPWASRTPLCSLHSWSFTGIFPEPAPRSPLMVVGAAGSVDSDMERRSVTHWEETESTREDGELLAVVPAENTPSVSKISHSEVSPEVRNHSRGLSLISKSATPSKLSISHSFGRNEDDLDLLMYSDSELEEQTFVDQEVEKVNLATDKSWEDYASREFTLVLSKTLKNGPKVMLEAKIAISMEYPVRPPFFTLQLLSGKTEALKWHNDLRAMEAEVNLHILQVVPSSYEDYILTHQILCLAMLFDMHFDEDHGKRKLVEPCLPDQSGEETADRLFIGAALIVLLVVYRVCIMLALLNQASRLILRKLDADSDSLSFLPATEKVA

SEQ ID NO: 183806 - protein, 49 aa, Oryza sativa
  Clone ID: PAT_MRT4530_80861C.1.pep
TILLLSQALMDEVVCIFRLRLCIPHVRLMFSAAKKCLLAWDGGPVWWHC

SEQ ID NO: 183807 - protein, 493 aa, Oryza sativa
  Clone ID: PAT_MRT4530_80862C.1.pep
MSTESTQSSTSSGSSGVSSASTTSDSSIVDYCQKMKTATDALRDVGHAVSESQLVLNLLRGLNDDFSNTADNIAATDVLLSFTSACNTLLLKELRITNAAKVAAATALVASATSGSSCPLGGNASSGGGGLSRGGGSGSARDGGSGVGGWTGGGGSSGGRGGGTNNRRNCNGNGGRSGGGLTDSGGGGGWTGGGNGGGGSGGGGGARGSSGGGGGGGWAGGGGGQGNPSWRPAGPWGLPLAVTPSSEVEQPRPLKVAPSSEVERPRPHTVAPSTEVEQPYIPLFGRRLPDDTVTAASCAPTAGTPLVGASSTGVAPSAATHATASPVPANYRSVLADPNWCTAMADEYKVVRGYSQQHDIDYDETFSPVVKPATIRVVLSIAASRAWPIHQLDVKNTFLHGHLKEIVYCQQPSGFVDPAAPDAVCLLPKSLYGLKQAPRAWYQRFARYIQQMGFMPSASNTSLFVYKDGDHIAYLLLYVDDIILTASTTTLLQ

SEQ ID NO: 183808 - protein, 85 aa, Oryza sativa
  unsure (1)..(85): unsure at all Xaa locations
  Clone ID: PAT_MRT4530_80863C.1.pep
HSNPVGNENYLHLYELGRLVVTEHNKKGNSLLEFEKLVSLKQQVVSCTFFYFTIYVNEGDAKKLYXLRFWEKPLMDFKCLQEFKP

SEQ ID NO: 183809 - protein, 127 aa, Oryza sativa
  Clone ID: PAT_MRT4530_80864C.1.pep
MPASEMNEEKHKTQIAPCVKPWELGVSGARRSALHPQEEAVRRRSLVERRRATIGAEGQSSGGLQVALLLPLAGAPHRSARNRDFSPAWLYRSSPASTRESGEAGKEVADPPASAPLLRAYIEEKRE

SEQ ID NO: 183810 - protein, 128 aa, Oryza sativa
  unsure (1)..(128): unsure at all Xaa locations
  Clone ID: PAT_MRT4530_80865C.1.pep
ARVLSVSLARERFLQLRFFSAGLRPFSIRLPSPAGAVTRCHLWAPAMTDDRPVLLTHGFGAXLTWQWAYYLRPLLDDGFDPIVPDLLFFGDSCTLAADXRSEVFQATAVKAGMDAIGVRRFDVDGISY

SEQ ID NO: 183811 - protein, 121 aa, Oryza sativa
  Clone ID: PAT_MRT4530_80866C.1.pep
MPASEMNEEKHKTQIAPCVKPWELGVSGARRSALHPQEEAVRRRFASRCARPRSVKSGVRAAARSRGSSPPTGRCPAPLRPEPRLLSRLALPFLSRLDEVDDRDDVLLIRSPHSARGPSPL

SEQ ID NO: 183812 - protein, 87 aa, Oryza sativa
  Clone ID: PAT_MRT4530_80867C.1.pep
MEPTRRCVPGHLATAAAAAAASPFSPPPSLPLPSALMPPKKRRLFTPAPCHAATPTPPPPYPIRACWHFYHFCLSVNCVGGFVLCLR

SEQ ID NO: 183813 - protein, 37 aa, Oryza sativa
  Clone ID: PAT_MRT4530_80868C.1.pep
RPHMRSAKYRGVMDEEMIHGSHMHGCRIADVISTSML

SEQ ID NO: 183814 - protein, 188 aa, Oryza sativa
  unsure (1)..(188): unsure at all Xaa locations
  Clone ID: PAT_MRT4530_80869C.1.pep
MADKKIRIGINGFGRIGRLVARVVLQRDDVELVAVNDPFITTEYMTYMFKYDSVHGQWKHHELKVKDDKTLLFGEKPVTVFGIRNPEDIPWGEAGADFVVESTGVFTDKDKAAAHLKGGAKKVVISAPSKDAPMFVVGVNEHEYKSDLDIVSNASCTTNCLAPLAKVINDRFGIVEGLMTTXHSITAT

SEQ ID NO: 183815 - protein, 946 aa, Oryza sativa
  unsure (1)..(946): unsure at all Xaa locations
  Clone ID: PAT_MRT4530_8086C.1.pep
MKSPIQITPSSHHSLSLHLRERDGAFAVLNLSTKTEIVRCNSSGDIYLFSIDAFTSMASARAFITTESTTDFWHRXLGHLGHDALSCLVQASVIPPPKGSTPVCHACQLGRHVHLPFTTSFTRALAKLELVHCDLXASPIPSVAGFKYYLVILDDFSHYVWMFPLRLKSGTFDTISHLFAFVKTQFSVTICNIXCDNASEXDNLTARTFFLTNGVHMRMLCPQNGKAERMLRSINNIVRSLLFQASLSAPYWVEALHTATHLINQHRTKTLHHHTPFFALFGANPSYTHPRVFDCKCYPSLSATTLHKLAPRSSLCVFLGYPLHHXGYRCLDLATYKVIXSRHVVFDEYSFPFAELTNNSIAPALDFLEDFSASXQPSSVIHALAQPARRCARLPLAIGMAHRPPPSAIGPPQRSSLASARVGHVGWKCAPAARARISILAPTXRSRLTAQPDARXSSPTSTSSSTCSRLPTTLPTLAPLAPPPXARSARVPSVHILEPTXISPVVNTHGLTTRGKNGIYPGXTTTTPMSPLSPWFLAPTGPPWGSTMEEEFTALQANCTWELVPCPTSSNVVTGKWIFRHKFXSDGGLDRYKARWVLHGFTQRPGIDFDETFIPVVKPSTVRTVLSLTVSRHCPLXMLTNXDVKNAFLHGKLQETVXCTQPSGFVYPTKPHLVCRLNESLYGPKEAPRVWNNRFASYLLTLGFTEAKSNIFLFIYRCGSDLVYLLLYVDDIVLTASSDILLRWTIQALQSAFSMKDLCILHHFLGISVTQRGTGLLLSQRQYNIEILERAGMSDCKPCSTPVDPNAKLSSSDGSPVADPTDYRNLAGTLQXLTFTQPDISYVVXQVCLHMHDPRDSHLAALKRILRYVRGTLDYGLHVQHSSTANLVAYSDADWAGCPDTRKSTSGYAVFLGDNLVSWSSKRQHTVSRSSAEAERKGLKNYLLEG

SEQ ID NO: 183816 - protein, 38 aa, Oryza sativa
  Clone ID: PAT_MRT4530_80870C.1.pep
MSVVNDGKSPRHDSKDLKVSHPEIARHYPPVHPIQTST

SEQ ID NO: 183817 - protein, 67 aa, Oryza sativa
  unsure (1)..(67): unsure at all Xaa locations
  Clone ID: PAT_MRT4530_80871C.1.pep
SNSDLLLQSFVGFGLPLASSVQFQYQQQEGSAESRXKKTGIFFYAISFSCSCSSGGGSSSSTGGVVY

SEQ ID NO: 183818 - protein, 46 aa, Oryza sativa
  Clone ID: PAT_MRT4530_80872C.1.pep
MVVPDGGSGGRGVNFCDVCGSVELSVAATGATRKRSVRHAVTSILH

SEQ ID NO: 183819 - protein, 119 aa, Oryza sativa
  Clone ID: PAT_MRT4530_80873C.1.pep
FLSINLLKPQTIEYLARVLQRDMFLYPALKILLPYWNTYMIRYYCPRSFVFLWFRRNSELKTKKTIPSYRLPRNSTSVLFKGSKDGMGNKPHRAPMRATAAQHAEPRKQEADAGIRPHQ

SEQ ID NO: 183820 - protein, 53 aa, Oryza sativa
  Clone ID: PAT_MRT4530_80874C.1.pep
IIIIILLQTPHKCAQLHSKPPIGQTERESTTHACKLFYLENNLPQRPPDQDPA

SEQ ID NO: 183821 - protein, 39 aa, Oryza sativa
  unsure (1)..(39): unsure at all Xaa locations
  Clone ID: PAT_MRT4530_80875C.1.pep
FLTFQAPPILSDASKLNRGFSELNQISCHFHXYHXMGGG

SEQ ID NO: 183822 - protein, 70 aa, Oryza sativa
  unsure (1)..(70): unsure at all Xaa locations
  Clone ID: PAT_MRT4530_80876C.1.pep
RPRSRLSPASPTSRGYWSRARWTESWRERHLLLQQQVLSRWSEYVRQQYSIMTTPLWQPSTFQLINNQXM

SEQ ID NO: 183823 - protein, 68 aa, Oryza sativa
  Clone ID: PAT_MRT4530_80877C.1.pep
TCGFMQFPKTNTDASCLSISWLPKFNVFFSTIVVASRMSSHEVALFHFSCQKLQQICRLSDGVYCEYQ

SEQ ID NO: 183824 - protein, 86 aa, Oryza sativa
  Clone ID: PAT_MRT4530_80878C.1.pep
MVCRRLSSFGLSGSLSGDIQSLSELQYLDLSYNNLSGPLPPNIGSLSNLESLGSEMVRRASSSTEARPPEREARDGGGWTEATAGA

SEQ ID NO: 183825 - protein, 108 aa, Oryza sativa
  Clone ID: PAT_MRT4530_80879C.1.pep
MAFRGPAPMDPRGEICTPPPPPRPRRGAVAAPLETAPLLHHETGPASGPPPSRRVLPLEVTNLPLAVDPAVINLREDGYKCRARERQQVADSGAVVEWSQCLRGKSGG

SEQ ID NO: 183826 - protein, 79 aa, Oryza sativa
  Clone ID: PAT_MRT4530_8087C.1.pep
MAGQWWPAAVEAKTLLRASLPDAGQYLSQQGGVHLGQEQQPGATPRRRHKHKAKFASGYYRSPSRMIAQFALMGCTASL

SEQ ID NO: 183827 - protein, 109 aa, Oryza sativa
  unsure (1)..(109): unsure at all Xaa locations
  Clone ID: PAT_MRT4530_80880C.1.pep
AIRRAWSGEAASYRTALASTSCLLHQCTGRVGARVSSASPRTRTNLMFCGAQXRTTPTSXRRAGLALLAPATAATGMKVTPSDRAXRKAGYLFTKPRTNTGLIGYSGKG

SEQ ID NO: 183828 - protein, 347 aa, Oryza sativa
  Clone ID: PAT_MRT4530_80881C.1.pep
MVALSKLVLITAVALLGWAYKVARPPPPPILGGPGGPPVSSPRVQLKDGRHLAYREAGVGREIAKYKIIFSHGFASTKESDFPVSQELAEELGIYLLYFDRAGYGDSDANPKRGLKSDATDVEELADKLQLGEKFYVVGTSMGGYVAWSCLNYIPYRLAGVALVVPAVNYWWPMPASVSASAYRKLDVGDRRTFWIAHHMPWLFYAWFNQKWFRISPIVEGKPEAFTEKDWEILAEIQRTGQLDRGRATKQGAYHSLCRDATILFGAWEFDPTAIENPFPNGDGVVSIWQGREDKIVRVEAQRYVAEKLPWVRYHEHPEGGHLFMCADGLGDKIVRELLLGEEPRDL

SEQ ID NO: 183829 - protein, 1017 aa, Oryza sativa
  Clone ID: PAT_MRT4530_80882C.1.pep
MEKLDRYLQEHFDVPAKNPSEEAQRRWRQAVGTIVKNRRRRFRWVPDLDRRSLDKAKVRSTQEKIRVALYVQQAALIFSDDELALITSKHDSKALKMHGGVDGISKKVRSSFDHGICASDLDTRQNIYGVNRYAEKPSRSFWMFVWDAFQDMTLIILMVCALLSVAVGLATEGWPKGMYDGLGIILSIFLVVMVTAVSDYKQSLQFKELDNEKKKIFIHVTRDGRRQKISIYDLVVGDIVHLSIGDQVPADGLYIHGYSLLIDESSLSGESDPVYVSQDKPFILAGTKVQDGSAKMIVTAVGMRTEWGKLMSTLSEGGEDETPLQVKLNGVATVIGKIGLVFAILTFLVLLVRFLIDKGMTVGLLKWYSTDALTIVNYFATAVTIIVVAVPEGLPLAVTLSLAFAMKKLMNDKALVRHLSACETMGSAGTICTDKTGTLTTNYMVVDKIWISEVSKSVTSNTISGELNSVVSSRTLSLLLQGIFENTSAEVVKEKDGKQTVLGTPTERAILEFGLGLEGVHDAEYSACTKVKVEPFNSVKKKMAVLISLPSGTSRWFCKGASEIILQMCDMMVDGDGNAIPLSEAQRKNILDTINSFASDALRTLCLAYKEVDDDIDDNADSPTSGFTLIAIFGIKDPVRPGVKDAVKTCMSAGITVRMVTGDNINTAKAIAKECGILTEDGVAIEGPEFHSKSPEEMRDLIPNIQVMARSLPLDKHTLVTNLRGMFDEVVSVTGDGTNDAPALHEADIGLAMGIAGTEVAKESADVIVLDDNFTTIINVARWGRAVYINIQKFVQFQLTVNIVALVINFVSACITGSAPLTAVQLLWVNMIMDTLGALALATEPPNDEMMKRPPVRKGESFITKVMWRNIMGQSLYQLFVLGALMFGGESLLNIKGADSKSIINTLIFNSFVFCQVFNEINSREMQKINVFRGIISNWIFIAVIAATVAFQVVIIEFLGTFASTVPLNWQHWLLSVGLGSISLIVGVILKCIPVGSGETSATPNGYRPLANGPDDI

SEQ ID NO: 183830 - protein, 112 aa, Oryza sativa
  Clone ID: PAT_MRT4530_80883C.1.pep
MGTFVGGPRLASSSCRRAFPLALYFGRRRLPSSSSGRRAAPPPTSAVTPLSPSAAALLRLGMADELSVLFAGWDPARRRAVAVAVGVFARRSHAARGRWPELRVVAGVEEDE

SEQ ID NO: 183831 - protein, 582 aa, Oryza sativa
  Clone ID: PAT_MRT4530_80884C.1.pep
MTVGLLKWYSTDALTIVNYFATAVTIIVVAVPEGLPLAVTLSLAFAMKKLMNDKALVRHLSACETMGSAGTICTDKTGTLTTNYMVVDKIWISEGIFENTSAEVVKEKDGKQTVLGTPTERAILEFGLGLEGVHDAEYSACTKMCDMMVDGDGNAIPLSEAQRKNILDTINSFASDALRTLCLAYKEVDDDIDDNADSPTSGFTLIAIFGIKDPVRPGVKDAVKTCMSAGITVRMVTGDNINTAKAIAKECGILTEDGVAIEGPEFHSKSPEEMRDLIPNIQVMARSLPLDKHTLVTNLRGMFDEVVSVTGDGTNDAPALHEADIGLAMGIAGTEVAKESADVIVLDDNFTTIINVARWGRAVYINIQKFVQFQLTVNIVALVINFVSACITGSAPLTAVQLLWVNMIMDTLGALALATEPPNDEMMKRPPVRKGESFITKVMWRNIMGQSLYQLFVLGALMFGGESLLNIKGADSKSIINTLIFNSFVFCQKINVFRGIISNWIFIAVIAATVAFQVVIIEFLGTFASTVPLNWQHWLLSVGLGSISLIVGVILKCIPVGSGETSATPNGYRPLANGPDDI

SEQ ID NO: 183832 - protein, 1039 aa, Oryza sativa
  Clone ID: PAT_MRT4530_80885C.1.pep
MEKLDRYLQENFDVPAKNPSEEAQRRWRQAVGTIVKNRRRRFRWVPDLERRSLDKAKVRSTQEKIRVALYVQQAALIFSDGAKKKEYKLTGDIIKAGYAINPDELALITSKHDSKALKMHGGVDGISIKVRSSFDHGIYASELDTRQNIYGVNRYAEKPSRSFWMFVWDALQDMTLIILMVCALLSVAVGLATEGWPKGMYDGLGIILSIFLVVMVTAVSDYKQSLQFKELDNEKKKIFIHVTRDGRRQKISIYDLVVGDIVHLSIGDQVPADGLYIHGYSLLIDESSLSGESDPVYVSQDKPFILAGTKVQDGSAKMIVTAVGMRTEWGKLMSTLSEGGEDETPLQVKLNGVATIIGKIGLVFAILTFLVLLVRFLIDKGMTVGLLKWYSTDALTIVNYFATAVTIIVVAVPEGLPLAVTLSLAFAMKKLMNDKALVRHLSACETMGSAGTICTDKTGTLTTNHMVVDKIWISEVSKSVTSNTISGELNSVVSSSTLSLLLQGIFENTSAEVVKEKDGKQTVLGTPTERAILEFGLGLKGDHDAEYRACTKVKVEPFNSVKKKMAVLISLPNGTSRWFCKGASEIILQMCDMMVDGDGNAIPLSEAQRKNILDTINSFASDALRTLCLAYKEVDDDIDDNADSPTSGFTLIAIFGIKDPVRPGVKDAVKTCMSAGITVRMVTGDNINTAKAIAKECGILTEDGVAIEGPEFHSKSTEEMRDLILNIQVMARSLPLDKHTLVTNLRGMFDEVVSVTGDGTNDAPALHEADIGLAMGIAGTEVAKESADVIVLDDNFTTIINVARWGRAVYINIQKFVQFQLTVNIVALVINFVSACIIGSAPLTAVQLLWVNMIMDTLGALALATEPPNDEMMKRPPVRKGESFITKFMWRNIMGQSLYQLFVLGALMFGGERLLNIKGADSKSIINTLIFNSFVFCQVFNEINSREMQKINVFRGIISNWIFIAVIAATVAFQVVIIEFLGTFASTVPLNWQHWLLSVGLGSISLIVGVILKCIPVGSGETSATPNGYRPLANGPDDI

SEQ ID NO: 183833 - protein, 652 aa, Oryza sativa
  Clone ID: PAT_MRT4530_80886C.1.pep
MDRSDSMADSPRRRNGLLRDQVQLVKRKDTNRYEIVRFPDPLSFEKGFFVMIRACQLLVQHNEGMIFVGVAGPSGAGKTVFTEKVLNFMPGVAVISMDNYNDASRIVDGNFDDPRLTDYDTLLENIHGLKEGRSVQVPIYDFKMSCRTGYRTVDVPSSRIVIIEGIYALSEKLRSVLDLRVSVTGGVHFDLVKRVLRDIQRAGQEPDQIIHQISETVYPMYKAFIEPDLQTAHIKIINKFNPFSGFQNPMYILKSPRTITPTDIKVALGEDHTESIEETYDIYLLPPGEDPESCQSYLRMRNREGKYNLMFEEWVTDNPFIISPRITFEVSVRLLGGLMALGYTIAAILKRKSRVFSDGKATVKIDWLEQLNRNYIQVQGRDRNHVKFVAEKLGLDGSYIPRTYIEQIQLEKLINDVMALPEDLKTKLSIDDELVSSPKEALSRVSADKRNKHLKSGLSHSYSTHGDKNIVKLSKLTETNRRFGSGRAPEPPAINQGAITQLSEQISTLNERMDEFTSRVEELNCKFAIKKSSTSQQNLALPNETCNGSAPTNLFVSHLGNGTLIPHSSSSNQLLKESPIVDEINAISRGQRQVIHQLDNLTSLLHEHLALTRQGNAVRRNGILEMDMSICPLIALTIGGFGYLVFKSLNRS

SEQ ID NO: 183834 - protein, 46 aa, Oryza sativa
  Clone ID: PAT_MRT4530_80887C.1.pep
MNCVGAVRVAQDLGPGHTIVTILCDSGMRHLNSIQSKEDTCHSLIE

SEQ ID NO: 183835 - protein, 519 aa, Oryza sativa
  unsure (1)..(519): unsure at all Xaa locations
  Clone ID: PAT_MRT4530_80888C.1.pep
EASEKIPTKTREGSEIDRRRRRRGDHAGEGGGRRHGVGGGAALQRTPPRGAPPLLPLRPVLPFLRQGGAAAAAHSNGAVYANGVAADAAELVSPSALRQPFVIGVSGGTASGKTTVCDMIIQQLHDHRVVLVNQDSFYRGLTAEESAHAQDYNFDHPDAFDTEQLLECMGQLKRAQPVNVPIYDFKNHRRSSESFRKVNASDVIILEGILVFHXDSLKNLMDMKIFVDTDADIRLARRIRRDTVERGRDVSLCLSVWSLCEHRXADIRLARRIRRXVAIDLIVQHIRTRLGQHDLCKIYPHVYVVQTTIRIRGMHTRMRERGSPTFDWAFXSGRLLGSVAXHGLGHMAYTENPIIPLTGTLSVGVDLSKKHCGVAIGSTYMGVDFCKKLCGVSIIRSGESMENALRACCKGIKIGKILIHRDGDNGQQLIDHRFPLDIAVRYGVPVEHGLGTELMISGGVPEERIMFLNLISAPEGVHCVCKRFPRLKIVTSEIETGLNEEYRVIPGLGEYGDRYFGTD

SEQ ID NO: 183836 - protein, 58 aa, Oryza sativa
  Clone ID: PAT_MRT4530_80889C.1.pep
MAIDGFPVIRLPENKAGAMVREYHSTGTLDGTDEAYSSENPPSDTYSHSGVGEKIEQD

SEQ ID NO: 183837 - protein, 172 aa, Oryza sativa
  unsure (1)..(172): unsure at all Xaa locations
  Clone ID: PAT_MRT4530_8088C.1.pep
MASSSKLSSAFALAVVVLLLAGGVMPAAEAASAHLHFFMHDTLTGAAPTAVQVVNGPRSHFGDTIAXDDKIMLSGVKSRWWRTVGMAKGAINLGNXRNPVWEVTMKVVLRXGPLTGRSVTVVGRDNIPAPVRELSVVDGTGEFRMGSGNVLWKTVSLDHPNAILELEVYVNP

SEQ ID NO: 183838 - protein, 473 aa, Oryza sativa
  Clone ID: PAT_MRT4530_80890C.1.pep
MDAAMESAVGPHFSGLRLDSRRLSSSSLPTSPSAASSNGCGGNDAPAAVNGFAPPPPPSAAAAAEEGSKQPFVIGVSGGTASGKTTVCDMIIQQLHDHRVVLVNQDSFYRGLTEEESDRVQDYNFDHPDAFDTEQLLECMGQLKSGLSVNIPIYDFKNHRRCSESFRKVNASDVIILEGILVFHDQRVRDLMDMKIFVDTDADIRLARRIRRDTVERGRDVISVLEQYGRFVKPAFDDFVLPSKKYADVIIPRGGDNHVAIDLIVQHIRTKLGQHDLCKIYPNVYVVNTTFQVVEHGLGHLPFTEKQIVTPTGSTYMGVDFCKKLCGVSIIRSGESMENALRACCKGIKIGKILIHRDGDNGQQLIYHKFPLDIAERHVLLMDPVLGTGSVEFIQCSFHSDVCLLVGMRTTEVTAKVSYHNYSTVQAPEGVHCVCKRFPRLKIVTSEIETGLNEEYRVIPGLGEYGDRYFGTD

SEQ ID NO: 183839 - protein, 515 aa, Oryza sativa
  Clone ID: PAT_MRT4530_80891C.1.pep
MEMTLPLLGAAVVLAAFLLFFLVKNNRCCWSPAAERRLRLPPGPWRLPLVGSLHHVLLSRHGDLPHRALRELAGRYGALMLLRFGAVPTLVVSSAEAAREVLKTHDACFASRHMTPTLAVFTRGGRDILFSPYGDLWRQLRRICVLELFSARRVQSLRHVREDEAARLVRAVAEECAIGGGGGAVVPIGDMMSRMVNDSVVRSAIGGRCARRDEFLRELEVSVRLTGGFNLADLYPSSSLARWLSGALRETEQCNRRVRAIMDDIIRERAAGKDDGDGEDDLLGVLLRLQKNGGVQCPLTTDMIATVIMEIFSAGSETASTTLEWAISELVRNPKVMDKAQSEVRKLFEGQDNLTEDDMSRLSYLHLVIRETLRLHAPAPFLLPRECREQCNVMGYDITEGTRVLVNAWAIARDTRYWEDPEIFKPERFNANLVDFKGNYFEYIPFGSGRRVCPGITLGLTSMELVLASLLYHFDWELPGGKRCEEIDMSEAFGITVRRKSKLVLHATPRVPCLH

SEQ ID NO: 183840 - protein, 80 aa, Oryza sativa
  unsure (1)..(80): unsure at all Xaa locations
  Clone ID: PAT_MRT4530_80892C.1.pep
MEQPLFELSVPRGEFYEPLPSLEPIYTSGYEIRPELISMVRENSFXLDLENPYHHIXDFEQVCSCLQIRSMKEETVWWKF

SEQ ID NO: 183841 - protein, 41 aa, Oryza sativa
  Clone ID: PAT_MRT4530_80893C.1.pep
HKSGASPTAQSMYLCKPMLKQLFSNTQDQCLLTIADRIFLK

SEQ ID NO: 183842 - protein, 48 aa, Oryza sativa
  Clone ID: PAT_MRT4530_80894C.1.pep
CLLCSIAILRYYPCWGLGISSCPICPRDAGGIPLYCILPLALCRILAS

SEQ ID NO: 183843 - protein, 127 aa, Oryza sativa
  unsure (1)..(127): unsure at all Xaa locations
  Clone ID: PAT_MRT4530_80895C.1.pep
HTYQDRWEGIAYDMFDDQYDMTRVKGGVHYLLQAGTSDGIDEVVLSYYESVILGLTTYDTDYNVXGLYIGHGRVDKLAVYIYMNXMTLASIXVLLILGICGGTGQAKFFQXELVFDKIGINRIMMSA

SEQ ID NO: 183844 - protein, 70 aa, Oryza sativa
  Clone ID: PAT_MRT4530_80896C.1.pep
MAWRGAGGGSGSGPREGDDGQRRGIGALARGEGGGPHGGSGSEWPSTKVLMPTNCAPRLLLGLNLASTGL

SEQ ID NO: 183845 - protein, 80 aa, Oryza sativa
  Clone ID: PAT_MRT4530_80897C.1.pep
IPMFFFFGPRKIEENSLPVFGPKEISEGGIFIDQRVLKRSEPRRGSFFGQRPWPICLGGFKPLSRVYLGIRGYSRPLFFG

SEQ ID NO: 183846 - protein, 286 aa, Oryza sativa
  Clone ID: PAT_MRT4530_80898C.1.pep
MYPYRFSNVMIGYLNLATLLASIPVIGAGLWMAKGSTATCGSMLQTPLLVIGFVVLLVSLAGFVGACFHVAWALWLYLLAMMLLIAFLLGLTAFGFAVTAGGGGTQVPGRPYREYHTSDYSSWLQKHIQDAKYWRPALACVVGSKACPKIANWSPMDYLQHDLTPIQSGCCKPPTACAYSGGVAVGAQDEDCFRWNNAAGILCYGCESCRAGVMEKVREDWHKISVLNVMVLVVLICICACGCCAFRNARRSVSEYPYGVNRMHKIHPRWDYYWWRWWRDRREQLY

SEQ ID NO: 183847 - protein, 603 aa, Oryza sativa
  Clone ID: PAT_MRT4530_80899C.1.pep
MSSSMRVALLAMLPILLVDAQSMAAPIQCLPGQAAALLQLKRSFDATVSDYFAAFRSWVAGTDCCHWDGVRCGGDDGRAITFLDLRGHQLQADVLDTALFSLTSLEYLDISSNDFSASKLPATGFELLAELTHLDISDDNFAGQVPAGIGHLTNLVYLDLSTSFLDEELDEENSVLYYTSYSLSQLSEPSLDTLLANLTNLQDLRLGMVDMSSNGARWCDAIARFSPKLQIISMPYCSLSGPICRSFSALKSLVVIELHYNYLSGPIPEFLAHLSNLSGLQLSNNNFEGWFPPIVFQHKKLRGIDLSKNFGISGNLPNFSADSNLQSISIRGAIPQWVWKTSGYFSLLNLSHNKFTSTGSDPLLPLNIEFFDLSFNKIEGVIPIPQKGSITLDYSNNQFSSMPLNFSTYLKKTIIFKASKNNLSGNIPPLICDGIKSLQLIDLSNNYLTGIIPSCLMEDASALQVLSLKENNLTGELPDNIKEGCALSALDFSGNLIQGKLPRSLVACRNLEILDIGNNQISDSFPCWMSKLPQLQVLVLKSNRFIGQMDISYTGDANNCQFTKLRIADIASNNFSGMLPEEWFKMLKSMMTSSDNGTSVMES

SEQ ID NO: 183848 - protein, 79 aa, Oryza sativa
  Clone ID: PAT_MRT4530_8089C.1.pep
GVEDPNWCSDPCVYLLPPWCQRPLCLCSDRCQLMASMNPLGPSRRFAPRPSPSRHRIQCSRDRRAACPTGSRRSGMTDL

SEQ ID NO: 183849 - protein, 85 aa, Oryza sativa
  Clone ID: PAT_MRT4530_808C.1.pep
TCFLSKLLNFGLCFAATTLTSWHLLVTFCSLHVALCMKLFEHKPFDARTVMGFGVLNGISIGLLNLSLGFNSVGFYQVGIVFALS

SEQ ID NO: 183850 - protein, 147 aa, Oryza sativa
  unsure (1)..(147): unsure at all Xaa locations
  Clone ID: PAT_MRT4530_80900C.1.pep
MSSAVKDQLHQMSTTCDSLLLELNVIWDEVGEPDTTRDRMLLELEQECLEVYRRKVDQANRSRAQLRKAIAEGEAELAGICSAMGEPPVHVRQSNQKLHGLREELNAIVPYLEEXKKKVERWNQXVHVIEQIKKISSEIRPAGFCSF

SEQ ID NO: 183851 - protein, 999 aa, Oryza sativa
  Clone ID: PAT_MRT4530_80901C.1.pep
MSSSMRVALLAMLPILLVDTQSMAAPIQCLPDQAAALLQLKRSFDATVGGYFAAFRSWVAGADCCHWDGVRCGGDDGRAITFLDLRGHQLQAEVLDTALFSLTSLEYLDISSNDFSASMLPATGFELLAELTHLDLSDDNFAGRVPAGIGHLTNLIYLDLSTSFLDEELDEENSVLYYTSYSLSQLSEPSLDTLLANLTNLQELRLGMVDMSSNGARWCDAIARFSPKLQIISMPYCSLSGPICRSFSALKSLVVIELHYNYLSGPIPEFLADLSNLSVLQLSNNNFEGWFPPIIFQHKKLRGIDLSKNFGISGNLPNFSADSNIQSISVSNTNFSGTIPSSISNLKSLKELALGASGFSGELPSSIGKLKSLDLLEVSGLELVGSMPSWISNLTSLTVLNFFHCGLSGRLPASIVYLTKLTKLALYNCHFSGEVANLVLNLTQLETLLLHSNNFVGTAELASLAKLQNLSVLNLSNNKLVVIDGENSSSEATYPSISFLRLSSCSISSFPNILRHLPEITSLDLSYNQIRGAIPQWVWKTSGYFSLLNLSHNKFTSTGSDPLLPLNIEFFDLSFNKIEGVIPIPQKGSITLDYSNNQFSSMPLNFSTYLKKTIIFKASKNNLSGNIPPSICDGIKSLQLIDLSNNYLTGIIPSCLMEDASALQVLSLKENNLTGKLPDNIKEGCELSALDFSGNLIQGKLPRSLVACRNLEILDIGNNQISDSFPCWMSKLPQLQVLVLKSNRFIGQMDISYTGDANNCQFTKLRIADIASNNFSGMLPEEWFKMLKSMMTSSDNGTSVMESRYYHGQTYQFTAALTYKGNDITISKILTSLVLIDVSNNDFHGSIPSSIGELALLHGLNMSRNMLTGPIPTQFGNLNNLESLDLSSNKLSNEIPEKLASLNFLATLNLSYNMLAGRIPQSSHFSTFSNASFEGNIGLCGAPLSKQCSYRSEPNIMPHASKKDPIDVLLFLFTGLGFGVCFGITILVIWGSNKRKQQA

SEQ ID NO: 183852 - protein, 51 aa, Oryza sativa
  Clone ID: PAT_MRT4530_80902C.1.pep
SSEFQVALGDHTGGTGSAPNKVKLGRVWCGTGARKELLKLKCKSQICQKLD

SEQ ID NO: 183853 - protein, 1164 aa, Oryza sativa
  unsure (1)..(1164): unsure at all Xaa locations
  Clone ID: PAT_MRT4530_80903C.1.pep
GRGPFRQQHPQPPSSGLKGRAHRGRVKKLSKLALRRARDWRARVAGLADRVLALAPGAPVGDVLDGARPAPDELAFVVRAVGVASWRRALDAFEWLVASGGGRAPGPRVVAVVLGVLGRARQDALAEDVFLRFAREGATVQVFNAMMGVYARSGRFDDARQLLDAMRDQDIEPDLVSFNTLINARAKSGCLAAGVALELLHEVRQAGLRPDAITYNTLISACSQGSNLDDAVAVFEEMIASECRPDLWTYNAMVSVHGRCGKAQEAELMFKELVEKGFQPDAVTYNSLLYAFAKEGDVERVERVCEELVKAGFRKDGITYNTMIHMYGKMGRLDLALGLYDEMRAIGCTPDAVTYTVLVDSLGKMDRISEAGKVLEEMADAGLKPTLVTFSALICAYAKSGRQDDAERTFDRMVESGVKPDRLAYLVMLDVFARSDETRKLMVLYRAMIKDGYKPDDGLYQVLLAALAKGNEHDEIEGVIQDMEAVFEMNPLVISSILIKAECISQGASLLKRACLQGYEPDGKSLLSILDAYEKMGKHEKGLSLLEWIRQHVPNSHNLISECSIMLLCKNGKIVDAIQEYSRKQMLKRGSFGQDCDLYEYLITYLEEAELFPEACQVFCDMQFLGIVPSQKIYQSIIYTCCRLGFPETAYQLMDDAARSDISLNILSCRVAMIEAYGKLKLWQQAENFVKGLKQESGVDRRIWNALIHAYAESGLYEHARAIFDIMIKKGPLPTVESVNGMMRALIVDGRLDELYVVVQELQDLDIKISKSTVLLMLEAFAKAGDVFEVMKIYNGMKAAGYLPNMHLYRIMISLLCHNKRFRDVELMVAEMEGAGFKPDLVVLNTLLLMYTGTGNFDRTIEVYHSILEAGLEPDEDTYNTLIVMYSRNFRPEEGFTLLYEMGKRGLTPKLESYKILLAASGKAKLWEQADLLFEEMRTKGYRLNRSIYHMMMKIYRNARNHSKAEHLLSAMKEDGIEPTIATMHILMTSYGTSGHPDEAEKVLNSLKSSNLEISTLPYSTVLDAYLRNRDYSLGITKLLEMKRDVIKSYTFCRLLTERTSSLFTEVDSFLEKLGTLEDSASLNFVNALEDLLWAFERRATASWIFQLAVKRSIYHHNIFRYLQQSLTPKIFIXSAGAGLVALTLWLDQMQDASLQGAPESPKS

SEQ ID NO: 183854 - protein, 244 aa, Oryza sativa
  unsure (1)..(244): unsure at all Xaa locations
  Clone ID: PAT_MRT4530_80904C.1.pep
ELHPSDGAHTLRYVSIGGLHAVREKGGISNPYGYQPPPGKPNHTCGGADRWPHVVSTDDVFCPTGLYCPSTIKKLSCSXFYCRKGSTSQTKCFHKGSCKPNSVNQDITIFGALLVGALSLVLLIIYNFSGQLLTNREKKQAKSREAAARHAKETAMARERWKSAKDVAKKHAVGLQSSLSRTFSRKKTLRTHEPSKGAVETDVEPSKGSGEKKSNLTDMMRSLEENPEKGEGFNVEIGEKKKKK

SEQ ID NO: 183855 - protein, 123 aa, Oryza sativa
  Clone ID: PAT_MRT4530_80905C.1.pep
VRGLAPEPGFFVWGRFVSRFSSPSSPGPPRGLVSVSFVLGVSGPRPECFEFVCPGRFLIWGVGRYVMPEPQALRGVYVVPRSSWGLFFGPPLLCFPPLCWPASPLALWETGASVRAYRLNVWG

SEQ ID NO: 183856 - protein, 49 aa, Oryza sativa
  Clone ID: PAT_MRT4530_80906C.1.pep
GEPLPHGVHLAGGSRHHHWAGTSWAISEIGAKHEAHYLWAGRGFAARPI

SEQ ID NO: 183857 - protein, 74 aa, Oryza sativa
  Clone ID: PAT_MRT4530_80907C.1.pep
LHKRDHRTQLAHQKSIRIGNTRNHCQYFVFHGYKYPSYLDRRNHIITKRIGSTRAIVENQTETIKSLEEKRNGT

SEQ ID NO: 183858 - protein, 55 aa, Oryza sativa
  unsure (1)..(55): unsure at all Xaa locations
  Clone ID: PAT_MRT4530_80908C.1.pep
LMTHSWTNPSSREYPAFHAAWLRGTXFWPPACCVINVYGDTTFICSIQHGSPLTE

SEQ ID NO: 183859 - protein, 283 aa, Oryza sativa
  Clone ID: PAT_MRT4530_80909C.1.pep
MRPGERAIFTIPPKLAITKSGSPASIPSSIPPEQTLRFEIELISLFAITDILENGSILKKIIKRPLPDKSPSNHADTVIVNYNACLEDGNSVSKSERLELNLASRTALKYAVKTMREGEEAIFIVNPRYTFSSQDRSHTGDQDAVPPDATLYLYVQLAERKTAKQNEAEEKGPFIDGPNEAKTTARALPKRRPVKPGFSLPVVQNDRPTYPGHVLFVPHVVEEEEADAGQAASTTTSGLATPPTTAADVGTSAATNSSAAQGSGIVKTETGFLFKRFRPWPAN

SEQ ID NO: 183860 - protein, 86 aa, Oryza sativa
  Clone ID: PAT_MRT4530_8090C.1.pep
LYILTVPYIRGSSPVHVQCMAMDYPSQCMSVIIWFSQKAFKSLVSLTVAVHSIPFDFIHQLESHPCYETLLCHLFPPKYSVIILFV

SEQ ID NO: 183861 - protein, 212 aa, Oryza sativa
  Clone ID: PAT_MRT4530_80910C.1.pep
MWNGWPGLAWDELGPRSGCQFGLNHRRPWVKAGLKRLCNNMANNEKGNKVRSQDKGTSSSRLNEAPDTSCVAVVQHLINQNRLLKELLQQHQTPILNPSQMQPQVQLEAVQALTPQPQQPVDKTEASICVVPLDVPAQQPRNQVQDEEPECKKVIVCYNCSEEGHYSRNCPQPKRNPRHHSGHYARRRHDHNIRVTGANAEPVKPSASQKQS

SEQ ID NO: 183862 - protein, 1770 aa, Oryza sativa
  Clone ID: PAT_MRT4530_80911C.1.pep
MVRCGGLCYARGIVTAPFRAPGLEWYIPGLEIDLYSRMPHYKPEYLFGVEGFVQELRTMSFAIGFGTAPFYAQIPHDRHEEKCRVKVTLNSNSEDIPSVMFEAGGRNYIHACQEVARIAIGELRDRYSDQLADTEYRYHPRQPQGSDRGSYLETEGIENDATTRHLVEMLWAMDETRAETVLAAQDREDRNRGKICKLEDKVDRLEKELAALKGEAPPQKARVRLTARKRALFVPRYQLAPKVRVVEKEVTPALADPPVVNWWDVSACVCLLLSVRKLMVLTRSNGNGPNNNNNNNNNNNGENPTLAQVLAQQAQLMNMMMQQLQNQQNQGNNHAPPQNKLAEFLRVRPPIFSSTTNPVEAGDWLHAIEKKLDLLQCTDQEKVSFASHQLHGPASEWWDHFRLNRTTAEPITWLEFTAAFRKTHIPSGVVSLKKKEFRSLNQGSRSVTEYLHEFNRLARYALEDVRTDEERQERFLEGLNDELSYPLMTGDYPDFQKLVDKAIRQEDKYNRMEQKKRRIAQFKTQQGNNQRLRLTLGPQSMPQGGSSSVVRPQRQFFNNHAGNNIRNQAPRPVAASTQQQPAKREQGSKPVVCFNCGDPGHYADKCPKPRRVKIVPVQSNSTAPASKARVNRVAVAEAQGAPDVILGTFLVNLVPATVLFDSGATHSFLSMSFAGNHGMEVEDLRRPLMVSTPCNQALSLQRSPSVRIEIQGVPFLANLILLESKDLDVILGMDWLARYKGVIDCANRKVTLTSNEGQVVTVYALSSESLRSRLNQITLEEIPIVREYPDVFPDDLPGMPPKRGIEFRIDLVPGTTPIHKRPYRMAANELAEVKRQVDDLLQKGYIRPSSSPWGAPVIFVEKKDHTQRMCVDYRALNDVTIKNKYPLPRIDDLFDQLKGATVFSKIDLRSGYHQLRIKEEDIPKTAFTTRYGLFECTVMSFGLTNAPAFFMNLMNKVFMEYLDKFVVVFIDDILIYSRTKEEHEEHLRLALEKLREHQLYAKFSKCEFWLSEVKFLGHVISAGGVAVDPSNVESVTNWKQPKTVSEIRSFLGLAGYYRRFIENFSKIAKPMTRLLQKDVKYKWSEECEQSFQELKDRLISAPILILPDPKKGFQVYCDASKFGLGCVLMQDGKVVAYASRQLRPHEKNYPTHDLELDAVVHALKIWRHYLFGTRTEVYTDHKSLKYIFTQPDLNMRQRRWLELIKDYDMGIHYHPGKANVVADTLSRKGYCNATEGRQLPLELCKEFERLNLGIVSRGFVAALEAKPTLIDQVREAQINDPDIQEIKKNMRRGKAIGFLEDEQGTVWLGERICVPDNKDLKDAILKEAHDTLYSIHPGSTKMYQDLTEGFSWASMKREIAEYVAVCDVCQRVKAEHQKPAGLLQPLKIPEWKWEEIGMDFITGLPRTSSGHDSIWVIVDRLTKVAHFIPVKTTYSGSRLAELYMARIVCLHGVPKKIVSDRGSQFTSNFWKKLQEEMGSKLNFSTAYHPQTDGQTERVNQVLEDMLRACALDFGGSWDKNLPYAEFSYNNSYQASLQMAPYEALYGRKCRTPLLWDQTGERQVFGTDILREAEEKVKIIQERLRVAQSRHKSYADNRRRDLSFGKGDYVYLRVTPFRGVHRFHTKGKLAPRFVGPYKIVSRRGEVAYQLELPQSLAGVHNVFHVSQLKVFKAVAVARGGRHRGRQVVAVLVRPFVVAEDRRSTVAAVDPIFSAASTSSPSPSVDLPPPFWSPIPMFPESPFSQEKNLKSSKASKASHTDPKQPFEHVDPD

SEQ ID NO: 183863 - protein, 1825 aa, Oryza sativa
  Clone ID: PAT_MRT4530_80912C.1.pep
MADRDEEQILYDTIAEGSSQYWNEEEGNEDPNQYLNEEGNMEWDAEGNQQGHVERDVEGNQEEEASGSQPSVGQKRARGQRGAAKKLEGRHIITEVEEDGRPSAPAEAAKNYVRHSGWVVRDNMPVSTVYWRRTRARGDHESFVPDSEKEMLWTTMLETFTLPAGTEDKVKRWILKKMAEQFQSFKGDLYQKYILKGQTPNFDTFPKLRDHWDEFVAYKTSEQGQAMMERNKENAAKKKYHHHLGSGGYSVAMPKWEQMEATLIERGIEPATANWPERSKFWYYAHGGTLNPADGSLVFGDQIREVARRLTDAVEASSQSTFRPDRDRDELTLALQTPEHPGRTRGKGVIPWKIGFKEDIHTYRSRMRSKRDTEAKIADLEFRVSSYELNMQDEVARKVDERMAAHRSHDPQPTIPPAMPCAAAVSVVVIAREGHRRDRQVTAVLVRSFAAAEDRRNTVAAVDPKFAAASSSSPSPSVDLPPLFWSPMPRYKPEYLFGVEGFVQELRTMSFVIGFGTAPFYAQIPHDRHEEKCRVKVTLNSNSEDIPSVMFEAGGRNYIHACQEVARIAIGELRDRYSDQLADTEYRYHPRQPQGSDRGSYLETEGIENDATTRHLVEMLWAVDETRAETVLAAQDREDQNRGKICKLKDKVDRLEKELAALKGEASPQKARIRLTARKRALFVPRYQLAPNVRVVEKEVAPADPPVIIISDDEEEESKRNHSKIEWVATQDDENEPNEPSIDLRCSEELDNGNGPNNNNNEGNPTLAQVLSQQTQLMNMMMQQLQNQQNQGNNHAPPHNKLAEFLRVRPPIFSSTTNTVEAGDWLHAIEKKLDLLHCTDQEKVSFASHQLHGPASEWWDHFRLNRTTAEPITWLEFTAAFRKTHIPSGVVSLKKKEFRSLTQGSHSVTEYLHEFNRLARYAPEDVRNDEERQEKFLEGLNDELSYPLMTGDYSDLQKLVDKAIRQEDKYNRMEQKKRRIAQFKTQQGNNQKPRLTLEPQSMPQGGSSSVVRPQRQFFNNNAGNNIRNQAPRPVAAPAQQQPAKREQGSKPVVCFNCGDPGHYADKCPKPRRVKVVPAQSNSTVPASKARVNHVAAAEAQDAPDVILVRKYPDVFPDDLPANELAEVKRQVDDLLQKGYIRPSSSPWGAPVIFVEKKDHTQRIALAPCNLAPLSPPSLQPCAAAVSVVVIAREGHRRDRQVAAILVCSFAATEDRRNAVAAVDPKFAAASSSSPSPSVDLPPLFWSPVASGMAIPTDPSGTYHCRPIPAGYSKVEVELVEGAYEDLELDYPGGDGGTSSSLGDKRRLVHHLLRLRHLLLRILHRLLLMLHQHRLHLRLQHRLLLRILHRLLLVLLHLLPRKLLFRHLQKVKRQFKPRSPEKKIPIDPSVRNFFRGMSASAKEAIKLSDYERTLKKASSGKSKPVPQLGEQPNQEIEPLVTGKEMTIEQFITDTGLTTYQLLGVAPIEKAEVKYMYELGKPLVKPELLQSLPTQMYKFRQLYMEMSATGREMIGARIRDTDFLQGDDILWINFRGIYELYQLDALDVSIMSCWILMEIQRARRRRVFDTGFIDPRKVNVAMLDQYPQETEDNLVHLLKAQHYKTFILLPYNTEFHWVLLLFDLEACTVNDDITMDFVKGLPSVRGKSVILTIVNLLSKYVHFIPLGYPYTMISVAQAFFIEVVRLHYIPNSIVVAHDPVTRSMFWPELFHLARVKLNLSSAFHPQSGGQLEAANHVIGERLLQARDYSKLYCNDSHRDMVFSVGDSPAGARIHSVFIVVVSKSFHGAPLASTMALLAITDGLVLLVPAKAYPWSCGPRCSGTADLV

SEQ ID NO: 183864 - protein, 448 aa, Oryza sativa
  Clone ID: PAT_MRT4530_80913C.1.pep
MKQQMIDNSAKIVSPDTVTTSTRYCHKFAEFMKTRPPTFAGSATSWYTDQWLGTIENKLDMVQCDEKNKVFYAAHQLQGAALECWKGYCATDKDPQAISWAEFSSILHYMDVSPGFIKTKDHTKDGVCTLCSQGYRYELMWCPRNKPRNCACARCGEIGHSASEHEISCSSCEQSHLLGECPMSKLTCYLCEGDDHVPIKCPLSSILTTVTQHQREAYQEVIQQVIGETNKIIVTPVKKFRECMSKTRKASSKTKNVVCFSCNEMGHFANRCPLRHQTPAQDKTIPKAILTKRTTPTTGGEVLWWRGRGGFLPASAVNGGRSRNASKRENVAESFAHLMVVVSWTEVAGIDGDGGTSGGEPRLGDDDDAWSDPAAVENGGATATASSSLRSAKKGCFMNEDLRRNSPGSEESTKKWFGLRSTGWTGTEKEAGDGALEQKTATRTAQGG

SEQ ID NO: 183865 - protein, 100 aa, Oryza sativa
  Clone ID: PAT_MRT4530_80914C.1.pep
LFFFFFWFFFFFFFFFFFFFFFFFFFFWEKRGKTFPGGDFKAPGSRGVWPLPKRKRPIPLFYRGGPGTRKTFWLWEKKIWGSGVRGPPNYRPVLGGETPP

SEQ ID NO: 183866 - protein, 474 aa, Oryza sativa
  Clone ID: PAT_MRT4530_80915C.1.pep
MVNTHSNGNGPNNPNNNNNGENPTLAQVLAQQTQLMNMMMQQFQNQQNQGNNHAPPQNKLAEFLRVRPPVFSSTTNPVEASDWLHAIEKKLDLLQCTDQEKVSFASHQLHGPASEWWDHFRLNRTTAEPITWLEFTAAFRKTHIPSGVVSLKKKEFRSLTQGSRSVTEYLHEFNRLARYAPEDVRNDEERQEKFLGGLNDELSYPLMVGDYPDFQKLVDKAIRQEDKYNHMEQKKRRIAHFKAQQGNNQKPRLTLGPQSMPQGGSSSVVRPQRQFFNNNAGNNIRNQAPRPVAAPAQQQPAKREQGSKPVVCFNCGDPGHYADKCPKPRRVKVVPAQNNSAVPASKARVNHVAAAEAQDAPDITLEEIPIVREYSDVFPDDLPANELAEVKRQVDDLLQKGYIRPSSSPWGAPPSPSLGKTTVVLAKSSPSSFAPSPSPEITGAASPSSTRRFPPLPPCRRRRPLVFRRRLGHR

SEQ ID NO: 183867 - protein, 1147 aa, Oryza sativa
  Clone ID: PAT_MRT4530_80916C.1.pep
MPSSSPPPLYAAGTPFAPRAGGSRARPAAVIALRHLPSPIAVGETPLPLPPLPRRLAAAPPPSRDAADVAVRVAATPPPSAAGRSPPVAALRRRAPWPPGRLEPPVRAGHVLPPPSDLPGRSGPSNPAARVAATWLPRVRRVGATCAPRGVPLLPRIARPMTQLLKKDEKFKWTAECDKSFEELKKKLISAPVLILPDQTKDFQELEHLNLGIVEHGFVAALEARPTLVDQVRAAQINDPEIAELKKNMRVEKAQDFLEDEHGTIWMGERFCVPADKELKDLILTKAHQTQYSIHPGSTKITPEARRIVKPLQMPEWKWEEIGMDFITGLPRTSSGHDSIWEELGTRLNFSTAYHPQTDGQTERASLQMAPFEALYGQKCRTPLFWDQTGDYVYLRVTPLRGVHHLQTKGKLALRFVGPYKILERRGKVAYQLELPSNMIGIHDVFHVSQLKKCLRVPEEQADSEHIDIQEDLTYVEKPVRIIETSERPPIRTSSPALPNLGVEISFMGAPSSSLSLPSCLSLLTSWAASRPKPSGALSPVLRTPLPRSPVASPPLPASSLSLPCRRPTSSRPCRRLSTPAGRAVAFPSVAAASSSPAPPPIHGEIAGDAAPPASSGFASTVPSPAIPAASPERRPTSLPPLSVLLRHPLLRPGCGVARSSPERRRRANCLFLLVGSSPRCTTTFTNIAALCSTSAQPLLAAIVISSSPFVLADRRPIGRPARRLAAPPPSSASQRRVPRHPCLCAAAAGCHRHLLASPGRHRRLVVPGRRGVRPSVKPFSSVVRVRQVCRCNPIVVFVLASASSSSAPATSCLRPRIAAEVAPSPFVSAIPVHLRRARSPSSFPRLVAWCAAATCSTPPSSPAELHPRRAAASVVAAGRRHRRKVRGRVEKPGRLTPEAADHRSPVAAVDRSRAAARPSRRPSSFVVWFEGEYRWVRLVVLYVYMSSKVAADHPISGEVAILSTRLRSGGDKPTGVAGESMPLVIEGVIMIQERHGGAAAERGEGKGETKRRSTAHPGSTATTETATGAEEGGGVARVDGVDGAPAVGDRNGEVDEVGEDAAKPKEAAPRWEVVRGDDSGGPELGGDGGERATARARFRRGERAVSGGNSGGELGEGLYRVGSKRGRPEEGGMGAGDPAAINGAGE

SEQ ID NO: 183868 - protein, 468 aa, Oryza sativa
  Clone ID: PAT_MRT4530_80917C.1.pep
MTQLLKKVEKFVWSPQCEKAFQTLKEKLVSSPVLILPDTHKDFLVYCDASRQGLGCMLMQEGHVVAYASRQLRPHEGNYPTHDLELAIVVHALKIWRHYLIGNRCEIYTDHKSLKYIFTQSDLNLRQRRWLELIKDYDVGIHYHPGKANVVADALSRKSHCNALGVRGIPPELNQLLEALNLSIVSHGFLATLEATPTLLDQIRDAQKNDPDMYGILKNMKQGKAAGFTEDTDGQTERLNQILEDMLRACVLDFAKTWDKSLPYAEFSYNNSYQASIQMAPYEALYGRKCRTPLLWDQVGESQVFGTDILREAETKVRTIRDNLKVAQSRQKSYADNRRRNLEFAVDDFVYLRVTPLRSVHRFQTKGKLAPRFVGPFRIIARCGEVAYQLELPASLGNVHDVFHVSQLKKCLRVPSEQADSEQIEVREDLTYVDRPLKILDTMERRTRNRVIRFCKVQWSNHAEEEAT

SEQ ID NO: 183869 - protein, 139 aa, Oryza sativa
  Clone ID: PAT_MRT4530_80918C.1.pep
ALCVPLPSWSRGEGARGPGPREWGPRGSLTVHGGPGAPGHGGAAAERGEGKGEKRRWSTAHPRSTTTTKKAAGAEEGGGAARVDGVDGVPAVRGLGEGVDGVDGGAAKPEEATPGRETVPASGEGRPETGEGGAGRVYI

SEQ ID NO: 183870 - protein, 93 aa, Oryza sativa
  unsure (1)..(93): unsure at all Xaa locations
  Clone ID: PAT_MRT4530_80919C.1.pep
KGCQDCQKFGAIQRAPASAMNPIIKPWPFRGWGIDMIGMINPPSSKGHKFILVATDYFTKWVEAIPLKKXVDSGDAIQFVXEHIIYRFGIPQT

SEQ ID NO: 183871 - protein, 107 aa, Oryza sativa
  unsure (1)..(107): unsure at all Xaa locations
  Clone ID: PAT_MRT4530_8091C.1.pep
MASHIVGYPRMGPKRELKFALESFWDGKSSAEDLEKVATDLRASIWKQMADAGIXKRYSWTGGEIGFSTYFSMARGNATVPAMEMTKWFDTNYHFIVPELGPNTNFS

SEQ ID NO: 183872 - protein, 97 aa, Oryza sativa
  Clone ID: PAT_MRT4530_80920C.1.pep
YTTTPISTGPPMTGDENAVATNQGDSMSKYPPIETENGISTTSKLEKDSDTAKLCPSDMNHEPTKMTSEATRSWCPTQKWGINRLLQPSTSGPFKRY

SEQ ID NO: 183873 - protein, 102 aa, Oryza sativa
  unsure (1)..(102): unsure at all Xaa locations
  Clone ID: PAT_MRT4530_80921C.1.pep
GLVSTHGYXNIYTRSNCKXSHRLIQLLSVHRHPLYRXFYLTRGCIGFRSSAKGXVLRSAGLGNCIGYIGVVQGCIALVSWIALVRLIFWPTYLSYILVNLVW

SEQ ID NO: 183874 - protein, 335 aa, Oryza sativa
  unsure (1)..(335): unsure at all Xaa locations
  Clone ID: PAT_MRT4530_80922C.1.pep
MSFHPLMTGDYSDFQKLVDKAIRQEDKYNRMEQKXHRIAHFKAQQGNSQRPRLIMGPQAVSQGGSPSVVRPPCQFFNNNAGNNNRNXAPRPVATPVQHQPVKREQGNKSGVCFNCGXQNNSNAPTSKARVNHVAAAEAQGAPNVILGMFPVNSVPATVLFDSGATHSFLSMSFAGNHGMEIEDLRHHLMVSTPSNQALSSQRSPSIRIEIQGVPFLANLILLESKDLDVILGMDWLARYKGVTDCANRKVTLTSNDGQVVTVHALPSEPLRSSLNQITLEEIPIVRDYPDVLPMIYLIPTFPESPILQEKTLKSSKASKASHTDPKQFFEHVDPV

SEQ ID NO: 183875 - protein, 42 aa, Oryza sativa
  Clone ID: PAT_MRT4530_80923C.1.pep
LPFSPPEALTVNKAFIPKSRQVLKELSLKGCETENETFTILL

SEQ ID NO: 183876 - protein, 858 aa, Oryza sativa
  unsure (1)..(858): unsure at all Xaa locations
  Clone ID: PAT_MRT4530_80924C.1.pep
MERSRCVPSYLRLACGEEPRGAPEGGLAGTADGRRRTRAPMVAAGDHRRGGAAPERGEGRGKRIGGPRLTPDRRRRRERRPERREAAARLGSTGTAAFRRSATETERWTRSARTRRSRRWQRRGGRWSGATTAADRSSAAMAERESDGASWVIAPAQASSHDTPGPMSPTRSLTQGSRTVTEYLHEFNRLARYAPKDLRTDEERQEKFLEGLNDELSYPLMTGDYHDFQKLVDKAIRQEDKYNRMEQKKRRIAHFKAQQGNSQRPRLTLGPQSMPQGGSSSVVRPQRQFFNNNAGNNNRNQAPRPVATPSQQQPAKREQGSKPGVCFNCGDPGHYADKCPKPRRAKVVPAQNNSSAPAAKARVNHVAATEAQGAPDVILGTFPVNSVPATVLFDSGATHSFLSMSFAGNHGMEVEELRRPLMVSTPSNQALSSQRSPSVRIEIQGVSFLANLILLESKDLDVILGMDWLARYKGVIDCANRKVTLTSNDGQVVTVHALPSEPLRSSLNQITLEKIPIVREYPDVFPDDLPVMSFGLTNAPAFFMNLMNKVFMEYLDKFVVVFIDDILIYSRTKEEHEEHLRLALEKLREHQLYAKFSKCEFWLSEVKFLGHVISAGGVAVDPSNVESVTNWKQPKTVSEIRSFLGLAGYYRRFIENFSKIAKPMTRLLQKDDGKVVAYASRQLRPHEKNYPTHDLELAAVDYDLGIHYHPGKANVVADALSRKGYCNVMGGRQLPLELCKEFERLNLGIVSRGFVAALEAKPTLIDQVREAQINDPDILEIKKNMRRGKAIGFLEDEQGTVWLGERICVPDNKDLKDAILKEAHDTLYSIHPXLKIPEWKWEEIGMDFITGLPRTSSV

SEQ ID NO: 183877 - protein, 82 aa, Oryza sativa
  Clone ID: PAT_MRT4530_80925C.1.pep
MATLPQRHALAARKHGPPEDCRSLGLVVVGILCLAVKYGVAMRERWVVVKYGIAMREARNLEILWVLGCEVKHNIEITVQSS

SEQ ID NO: 183878 - protein, 111 aa, Oryza sativa
  Clone ID: PAT_MRT4530_80926C.1.pep
NPLWGPNPNPPSPGVCSFFYLGVFGQFSPWKMGSCASPERWVGSPLGAPRLPSFFFPVVFFVGLWPVTLFPRVGTLPLFSPSLRSSSFWEKFGALRGRAGFSGSLPGAVPQ

SEQ ID NO: 183879 - protein, 85 aa, Oryza sativa
  Clone ID: PAT_MRT4530_80927C.1.pep
DIFGIVEGLMTTGDAITATQKTVDGPSSKDWRGGRAASFNIIPSSTGAAKAVGKVLPVLNGKLTGMSFRVPTVDASGGDLTGRLE

SEQ ID NO: 183880 - protein, 165 aa, Oryza sativa
  unsure (1)..(165): unsure at all Xaa locations
  Clone ID: PAT_MRT4530_80928C.1.pep
PARGRSTRSSWKVSSPPPLCPRPPSWRGRSTRSSWKVSSPPPLCPRPPPLKPSHSPKTALPSPSSSPRXRSPLASPTPSPLRRARAPAPAPSPXPPPQPPPPSSAPLPLGARPPPPPVFLHRPGAPRRARARPHRLLRRRRRRRRGRVTGSSALIVPLPSNPCRA

SEQ ID NO: 183881 - protein, 107 aa, Oryza sativa
  unsure (1)..(107): unsure at all Xaa locations
  Clone ID: PAT_MRT4530_80929C.1.pep
VSTHGYXNMYTWSHCKLSYISIQLLSPHRHPLFRGFYLSSSGRWHLTRGCISFXSPAKGXVLCSIGPDNCIGYIGVLQGCIASISWIASVRLIYFPTYLSYILANLV

SEQ ID NO: 183882 - protein, 68 aa, Oryza sativa
  Clone ID: PAT_MRT4530_8092C.1.pep
SVHAYRCVDRALGRAPSRFFGPGTDGVKGLNVIMHALVQHSTLLLNLAVDGYGVQLDELIHHRLGECR

SEQ ID NO: 183883 - protein, 136 aa, Oryza sativa
  Clone ID: PAT_MRT4530_80930C.1.pep
VLSCCLLSGFFCCVFREIPSAASLWGRETSPEALWTSVQRTPAPGQGKAPPVLGGLKPAPPPAPLGGGFFGFGPRPGSKPDPGGRPLGPHGKTRGGVGGPPAGGGPRPFPPWGAWAAAPPPGGRGSISAPPEPWGG

SEQ ID NO: 183884 - protein, 118 aa, Oryza sativa
  Clone ID: PAT_MRT4530_80931C.1.pep
RLGGNRGREGRGGRRRLAAPHCAAPPLRWPLPVSSSPCLRRRPTPRPPPLASRPSHGRRGARPGCRGRRPPSRRRPSLPPRPADRPQAYLAAAAAAGWESEGRTRGGRCRRFGYGRPR

SEQ ID NO: 183885 - protein, 61 aa, Oryza sativa
  unsure (1)..(61): unsure at all Xaa locations
  Clone ID: PAT_MRT4530_80932C.1.pep
MGKRRGVVDGKXVARMAAGEXERQGGGVHLSPLYLYYLRVFTGEEATVCGGLWKMSSARRL

SEQ ID NO: 183886 - protein, 255 aa, Oryza sativa
  Clone ID: PAT_MRT4530_80933C.1.pep
MGSSTEHGGAGGRGKKGSGSQLWKKALLHSSLCFVMGFFTGFAPSSVSDWTSAAVSAGGVGSSHVVRSLHATGGAAVNRSLLAQAAAGAVDAGPQPLLVVVTTTESTPSAAGQRAAALTRMAHTLRLVPPPLLWVVVEANPDVAATARLLRTTGLMYRHLTYKDNFTVADAAAGKERHHQRNVALGHIEHHRLAGVVLFAGLGDTFDLRFFDQLRQIRNDWHPSTNGRGEAVAAVLSPGPRGDSTMRGRSLADAA

SEQ ID NO: 183887 - protein, 52 aa, Oryza sativa
  Clone ID: PAT_MRT4530_80934C.1.pep
PTRSRQSQSKPRLSGGSRDRLVLSGAGSSQSKPRLSVAFPLPLRPASCFACQ

SEQ ID NO: 183888 - protein, 39 aa, Oryza sativa
  Clone ID: PAT_MRT4530_80935C.1.pep
QSCINGQMQLILQFAFIGGTVYSPGTVQLSNEKVYNLVT

SEQ ID NO: 183889 - protein, 123 aa, Oryza sativa
  Clone ID: PAT_MRT4530_80936C.1.pep
MLGLFTLWISKGQHNNIVWRFAGDGDNGDPPFCTKHLPIFRVDGARRREEARGGVGGELVFLGHEFSACFRAEQFLAALKPRCAYLVDDCRLDEKEYCRQDIGRWEMKRGQMEGLPDDDGGGG

SEQ ID NO: 183890 - protein, 101 aa, Oryza sativa
  Clone ID: PAT_MRT4530_80937C.1.pep
MAVRLYDKNSSAGDRGPRCTDLPGRCSRPPLCPHHPHPRHGLCLVHEDPVLSQRSTGEQHMGAAWHVAGAGSLALFAIRISPREPIAIETRTGRPGRRAPK

SEQ ID NO: 183891 - protein, 1217 aa, Oryza sativa
  Clone ID: PAT_MRT4530_80938C.1.pep
MSSSFVNNSVNTNLNKVFPASTMLVWTQVSEIVFPVYTTMPISASPSMTGNENAVATNQDDSMSKDPPAEAENGTSTTSELKKDSNAAKPCRSDKNREPTKMTSEATRAENQLATPAQHIRAVNAILRETPYDPVLNDNLARWTERLRELVTNLSNTFKEAAAAAHPEQPPTGDANGEDPERRESPHRATPPPRGTGDLRDHLNGRQEARRTRDNENHSLRHISSWRHNNEDRGDRSNEDRDRDNRHNRHDHNDCERRVPDDTGRERHHNDDDDGDQRRDNSGRRRQDSRDPGRHPRNRKRVRVVEKDAEAAPQESDSAYPDSDLHVSHIFGGSTMYSSKREYKKVEREVCSTWQGAAPKMKWSEQKIEFSEEDHPKTAVIPGRYPIVVEPTIRNIKVARVLIDGGSSINLLFANTLDAMGIPQSELTPTDQPFYGITPQSSSRPLGNITLPVTFGQANNFQTEQIAFDVAEFDTAYNAIIGRTALAKFMAASHYAYQVLKMPGPKGTITIQGNAKLAVQCDKRSLDMVEQTPSPPTTIEPPKKPSDMPGVPREVIEHKLMVRPDAKPVKQRLRRFAPDRKQAIREELDKLLKAGFIREVLHPEWLANPVMVRKANGKWRMCVDFIDLNKACPKDHFPLPRIDQLVDSTAGCELLSFLDAYSGYHQISMAKEDEEKTAFITPFGKCTFGVPSGKLLGFLVSGRGIEANPEKIKAIENMKSPTRLKEVQKLTGCMAALSRKLRHYFQAHRVTVVSCFPLGEVVRNKDVVSRMAKWVIELSQFDDHFVPRTAIKSQVLTDFVADWTMPDNKSDNQVDNETWTMAFDGALNSQGAGVGFILTSPSGDQFKHAIHLNFRVTNNTAEYEGLLAGIRAAAALGVKRLIVKGDSELVANQVHKDYKCSNPELSKYLAEVRKLEKSEELPEDDTEAEKITRKAKIYCMVGNDLYKKAPNGVLLKCVSSDDGRHLLLDIHEGICWSHAAGRTLVGKAFRQGFFWPIALKDACDMVQRCEACQFHSKHTKLPAQALQTIPLTWSFSCWGLDILGPFPRGQGGYRFLFVAIDKFTKWIKAVPTGEIKANNAIKFSKGIFCRYGLPHRIITDNGSQFISTDFQDYYIELGVKICFASVSHPQSNGQVERANGIVLQGIKTRVYDRLMSYDKKWVEELPLVLWAIRTTSTTSNKETPFFLVYGSESMLPSEPRHQSTRVQKHSDEDQEEQ

SEQ ID NO: 183892 - protein, 101 aa, Oryza sativa
  Clone ID: PAT_MRT4530_80939C.1.pep
MNTRLHPNHYRQDAICDRSDTGRVSNRQPRSHVAPVSAGSGGRCGASQRPEPVYIAGVSRFFLARNLSTHRESLRSHPKPPAELAKGGLRGLPVRSHELRH

SEQ ID NO: 183893 - protein, 767 aa, Oryza sativa
  unsure (1)..(767): unsure at all Xaa locations
  Clone ID: PAT_MRT4530_8093C.1.pep
MASHIVGYPRMGPKRELKFALESFWDGKSSAEDLEKVATDLRASIWKQMADAGIKYIPSNTFSYYDQVLDTAAMLGAVPERYSWTGGEIGFSTYFSMARGNATVPAMEMTKWFDTNYHFIVPELGPNTKFSYSSHKAVNEYKEAKALGVDTVPVLVGPVSYLLLSKPAKGVEKSFALLSLLSSILPVYKEVIAELKAAGATWIQFDEPTLVLDLDSHQLAAFSAAYTELESALSGLNVLIETYFADIPAESYKTLTSLNSVTAYGFDLIRGAKTLDLIKSAGFPSGKYLFAGVVDGRNIWADDLAASLTTLESLEAIVGKDKLVVSTSCSLMHTAVDLVNETKLDSEIKSWLAFAAQKVVEVNALAKALAGQKDEAYFAANAAAQASRRSSPRVTNEEVQKAAAALKGSDHRRATNVSARLDAQQKKLNLPVLPTTTIGSFPQTVELRRVRREYKAKKISEEEYISAIKEEISKVVKIQEELDIDVLVHGEPERNDMVEYFGEQLSGFAFTANGWVQSYGSRCVKPPIIYGDVSRPNPMTVFWSKLAQSMTSRPMKGMLTGPVTILNWSFVRNDQPRFETCYQIALAIKKEVEDLEAGGIQVIQIDEAALREGLPLRKAEHAFYLDWAVHSFRITNCGVQDTTQIHTHMCYSNFNDIIHSIINMDADVITIENSRSDEKLLSVFREGVKYGAGIGPXGVYDIHSPRIPSTEEIADRVNKMLAVLDTNILWVNPDCGLKTRKYNEVKPALANMVSAAKLIRTQLASAK

SEQ ID NO: 183894 - protein, 135 aa, Oryza sativa
  unsure (1)..(135): unsure at all Xaa locations
  Clone ID: PAT_MRT4530_80940C.1.pep
MDSPATPVGLSPPLLSLVPRNEPCGNQRSGGRPTDGDGDDEETAAVFGSTAAMALRXSSATAKGRTRTATRRRPRRRSSRATATSRTAAAHDWSDGGDGGARAHGAMAFLSSNKSQKNLGIIELSKVFNEILSGP

SEQ ID NO: 183895 - protein, 1929 aa, Oryza sativa
  Clone ID: PAT_MRT4530_80941C.1.pep
MPGVPREVIEHKLMVRPDAKPIKQKLRRFAPYRKQAIREELDKLLKADQLVDSTAGCELLSFLDAYSGYHQISMAKEDEDKTAFITPFGVFCYVKMPFGLITTGNTFQRTVQGALSDQLGNNVEAYVDDIVVKTKTSDSLIDDLRETFDNLRRYRLMLNPEKCTFGVPSGKTPRALLYPSPPSPSPLVVGEALAPCALAQPSPPSLQPCAAAVPAVTVAREGHRRDRQVAAVLVRCFAAVGDRWSTIAVVEPKSSAASSSSPPPSVGFPPSFWSPMPRYKPEYLFGVEGFVQELRTMSFVIGFGTAPFYAQIPHDRHEEKCRVKVTLNSNSEDIPSVMFEAGGRNYIHASQEVARIAIGELRDRYSDQLADTEYRYHPRQPQGSDRGSYLETEGIENDATTRHLVEMLWAMDESRAETVLAAQDREDRNRGKICKLEDKVDRLEKELAALKGEAPPQKARIRLTARKRALFVPRYQLAPKVRVVEKEVAPTLADPPVNIISDDEEEESKRNHSKIEWVATQDDEDEPKEPSIDLRCSEELDKMVNTRSNGNGPNNPNNNNNEGNPTLAQVLAQQVQLMNMMMQQLQNQQNQGNNHAPPQNRLTDFLRVRPPTFSSTTNPVEAGDWLHAIEKKLDLLQCTDQEKVSFASHQLHGPASEWWDHFRLNRTTAEPITWLEFTAAFRKTHIPSGVVSLKKKEFRSLTQGSRSVTEYLHEFNRLARYAPEDVRNDEERQEKFLEGLNDELSYSLMIGDYPDFQKLVDKAIRQENKYNCMEQKKRRIAQFKTQQGNNQKPRLTLGPQSIPHGSSSSVVRPQRQFFNNNAGNNIRNQVPRPVAAPTQQQPIKREQGSKPAVCFNCGDPGHYADKCPKPRRVKVVPAQNNSTVPVSKARVNHVAAAEAQDAPDVILVREYPDVFPDDLPEKIHQTKFITMGSSDKFVVVFIDDILIYSRTEEEHEEHLRLALEKLREHRLYAKFSKCEFWLSEVKFLGHVISAGGVAVDPSNVESVTNWKQPKTVSEIRSFLGLAGYYRRFIENFSKIAKPMTRLLQKDVKYKWSEESLEAKPTLIDQVREAQINDPDIQEIKKNMRRGKAIGFLEDEQGTPSPPSLQPCAAAVPAVTVAREGHRRDRQVAAVLVRCFAAVGDRWSTIAVVEPKSSAASSSSPPPSVGFPPSFWSPSTRLRSGGDKPTGVAGESITSGFEGEIMIQERCTVVDCVVRERNRSKSREDHGNREHEVAYKTQGSTEANRMHGSTKQEAEEAFIAFKRYLSNPHVLVAPQPNEELFLYIAATPYSVSTIIVVEREKVQLPVYYVSEALHDVMTRYPQIQKLLYAVIMTSRKLCQYFQAHRVTVVSSFPLGEVMRNKDVVSRIAKWVVELSQFDIHFVPRTAIKSQVLADFVADWTMPDNRSDNQIDNETWTMAFDGALNSKGAGAGFILTSPSGDQFKHAIHLNFRATNNTAEYEGLLAGIRVAAALVVRKLEKRFDGIEVRHVYRKDNIEPDDLARRASRREPLEPGTFLDVLTRPSVKEASGEDSPVAPDISSGAIEAERTVADIETTDDWRTPLIKFIGSEELPEDDAEVEKISRKAKVYCMIGNDLYKKAPNGVLLKCILSDDGRHLLLDIHEEICGSHAAGRTLVGKAFQQGFFWPNALKDACDMVQQCEACQFHSKHTKLPAQALQTIPFTWPLSCWGLDILRPFPRGQGGYRFLFVAIDKFTKWIEATPTGEIKADNAIKFIKGIFCKFGLPHQQLTSREGNGIILQGIKTRVYDRLMSHDKNWVEELPSVLWAVRTTPTTSNKETPFFLVYGSEAMLPTELRHQSTRVQKYSDEDQEEQRYDDVNLLEEHRERVAVRAASYQQALRRYHEKRIRARMLSIGDYVLRRVQSQAGRNKLSPKWEGPYTITQVLRPGQRSKSLIFREEFSDDKAGG

SEQ ID NO: 183896 - protein, 63 aa, Oryza sativa
  Clone ID: PAT_MRT4530_80942C.1.pep
SSIRIHTYSSDIMCRKGNDTMQSGAQEKFHHQVISFNFNLFFLAGAKPRSLHSCSLGCSVFGT

SEQ ID NO: 183897 - protein, 138 aa, Oryza sativa
  unsure (1)..(138): unsure at all Xaa locations
  Clone ID: PAT_MRT4530_80943C.1.pep
MQLNPKARTRRNKTKAKKTLSMCGNHQEAHQLNPMMYTESYCWNRLYRLIQSDPDLADPXIVADLDSSRFLFCSRIDLRLXFRFDLIFIFDTRYYQIWSLTIIFSKRNFKPLLGTTHGLPRIPAEQPPHAGVCFTVVA

SEQ ID NO: 183898 - protein, 100 aa, Oryza sativa
  Clone ID: PAT_MRT4530_80944C.1.pep
MPVFTYCIKTAYIHNANASSCRPMASSSTVASSSDSGGGLVDGGSSGSGGTAAPSPMTMMTRWAVAAVCGGGRDGDDKEAVEALCDDNSDNEDGGSGCES

SEQ ID NO: 183899 - protein, 135 aa, Oryza sativa
  unsure (1)..(135): unsure at all Xaa locations
  Clone ID: PAT_MRT4530_80945C.1.pep
RRGRGRAATRSLSTHRSVTPANSAASSQQPADPQKSPIRPSSNNAGECGPATASLPWMTGTAINPLFRAXPNKIVFGSPLEHEAYVRRWIEERISFRPSFSIKFYPVGDITECIPDEVADVAVLEEPEHLNWYHH

SEQ ID NO: 183900 - protein, 620 aa, Oryza sativa
  Clone ID: PAT_MRT4530_80946C.1.pep
MADNEKGNKVRSQDIGTSSSRVNETPDTSCVAVVQHLINQNQLLIEILQQHRMPILNPSQMQPQVQLEAVQALTPQVSAPPTSQKAPHAMPHVDPKEASIICFMCDEQGHYARNCPQQKRKAPMRTEDEVRKMIITSTEWPPPGMTKHQRRNSFRGAQQLTEHLLANGGRVSDSEDSDQVSSDDEDEMERKACSRWGEVGHVASLCATTCFHCEEDHPPGECPMSRITCFFCEGTDHVPKDCQFSFLLTKKMANQPASSNGEKHQGNTNPRQDHRFSLTPVPGQRNRNEKRKCRVREDICCFNCQGMGHFADKCPKPRNIAAGTSVHATPCNQKLAPQRIVLHASRSSPIARVATAPIPMSALPQGVDAQFQPQPPADKTEASICVVPLEVPIQQLRNQVQDEEPELKEGITPKTVPNQGKIDLHITANLHEADIPTVLWSLEQTPYPFHRKAASQRTSSSPEASAIHIKEYHLIEIGRKMIDKKRLAKMFSSMKEVGRKVIDKQKHVLHRSRKTPDCNCPATVTLSLSKQDDLVDNLSEVDSEDMNHEKFWNGSITALPQPSLSQPKGAPWSKSGEEKIPSATGGQAKQFRVVKFCWKFVKTQRKKSDKKRRPPNLSSC

SEQ ID NO: 183901 - protein, 669 aa, Oryza sativa
  Clone ID: PAT_MRT4530_80947C.1.pep
MSTRRHLAVFTTASLPWMTGTAINPLFRAAYLAKDGDREVTLVIPWLSLRDQELVYPNKIVFGSPLEHEAYVRRWIEERISFRPSFSIKFYPAKFSKELRSILPVGDITECIPDEVADVAVLEEPEHLNWYHHGRKWKNKFRRVIGVVHTNYIAYVKREKNGQAIACFMKYMNTWVTRIYCHKIIRLSGATQDLPRSVVCNVHGVNPKFLEVGKLKLKQLRNGEIAFTKGAYYIGKMVWSKGYRELLDLLSKYQSKLVGLEVDLYGSGEDSDEVRKSAELLSLAVKVHPGRDHADPLFHDYKVFINPSTTDVVCTTTAEALAMGKIVICANHPSNEFFKQFPNCRTYDSGEEFVQLTLDALAEQPAPLTDMQSHDLSWEAATERFMEAAELNLPISAEPRIHQTSKVSLPAFMRTRKLKQSLEDASVYLHQALSGLEVTRRAFGAVPKTLQPDEQLCNDLGLAPAKKKRGKESGRQTGSHPSVPRRHVDAPFNGGKAEWRQRKVVETDVETATAAPKPPLFFPRRDSDASAPPYPPLPILLSPYPQDGLPLPLFSLDAETPLDTQTWAPVRASPEGTRWTVYALPPATGGPERPTRQLRATKRLKSHHPAFVNFPLSRLNKFAGKSPKGTSRASAQLKTRRLVEFLLLFVRLTCANDNRTSVHREGPTG

SEQ ID NO: 183902 - protein, 1122 aa, Oryza sativa
  unsure (1)..(1122): unsure at all Xaa locations
  Clone ID: PAT_MRT4530_80948C.1.pep
MAASGSVSCRLEDVTLHEFNNLARYAPEDVREDEEKQEKFLAGMDPELSVRLVSGDYPDFQRLSQQQQNQQGNRAPRPLAPAVQPGQGRRDVQGQQRLCFNCFEPRHFADKCPKPRSQQGQAPPRPNNGGKDATRGRVNHITAENVLTTPDVIVGAMTAKYYSPVVPIEIQGIPFPLDLILLDTKDLDVILKMNWLTQFQGVVDCARRTVTVYQKPDQPVVFFAHPTPTGSSVLHQLGLSEIPVVSEFGMPPKREIEFRIDLAPGTTPLYKRPYRMAANELAKVKKQLEELKEKGYIRPSTSPWGAPVTFVEKKDKTKRMCVDYRALNEVTIKNKYPLPQIDDLFDQLKGATVFSKIDLRSGYHQLRIREEDIPKTAFTTRYGLYEFTVMSFGLTNAPAFFMNLMNKVFMEYLDKFVVVFIDDILVYSQSEEDHQQHLRLLSKCEFWLSEVKFLGHVISAKGVAVDPETVTAVTDLKQPKSVTQVRSFLGLAGYYRRFIKNFSKISRPMTQLLKKEEKFVWSPQCERAFQTLKEXLRPHEGNYPTHDXLELTAVVHALKIWRRYLIGNHCEIYTDHKSLKYIFTQPDLNLRLRRWLELIKDYDVGIHYHPSKANVVADALSRKGHCSTLCVRGIPPELNQQLEALNLSVVSHGFLAALEAKPTLLDQIREAQKNYPDMHGILKNMKQGKAAGFMEDEHGTLWNGNRVCVPDNKEFKQLILQGAHESPYSIHPGSTKMYLDMKEKYWWVSMKREITEFVALCEVCQHVKAEHQRPAGLLQPLQVPEWKWDEIGMDFITGLPKTQGGYDSIWVVVDRLTKVARFIPVKTTYGGNKLDELYFARIVSLHGVPKKIVSDRGSQFTSHFWKKLQEELGTRLNFSTTYHPQADGQTERLNQVLEDMLRACVLDFGKTWDKSLPYAEFSYNNSYRASIQMAPYEALYGRKCRTPLLWDQVGESQVFGTDILREAEAKVRTIRDNLKVAQSRQKSYADNRRRDLEFAVHDFVYLQVTPLQGVHRFQTKGKLAPRYVGPFRIIARRREVAYQLELPASLGNVHDVFHVLQLKKCLRVPSEQADSVQIEVREDLTYVEKPVKILDTMECRTWNRVIRFCKVLWSNHAKEEAT

SEQ ID NO: 183903 - protein, 76 aa, Oryza sativa
  Clone ID: PAT_MRT4530_80949C.1.pep
FFFFFFCFFFFFFFFFFFRLNTFIHSQGSLQCAIMGGKWVLAGISTTQHTNKTSQQQPLLSRSATDRNAFSITKVP

SEQ ID NO: 183904 - protein, 57 aa, Oryza sativa
  Clone ID: PAT_MRT4530_8094C.1.pep
FFHVKHGSDITYDYMNDSKNKHPLYICKTLKLSLSLQYVVTGIHHTVSDNQIKLCMH

SEQ ID NO: 183905 - protein, 2048 aa, Oryza sativa
  Clone ID: PAT_MRT4530_80950C.1.pep
MPRYKPEYLFGTEGFVQELRTMSFLIGFGIALLYALIPHDRDEEKCRVKVTLNNNREDIPSVMFEAGGGSYIHACQEVARIAIGELRESYNDRLADTEYRYHPRQPQGSDRGSYLEPAGIENDATRRHLVEMLWAMDETRTKIVIAAHDREDWNRGKICKLEDKMVLTRSNGKGPNSNNNNNNNAENPTLAQVLAQQAQLMNLMMQQLQNQQNQGNNHAPPQNMLAEFLRVRPPVFSSTTNPVEAGDWLHTIEKKLDLLQCTDQEKVSFASHQLHGPASEWWDHFRLNRTTPEPISWLEFTTAFRKTHIPSGLVSLKNKEFRSLTQGSRTVTEYLHEFNRLEKFLEELNDELSYPLMTGDYHDFQKLVDKAIRQEDKYNRMEQNFAGNHGMEVEELRRPLMVSTPSNQALSSQRSPSIRIEIQGVPFLANLILLESKDLDVILGMDWLARYKGLIDCANRKVTLTSNEGQVVTVHALPSEPLRSSLNQMTLEEIPIVQEYPDVFPDDLPGATVFSKIDLRSGYHQLRIKEEDIPKTAFTTRYGLFECTVMSFRLTNAPAFFMNLMNKVFMEYLDKFVVVFIDDILIYSQTKEEHEKHLRLALEKLREHQLYAKFSKCEFWLSEVKFLGHVISAGGVAIDPSNVESVTNWKQPKIVSEIRSFLGLAGYYRRFIENFSKIAKPMTRLLQKHVKYKWSEECEQSFQELKNRLISALILILPDPKKGFQVYCDASKLGLGCVLMQDGKVVAYASRQLRPHEKNYPTHDLELAAVVHALKIWRHYLFGTRTEVYTDHKSLKYIFTQPDLNMRQRRWLEWIKDYDLGIHCHPGKANVVADALSRKGFCNAMEGRQLPLELCKEFERLNLGIVSKGFVAALEAKPTLIDQVREAQINDPDILEIKKNMRRGKAIGFLEDEQGTVWLGERICVLDNKDLKDAILKEAHDTLYSIHPGSIKMYQDLKERFWWASMKREIAEYVAVCDVCQRVKAEHQKPAGLLQPLKILEWKWEEIGMDFITRLPRTSSGHDSIWVIVDRLTKAAHFIPVRATYSGSRLAELYMARIVCLHGVPKKIVSDRGSQFTSKFWKKLQEEMGSTLNFSTAYHSQTDGQTERVNQILEDMLRACVLDFGGSWDKNLPYAEFSYNNSYQASLQMAPYEALIDVGHLYAEIIGLLDKIMAASAPSNFNLRSILEKEKLTGTSFMDWYRNLRIVLRQEHKEFVLTQPFLADLPNNSPAAQRMEHERRCKEYLDISCLMLATMSPELERQYEALDAHTIITGLRNMFEDQARAERFNTSKSMFACRLAEGNPVSPHVIKIIGYTESLDKLGFPLSQELATDLILQSLPPSFEPFIMNFNMNNLNRTLAELHGMLKTAEESIKKNSNHVMVMHKRKPNNKKSGQKRKLNSDEIMSTSNSKTKVQKTGPAKDAECFFCKETGHWKRNCKKYLEQLKQKQKDGKSSTSGINVIEINIATSSTDYWVFDTRGGFGYFITFTDDSSRYGYVYLMRHKSESFENFKEFQNEVQNHLGKTIKYLRSDRGGECLSLEFGNHLKEYGIVPQLTPPGTPQWNGVSERRNRTLLDMLWKHRLHEGPIGYGVHLRDNDEPTTYEEEMVGPDSEKWLGAMKSETESMHVNQIWNSVDPPDGVKAIECKWVFKKKIDVDGNVHIYKARLVAKGFRQIQAIAAYFDYEIWQMEVKTAFLNGNLNEDVYMTQPKGFVDPQSAKKICKLQKSIYGLKQASRSWNIRFDEVVQALGFFKNEEEPCVYKKISGSALVFLILYVDDILLIGNDIPILESVKTSLKNSFSMKDLGEAAYILGIRIYRDRSKRLIGLSQSTYIDKVLKMLNMQDSKKGFLPMPHGINLGKNQCPQTTDERNKMSVIPYASAIGSIIDSSTRVSTHIPRYKPEYLFGTEGFVQELRTMSFLIGFGIAPLYAQIPHDRDEEKCRVKVTLNSNPEDIPSGMFEAGGGSYIHACQEVARITIGELRESYNDRLADTEYRYHPRQPQGSDRGSYLEPAGIENDATTRHLVEMLWAMNETVATGKIAFSRTLVY

SEQ ID NO: 183906 - protein, 632 aa, Oryza sativa
  Clone ID: PAT_MRT4530_80951C.1.pep
MVAAGDQRRGGAAAERGEGRGKRRRRSMAHPGTTRTAETTTGAEEGGGAVRIDEDGGAPTVGGRNEGVDEVDGNAAKPKEVTPSREEVRSDDGGEPELGGDGGERGRRRGHESDGERCILESFWDATECEQSFQELKSRLISAPILILPDPKKGFQVYCDASKLGLGCVLMQDGKVIAYASRQLRPHEKNYPTHDLELAAVVHALKIWRHYLFGTRTEVYTDHKSIKYIFTQPDLNMRQRRWLELIKDYDMGIHYHPGKANVVADALSRKGYCNATEGRQLPLELCKEFERLNLGIVGRGFVAALEAKPTLIDQVREAQINDHDIQEIKKNMRRGKAIGFLEDEQGTIWLGERICVPDNKDLKDAILKEAHDTLYSIHPEYVAVCDVCQRVKAEHQKPAGLLQPLKIPEWKWEEIGMDFISGLPRTSSGHVSIWVIVDRLTKVAHFIPVKTTYSGSRLAELYMARIVCLHGVPKKIVSDRGSQFTSNFWKKLQEEMGSKLNFSTAYHPQTDGQTERVNQILEDMLRACALDFGGSWDKNLPYAEFSYNNSYQASLQMAPYEALYGRKCRTPLLWDQTGERQVFGTDILREAEEKIPTFPESPFSQEKILKSSKASKASHTDPKQPFEHVDPI

SEQ ID NO: 183907 - protein, 93 aa, Oryza sativa
  Clone ID: PAT_MRT4530_80952C.1.pep
VGNEPPLTRAKAKGKASTLATTKSHKRSTRSGRLIGPRLDPRSQKIIYDMDGSILAITNLESPRLQGPYSEPPPKRRKTPRCSSPGHRRLLPF

SEQ ID NO: 183908 - protein, 215 aa, Oryza sativa
  Clone ID: PAT_MRT4530_80953C.1.pep
CRRCKARCKVECSGSNSSSNVDTATVESKAADATTMSPTTSTSSDASRNQDQSESQFVFQEQAPATSDSTPPSLQQTSTAKSPPIPEATSATYSGYGLQVEGSTSAAIRVALEEASCKVSEELSRSPSNRLNSKVIKLPVSTVQIKISKFREQPQFWSGSVQAELAGLVFAKQRNRKVESSQFNRADQSNRPPAPAFFLAIPESRDEIPVRGVDL

SEQ ID NO: 183909 - protein, 291 aa, Oryza sativa
  Clone ID: PAT_MRT4530_80954C.1.pep
MTSSFIDNSVNTGPIQGVPTSTMLVWTQVDEIVFPVYTTVPISAGPSMTGNENAVAITPGNSMSKDPPAVAENETSTSYEPEKMKNHDFSSYKVLLCAIKTPLPKVQQSKISLKDADKEQGATLISDRFIGVIDIDPHESSVLHLLEDYGSSSSSTPRDVFAIDLWQQFVANFQGTYKRHAIEDDLHALTQNPGESLRDYVRCFNECRNTIPEITDASVIRFFKTGVRDRYTTQELATRRITTTQRLFEVTDRCAHADDALRRKNDKPKTGGEKKPAKDVSRPKTTLKYIL

SEQ ID NO: 183910 - protein, 27 aa, Oryza sativa
  Clone ID: PAT_MRT4530_80955C.1.pep
LSSQFSSTTYNSRFERGRIRHGKRYGA

SEQ ID NO: 183911 - protein, 156 aa, Oryza sativa
  Clone ID: PAT_MRT4530_80956C.1.pep
LTVHIPVHTHVTQDGARGDGEVDGGGDAGHRPLQRGRRHEAAVADVGEEHAGDGRTGTDGEQPRDPARRRRIPLLLLIHQQHAREVSLRRHREQREGEAGLGDVLAAGDASSGDAAGAGADGPASHPGREEDGHGHHEHGDQVGQKLGQGKKIRSK

SEQ ID NO: 183912 - protein, 249 aa, Oryza sativa
  unsure (1)..(249): unsure at all Xaa locations
  Clone ID: PAT_MRT4530_80957C.1.pep
MAAEMALVKPISKFSSPKLSNPSKFLSGRRFSTVIRMSASSSPPPPTTATSKSKKGTKKEIQESLLTPRFYTTDFEEMEQLFNTEINKNLNEAEFEALLQEFKTDYNQTHFVRNKEFKEAADKLQGPLRQIFVEFLERSCTAEFSGFLLYKELGRRLKKTNPVVAEIFSLMSRDEARHXGFLNKGLSDFNLALDLXFLTXARKYTFFKPKFIFYATYLSEKIGYWRYITIYRHLKENPXVQCYPIFKYF

SEQ ID NO: 183913 - protein, 69 aa, Oryza sativa
  Clone ID: PAT_MRT4530_80958C.1.pep
MHYYSNQNPSNIQVLPIHFSIKGENNINKGDRKNQQIITESIKNQLAKAIPKFSVIESSAELTGTSNPW

SEQ ID NO: 183914 - protein, 54 aa, Oryza sativa
  Clone ID: PAT_MRT4530_80959C.1.pep
GLINGVRVFGGPIGTKVPRKTWKAIIYSPLVYRRADQREYFGFINPREGYKRVG

SEQ ID NO: 183915 - protein, 616 aa, Oryza sativa
  Clone ID: PAT_MRT4530_8095C.1.pep
MARDKQSALIVAAFVLLCSGCLCGVADGAKGGRKTKGPVIGIDLGTTYSCVGVYRNGHVDIVANDQGNRITPSWVAFTDDERLVGEAAKNQAALNPDRTIFDIKRLIGRRFDDEEVQRDVKYLPYKVVDKGGKPYVEVRVKAGEVKVFSPEEISAMILAKMKETAESYLGQRVTDAVVTVPAYFNDAQRQATKDAGTIAGLNVPRIINEPTAAAIAYGLDRKGAGEMTNVLVYDLGGGTFDVSVLSLDHGVFEVLATSGDTHLGGEDFDRRVMDHFIRLVKRQHGRDIGGDGRALGKARRECERAKRALSRQHQVRVEIEALFVGVDFSETLTRAKFEELNMDLFKKTLGPVRKAIADAKLKKSDIDEIVLVGGSTRIPKVQELLKEMFDGKEPTKGINPDEAVAYGAAVQGSIISGEGGAETKDILLLDVTPLTLGIETAGGVMTKLIPRNTRIPVKKSQVFTTYEDHQTTVSIKVFEGERSLTKDCRELGRQEEIDRMVREAEEFAEEDRRVRERVDARNRLENYVYRMRSAVRDGGMAGKIGDDDRERMESALTEALEWLEDNDGGARTAEKEDYEEKLKEVEQVCGPIIKQVYKKSGDASAGAGDDDDVNEL

SEQ ID NO: 183916 - protein, 41 aa, Oryza sativa
  Clone ID: PAT_MRT4530_80960C.1.pep
TSTSIKCSISSSFKYRVTYINHTSFLLSFFHHFIFFRGRLS

SEQ ID NO: 183917 - protein, 398 aa, Oryza sativa
  Clone ID: PAT_MRT4530_80961C.1.pep
WRAHRRAREAALWRRLAASERRPRCAVGRAAECTAEALAATACGRRWAAAAELGAEKRGGRAETATRRRAGGRTGGGGRRRRGRRPATWAQGSEWARGGGKGGGVGGCRRGAVGWRKGTTPTGGVHLSASRREGEGETGRSNKERPSAGKKRGKLQGVTMSLPPPPLGATARAAVRTAPPLGHASPTVPLDVFPTVGLPETPSTPPPLAAPPLSSSRRPPIPFRRRRSASTAAAHNRAPLSAIPRRFLSPLPSWSSRGPPRTAALAAGLPSRARAVPPIPPPHDCLRWPPSRCLPIFRAGGWNRLDPLWPPVPASPSDSPLLAGTRRLSSPSSRRPARAKRASRLGAASFGFAAPSPSPSTPSSSSPTAGAPPSPSTRAAPPPSSTPGASSVAAVASG

SEQ ID NO: 183918 - protein, 530 aa, Oryza sativa
  Clone ID: PAT_MRT4530_80962C.1.pep
MAMEPTVKVALGTAAFGIFWVLAVFPAVPFLPIGRTAGSLLGAMLMVLFGVMSADEAYAAVDLPILGLLFGTMVVSVYLERADMFKHLGRLLSWRSQGGKDLLVRTCVVAALASALFTNDTCCVVLTEFILKIARQNNLPPKPFLLALASSANIGSAATPIGNPQNLVIAVQSGISFGQFVFGILPATLVGAVVNAAILLCLYWRHLSDEKCVEVVAPVPTDVVEEEDVTSHRFSPATMSHPRSSSHHHHHQQPGSSLSSPDCEVFEPVKPVPVTSNGDSNNKPDAADAAVVVGIHQRRRGVRGGVRMKEEHAFRWVEEKGEAMEQWKSTVWKTGVYVITLSMLVALLLGLNMSWSAITAALALIVLDFKDARPCLEKVSYPLLLFFCGMFITVDGFNKTGIPSAFWEFMEPYARIDTPTGIVILALVILLLSNVASNVPTVLLLGARVAASAAAISPAAETNAWLILAWVSTVAGNLSLLGSAANLIVCEQARRSEQYGYTLSFFSHLQFGFPATLIVTGIGLLLIRSN

SEQ ID NO: 183919 - protein, 158 aa, Oryza sativa
  unsure (1)..(158): unsure at all Xaa locations
  Clone ID: PAT_MRT4530_80963C.1.pep
NSCLSYVFSCGLSQSQETCLSLSRPSMPLCSTAAVAFLAEDGAEKQGMAAAGAGRLREHHQREERQLRDXEPLHLRRVLRRRLLHRRNRGRRRRRGGEGRRAPGGGVAAHVADEVVDGDGRHHLAPCPPPPLSATIGTLLSGDGGGITAEDDINSSGS

SEQ ID NO: 183920 - protein, 129 aa, Oryza sativa
  Clone ID: PAT_MRT4530_80964C.1.pep
MATAVESEHDDGGGLQGYRSVCKRAEEVTVAAAKEVGEEDGDASGEVVEGVEEVAEVRERAVDDVMEMDDATGTSSSPPASSHAFTKCMMLKTGTSNHDGVEWRAVAGRRRRRHGSPSSSPFDPGVGIF

SEQ ID NO: 183921 - protein, 100 aa, Oryza sativa
  Clone ID: PAT_MRT4530_80965C.1.pep
MAWSACPLFLKCGAFLSACSARRSDSSWLNVTAMNTDGTFSSHGVISIFSASSQAYCKFSNEKETVKDRLTGVECSSAYRSFDNSIAKALAMKDRKKDNS

SEQ ID NO: 183922 - protein, 194 aa, Oryza sativa
  Clone ID: PAT_MRT4530_80966C.1.pep
MGVGWEEWIPDDFAAPSCWQRRRLRRTDATRRATGRDAACREEYPPGAQPPAGACLRPDVNRRGRVERAGPTDGDGGGEGDIHAGDSYAPLAVFDSLRSTLALWPLLYHHAPPADYHRLLRAHRLLPLARRLLMLKFGKPQSHHRPRASISFTVLKSTDGYYEMLLVGFLMDSVKEVYLEEIVFKEDVSWQFIY

SEQ ID NO: 183923 - protein, 99 aa, Oryza sativa
  unsure (1)..(99): unsure at all Xaa locations
  Clone ID: PAT_MRT4530_80967C.1.pep
GGQSSTVEEKGAAAATEEVGRLCAGSASEQTGVTGFSGPGLLTGRSGGSLGGSGGXSTVEERELRXRQRWRTRAEAATAHASGXASEPTGVGRGEDRRL

SEQ ID NO: 183924 - protein, 102 aa, Oryza sativa
  Clone ID: PAT_MRT4530_80968C.1.pep
MCEMNHWKSYAFKLRERVVQILDPKKLFCGNDSHAENNHQWNGPILAKAMQECLSMFFLDWTDEVTNVDSGINSLVYMKNWMASNVSEVSIWYPLTISEQTL

SEQ ID NO: 183925 - protein, 478 aa, Oryza sativa
  unsure (1)..(478): unsure at all Xaa locations
  Clone ID: PAT_MRT4530_80969C.1.pep
MFDPPIADLMKIRSSILAVVLVWCLLALQVLLVFATVFAATQWATSSAMYCNDLTASVHRPHSVSITEFGAVNDGVTLNTKAFKNAIFYLSSFADKGGAELFVPAGRWLTGSFNLISHLTVSLDADAVIIGSQDSSDWPVIDPLPSYGRGRELPGANGTIDGQGELWWNGVNKHTEAIGIAVAVDAAAFAAREGEXRRSRESSILAVVLVWCLLVSRFEGGRTDLTVSSLAARENDEPIRICTSSPFGFCNCFCCDSMGHFICHVLQRLDXSVHRPHIRNITELTGNSAGIAFGSEMFSSIFDVRAEGLRFINSVHGIRIKTAPGRGGYVKNIYIADVSMDNVSIAIRITGNYGEHPDDNYDKNALPVISNITIKNVVGVNIGTAGMLLGIQGDIFSNICLSNVSLSSKSADPWNCSLIEGFSNSVAPEICEQLRPSPGPGQVCYDGNSYPVPAAQQPYKSGATRLQNPFLKFISLYS

SEQ ID NO: 183926 - protein, 195 aa, Oryza sativa
  Clone ID: PAT_MRT4530_8096C.1.pep
MKRGKNKRCNRRGTCGRGGKDWGYTEPIGGEVTAGAEDGRVYERAREGTTGKRTHQLGGHSLSTRERGAGRKKGHWPAPAMAAAQGCGYGLEVVPSALGSKGDGKLPRLEGEWRQRGETWWHGGEVNAGDGDVDFSTDVVGIRVWGRWSWMGSEQDGRGRLDKDGCSCHVAQLVSPEKAPASHLHYKWTHGPLQN

SEQ ID NO: 183927 - protein, 93 aa, Oryza sativa
  Clone ID: PAT_MRT4530_80970C.1.pep
LALSLGHCWTPLCIIWWPARKRKIMLKRSFLSGRCCHWPRFGRRQVSWPGQYGHLVGQPSFKHWQHRAWVHQLQQFSQLVHQDIQSFPQQQTC

SEQ ID NO: 183928 - protein, 192 aa, Oryza sativa
  Clone ID: PAT_MRT4530_80971C.1.pep
DNVNRSRRHVSSRRHDNGNRGDHSNEDRDHDNHHDHNDRERRVPDNTGHGRRRIDDDDGDRRRDNSGRRRQDSRDPGRHPRNRTLEPSDPSSSSSSASSSSSDRHPRSTHDRRQPTAPNAGCRAFGRSLRDVRWPTALKGSARSWLMHLPPYSISSWADLLLPSPWFHDQEERHPPGVSSTLHWWKPICRGP

SEQ ID NO: 183929 - protein, 364 aa, Oryza sativa
  unsure (1)..(364): unsure at all Xaa locations
  Clone ID: PAT_MRT4530_80972C.1.pep
SSPTPHVGRQNLAPTGHPPLGSPPHRAVAAVGFARLSSTPAAPSLSGFIAGIRIPSRSGHPESRPSVAVVLPWLVVAVRRRLPPRRPPSVRHPSXSFPLPPPPSAAAAVGRVPSPLALAGQPALXRAEPGGRLYRRPRSARGRSGPSVPWTGGGPPAWSRSTVNRPPLSRCPVGPACRRRASLRWRVLRGVGFVRAVEDACGVVFPLQFKSRISSSYLLFFRCIYNSIREFLGMTSRPRRHRRRRAVVVAAPRPTALSRPPSSRIWEGSGGEGSRPRRCRRRRPPLSTLRPDLGEEREHHPTGILDGTDEAYSSEKPSSDPNSNSGGWEKGVQLYPQDTAPRHVSVRRHATTTYRKEAVTGPFA

SEQ ID NO: 183930 - protein, 345 aa, Oryza sativa
  unsure (1)..(345): unsure at all Xaa locations
  Clone ID: PAT_MRT4530_80973C.1.pep
MCIKLPVQDQPGYTNDNVDIQIHREHHSTGILDGTDEAYSSGKPSSDTYPSSGVGKRHSPTTRFRAPTCHHDIPERGRDRTLHITPSNQAHHTSGFTPTARKAAGSPLSCLGESGSRIGRRRAHPNSITPTLAWMRRLEESYTTSPAVAHAGLWADVSTEXVRRRHAGPTDRTAVGARGRARGHGASRTGDHGAGGAALTRRRCACGSGARRRPTATDRRRRAAARGGAAATQLGGDAAAKRCGRERKRGGGPHRQRSTTAGDGGRWRRRDELRNLLTNKRRGIRGRGKSARERERRPKAAAMASLTGARRGRVSGGEPQRGRGGRGRSRPRESNGGDGARRRRA

SEQ ID NO: 183931 - protein, 920 aa, Oryza sativa
  unsure (1)..(920): unsure at all Xaa locations
  Clone ID: PAT_MRT4530_80974C.1.pep
YGAPGLGCILIXNTKAISVKEHVNSMAAISTLFEGKLTEAQLEQGFTQQFRWNWIWKAKAMPNGSFQMRFPNKLRFEELANFDYFTVKGTDVQVNVKEWTQEAEAVGKLNIAWVKVAGIPDEMKGYQALYEVGSNLGPVMEIDMVTFRANNIIRLKVGLMETDVFPLKLVLTTPKGFLYQARFTLEEVIEQGWFREEIMEEVVVETDDKDLGFAEQSTFGKSRSVVSVTPELMQKEEQMKQLQILKDREMAMQLQVEEDNSSGMKRKLIMDVEGSDKDAGQLGEGVEDKLLKIQEQVIQDQLMGGKKVAVEVSKNVKEMSEEDKEKVNLGDSEDFLDSQESVDSFARQVGVLITEEDTESQEEEKRRSKRLKDKEDSCAIDNIDLNLSLIKDLECARISLFLKEQEVMKNKNCESKTEIEFPVENLLDELCSSEGYDSDLEHIDSLLKGSHFSGSKHKSKRGNLEIFKKNIDFVGIMETIKQDFSVGLLRGLSGNKNMKWEWLPAMGHSGGILVGINIDKLSMLAVSKGDFHVKIELQVMQTNFCWDLIVVYGAAQNAHKDRFLTELANIIQKQMKPLVMGGDFNIIRKESDKNKAGGYNRWSFIFNAVIEQANLREIFLGGRKFTWCNNQENPTLEKLDRIFVNTDWEKEYPLTMAKTLTRSISDHNPLLIDTGVLKITHKSFKFELSWFLREDLKEIVESVWKINYYGSSIERWQKRFRALRKKLNGWNKNWEGRYRREKESILEKIENLDAKVERCGMSREDREERKELEDKLNFVINLLELVNDFHKGLVDIDRLNFGVINLIPKIKDAAQIQKYRPICLLNAKEFPDQWCDWVMKVIMGGKVAVQVNDQVGPYFKTHKGLRQGDPLSPLLFNLAAKALILLVQRAEDNLLIEGLGENDNNKVVILQYADDTIFLL

SEQ ID NO: 183932 - protein, 74 aa, Oryza sativa
  Clone ID: PAT_MRT4530_80975C.1.pep
MGATSKTMHPQPTMADVSTEGCGADMRDPPVSDPGERERGGGSRAHYAHAAAVRMRQRRKATADGDRPAAESGG

SEQ ID NO: 183933 - protein, 126 aa, Oryza sativa
  unsure (1)..(126): unsure at all Xaa locations
  Clone ID: PAT_MRT4530_80976C.1.pep
FPTHPSHKQEYRPNPTYGRNPRDSQAGLSPLAAGRPGECPSTPDFIHLXPCTFVYNQTEPQTKPYPLDMXKYGSALQQRPELNPYSGRGATSHNWHAPKPPRKTGFRGFERGREGYVQFHHKPTIP

SEQ ID NO: 183934 - protein, 376 aa, Oryza sativa
  Clone ID: PAT_MRT4530_80977C.1.pep
MGGALTSLCVSVCLFVRSPKKFGSASADWCLPSAGGKPPPPPPLYASSSSPATSGSKPSPASSRMQVKQKVYELYKGTVERVTGPRTVSAFLDKGVLSVPEFILAGDNLVSKCPTWSWEAGDPSKRKPYLPPDKQFLVTRNVPCVRRAVSLEEEYDAAGAEVVLGDDEDASKPEEEEDIPSMDTLDIGKTEGINSIPSYFSAGKKAEEEEDIPDMDTYEDTGNDSVATAQPSYFVAEEPEDDNILRTRTYDVSITYDKYYQTPRVWLTGYDESRMPLKPELVFEDISKTMRGRRLWPQSYPLLNMTTLWTSIWAVQADDLLIEATYMSILHIRDYMSLLSLDHAISCLHTDIDSNLMLRQESERSCRRCTKAYHGA

SEQ ID NO: 183935 - protein, 686 aa, Oryza sativa
  Clone ID: PAT_MRT4530_80978C.1.pep
MEFLDGRSPTRTEMGRHCIVPVARQVGELGAQGSTTMSSSFVDNSVNTNLYQGVLASTMLVWTQVGEIVFPVYTTVPISAGLSVTGSENAVATTQDDSMSKDPPAEAENGTSTTSEPEKDPSAAKPYISDKNHEPTRMNSEVTRSWCPIHKTRKHTLQACWVFLNVHAEIRACKERGIQRTSSTRDVYCPIHKTKNHDLSSCKVFLSAMKTSPPKVQQSHIPFRDEDKEQGATPISDRFVGVIDIDPHELSVLHLLEDYGSSSTSTPRKRTRNSHQLAVLMAKTLNSGIRLIEPPLHLAAPTETVITATTATITMIANGGCWAILVEDATIMTMTMEIGAGTTTGDDDRILENPADALTAEAQPSYGGRWRRRRGEPATAEARHCGRGRRRRGLTTVDGGTAERAALRPRTAEARPSDGNIDSAYPDSDLHVSHICGGSTAYSSKREYKKVEREVCSTWQGAAPKMKWSEQKIEFSVEDHPKTAVIPGRYPIVVEPTIRNIKVARVLVDGGSSINLLFAGTLDAMGIPRSELTPTDQPFHGITPQSSSKPLGKITLPVTFGQANNFRMEQITFDVAEFDTAYNAIIGRTALTKFMAASHYAYQVLKMPGPKGTIIIQGNTKLAVQYDKRSLDMVEHTPSPPATAEPPKKVSKTNKTPKPDSAIKIVPLSSANPDKTVKIGASLDEK

SEQ ID NO: 183936 - protein, 305 aa, Oryza sativa
  Clone ID: PAT_MRT4530_80979C.1.pep
MQVKQKVYELYKGTVERVTGPRTVSAFLDKGVLSVPEFILAGDNLVSKCPTWSWEAGDPSKRKPYLPPDKQFLVTRNVPCLRRAVSLEEEYDAAGAEVVLGDDEDASKQEEEEDIPSMDTLDIGKTEGIKSIPSYFSAGKKAEEEEDIPDMDTYEDSGNDSVATAQPSYFVAEEPEDDNILRTRTYDVSITYDKYYQTPRVWLTGYDESRMPLKPELVFEDISQDHARKTVTIEDHPHLSAGKHASVHPCKHAAVMKKIIDVLMSQGVEPEVDKYLFIFLKFMASVIPTIEYDYTMDFDLGSTSR

SEQ ID NO: 183937 - protein, 669 aa, Oryza sativa
  Clone ID: PAT_MRT4530_8097C.1.pep
MARDKQSALIVAAFVLLCSGCLCGVADGAKGGRKTKGPVIGIDLGTTYSCVGVYRNGHVDIVANDQGNRITPSWVAFTDDERLVGEAAKNQAALNPDRTIFDIKRLIGRRFDDEEVQRDVKYLPYKVVDKGGKPYVEVRVKAGEVKVFSPEEISAMILAKMKETAESYLGQRVTDAVVTVPAYFNDAQRQATKDAGTIAGLNVPRIINEPTAAAIAYGLDRKGAGEMTNVLVYDLGGGTFDVSVLSLDHGVFEVLATSGDTHLGGEDFDRRVMDHFIRLVKRQHGRDIGGDGRALGKLRRECERAKRALSRQHQVRVEIEALFVGVDFSETLTRAKFEELNMDLFKKTLGPVRKAIADAKLKKSDIDEIVLVGGSTRIPKVQELLKEMFDGKEPTKGINPDEAVAYGAAVQGSIISGEGGAETKDILLLDVTPLTLGIETAGGVMTKLIPRNTRIPVKKSQVFTTYEDHQTTVSIKVFEGERSLTKDCRELGRFDLSGIAPAPRGVPQIEVTFEVDENGILHVTASDKAAGRSKSITITNDKGRLSQEEIDRMVREAEEFAEEDRRVRERVDARNRLENYVYRMRSAVRDGGMAGKIGDDDRERMESALTEALEWLEDNDGGARTAEKEDYEEKLKEVEQVCGPIIKQVYKKSGDASAGAGDDDDVNEL

SEQ ID NO: 183938 - protein, 288 aa, Oryza sativa
  unsure (1)..(288): unsure at all Xaa locations
  Clone ID: PAT_MRT4530_80980C.1.pep
AATSPLAAARRLGRLGRRTLAGERRLFGTNGGHQRVEGDSANLPVTKRAAEDQRTATATRKKRRRPSGQRXRRCSGGLRRQXSGGRGRRRLGDPDGGLPEXRRRPKRRRHTAGRTAATAAQGYTGLGLYRQREAKARVATGSGDTGXPFKGARRRRRRPTATGDAMEGSGSERXKADPIRLRIKHFPSRFSRYFQRGKGRGDLGKHFPSINFTGSGKERPDLEGDGGMARLGFRAAAARRRRRXPTGGTHLSAIARARARLRTGPAWAEEREXRGFGPTFGPKPKEDF

SEQ ID NO: 183939 - protein, 731 aa, Oryza sativa
  unsure (1)..(731): unsure at all Xaa locations
  Clone ID: PAT_MRT4530_80981C.1.pep
MSWHRAGVLLLGAQSCLPVPGVPAVGGIGSVLLSMARMGWKLCHVFRLYTVVMAGSINRRGLDLTGFVLELRGMCIVLGYPHGVDYQGKQLPEQEGDDAEPHAAREVTAVILTGSPERSSLAVTAGGDSFSAACQNAALLAIGTLHQLYPDELQHSPYRYHHAPGAHGGGVRRGSYRLPSDGAPWDGREQHEDPGAASGESAAEEGPRRSGGAAASAQDRPGRGEVLLPVKAVTQVRSFLGLAGYYRRFIENFSKIARPMTQLLKKEEKFVWSPQCEKAFQTLKEKLVSSPVLILPDTRKDFLVYCDASRQGLGCVLMQEGHVVAYASRQLRPHEGNYPTHDLELAAVVHALKIWRHYLIGNRCEIYTDHKSLKYILTQSDLNLRQRRWLELIKDYDVGIHYHPIKANVVRDALSRKSRCNTLGVRGIPPELNQQMEALNLSIVSHGFLATLEAKPTLLDQIRDAQKNDPDMHGIVKNMKQGKAAGFTKDEHGTLWNGNRRVKAEHQRPAGLLQPLQVPEWKWDEIGMDFITGLPKTQGGYDSIWVVVDRLTKVARFIPVKTTYGGNKLAELYFARIVSLHGVPKKIVSDRGSQFTSHFWKKLQEELGTRLNFSTAYHPQTDEQTERLNQILEDMLRACVLDFRKTWDKSLPYAEFSYNNSYQASLQMAPYEALYGRKCRTPLLWDQVGESQMFGTNILREAEAKVRTIWDNXKVAQSRQKSYADNRRRNL

SEQ ID NO: 183940 - protein, 128 aa, Oryza sativa
  unsure (1)..(128): unsure at all Xaa locations
  Clone ID: PAT_MRT4530_80982C.1.pep
DVSDIEKPAAVRRRDNPDQFSGXGGGVVDXGMIXLRRRIXXXRAAXXGWXPPAEWAAWEXXWYGSYHPHVCALVGAVQAFLXSXRPGVGVGIVAXVAVSVPTXXFVXXSGLLHASQFSNLQKSFANHG

SEQ ID NO: 183941 - protein, 563 aa, Oryza sativa
  Clone ID: PAT_MRT4530_80983C.1.pep
MVNTRSNGNGPNNNNNNNNGENPTLAQVLAQQTQLMNMMMQQLQNQQNQGNNHAPPQNKLAEFRRVRPPIFSSTTNPVEAGDWLHAIEKKLDLLQCTDQEKVSFASHQLHGTASEWWDHFRLNRTTVEPITWLEFTAAFRKTHIPSGVVSLKKREFRSLTQGSRSVTEYLHEFNRLARYAPEDVRNDEERQEKFLEGLNDELSYPLMTGDYPDFQKLVDKAIRQEDKYNRMEQKKRRIAQFKAQQGNSQKPRLTLEPQSMPQGGSSSVVRPQRQFFNNNAGNNIRNQAPRPVVAPTQQQPAKREQGSKPVVCFNCGDPGHYADKCPKPRRVKVVPAQSNFTAPAPKARVNHVAAAEAQDAPDVILVREYPDVFPDDLPVKFLGHVISAGGVAVDPSNVESVTNWKQPKTVSEIRSFLGLAGYYRRFIENFSKIAKPMTRLLQKDVKYKWSEEYVAVAREDRRRGRQVVAVLVRLFVAAEDRRSTVAAVNPKSAAASSSSPSPSVPLPPSLWSPMVGALCQSLAWSLTNANDVDALYEPFSLKEDCFVLSILHGNHQFREVETC

SEQ ID NO: 183942 - protein, 151 aa, Oryza sativa
  Clone ID: PAT_MRT4530_80984C.1.pep
MEKPQKKKKSTISHFTQKQIKNVHPVANNVWTQTRTHIHISLSPKIKKTQRKFKKTLANEPIALSSSSSLPPWQSRAQGLADLAPATACLLLHLAGEERKGRVEMKTLPYLLVIGPPCHKQFDPPPIGERERHLLAAQGRGRGIHMRRGEG

SEQ ID NO: 183943 - protein, 1696 aa, Oryza sativa
  unsure (1)..(1696): unsure at all Xaa locations
  Clone ID: PAT_MRT4530_80985C.1.pep
MADYTTRGHEIKLDETQTIVATSSSISADNKAKQKQCHNLFLARFMVKHRSCRVIFDSGGSCNNLVSSDLVENLGLPIKPHPHRYYIQLFNSFHKNEGNDNGARFTQDKFNRFNDKVKPKTVSNQEGEDDEDTTSSDMTMPILCINQQKELAFSMAGSINRRGLDLTGFVLELRGMCVVLGYPHGVDYQGKQLPEQEGDDAEPHATWEVTAVILTGSPERTSLAVTNAALLAIGTLHQRYLDELQHSPYRYHPRRGGARDYATFRDASSEDDATIMHLARMVEAYDAARIDFHHMVRRGLVENNMKILELRQENLQLKKDLDAVEAQLCQLKIAQGEVCRPKRRRVCRSLKITARKSTSRPELVRQSLAWTCFVETPRAEPAPVVPQEEGASGVGSTEDALLLTFRPGPSQNFSARVVWGMVIPMVTTRRSATTGDGNQPEGSNHNNHGSPPPPPPPPPPPPPDTNSILTQILAQQANMMAAFLHHIQNPPQHNAPPPPPPPQHSKLAEFLRIRPPTFSSSNNPVDALDWLHAVGKKLDTVQCNDEEKVIFAAHQLQGPASLWRDHFQATQPEGQPITWARFTAAFRRTHVPAGVMALKKREFQELKQGNRSVMEYLHEFNNLARYAPEDVREDEEKQEKFLAGMDPELSVRLVSGDYPDFQRLVDKSIRLEAKHKKLESHKHRLANFCNQQGANQRVRYTNPYPGGSSSQQQQQQQPHSAPRAQFVVRVPQLQQQQSQQGTRAPRPPTPAVQPGQGRRDVQGQQRLCFNCFKPRHFADKCPKPRRQQGQAPPRPNNGGKDVIRGRVNHVTAEDVLTTPDVIVGTFLIHSIPATILFDSGASHSFISVPFVGRNQLGVERLRNPLLITTPGGVMTAKXTKNLDVILGMNWLAQFQGVVDCAXRTVTLYRGPEQPVVFFAPPTSVGSSELHQIGLSETPIVSEFGDVFPEELPGMPPKREIEFRIDLAPGTTPLYKQPYRMAANELAEVKKQLEELKEKGYIRPSTSPWGAPVIFVEKKDKTKRMCVDYRALNEVTIKNKYPLPRTDDLFDQLKGATVFSKIDLRSGYHQLRIREEDIPKTAFTTRYGLYEFTVMSFGLTNAPAFFMNLMNKVFMEYLDKFVVVFIDDILVYSQSEEDHQQHLRRVLGKLREHQLYAKLSKCEFWLSEVKFLGHVISAKGVAVDPKTVTAVTDWKQPKTVTQIHSFLGLAGYYRKFIENFSKIARPMTQLLKKEEKFVWSPQCEKAFQTLKEKLVSSPVLILPDTRKDFLVYCDASRQGLGCVLMQEGHVVAYASRQLRPHEGNYPTHDLELAAVRRWLELIKDYDVGIYYHPGKANVVADALSRKSRCNTLGVHDIPPELNQQMEALNLSIVSRGSLAMLEAKPTLLDQIREAQKNDPDMHGILKNMKQEFVALCDVCQRVKAEHQRPAGLLQPLQVPEWKWDEIGMDFITGLPKTQGGYDSIWVVMDRLTKVARFIPVKTTYGGNKLAELYFARIVSLHGVPKKIVSDRGSQFTSHFWKKLQEELGTRLNFSTAYHLQTDGQTERLNQILEDMLRACVLDFGKTWDKSLPYAEFSYNNSYQASLQMAPYEALYGRKCRTPLLWDQVGESQVFRTDILREAEAKVRTIRENLKVAQSRQKSYADNRCRDLEFAVDDFVYLRVMPLRGVHRFQTKGKLAPRFMGPFRIIAQRGEVAY

SEQ ID NO: 183944 - protein, 101 aa, Oryza sativa
  Clone ID: PAT_MRT4530_80986C.1.pep
MKRIVESKLNIKKVNPSCLFVRAIPSYESSDMFEDNLQSGNLYEVDSEDMNHEKFWNGSIIKLPQPSLSQLKGAPWFKSGEEKIPSATEGQAKQFRVVKFC

SEQ ID NO: 183945 - protein, 128 aa, Oryza sativa
  unsure (1)..(128): unsure at all Xaa locations
  Clone ID: PAT_MRT4530_80987C.1.pep
IKRIVGSKLNVKKVNPSCLFVRAIPSYGTSDMFEDNLXRSVDNLCEVDAEDMNREKFWNGSIIKLPQPSLRQLKGAPWFKSGEKKIPSATGDQAKQFRVGKFCWASTFKKMQRKKSDHKRRPPNLSSC

SEQ ID NO: 183946 - protein, 124 aa, Oryza sativa
  Clone ID: PAT_MRT4530_80988C.1.pep
MKRIAESKLNIKKVNLSCLFVGAIPSYEPSDMFEDSLQSGNLSEVDSEDMNHEKFWNGSITGLPQPSLSQPKGASWSKSGEEKIPSATGGQAKQFRVVKFCWKFVKTQRKKSDKKRRPPNLSSC

SEQ ID NO: 183947 - protein, 343 aa, Oryza sativa
  Clone ID: PAT_MRT4530_80989C.1.pep
MDWASLPADLLFSISSHLREPEDFVRFRAVCPQWRAAVSHEEHAFFQPWIMASRWLEDEYSENLVFYSLSTLKTIKVRVPDMKGKRIAASGSGHLVAIDNDDDLSAVLVNPLFGKTTALPRLPEFFHDNGTHGWVTGEGVITVVLYNWMSESMALWYHGGGITMKGWAIVPGRKLWLRMPYYLRMLAAHGDQMEMHLTDLDRDNDNSVVLLQETQKVELLGGCWHGSDELFKATTPYHHEWFSLYRMVKQEEIPVHDIKNAIVVQSCDSCTRTYMIPASCDFAALCSRNAFYYLRKQFDDGGSYYALYKKCLASEELTFVKRLPEDWKLSDEWFMPTLKIGTL

SEQ ID NO: 183948 - protein, 91 aa, Oryza sativa
  unsure (1)..(91): unsure at all Xaa locations
  Clone ID: PAT_MRT4530_8098C.1.pep
MRSMAERDWKTRPSVAEGVRXDRRGSATDSAPDARGDRGSAATGRPVTEGXAXRAWHGTADVEGRDDEVEDGEYEGCDCGACEGTKQHVWS

SEQ ID NO: 183949 - protein, 78 aa, Oryza sativa
  Clone ID: PAT_MRT4530_80990C.1.pep
IYHVGDTGISFIRTFEFLGTGMIRIQALCLKSQTFRTFSSSSLSAAAAVQGGSWSFAAAAAGDPGPGNKASFGGGALT

SEQ ID NO: 183950 - protein, 80 aa, Oryza sativa
  unsure (1)..(80): unsure at all Xaa locations
  Clone ID: PAT_MRT4530_80991C.1.pep
PTRQGLVAGCVTDTIGIHALLGASLVDIPAPKDWPFTGVLMENEEDLISGLLLTLXYLGYRGLKTNVATIRGAKSWGLLV

SEQ ID NO: 183951 - protein, 254 aa, Oryza sativa
  unsure (1)..(254): unsure at all Xaa locations
  Clone ID: PAT_MRT4530_80992C.1.pep
ELSYLFRRDETWWVLKIDRTEPTSLEIEDLVEVIEKKPRESLQRVQYAKAIDHINNGLSNDKQLMVIHMDLKTXSCELFPCLLMVGFPALAHSDFLHCQLTTTSVPDRTLREQNDVTSASSSTSMNEPKFGIIQILPIVLQKGVLKTNCIDSRDRTNRAQIVDGLVGLGRQLKALVQTKGLQIHIXEPLSSTLMLFYEEMEHALALQVTGSAAQNKDFWKQKGQCSAMNKLTRNILHFVSNAYMDSEKQNSPNM

SEQ ID NO: 183952 - protein, 69 aa, Oryza sativa
  Clone ID: PAT_MRT4530_80993C.1.pep
YLKNKDPHYIKTYRDWVLDYPIGLFRAQKGKTFWGLKIGGTLRCPSIPRGKKDIPIGSYAPHDQWGRGD

SEQ ID NO: 183953 - protein, 63 aa, Oryza sativa
  Clone ID: PAT_MRT4530_80994C.1.pep
MPVGDRRPPVPLTAAIDPIPAPLHILITGQAPFIPRPEQEVEVSSAEREAPRLTSLVATWWSV

SEQ ID NO: 183954 - protein, 50 aa, Oryza sativa
  Clone ID: PAT_MRT4530_80995C.1.pep
MSRPASSGPSRRGSERRVAISGDVVELFVPARGRDGSLARAGTASARSRL

SEQ ID NO: 183955 - protein, 36 aa, Oryza sativa
  Clone ID: PAT_MRT4530_80996C.1.pep
MACGNNSNGNSTTDGENGNASGSASNTTATNVVAPH

SEQ ID NO: 183956 - protein, 70 aa, Oryza sativa
  Clone ID: PAT_MRT4530_80997C.1.pep
LRGIRRADKQMFTQETAYDHDYTIALIRTSPIGKAGTACRYQVTEFPGSDTTASGRRYWNELNSSSSVLC

SEQ ID NO: 183957 - protein, 300 aa, Oryza sativa
  unsure (1)..(300): unsure at all Xaa locations
  Clone ID: PAT_MRT4530_80998C.1.pep
PQGGQGWNQLRSNYQGGSDNNNDTFNNQPSLKDLVFIQAKTTGALSKKLAANDKISTLVPANETGRIPGQPEPSIENVKAIIMRGGKSTXDPPYLNTAXTRRNSEDTSQSSTAGTEEIAPQEYRDTNLLPFPQXYRKPSVDEQSSRFVEVIQKIHINVPLLDVMQVPTHACYLKDILNNKRSVATTEVVKLTKECSNALLHRLPEKKKDPGCPTITCSIGTQHFDQALCDLGASLSVLPKEVFEKLNFAVLAPTPMRLQLAESLVRYPVGIAEDVPVKIRDFFIPIDFVVLDMQTGHNKG

SEQ ID NO: 183958 - protein, 78 aa, Oryza sativa
  Clone ID: PAT_MRT4530_80999C.1.pep
MMRRLTLVDVGGGGQALTLGGARRERRASATPTPATTQHAPPMPGGPSRVADADDDDELSHLLSLNPDSPRGSLLLTA

SEQ ID NO: 183959 - protein, 113 aa, Oryza sativa
  Clone ID: PAT_MRT4530_8099C.1.pep
MRGAKRPLGAVMAWVRRQPPKVKAFLAVVTGMAALVFIRFIVHDHDNLFVAAEAAHALGIAVLIYKLTKEKTCAGSPPPLSAHVYGVASSVARTCARASIRRDRRIRNRVAPE

SEQ ID NO: 183960 - protein, 86 aa, Oryza sativa
  Clone ID: PAT_MRT4530_809C.1.pep
HLDHRKNKAEISKGSIAFVGALQSADVLTKKLPFSCSKESKVPPPLSPINEMEGKILREWNHCGRNSPSTQQGWELSSDERLYVRH

SEQ ID NO: 183961 - protein, 288 aa, Oryza sativa
  Clone ID: PAT_MRT4530_80C.1.pep
MENKPNGESFSRSQSRGIHRRQHSQKLPVRPAGVLVLHMEFADDALVDEDGDGESEEADDGEAAAGPAEVELEVLAACVPLLDPLVLVHLHAAPHLLRSLSSIRRRRRLLSPAARMRWWAREKGQRPDADLVWGDGRLAEERKAWRKNHPHGFVAKPETLADGTVNLMIWHCTIPGKQGTDWEGGYFPLTLHFSEDYPSKPPKCKFPQGFFHPNVYPSGTVCLSILNEDSGWRPAITVKQILVGIQDLLDQPNPADPAQTDGYHLFIQDPTEYKRRVRLQAKQYPPIV

SEQ ID NO: 183962 - protein, 89 aa, Oryza sativa
  Clone ID: PAT_MRT4530_81000C.1.pep
IPRARSRRVGYWRAPRHSQISPLLCSPSQIYTDGAAETLAQPPAFRRRARGGPPRRRSLGHRVHAALMIRLKQPIGPHARPWTRRCGQD

SEQ ID NO: 183963 - protein, 278 aa, Oryza sativa
  Clone ID: PAT_MRT4530_81001C.1.pep
MARGPMDLWNEWATQILVLLSFTLQIILLQLAGIRRREAPAVLRLLLWLAYQLADSTAIYAICHLSLGGTPREHQLVAFWAPFLLLHLGGPDNITAYSLEDSKLWLRHLLTVVVQVLGAAYVLYKQFRGSGSPLLLATILMFVVGVVKYGERTWALMSGNIDTIRSTLKKEPHTKCHSHIEYKPHQMSFSNEGHFRREANEEEFLICNAHALFHICKYAVVDDSSYDNTRDTRASDAAILRGITDEQKYAVTEIELSLSPSCTICCTPRLSDSQFKTY

SEQ ID NO: 183964 - protein, 84 aa, Oryza sativa
  Clone ID: PAT_MRT4530_81002C.1.pep
MVPVDLERPSCGREHAFRHPIDRGHEMRLVVVFPAIFRLPSVPEGGSGHRLRLEAYLLYNPLPQGQTAASVRLFQNPKYFPWME

SEQ ID NO: 183965 - protein, 638 aa, Oryza sativa
  Clone ID: PAT_MRT4530_81003C.1.pep
MLSRAASLRRAAAAAFSTAAARPETGLYGFDVLRTAKGFRRFVDDAIEREFMDEADKASMRIYEHLQYLNTNTTLYNAILKAESEGVMLTEEARRAATTLRVDFEKGGIHLPKDKLEHVNHLNLEIAQLGRNCMSARLQLTISKRSHYLVTFACWFSENVMNKPGFVDIYPASRIPRNMQRHFKSIHRIKPWGDEEQRNQMDTTKQKGLRIVTDSGTLSTALRWVSDEEIRKQVYLVGNSEPRENITVLGKLINARDELAKTMGCKSYGDFAIRPNMAASVDVVMSFLKDLSGVVRHKAGEEFKRIQDFKRNVCNEKSAKLEPWDEDYFIGMMKSAVHNLDVSVVAAYFPLSQCLKGLNVLVESLFGATFHQIPMGDGESWHPDVMKLSLHHPDEIVALVCNFSSSSKIMARLNHWDVETLFHEFGHALHSLLSRTEYQHFSGTRVALDVAEMPSNLFEFYAWDYRVLRKFAVDETTGDPIPEKLVKALNASRNMFPATELQRQIFYSIMDLTLFGEQGSKPMDTISTVADLRRKHTSWKCVEGTHWHTRFTHLINYGAGYYSYLYARCFATTIWQEVCQGDPLSRSTGSALRDKFLKHGGAKDPSALLKDFVGDSIIINSGGGIIPDISSLCKEVGL

SEQ ID NO: 183966 - protein, 689 aa, Oryza sativa
  unsure (1)..(689): unsure at all Xaa locations
  Clone ID: PAT_MRT4530_81004C.1.pep
MAAGDHRGAGAASRWPRRVAAAWGPAVSRPRPRVRLTRGTHGAGRCEPGCARSTVDREAAAWAPLPWTRRRSAQSHRRSDHGSVAGLTGVCARSDRPAAVGLTGHQRAANFHLSKLFLELLLISIILCSLIVMPPRTRHGRRAPTPDPVSEPEESCGNEYAQSDEEVEVNVEGASEEASGDDDSGSGEDEDEGKFEGLQDLFKTVGIDQIVTLKQDYNEDLIRQFYATVWVAGDYGEMKWMSNTLQCSISRRRARPPPSLTGGAHLSSPSSRRARRRARALAPPPPRIAPHPAVPARIKERGITPRVSLSRFPLFSLSLSLGFVRIHPAKFAGVFNGARDLRARFPLSPAALSPSRCYIFDPRASLFRFRRSPLALAVGFVPAPCSSLSAVAADLRFAADVAPVLRPTRRHLLRLRRIAVDLVRASVSLADRRSAAVIVIPSRAAAFLRSGRRSRRRRCPGVSRRPPFAFPLLSALSGAAPPRRWSPAVTIGARARRSRRPCRRGRLRARPRGCQVGPAVSRPRPRVRLTRGTHGADRRQPRAPXVSDSEDSDQVSSDDEDEMERKACSRCGEVGHVASSCATTCFHCEEDHPPVPGQRNQNEKRKCRVREDICCFNCQGMAPTPASALPQGVNAHFQPQQRIVVDGRSCVSPRPTPGQAKGNRPPEGDTKQKTVIRFNQQSEGSFSCE

SEQ ID NO: 183967 - protein, 415 aa, Oryza sativa
  Clone ID: PAT_MRT4530_81005C.1.pep
MSALAPAPKLQPDERSNLLSLLAAASRPLADIAADFLARFPLERRLRVGAALGFLLEDKKMLHPTGRLIAFAILHQSYSSEPANPYVPLLLNAACDETSEKSERAFVQLLLTSASGNNNIEVLKQSAVDYINGSDSASQALLPREQLEKLFSSNSVQSQPQTSSFSAGTVRCAIPDPDVPQSCVNSSEPSISLPGTKPKSASDDRDFALAGLLQEKSWGRLGPQWIRPTPPRLHILDGELQWLNPDNNHELLWDYSMCADTSRGAAIRDLIARALKGPLAPSQQEDLVEHNPLIAVEILSKLMNSPDIDGYLDVLVHMEMSLHSMEVVNRLTTAVELPTEFVHEYISNCIQSCQNVKDKYMQNRLVRLVCVFLQSLIRNKIINVQDLFIEVQAFCIEFSRIREAAGLFRLLKSLE

SEQ ID NO: 183968 - protein, 53 aa, Oryza sativa
  Clone ID: PAT_MRT4530_81006C.1.pep
GRRRRQWWNLTGARAEAGSGSGTRRRGGGRGGPRPREPDGGGGAKMQKYTNST

SEQ ID NO: 183969 - protein, 1371 aa, Oryza sativa
  Clone ID: PAT_MRT4530_81007C.1.pep
LLVWNIPGLEIELCSRDGCSEWLGLGNRMPRFKPEYLFGVEGFVQELRTMSFAIGFGTAPLYAQIPHDHDEEKCRVKVTLNSNSEDIPSVMFEAGGGNYIHACQEVARIAIGELRDRYSDQLADTEYRYHPRQPQGSDRGSYLETEGIENDATTRHLVEMLWAMDETRAEVVLAAQDREDQNRGKICRLEDKVDRLEKELAALKGEAPPQKARIRLTARKRALFVPRYQLAPKVRVVEKEVTPALADPPVVNMVLTRSNGNGPNNNNNNNGENPTLAQVLAQQAQLMNIMMQQLQNQQNQGNNHAPPQNKLAEFLRCTDQEKVSFASHQLHGPASEWWDHFRLNRTTAEPITWLEFTAAFRKTHIPSGVVSLKKKEFRSLTQGSRTVTEYLHEFNRLARYAPEDVRTDEERHERFLEGLNDELSYPLMTRDYHDFQKLVDKAIRQEDKYNRMEQKKRRIAHFKAQQGNSQRPRLTLGPQSMPQGGSWSVVRPQRQFFNNNAGNNIRNQAPRPVAAPTQQQPAKREQGSKPGVCFNCGDPGHYADKCPKPRRVKVVPAQSNSTAPAPKARVNHVAAAEAQVPATVLFDSGATHSFLSMSFVGNHGMEVEDLRRPLMVSTPSNQALSLQRSPSIRIEIQEVPFLANLILLESKDLDIILGMDWLARYKGMIDCANRKVILTSNDGRVVTVHALSSESLRSSLNQMTLEEIPIVREYPDVFPNDLLGMPPKRDIEFRIDLVPGTTPIHKRPYRMAANELAEVKRQVDDLLQKGYIRPSSSPWGAPVIFVEKKDHTQRMCVDYRALNDVTIKNKYPLPRIDDLFDQFKGATVFSKIDLRSGYHQLRIKEEDIPKTTFTTRYGLFECTVMSFGLTNAPAFFMNLMNKVFMEYLDKFVVVFIDDILIYSRTKEEHEEHLRLALEKLREHQLYAKFSKCEFWLSEVKFLGHVISAGGDAVDPSNVESVTNWKQPKTVSEIHSFLGLVGYYRRFIENFSKIAKPMTRLLQKDVKYKWSEECEQSFQELKNRLISAPILILPDPKKGFQVYCDASKLGLGCVLMQDGKVVAYASCQLRPHEKNYPTHDLELVAVVHALKIWRHYLFGTRTKDYDMGIHYHPGKANVVADALSRKGYCNATEGRQLPLELCKEFERLNLGIVSRGFVAALEAKPTLIDQVREAQIIDPDIQEIKKNMRRGKAIGFLEDEQGTVWLGERICVPDNKDLKDAILKEAHDTLYSIHPGSTKMYQDLKERFWWASMKREIAEYVAVCDVCQRVKAEHQKPTGLLQPLKIPEWKWEEIGMDFITGLPRTSSGHDSIWVIVDRLTKVAHFIPVKTTYSGSQLAELYMARIEKNLKSSKASKASHTDPKQPFEHVDSV

SEQ ID NO: 183970 - protein, 250 aa, Oryza sativa
  unsure (1)..(250): unsure at all Xaa locations
  Clone ID: PAT_MRT4530_81008C.1.pep
LAYHYGTKPKSASDDRDFALAGLLXRKSWGRLGPQWIRPTPPRLHILDGELQWLNPDNNHELLWDYSMCADTSRGAAIRDLIXRALKGPLAPSQQEQVVIELAKDSKLVYHCGMTPQKLPDLVEHNPLIAVEILSKLMNSPDIDXYLDVLVHMEMSLISMEVVNRLTTAVELPTEFVHEYISNCIQSCQNVKDKYMQNRLVRLVCVFLQSLIRNKIINVQDFFIEVQXFCIEFSRIREAAGLFRLSXSLE

SEQ ID NO: 183971 - protein, 232 aa, Oryza sativa
  unsure (1)..(232): unsure at all Xaa locations
  Clone ID: PAT_MRT4530_81009C.1.pep
LAARDGGGKGRDWQGVGDDCDYGLRQRGRRSSGCDEEGEVRGSNGSRMEGGGKDGDGGQDLVTTEADPAPWRTDLVWGELAAVAALRSSQRRCQRQRRRAHGDGGGGGWTAVNNTVAGRRQRRYRLLWQRGALAVAMVAAVAGRRRGGXSQRGSDWXSEAALAQRGTSDGSGGRQGARGAAGGEEAGLAREAQPMARGRTGARGGKGSDHGARRSCRGDVARFSAHEGSWPA

SEQ ID NO: 183972 - protein, 98 aa, Oryza sativa
  unsure (1)..(98): unsure at all Xaa locations
  Clone ID: PAT_MRT4530_8100C.1.pep
AILTPGRGEHAQSFGXGLKTELQVETGSPGLPXALNDRERGWPPHDHIRESDWKXSGIVRGIXYREWNPEVDAHLQADGYANXTVPSLDSSKLGVHAR

SEQ ID NO: 183973 - protein, 98 aa, Oryza sativa
  Clone ID: PAT_MRT4530_81010C.1.pep
GAAAQRSSQPPSASRARVTVPCDQAAKAIRAASQCPELVPGRLIGGYVRELAAQLAKATSRARRAATSSDSVSSSIVLHVPQSSRPGIPLVLERPPPR

SEQ ID NO: 183974 - protein, 358 aa, Oryza sativa
  unsure (1)..(358): unsure at all Xaa locations
  Clone ID: PAT_MRT4530_81011C.1.pep
MPRYKPEYLFGVEGFVQELRTMSFVIGFGTASFYAQIPHDRPEEKCRVKVTLNSNSEDIPSVMFEAGGRNYIHACQEVARIAIGELRDRYSDQLADTEYRYHPRQPXGSDRGSYLDTEGIENDATTRHLVEMLWAMDETRAETVLAAQDHEDRNRGKICKLEDKVDRLEKELAALKGEAPPQKARIRLTARKRALFVPRYQLAPKVRVVEKEVTPALADPPVVNMVLTRSNGNGPNNNNNNNNNNGENPTLAQVLAQQAQLMNMMIQQLQNQQNQGNNHAPPQNKLAEFLRVRPPTFSSTTNPVEAGDWLHAIEKKLDLLQCTDQEKVSFASHQLHGPVSEWWDHFRLNRTTAEPICR

SEQ ID NO: 183975 - protein, 500 aa, Oryza sativa
  Clone ID: PAT_MRT4530_81012C.1.pep
MAPSWLGQEGAAPAAPHRRPADEVKLSVEEAVAPAEVVAAQTEEANEVAVVSGGGGGGVQVLSRGRLAARDGGGKGRDWQGVGDDCDYGLRQRGRRSSGCDEEGEVRGSNGSRMEGGGKDGDGGQDLVTTEADPAPWRTDLVWGELAAVAALRSSQRRCQRQRRRAHGDGGGGGWTAVNNTVAGRRQRRYRLLWQRGALAVAMVAAVAGRRRGGCGQSAARWPSAAAATVVVTVCTRGTSDGSGGRQGARGAAGGEEAGLAREAQPMARGRTGARGGKGSDHGARRSCRGDVARFSAHEGWSTGGAPVQWSHMSAERRSVMLSGGRFGTSLLPDLCIEAVAGLRCSPWLWLIIPCPSLLTDFVFIHYPICNGDKDSGVCESTSHHGRHKHACRGAALLVDVTVCVNDADGGLHADHAVAASMPWLAGWLACIIRDRECTCTSARGQLIIQIRRVLVIKEENTRPDNTFPTQTARGNNMTILRPSEAPSCTAQTLLTSIRG

SEQ ID NO: 183976 - protein, 394 aa, Oryza sativa
  unsure (1)..(394): unsure at all Xaa locations
  Clone ID: PAT_MRT4530_81013C.1.pep
MDEVVATMDISEPNKGYASCGSVIEMSRQMKTTRXRMGEGLCHMFTTGSMPMECGVKMCLVGWPGLAXTXLGPRSGCQFSLNHRRPWVKAVLDGXFCEEKDVANCLPKLRKTAGSASEAKEAVKLDVKQDKRLRSVKVLSLVFDLSLPFVFPLSLSKPXQQMADNEKGNKVRSQDMGTSSSRVNEAPDTNCVAVVQHLIKQNKLLIEILQQHRTPILNRSQMQPXVQLEAVQALTPQVSAPPTSQKAPHAMSHVDSKEARIICFMCDEQGHYARNCPQQKRKAPMRTEDEVRKMIITSTEWPPPGMTKRQRRNSFRGAPQLTEHLLASGGRVYDSEDSDQVSSDDEDEKSPQGFNQNKMEHKACSRCGEIGHVASSCATTCFHCEEDHPPASAP

SEQ ID NO: 183977 - protein, 1454 aa, Oryza sativa
  Clone ID: PAT_MRT4530_81014C.1.pep
MSVWGGRETDLGGGQGERAGAPGLEWYIPGLEIELCSRDGCSEWLGLYNRMPRYKPEYLFGVEGFVQELRTMSFVIGFGTAPFYAQIPHDRHEEKCRVKVTLNSNSEDIPSVMFEAGGRNYIHACQEVARIAIGELRDRYSDQLADTEYRYHPRQPQGSDRGSYLETEGIENDATTRHLVEMLWAMDESRAETVLAAQDREDRNRGKICKLEDKVDRLEKELAALKGEAPPQKARIRLTARKRALFVPRYQLAPKMVNTRSNGNGPNNPNNNNNGENPTLAQVLAQQTQLMNMMMQQFQNQQNQGNNHAPPQNKLAEFLRVRPPVFSSTTNPVEASDWLHAIEKKLDLLQCTDQEKVSFASHQLHGPASEWWDHFRLNRITAEPITWLEFTAAFRKTHIPSGVVSLEKKEFSARRSFLGGLNDELSYPLMVGDYPDFQKLVDKAIRQEDKYNCMEQRKRRIAHFKAQQGSNQKPRLTLGPQPMSQGGSSSVVRPQRQFFNNNAGNNIRNQAPRPVAAPVQQQPAKREQGSKPVVCFNCGDPGHYADKCPKPRRVKVVPAQSNSAVPASKARVNHVAAAEAQDAPDVILGTFLVNSVPATVLFDSGATHSFLSMSFAGNHGMEVEDLRRPLMVSTPSNQALSLQRSPSVRIEIKGVPFLANLILLESKDLDVILGMDWLARHKDDLPGMPPKRDIEFRIDLVPGTTPIHKRPYRMAANELAEVKRQVDDLLQKGYIRPSSSPWGAPVIFVEKKDHTQRMCVDYRALNDVTIKNKYPLPRIDDLFDQLKGATVFSKIDLRSGYHQLRIKEEDIPKTAFTTRYGLFEGCVLMQDGKVVAYASRQLRPHEKNYPTHDLELAAVVHALKIWRHYLFGTRTEVYTDHKSLKYIFTQPDLNMRQRRWLELIKDYDMGIHYHPGKANVVADALSRKGYCNATKGRQLPLELCKEFERLNLGIVGRGFVAALEAKPTLIDQVREAQINDPDIQEIKKNMRRGKAIGFLEDEQGTVWLGERICVPDNKDLKDAILKEAHDTLYSIHPGSTKMYQDLKERFWWASMKREIAEYVAVCDVCQRVKAEHQKPAGLLQPLKIPEWKWEEIGMDFITGLPRTSSGHDSIWVIVDRLTKVAHFIPVKTTYSGSRLAELYMARIVCLHGVPKKIVSDRGSQFTSNFWKKLQEEMGSKLNFSTAYHPQTDGQTERVNQILEDMLRACALDFGGSWDKNLPYAEFSYNNSYQASLQMAPYEALYGRKCRTPLLWDQTGERQVFGMDILREAEEKVKIIQERLRVAQSRHKSYADNRRRDLSFEEGDYVYLRVTPFRGVHRFHTKGKLAPRFVGPYKIVSRRGEVAYQLELPQSLAGVHNVFHVSQLKKCLRVPTEEANLDQIEVQEDLTYVEKPIRILETSERRTRNRVIRFCKVQWSNHSEEESTWEREDELKSAHPHLFASSSESRGRDSV

SEQ ID NO: 183978 - protein, 641 aa, Oryza sativa
  Clone ID: PAT_MRT4530_81015C.1.pep
MAEQAKVHDLSPSVSGDDGEPNPRRRARTPPPPPHQNPKQGEALERVEKSAASPVAGDAGERRDGERRLLVYGDGSTPQGALQAVGALLRHPPVVPDPESPAQRWLDDVANLVMTAQQRLGAGGRSATTKTSGAATTGSVSSRRRARRAAAVARHSAATPSSAPPTREDQHGEPDARLDIERRRNSRRTPRATEGASSSRVSPRHGREDQPSVPPAGGVSCRAFVASLRNVRWPPRFRPTITEKYDGSVNPTEFLQVYTTGIEAAGGDDRVMANFFPMALKGQARGWLVNLPPASVHSWEDLCQQFTMNFQGTYPRPGEEADLHAVQRGDDESLRSYIQRFCQVRNTIPCIPAHAVIYAFRGGVRHNRMLEKIASKEPQTTAELFQLADRVARKEEAWTWNSSGSGVAASAAPGSAAQTGRRDRRRKKREQGEEAPEPNGGLRPLTTGVGPLPACPTTPGAPDPQDGPEATVGRPLLPSSDPEVIGTEDECAPRGHLDEERPGDAAPGEEDRPRRKVQRPVYFVSEALRDAKTRYPQAQRMLYAILMASRKLRHYFQAHRVTVITSYPLGQILHNREGTGRVVKWAIELSEFDLHFEPRHAIKSQALADFVAEWTPAPETVSTPEASLGPSQLPHTAHWVM

SEQ ID NO: 183979 - protein, 112 aa, Oryza sativa
  Clone ID: PAT_MRT4530_81016C.1.pep
GKSTPKVPQLVIEIQNRPLITKPDTWHPQLTNHSLSGFNPGLSDVDAESAGPTWAPHVRQTTPAKSRPRRSPSPAPVHEAEGAPSVAEAHHRLQRWCGVSAVAGWGWPAGRS

SEQ ID NO: 183980 - protein, 156 aa, Oryza sativa
  unsure (1)..(156): unsure at all Xaa locations
  Clone ID: PAT_MRT4530_81017C.1.pep
SSEDRDHDNRHNHDDHEWQVLGDTGQGRRHNDDDDGDXRQDSREPSRRPRNNTLEPSDPSSSSSSSSSSSSDRHPRRTYDRRQPTAPSAGCRAFGRSLRDVRWPERFQLGAIEKYDGSTDPEEFLQVXSTVLYAAGADDNALANYLPTALKGSACS

SEQ ID NO: 183981 - protein, 88 aa, Oryza sativa
  Clone ID: PAT_MRT4530_81018C.1.pep
DVCIWPVHLDIFLTVGLYKSVSGKYIVVSCCLMIFLFERMTQIVLLICAIGYVDSFFVLHISCNENRKPIPEHSMIVWLSSLNVLCNS

SEQ ID NO: 183982 - protein, 409 aa, Oryza sativa
  unsure (1)..(409): unsure at all Xaa locations
  Clone ID: PAT_MRT4530_81019C.1.pep
RRPSTREVSHPQASTKNCRRWKKLCLSPTYSRPSNGQSTSGGRYQAEDRHPLQPAIRRKFLPPLPRSPVAAPPLPAFSFSLSGAGRPPAAPPASPVRRPAAPSPPSASQPPXSPPAGRAVFSLGVAASTSTPACPRFRRNAVARAGLALCLAGVPSATPSSVPVHRQTSPAPPPASQRQGCPRPRLPSIRTPLVFVIVVSVRPRRRLLWSVVRPCRLVVSLRRHPRRHRSSVFRAVLVSVQLLPAALITSSPVPVVVLSSFPVVVAFVPPSSRSRPSSASVKCAAAAPSSSSSSSPRRQALCRPRLAFVQRSPPKSSPRRSSPSFLAASAAPVRRCCSHASSRGGKDLSSRCPVLVLSVSPRTRCAVVDPGTRVPVSLLSFRRFSRRGSRSSPKVRKAVVCEQGKSHHP

SEQ ID NO: 183983 - protein, 155 aa, Oryza sativa
  Clone ID: PAT_MRT4530_8101C.1.pep
PPKQPHPHSLLSPLLPPTVEKAAWAVGSAKSTARTPKDVQPCMSSYMAYSAHYLNVLRKVWTCLHRDDIMKTAMLKELPPYDPDWYYSRAVSIVRKICLMQVIGVMAFRNSDAGHQMKETLPPDICDRLGDISMMMLHEMQMTYMCNVDPVNFQL

SEQ ID NO: 183984 - protein, 970 aa, Oryza sativa
  Clone ID: PAT_MRT4530_81020C.1.pep
MPISASPSMTGNENAVATNQDGSMSKDPPVEAENGTSTTSELEKDSNAAKPCHSDKNHEPTRMTSEATRRHLLRSNNHIPIRDKDKERGATPTSDRFVGVIDIDPHEPSVLHLLEDYGSSTTSAPREVLAIDDVGTSARTNAEAENQVATPAQHIRAVNAILRETSYDPVLNDDLARWIERLRESVTNLSNAFEEAAAAAHPEQPPTGDANGENPERRESPHRATPPPRGTGDLRDHLNGRREARRARDNENRSRRHVSSQRHDNEDRGDRSNEDRDRDNRHNRHDHNDRERWVPGDTGRGRRHNDDDDGDRRRDNSGRRRQDSRELGRHPRNQIPTRSNRKYDGSTDPEEFLQVYSIVLYTAGADDNALANYLPIALKGSAHSWLMHLPPYSISSWADLWQQFVANFQGEGQREMENVRRLHRPQHGVSKDHFPLPRIDQLVDSTAGCELLSFLDAYSGYHQISMAKEDEEKTAFITPLGVFCYVKMQFGLITTGNTFQHTVQGALSDQLGNNVEAYVDDIVVKTKTSDSLIDDLRETFDNLRRYRLMLNPEKCTFGVPSGKLLGFLVSGRGIEANPEKIKAIENMKSPTRLKEVQKLTGCMAALSSQGAGAGFILTSPSGDQFKHAIHLNFRATNNTVEYEGLLTGIRAAAALGVKRLIVKGDSELVTNQVHKDYKCSNLELSKYLAKVRKLEKRFDGIEVRHVYRKDNIELDDLARRASRREPLEPDTFLDILTKPSVKEVSGEVSPATPDIGSEATKAERAVADIETTDDWRIPLIKFINSEELPEDDTEAEKITRKAKIYCMVSNDLYKKAPNGVLLKCVSSDDGRHLLLDIHEGICGSHATSRTLVGKAFRQGFFWPTALKDACDMVQQCEACQFHSKHTKLPAQALPTIPLTWSFSCWGLDILGPFPRGRGGYRFLFVAIDKFTKWIEAVSMGEIKADNAIKFIKGIFCRYGLPHRIITDNGS

SEQ ID NO: 183985 - protein, 624 aa, Oryza sativa
  unsure (1)..(624): unsure at all Xaa locations
  Clone ID: PAT_MRT4530_81021C.1.pep
QITGSSVAHQEFPPQEDGHNADNNISNTNDGRLARAPAPPPPRIPPHPAAPARNKEGEITPRDSLSLSPHFSLSLFLGFVXNTPANLAGAIDAARDRRXRFPSPPVALSHSQHYINAPRASLHRFRRSPPSLSAGIELAPSLSLSAVAAELRSAAAVAPDLLPLRRRLLRLRRVLADLVHPSVSVADRRNAAVLVDPSRAAAFFRSGRRSRRRRRPGVSRGPPFHFPLPSPLSXAASRRPCRRGRLRARPVAAMWGPAVSRPRPRVRLTRGTHGAGRRKPRAPGPPWIVRLPRGPHXPWTRTNEGYTSCGPMADNEKGNKVRSQDIGTSSSRVNEAPDNSCVTLVQHLINQNRLLIEILQQHQTPILNLSQIQPQVQLEAVQSLTPQVSMPPASQKTHGGVPHVDSKEASIICFMCDEQGHYARNCPXQKRKTPMRTEDEVRKMIITSTEWPPPGMTKRQRRNTFRGAPQLTEHLLANGGRVSDSEDSDQVSSDDEDEMERKACSRCGEIGHVASSCATTCVHCEEDHPPDRCPTSRITCFFCEGTDHVPKDCQFSFLLTKKMANQPASSNGEKHQGNTNPRQDYSFSLTPVPGQRNQNEKRKCRVREDICCFNCQGMGHFADK

SEQ ID NO: 183986 - protein, 132 aa, Oryza sativa
  unsure (1)..(132): unsure at all Xaa locations
  Clone ID: PAT_MRT4530_81022C.1.pep
QALIATHYRESWYXLQVPSRNSRVDPRVRGFRPRRIVSLSVDEMEAIERRRGVQQPAPVQPPLQIASPPATPVKTPKGKSSSRNNSSVSLSSTKAKKKAAVSSVEVPPHPRSKSKSKSNPDERCLSPQKKKK

SEQ ID NO: 183987 - protein, 320 aa, Oryza sativa
  Clone ID: PAT_MRT4530_81023C.1.pep
IPRAAGIARGEARAALFSHSLRCAPPGNPPIQSGARHRRRCHTAAMAEPLSSSSQDSSVPSAQEERVVVTNKHGEKLIGLLQHMGSNKIVVICHGFTASKNDSIIVDLANALTKKGVGIFRFDFSGNGESEGEFQYGNYRKEADDLHSVISHLNQEKYDVKAIVGHSKGGDVVVLYASIYDDVRTVVNLSGRFHLEKGIEERLGKEFMNIIDKEGYIDVKTNSGKVLYKVTKESLMERLTTDMHKACLSISKECRFFTVHGSADEIIPVEDAYEFAKHIPNHKLHVIEGANHCYTAHRKELSDAVVDFITSSEDGDNSSA

SEQ ID NO: 183988 - protein, 97 aa, Oryza sativa
  unsure (1)..(97): unsure at all Xaa locations
  Clone ID: PAT_MRT4530_81024C.1.pep
VATPFWQPATYQSINNQVMLYQXCQQLRLVAHQSHYQAISSVHAIVQQLQLQKVGVVYFDQTQAHAHALLALNLPSICGIYTNYYIATRSILIVGGV

SEQ ID NO: 183989 - protein, 60 aa, Oryza sativa
  Clone ID: PAT_MRT4530_81025C.1.pep
LFIAGRNRLQVNEGPSKACCNRGANSGGCRHRINVQVPSVSEGSECTEHISSDKIEPTNL

SEQ ID NO: 183990 - protein, 101 aa, Oryza sativa
  Clone ID: PAT_MRT4530_81026C.1.pep
EHSTLLNRSSKLCLYCFLGFLNNTQPPRKELFPTKERGNYYASPEWSQVLYLHPLCKSFLVLNVDTSLIAQMPRCGGSSSRDTRRPPLLARCLVPNSCSPG

SEQ ID NO: 183991 - protein, 52 aa, Oryza sativa
  Clone ID: PAT_MRT4530_81027C.1.pep
QLNIHTTHLAVTYIYWITVKFSRRRRCSSIQQLLTILKNLNRETAQIIIRFF

SEQ ID NO: 183992 - protein, 42 aa, Oryza sativa
  Clone ID: PAT_MRT4530_81028C.1.pep
VTSNWDGHVNLVSDMTSCYLAGVIRYPWRLRMISCTGATPRG

SEQ ID NO: 183993 - protein, 548 aa, Oryza sativa
  Clone ID: PAT_MRT4530_81029C.1.pep
MSAGHVISSPLLSLSPPSLTLLVWVGTRQLGRTSVATAFGGARGRRREGRPLSREEVGQARGAGRPAATSSQGRDADSAEVGGGKDEHHGGVDHCGIRIAREESRKLEEVTPAYRNGGRANRSRREDERNGSPTLRRPQGASGPPRSVVLTAAASTPARRRAGAVMVVIEQEPEVEETPAAAEEPAAEEQAAGGAAGGEAARADGEDEEEAFEDALTDEQLREKARSQANDAKAEGNKFFGAGDYERALSQYEERRASTAVKPRRERTAPSQPPSIGPTAPSQPPKEGVEGYGLATAARPLPRLHFTNIATAAAPDLRRRATMAAKLLLAAFPVDFMRDEVLIEAICFPRRLLPSPSVVVTAQWWRPCTSKARSQANDAKAEGNKFFGAGEYERALSQYETALQIAAELESAEDIRSACHSNRAVCFLKLGKYDETIKECTKALELNPSYLKALLRRGEAHEKLEHYDEAIADMKKIIELDPSNEQAKRSLFRLEPLAAEKREKMKEEMIGKLKDLGNSVLGRFGMSVDNFKAVKDPNTGSYSISFQQ

SEQ ID NO: 183994 - protein, 59 aa, Oryza sativa
  Clone ID: PAT_MRT4530_8102C.1.pep
TYLSICYYFFSLGQKEGSEIVQEGPRCSLRSRKVYSDLTVDYFKMFLLNVPAAVVALTL

SEQ ID NO: 183995 - protein, 75 aa, Oryza sativa
  Clone ID: PAT_MRT4530_81030C.1.pep
MGCSEDDARVKDSRRRVAMVAEYVWRPFWPSATAPLERRERAEANGAALVLLVSSRKVEMERIVWRMAKGMKSRP

SEQ ID NO: 183996 - protein, 165 aa, Oryza sativa
  unsure (1)..(165): unsure at all Xaa locations
  Clone ID: PAT_MRT4530_81031C.1.pep
RPFCLHVNERLAAALQLIGEYRLWCARDLXCIKILLIRIPSKDMNVLTLDDINTHLILYVDTLHRRMYHDYLLADVHNKLDYDLALTGENFLSRGIHTLVLNGYMAELIHHAVLRTKPPHIWACKRSVNTHDSMLKDEPDNHIDXXLTTPFAGCPPLHMKRTNQK

SEQ ID NO: 183997 - protein, 58 aa, Oryza sativa
  unsure (1)..(58): unsure at all Xaa locations
  Clone ID: PAT_MRT4530_81032C.1.pep
GAGRALRRPLSLPDSPRHERGLPVARXGTGVKPGVWCAWLEGVMRRVLSRPLSGFSEE

SEQ ID NO: 183998 - protein, 267 aa, Oryza sativa
  unsure (1)..(267): unsure at all Xaa locations
  Clone ID: PAT_MRT4530_81033C.1.pep
MGATAGIDRYTEALLSWLVIFLHRDTSIVMMYRVFGYFKSFSYSCIALPFVLIVFACFPNCLAASKVYRFIVGLMLTSNTDPHVDHAYTNRRRARRCHLRVREPEGYPVHPFAVGFRPRNPLCTIRRSSRSPSTSRHSPSARNSPPIPLYLPYRRCRFCRAASLRGRAAVRRRIAAAAPPPSAAAPPPSAASPPPSAGVAPPPRHGRRAGLRPSTLPPEWPPRARHVXHHVVRRLLPGPWTRSTMNRCPEPMTCGARLLAPPSLSLR

SEQ ID NO: 183999 - protein, 206 aa, Oryza sativa
  unsure (1)..(206): unsure at all Xaa locations
  Clone ID: PAT_MRT4530_81034C.1.pep
SPRVAGAEEDDGERRRQATGGRRRRADELRGARKPWPKAAVEVVLTRVRGNEGSGDELRRRRGGRGGSRPREPDGGDGAXRAGVVDVARRRRRRGRGGGCGRGGASEIGGRWGKDPTGGPHLSVTPREEAAGRPDWASASCSAPPHRSMPPPSPSPTSSTSPPSTPSPLPAATAAPHPLKRTILLVEGPPISGFAAGGRFCNSMTS

SEQ ID NO: 184000 - protein, 711 aa, Oryza sativa
  Clone ID: PAT_MRT4530_81035C.1.pep
MAPRKLNLPSVTGPDPSRIDDDTTAYLGGSLVNEDELAKLVTSGVLAEKQAFPPGKAVVPKPGDNRTVVFAMFFEVGLLFPCNVLLPEILRLFQVELPQLSPSALVQNAIFDWACWAAGCRNLVEEFCMLRIFPLSQSWQVEVNQDEEVNGLPKLVMPEGANMLTLAQADTEAQKMIGYVSIVEFSQLLTRQAAGRANRVYDGDLPPRAKPFKADGDEGTSRKRTRGQVKLAPRKRKAPTSTDSDADDEDTVDDHDGEEEGEDKGETELAAEMAADEPADNRTETRGYTPTPSPYDVETGVESNSSPLGRKELEGGKALVSIEAAKLAKGGSVKKTSKKKGPVNVACVFSDDESSDETPTSPATSLGLLTAPGATVDAGGAGGSVATGTSAFADRVVRAAARLFGSPLSKLVVSPLAIQKGKKTAAETSASEYSLAAPHFAPGDFETRADLIPFVEGVSNLVSPTGSLSLFTELNEFDEGCSAIKSLAVRSLEMESLADTLKETKANNKRLRVELEKGSEAKAEIKRLNAELKKEQNHSAALTEYYNLTEPKMEALRQEARKAKAAAEKDAQRLTREMAKATESTKTACRTLCLALTDMGAKVRGIPSEDTSAFDFLEWTEQAGGAVSDFATTYSDCCAHLSVAVTMGLLQQNWSEHVAEFPKFVKGDWEVSSLDIFPALRAWRKQFWQKEGRFTAKARLLEHLAKAEAAE

SEQ ID NO: 184001 - protein, 146 aa, Oryza sativa
  unsure (1)..(146): unsure at all Xaa locations
  Clone ID: PAT_MRT4530_81036C.1.pep
SSVLPKKTHQCWFPAAGNIFQRTVQGALSDQLGNNVEAYVDDIVVKTKTSDXLIDDLRETFDNLRRYRLMLNPEKCTFGVPSGKRMHGSTKQVCCQDGRTRTTLLHYHYFQAHIVTVVSSFPLSEVVRNKDVVGRIAKWVVERRRH

SEQ ID NO: 184002 - protein, 449 aa, Oryza sativa
  unsure (1)..(449): unsure at all Xaa locations
  Clone ID: PAT_MRT4530_81037C.1.pep
MDISRTNEGYTSCGPVVEMSWHRAGVLLLGAQSCLPVPEVPAVGGVGSVLLFMARMGWELCHVFRPYTMVNKPNIHHNSKRLRSVKMADNEKGNKVRSQDIGTSSSRVNEAPDTSCVTLVQHLINQNQLLIEILQQHQTPILNLSQMQPQVQLEAVQALTPQVSMPPASRRTHGDVPHVDSKEASIICFMCDEQGHYARECPQQKRKTPMRTEDEVRKMIITSTEWPPPGMTKRQRRHTFRGAPQLTEHLLANGGRVSDSEDSDQVSSDDEDEMERKACSRCGEXIGHVASSFLLTKKMANQPASSNGEKHQGNTNXRQDYSFSLTPVPGQRNQNEKRKCRVREDICCFNCQGMGHFADKCPKPRNIAASTSVHATPCNQKLAPQRIVIHASRSSPIARVATAPTPASALPQGVNAQFQPQPSVDKTEASIGIIPLDVPAQQPXNQVQD

SEQ ID NO: 184003 - protein, 43 aa, Oryza sativa
  Clone ID: PAT_MRT4530_81038C.1.pep
FLHTTRDPDFGLTFTSEGLITNPIRTLRPTTLLNINKNTGSST

SEQ ID NO: 184004 - protein, 197 aa, Oryza sativa
  Clone ID: PAT_MRT4530_81039C.1.pep
MTELVAPHRETAQAPLCRFGRGLRVRSQALSVCGKMLAGKTHETRPMYTDRIKERAVLRCTQRDTLDQTAINAVRGNHEEGGHLTLGPNVPEGARPRGRLRLPQASGYAPGMFCYWHTISQTFLKKGQTLKRWERSNDMCQVGGVATDRRSECEGSSTGTGPKATMTSMSSVVLELRAAKKLEPSESISVETICSFS

SEQ ID NO: 184005 - protein, 64 aa, Oryza sativa
  Clone ID: PAT_MRT4530_8103C.1.pep
KKFFFSGIHNKFFQIFSPFEAPKVLISTPLFREMLPHVVVPPFPIKISPMGVPVGIPCSFVETL

SEQ ID NO: 184006 - protein, 786 aa, Oryza sativa
  Clone ID: PAT_MRT4530_81040C.1.pep
MTFSFVDNCVNINLNQGVPTSTTLVWTQVGEIVFPVYTTVPITAGPPMAGNENAMATTWGDSMSKDSPAEAEIGTSMTSEPEKDPSAAKTCLSDRNHEPTRITYEVTRDEDKEQGATLISDRFVGVIDIDPHEPSVLHLLEDYGSSPMSTPREVLAIDEIGTSARTNAEAENQVTTPAQHIRAVNAILRETPYDPVLNDDLAGWTERLFGLITAGNTSQRTVQGALSDQLGNNVEAYVDDIVVKTKTSDSLIDDLRETLDNLQRYRLMLNPEKCTFGVPSGKLLGFLVSGRGIEANPEKIKAIENMKSPTKLKEEAEEAFIALKRYLSNPPVLVAPQPNEELFLYIAATPYSISIVIVVEREKVQRPVYYVSEALHDAKTRYPQIQKLLYAVIMTSRKLRLYFQAHRVTIVSSFPLGEVVRNKDVVGRIAKWVVELSQFDVRFVPRTAIKSDNQIDNETWTMVFDGALNSQGAGAGFILTSPSGDQFKQAIHLNFRATNNTTEYEGLLAEIRAAAALGVRRLILKGDSELVANQVHKDYKFTSPELSKPLVKEASGEDSPVTHNISSGVTEAERAVADIETTDDWRTPLIKFIGSEELPEDDAEAEKISHKAKVYCMIGNDLYKNAPNGVLLKCVLSDDGRHLLLDIHEGIYGLHAADILGPFPRGQGGYRFLFVAIDKFTKWIEATPTGEIKADNAIKFIKGIFCRFGLPHRIITDNGSQFISADFQDYCIRLGVKIWFASVSHPQSNGQVERANGIVLQGIKTRVYDRLMSHDKKWAEEHPSVL

SEQ ID NO: 184007 - protein, 954 aa, Oryza sativa
  Clone ID: PAT_MRT4530_81041C.1.pep
MIKDIMEVFMEDFLVYGKTFGHCLQNLDKVLQQCQEKDLVLNWEKCHFMVHEGIVLGHRVSEREIEVDHAKIDVIDQLPPPVNIKGIRSFLGHAGFYRRFIKDFSTIAGPLTNLLAKDAPFEFDDACLESFEILKKALVSTPIIQPPDWTLPFEIMCDASNFAVGAVLGQTKDKKHHAICYANKTLTGAQLNYATTKKELLAVVFAIDKFRSYLLGAKEIIYTDHVALKLRITDTQEQPINDFLRDDMLMTVRDSNPWYANIVNYMKTVNKMGTRWKDRLLDALWAYRTTYKTPIGMSPYQIVYGKSCRLPVELEHRAYCAIRNWNMDFEGAGEWRKMQIAELEEWREKAYHNAKIYKERTKRWHDKRIKIKKFNQETKPRTLSFLLSPTFANLLFFSSQFHCFITLNSPVAGKSLIPFIGSSSNSTYNLDGEPTPVNQLILVEHYTMEGVNALWAQPLATVPGSPAILELIGKLPGSAEPFSAPFGPPFGTLFTKAGDEVFHKYVTPTATPSTPKEERFHIQGVRTPGGGYGKGLLRPLTASEKEGAAESHSPPPMKVKHNLTPPPIVRAPGQYQEDEVKSPEPSIHKLAAQVKKLRKENIELRDRNTELGPCAAVTPVVAVARGGRLRGRRRIAVLVRPFAVAEDRRSTVAVVEPKRRRSPASMRARAARAATGDDVTADVIGTVRREPAVDRLISAVRFGWINLGRSFPCAATVRPMPRYKPEYLFGVEGFVQELRTMSFAIGFGTAPFYAQIPHDRHEEKCREVARIAIGELRDRYSDQLADTEYRYHPRQPQGSDRGSYLETEGIENDATTRHLVEMLWAVDETRAETVLAAQDREDRNRGKICKLEDKVDRLEKELAALKGEAPPQKARIRLTARKRALFVPRYQLAPKVRVVEKEVTPVLVDPPVINVSDDEGEESKHTHSKIEWRATQDDEDEPNEPSINSDARKN

SEQ ID NO: 184008 - protein, 1186 aa, Oryza sativa
  Clone ID: PAT_MRT4530_81042C.1.pep
MPRYKPEYLFGVEGFVQELRTMSFVIGFGTAPFYAQIRHDRHEERCRVKVTLNSNSEDIPSVMFEAGGRNYIHACQEVARIAIGELRDRYSDQLADTEYRYHPRQPQGSDRSSYLETEGIENDVTTRHLVEMLWAMDESRAETVLAAQDREDWNRGKICKLEDKVDRLEKELAALKGEAPPQKARIRLTARKRALFVPRYQLAPKVRVVEKEVAPADPPVVNVSDDEEEPKHTHSKIEWVATQDDEEEPNEPSIDLRCSEELDNGNGPNNPNNNNGENPTLAQVLAQQTQLMHMMMQQLQNQQNQGNNHATPQNKLAEFLRVRPPVFSSTTNPVETGDWLHAIEKKLDLLQCTDQEKVSFASHQLHGPASEWWDHFRLNRTTAEPITWLEFTTAFRKTHIPSGVVSLKKKEFRSLTQGSRSVTEYLHEFNRLARYAPEDVHNDEERQEKFLEGLNDELSYPLMTGDYSDFQKLVDKAIHQEDKYNRMEQKKRRIAQFKTQQGNNQKPRLTLGPQSMPPGGSSSVVRPQRQFFNNNAGNNIRNQVPRPVVAPTQQQPAKREQGSKPVVCFNCGDPGHYADKCPKPRRVKVVPAQSNSTAPVSKARVNHVAAAEAQDAPDVILVREYSDVFPDDLPANELAEVKRQVDDLLQKGYIRPSSSPWGAPVIFVEKKDHTQRMCVDYRALNDVTIKNKYPLPRIDDLFDQLKGATVFSKIDLRSGYHQLRIKEEDIPKTAFTTRYGLFECTVMSFGLTNAPAFYMNLMNKVFMEYLDKFVVVFIDDILIYSRTKEEHEEHLRLALEKLREHQLYAKFSKCEFWLSEVKFLGHVISAGGVAVDPSNVESVTNWKQPKTVSEIRSFLGLAGYYRRFIENFSKIAKPMTRLLQKDVKYKWSEESVAVAREGHRRDRQVVAVLVRPFAAAEDRRSVIAVVDPKSFAVSSSSPSPSVDLPSPFWSPVSSPCRPLCLGAFHLCPRAAVRRRACAARAVRPAEPPLPSVTSPLTSSRPSARGSLRGTRLRSGGDKPTGVAGESMPCYKGVIMIQEGALQWIVLYKGYCHNSFPRYRGGIEAHGDMIHGNAELADDALERALDAVIGFSSSFRPNRTTPSRTLAPPGSPRRPLQDTPRKPIQWRSDLGDRHRVLQLHSIASIIDSILSVTPLTDRAADVIPGVVPCRHGASPSLWLCRHP

SEQ ID NO: 184009 - protein, 93 aa, Oryza sativa
  unsure (1)..(93): unsure at all Xaa locations
  Clone ID: PAT_MRT4530_81043C.1.pep
TLYRYYYVCFFFFFPFIWRLYVFDYYYYFACIRCKCIDLTRSIIINLSIRIEIWSISFISKKKKKKKKKKKKKKKKKXKKKKKKKKKKKKKKK

SEQ ID NO: 184010 - protein, 62 aa, Oryza sativa
  Clone ID: PAT_MRT4530_81044C.1.pep
LCLLGSRRLSRPPDPGPEPPNRRRRGAGGRLLRPGWVALIGARRREIRLDRLHVGWLQMNQI

SEQ ID NO: 184011 - protein, 213 aa, Oryza sativa
  unsure (1)..(213): unsure at all Xaa locations
  Clone ID: PAT_MRT4530_81045C.1.pep
RPVLIWLRCYYQNHAPRAQPGPREWGPRGSLTVHGGPGAPGLTPIGAVGPTRQPHPRARAADGRAPRGSHSAHPRAAKPARTAGGGAXRAPMVAAGDHRRGGAAAERGEGXGERRRRSTAHLGATAAMREAAEAEGGGVAARVDGVGGAPAVGDRNGEVDEVGEDAAKPKEAAARWEAGRGDDGGGPELHGHGGTAPHLNARPPPAAPPCVVA

SEQ ID NO: 184012 - protein, 259 aa, Oryza sativa
  Clone ID: PAT_MRT4530_81046C.1.pep
MGESPPSIFDRTVRNHPQLTMGFFLGPLGLQLGPFVCMWLKPTRRELCPRLVSSPAKLTDDATPPQPPPQPQPGDRRRRPRLPDPPRPHGGKAVPLSGLSPQDTCKAVADPYIECEFMIILIDLILHKTRAYRHLLFNKLRIYSSLDKVLGDALLGNIVFMTMLFLEVQFILKLSFDIRRYREVLLAVIISSYFKLFLMAMMVWEFPSSVIFFVEISVLSSNTVALRVVTEFSKAHCFGVCFGAHAARYLTERWLLGAP

SEQ ID NO: 184013 - protein, 819 aa, Oryza sativa
  Clone ID: PAT_MRT4530_81047C.1.pep
MVNTRSNGNGPNLNNPNNNNNGENPTLAQVLAQQTQLMHMMMQQFQNQQNQGNNHAPPQNKLAEFLRVRPPVFSSTTNPVEASDWLHAIEKKLDLLQCTDQEKVSFASHQLHGPASEWWDHFRLNRTTAEPITWLEFTAAFRKTHIPSGVVSLKKKEFRSLTQGSRSVTEYLHEFNRLARYAPEDVRNDEERQEKFLGGLNDELSYPLMVGDYPDFQKLVDKAIRQEDKYNRMEQKKRRIAQFKTQQGNNQKPRLTLGPQSMPQGCSSSVVRPQRQFFNNNAGNNIRNQAPRPVAVPAQQQPAKREQGNKPVVCFNCGDPGHYADKCPKPRRVKVVPAQNNSAVPASKARVNHVAAAEAQDAPDVILVREYPDVFPDDLPANELAEVKRQVDDLLQKGYIRPSSSPWGAPVIFVEKKDHTQRMCVDYRALNDVTIKNKYPLPRIDDLFDQLKGATVFSKIDLRSGYHQLRIKEEDIPKTAFTTRYGLFECTVMSFGLTNAPAFFMNLMNKVFMEYLDKFVVVFIDDILIYSRTKEEHEEHLRLALEKLREHQLYAKFSKCEFWLSEVKLLGHVISAGGVAVDPSNVESVTNWKQPKTVSEIRSFLGLAGYYRRFIENFSKIAKPMTRLLQKDVKYKWSEESLEAKPTLIDQVREAQINDPDIQEIKKNMRRGKAIGFLEDEHGTVWLGERICVPDNKDLKDAILKEAHDTLYSIHPGSTKMYQDLKERFWWPSPSLGKVAVVVAKSSPSSSALSLPSETAGASSPSSSRRPPPFQPRRRRRPLVVRRRFGRRPSAVNRRGPDQSRPSDLDRINLGRPFA

SEQ ID NO: 184014 - protein, 619 aa, Oryza sativa
  unsure (1)..(619): unsure at all Xaa locations
  Clone ID: PAT_MRT4530_81048C.1.pep
VRLRRPRRPRLPQLRLRRRRRALLLSGVPAGRGSRSFDFGADDVLCSYDDFAAPSEPKRPDPADKADFHDSRLGRPFGKAYEQESYGKEDVLFAVEKCMKKYADNLLRSLEGITNRLSQLEIYCYKLERSMGELRSDVLRDETDQRLKSLEKHLHEVHRSIQXILRDKQELAETQKEXLAKFQLTHDTSKKKEDMPTPXFPEQKTLEEKADAPGQQLAIVLPHQVNSSLAPRASQPVQQYKDQTVQQPPSSSVPQQDRYVLSQAIVYYPQRQAPGIQDTQGQQVQPEVQYLPVRPSATQDVPVHASSQQSQAANQTHPQSFPPYQQQWPQQSSQPAPAPVAQPQPTFSQPFPPPVQQPQLSNTQQFPPQPMQQPQLSNTQQFAPQPVQQPNAQQFPPPPVQPQQSNTQLPPQAMQPQQHPPVQNQMRPQTPPNYPHYQPHQSLNPPPETLPGSMAMQGPYNTVAPAAGSRSEVPYSYGGPGMPPPQHNMQRQQLPPPSQGSFGPPSKGGYAGPPQYAPQGSSHGYNTAYGYPPSGPSAAQAPQMPPAPGNVGMSHPGSHQMMRGHPYGEMIEKAITMGYPREQVMNVIQRMTESGQPMDFNTLLDRLNEAGSGAPPRAW

SEQ ID NO: 184015 - protein, 121 aa, Oryza sativa
  unsure (1)..(121): unsure at all Xaa locations
  Clone ID: PAT_MRT4530_81049C.1.pep
GGARRRRVPGARRHRGGVRASRAALLQPPPPPLLQRRLPGFLGVHRAVRLHHGRSGGGIDGESSREGGGDGAVPSDPRAGCQVPPERXNKSRSKKGGDAPNCIDREDRLHRPRVYIFIPMG

SEQ ID NO: 184016 - protein, 510 aa, Oryza sativa
  Clone ID: PAT_MRT4530_8104C.1.pep
MAFLLFFVFVTAAVLCFVVPAFLLLCTSVQRRRDVGQGGGRDWQKKKKLRLPPGSMGWPYVGETLQLYSQDPNVFFASKQKRYGEIFKTNLLGCPCVMLASPEAARFVLVSQARLFKPTYPPSKERMIGPSALFFHQGEYHLRLRRLVQAALAPDSLRALVPDVDAAVAATLAAWSGGHVASTFHAMKKLSFDVGVVTIFGGRLGRRHREELRTNYSVVERGYNCFPNRFPGTLYHKAIQARKRLRAILSEIVAERRARGGGGGGGGDDLLGGLMRSRDDGTAGAVALLTDDQIADNVVGVLFAAQDTTASVLTWILKYLHDSPKLLEAVKAEQMAIYVANEGGKRPLTWTQTRSMTLTHQVILESLRMASIISFTFREAVADVEYKGFLIPKGWKVMPLFRNIHHNPDYFQDPQKFDPSRFKVAPRPSTFLPFGSGVHACPGNELAKLEMLVLVHRLVTAYRWEIVGASDEVEYSPFPVPRGGLNAKLWKQEAEEDMYMAMGTITAAGA

SEQ ID NO: 184017 - protein, 62 aa, Oryza sativa
  Clone ID: PAT_MRT4530_81050C.1.pep
MDALAPLTSLEIGAQQGCTATELHAQLPVANRATLPQIKSERQARKEVATLRAALEWGEDDG

SEQ ID NO: 184018 - protein, 75 aa, Oryza sativa
  unsure (1)..(75): unsure at all Xaa locations
  Clone ID: PAT_MRT4530_81051C.1.pep
FFFGFGGVFGFGLICLLFGGRLVLGWFGLLLVDWNCFFFKKKKILKKKKKKKGXFYKVSSFCLFVFFVFFLLVRF

SEQ ID NO: 184019 - protein, 497 aa, Oryza sativa
  Clone ID: PAT_MRT4530_81052C.1.pep
MASPTRPGPYMPRPPAVPEWLNTGDNGWQLAAATFVGLQSMPGLVVLYGSIVKKKWAVNSAFMALYAYASTLIVWVLVGFRMAFGDRLLPFWGKAGAALTEGFLVARASVPATAHYGKDGALESPRTEPFYPEASMVLFQFELAAITLVLLAGSLLGRMNIKAWMAFTPLWLLFSYTVCAFSLWGGGFLYQWGVIDYSGGYVIHLSSGIAGFTAAYWVGPRLKSDRERFSPNNILLMIAGGGLLWLGWAGFNGGAPYAPNITASIAVLNTNVSAAASLLTWTCLDVIFFGKPSVIGAVQGMMTGLVCITPGAGLVHTWAAILMGICGGSLPWFSMMILHKRSALLQKVDDTLAVFHTHAVAGLLGGFLTGLFALPDLTAVHTHIPGARGAFYGGGIAQVGKQIAGALFVVVWNVVATTVILLGVGLVVPLRMPDEQLKIGDDAAHGEEAYALWGDGERFDVTRHEGARGGAWGAAVVDEAMDHRLAGMGARGVTIQL

SEQ ID NO: 184020 - protein, 122 aa, Oryza sativa
  unsure (1)..(122): unsure at all Xaa locations
  Clone ID: PAT_MRT4530_81053C.1.pep
MLEKLWDDVVAGSRPETGLXKLPKDATTRPLVINKEGDGQASGVVHKRTQTMPTTPTTPVTPLYWFPTTATTTTPRGRNVWRKTLHPGRNLATKSPCTQPNQTAPSSTSPTHYEWLCRDQTR

SEQ ID NO: 184021 - protein, 374 aa, Oryza sativa
  Clone ID: PAT_MRT4530_81054C.1.pep
MPRQHLSISPLLLSLLCFSFSVQASRPEGRRSVGRARRTLHEVGRGGGVVVAGRAVSAQFATAGADLSSGAAAAASAAGRRCTSPTSHRARARSGCAPSSPGSGSSRAAVQLRRVSRGCALFVYRAAEGASSTPTPPEEQTTRAAAAAVASPLPALNLTNRGLIGQMSPLGNLTFLKFLFVPANSFTGEIPQSFGNMHHLQIIYLSNNTLQRRMPNLANCSNLKVLWLNGNNLVGQIPADLPQRFQSLQLSVNSLTGPIPVSVAKITTLKRFSCLYNNIDGSIPNDFAKLPGLVYLHLGAKIIGRQCAKFFWKPFHSTAVHTLIHMGLNQFLGSIPSGIANIPNLIALELGGNLFTNVIPRSGGGMRGLLFQAG

SEQ ID NO: 184022 - protein, 1024 aa, Oryza sativa
  Clone ID: PAT_MRT4530_81055C.1.pep
MKFTTIRQYLLVLMASSIIKIMCSSLYGNETDRLSLLEFKKAISMDPQQALMSWNDSNYFCSWEGVSCRVKTPHRVISLNLTNRGLIGQMSPSLGNLTFLKFLFLPANSFTGEIPQSLGNMHHLQIIYLSNNTLQGKIPNLANCSNLKVLWLNGNNLVGQIPADLPQRFQSLQLSINSLTGPIPVYVANITTLKRFSCLYNNIDGNIPDDFAKLPVLVYLHLGANKLAGQFPQAILNLSTLVELTLASNHLSGELPSNIGDSVPNLQKFQLGGNFFYGHIPNSLTNASKLNLIDISINSFTGVVPRSIGKLTKLSWLNLELNKFHAHSQKDLEFMNSLANCTELQMFSIYGNRFEGNVPNSFGNHSTQLQYIHMGLNQFSGLIPSGIANIPNLIALELGGNLFTTVIPDWLGGLKSLQTLSLFNNLFTGPIPPSLSNLSNLVELGLSTNQLDGYIPPSLGYLQVLEEFTISHNNINGWVPNEIFGIPTISLIWLSFNYLEGELPSEVGNAKQLMYLHLTSNKLSGDIPSTLGNCESLVDIKLDQNVFTGNIPITLGNISSLRGLNLSHNNLSGTIPVSLGDLELLQQLDLSFNHLTGHVPTKGVFKNTTAIQIDGNQGLCGGIPELHLLECPVMPLNSTKHKHSVGLKVVIPLATTVSLAVTIVFALFFWREKQKRKSVSLPSFDSSFPKVSYHDLARATDGFSASNLIGRGRYGSVYKAQLFQGRNVVAVKVFSLETKGAQKSFIAECNALRNVRHRNLVPILTACSTIDSRGNDFKALVYKFMTRGDLYELLYSTGDDENTSTSNHITLAQRLSIIVDVADALEYLHHNNQGTIVHCDLKPSNILLDDNMTAHVGDFGLARLKIDSTASTSADSTSSIAIKGTIGYIAPECASGGGQVSTVADVYSFGIILLEIFLRKRPTDNMFKDGLDIAKYVEMNSPDRTLNIVDPELLDDKQLQEIPVTMKEKCIECLVSVLNTGLCCVKISPNERMAMQEVAARLHVIKEAYAKAISDSQAVISDKT

SEQ ID NO: 184023 - protein, 408 aa, Oryza sativa
  unsure (1)..(408): unsure at all Xaa locations
  Clone ID: PAT_MRT4530_81056C.1.pep
MQPISSLSAPPSLPRDPQQILHFPSPRGPSPSCRPSSQHPYSPLRPLPPPSTPPRRPPSPTTSPPSPSPAPPPRAPXPLPRHAPPPXSPPQHALSPAVPPPPPPPPPSPPPPQPGRXPPVSGAHWPPPPLLAPPAAAISVSAVTTCPPSTCSSPCRPPPTPPLPPPPSPPPPPRPPLRAAGRPPAXLPPPPXPPPPADSRSPALPHPPPLPPAPSAGEPGLCGAESATAWITPPRPPRPSLGPAPPGGPECPPPPPASPAAPPPXTAQQMPPPSRXPPPPIPPPRPPPPLPPAPSAGAPGLCGAESATAWITPPRPPLPSLGPAPPGGCPPPPPTSPAARPSPPHGRPPXPPRPSLGPAGGAGLRGAPPPPPPPPGSGSPHPSSTLALAPPPLAAGLVAIFSYLFNMK

SEQ ID NO: 184024 - protein, 92 aa, Oryza sativa
  Clone ID: PAT_MRT4530_81057C.1.pep
MAFAVSAAATARLISEAESVEDVSVSWEFQMVRNRKQTLKLARWSAMAAPVGCFASLTTRTIPFSFSGMMQGPRIWPRLEKRWPRVFDNLRG

SEQ ID NO: 184025 - protein, 378 aa, Oryza sativa
  Clone ID: PAT_MRT4530_81058C.1.pep
MAAAAAHKEEVIGKLNVRVVRGSNLIIADPLTHTSDPYVVLSYGPQEVFDEDKFTADDSMGVAEFNVTDIYDAAKLDLKHVSDGARIKTIYPVGVNYLGAESHVSWKNGKVVQDITLKLSKVDSGLIVLQLEWVHVPVLQSFASSPDAATTIHAVLAVHVGAAPSPPLLRVVHSPPSAPAQRHPLSSVRVGTASPRHPLSGVPAVRGAGPCRRPPCSHAVPGPALLRPSSTPLSCSTSPPIRRGRSTLQPSDQKDMKKFFFPTSLALRVLPPLFLRCRILPRASNMTALVLRGYCCCIGAFTKMSTEIGDKTMNDINGGNTASKSSGGTFSGALADGGLGQVAARQPFSRSASFFTGRAAMAASISPIVLRIAGGGGG

SEQ ID NO: 184026 - protein, 73 aa, Oryza sativa
  Clone ID: PAT_MRT4530_81059C.1.pep
LRASEVQRCRRPENRCALPSSERTQIDGKNLATDVSIPAGHKNWRTNDRMARTCICSRTKKPKCVKTELQTDH

SEQ ID NO: 184027 - protein, 687 aa, Oryza sativa
  Clone ID: PAT_MRT4530_8105C.1.pep
MPHRTSKMRRLPRTRSRRRTALHRRPPPLPPAIIIHKDPPPPPPPRQPAAAKGTLDAFGRDLTAEAANADPVVGREEEIDRVVCILSRKSKNSAVLVGAAGVGKTAIAEGLAQRIARGEVSGVLEGARVVELNVAAMISGTSYRGTFEERMTGVIAEAEAEADAAAGKVVLFVDEIHMLLGAGRVSGGCIDASNMLKPALARGRVRCLGATTHDEYHRYMVRDAAFERRFQKDAALVAAAKLSGRYIPARHFPDKAIDLVDEACATARLLMDRRKKKQAQAAVAPKDENVGPDHIAQVRRTPARATASTSRAGETLTADEAVGAVAEAVVRSRSGLGNPNQPSGSFLFLGPTGVSKTELAKALAEQLFGNAKLLVRIDMSEYVNASSVTRLIGSAPGTNGYDKGGQLTELVRCRPYSVVLFDEVEKADAAVFNVFLQILDDGRLTDGQGRTVDFTNTIIIMTSNLGAQHLADAAAADASHKDDATEAAAAAAKQRVLADVQRHFRPELISRLTEMVVFRPLSGEQLRKVARLQLRGMAARLAEKGIGLDVANAALDVVLARSSDQVRAYGARPIKRCLEKDVMTRISKMVVQEEADDDCYVTVEADQGKEELVFTVDKQADAEENDAAAASSSSSAAGKKRKRRPPARRDLPPPRADLFFARKILLAPPLKPLLRMRAAWISALLSG

SEQ ID NO: 184028 - protein, 173 aa, Oryza sativa
  Clone ID: PAT_MRT4530_81060C.1.pep
MAAAAAHKEEVIGKLNVRVVRGSNLIIADPLTHTSDPYVVLSYGPQKVKTSVQKKNSNPVWNEVLQLAVTNPTKPVKLEVFDEDKFTADDSMGVAEFNVTDIYDAAKLDLKHVSDGARIKTIYPVGVNYLGAESHVSWKNGKVVQDITLKLSKVDSGLIVLQLEWVHVPGVTL

SEQ ID NO: 184029 - protein, 35 aa, Oryza sativa
  Clone ID: PAT_MRT4530_81061C.1.pep
MSGKSGCSIDRLPVHPYSITLTLANADGTSATTSK

SEQ ID NO: 184030 - protein, 58 aa, Oryza sativa
  Clone ID: PAT_MRT4530_81062C.1.pep
WWPSWPSYLSISSSCLHHHPIVIIVSFVWCCPLVCVPVWLPICVFDRNKKARFVSASI

SEQ ID NO: 184031 - protein, 107 aa, Oryza sativa
  unsure (1)..(107): unsure at all Xaa locations
  Clone ID: PAT_MRT4530_81063C.1.pep
WRSGSSGSGRRRSGGQRASVAAGGGDDSRTTSGWRLAGTARRRXRAELARPPPRRHKGGDWRGWRTGGDRAAARGRRKGGDRAADGGSGAKKSAKHFFNGYLLPQEL

SEQ ID NO: 184032 - protein, 484 aa, Oryza sativa
  Clone ID: PAT_MRT4530_81064C.1.pep
MAVLLRKVWGSVLARAAAGAAPPEAFAAAASPRRPQAAGEYGSLGALDVLPIDVLAQILRLLGPADAARSTAVCRAWRLLASDNGLWAFFLRLGPDPWELVVFAETHLGAGPALHPGLYYDSSPQLSFKHVYTRRAVVPGSIIVDGGSGYCKYGWSKYAAPSGRCATFLEFGNIESPMYARLRHFLSTIYTRMQVKPSTQPIIVVLPLCHSDDTESARASRKQYRDTLYSVLFDMNVPAVCSVDQAVLALYAAKRTSGIVVNIGFNATSIVPIFQGRVMHEIGVETVGQGALKLTGFLKELMQQRNITFESLYTVRTIKEKLCYVAADYEAEKRKDTQASCEVDGEGWFTLSEERFKTAEILFQPQIGGVRAMGLHKAVSLCMDHCYNSEVFGDDNWYKTVVLSGGSSCLPGLSERLEKELRELLPAHISEGIRVIPPPFGTDSAWFGAKMISNVSTFTEAWCIKKKQFRQKTRRNGPSFVNVW

SEQ ID NO: 184033 - protein, 116 aa, Oryza sativa
  unsure (1)..(116): unsure at all Xaa locations
  Clone ID: PAT_MRT4530_81065C.1.pep
DAWPVHIPGRPIFPSYPLPALRMDDDEISSKAIGGSTGEILESNAQVLSQIXTNLSTMQIQDNICLLCQTRHNILMVSNEINDAAHVMKQMPPVHVKINEELVNSMLGTPTVPIHK

SEQ ID NO: 184034 - protein, 262 aa, Oryza sativa
  Clone ID: PAT_MRT4530_81066C.1.pep
MAETQNEGMGNLPQQPAGEIYTIFTVDPNDRKYYVAAVDSSDEVIVKENTEGSRVFDDLQQQQPDASAADWRTAAVDAGDRHSKSAGKRPARREEGPLQVVLGKHGAEGERWTTDGTPATADADDDRRLISRRCYIQRASNANLVFKAVNTGGRDGSIIELTDKPMVIMGSDQDQLFCCWTIVPVAGDHIIADGGLSLRSLRMDHPRLVAQSGLLSNQHDTRCITPDKSASLSTQPRLEATGETLKDGNKQGDNKKGKKNYN

SEQ ID NO: 184035 - protein, 69 aa, Oryza sativa
  Clone ID: PAT_MRT4530_81067C.1.pep
RTRGRTRGVWRHTPWIGAHTHKGPERPLRRVLQGLDPLTTARLFAEALRVSQKKVNCEDCFILKLVADP

SEQ ID NO: 184036 - protein, 327 aa, Oryza sativa
  Clone ID: PAT_MRT4530_81068C.1.pep
LQTTGSYRSTMAETQNEGMGNLPQQPAGEIYTIFTVDPNDRKYYVAAVDSSDEVIVKENTEGSRVFDDLQLWYMVTADEPQQQHKQQTSAAAATAATACKPAAEAAGGDKQGTTKPEQIVPGAGSSSSRTHQPQTGERRRSTPETGSSKSAGKRPARREEGPLQVVLGKHGAEGERWTTDGTPATADADDDRRLISRRCYIQRASNANLVFKAVNTGGRDGSIIELTDKPMVIMGSDQDQLFCCWTIVPVAGDHIIAGAGPSWCPLRMDHPRLVAQSGLLSNQHDTRCITPDKSASLSTQPRLEATGETLKDGNKQGDNKKGKKNYN

SEQ ID NO: 184037 - protein, 2078 aa, Oryza sativa
  unsure (1)..(2078): unsure at all Xaa locations
  Clone ID: PAT_MRT4530_81069C.1.pep
FTESTEGKNPTRAELGHWRIVWGLIPPSPTWRPLDLQYKRDLPGRVXDIESQSQHNLHSLXNPCTNVPQYPLYPVYGYHPSTVARQVGGLGTQGSTTMSSSFVDNNVSTSLSQVLPASTMLVWTQVGEIVFPVYTTTPISTGPPMTGDENAVATNQGDSMSKNPPVETENGISTTSNLEKDSDTAKPCPSDMNHELTKITSEATRSWCPIHKTKKHTLQDCWVFLNVCAEIRACKERGIQRTSPTRDVYCPIHKTKNHDLSSCKVFLGAMKAPSPKSYVPIRDNGEEQGATPTSDRFVGVIDIDPHEPSVLHLLEDYGSSTTSAPREVLAIDDVGTSAVTAGNSGVAATVPPPAASAASPVRRPTSPPPLPAPELHXFPGQATASPVFRRNAVARAASPSVSSAPTPAAPFAVPVRRPTSPSPPPASQRQGRPRPRLPFDRTPPRSIVVVSVRSRRRRPVGRPARRLAAPPPSSASQRRVPRHPCLYAAVVGCPRRLLAGPGRRRRRPLVVPGRRGVRPSVKPFSFIVLASSSAAAPSSSSSSPPRRQASCRPCLAFVQGCRCFADXLGNIRWFYNFRLWEFSYHLDTMEXLAYLRLGSRDVMAQGWCPAARGSILPAYPGGSGRRWXLGRYSCLWLGWVGNYVXVFRPYTDEXDLGSGCQFSLNHRRPWVKAGSXRVHGLDXITLCNSRIVFIKWLWATKXTFKCCFLQNLTVRENVFFSVATSAHANAEAGNQSTTPAQHIRAVQAILRETPYDPVLNIDLERWTERLRESVTNLSNAFEEAATAXTPWCPIHKTDRHSPEDWLVFKKLLEKHMAFEKGKRVRVVETNEETAPHEPDSTYPDSDLHVSHIXAVPQRRYPIVVEPTIRNIKVVRVLIDGGSSINLLFASTFDAMGIPQNELTPTDQPFHGITPQSSSRPLGKIILPVTFGQANNFRTEQITFDVAEFDTAYNAIIGRTALAKFMAASHYAYQVLKMPXPKGTITIQGNTKLAVQCNKRSLDMVEQTPSPPATTEPPKKVTKTNKTPKPDGAIKIVPLSSANPDKTELALITFLRDNADVFAWQPSDMPGVPREVIEHKLMVRPDAKPVKQRLRRFAPDRKQAIREELDKLLKAGFIREVLHPKWLANPVMVRKGNGKWRMCVNFTDLNKACPKDHFPLPRIDQLVDSTAGCELLSFLDAYSGYHQISIAKEDEEKTAFITPFGVFCYVKMPFGLITAGNTFQCTVQGVLSNQLGNNVEAYVDDIVVKTKTGDSLIDDLRETFDNLQRYRLMLNPEKCTFGVPSGKLLRFLVSGRGIEANPEKIKAIENMKSPTRLKEVQKLTGCMAALSRFVARMGERGQPFFALLKKQDKFVWTQEAEEAFIALKRYLSNPPVLVAPQPNEELFLYIAATPYSVSTVIVVEREKVQRPAYYVSEALHDAKTRYPQIQKLLYAVIMTSRKLRHYFQAHRVTVVSSFPLGEVVRNKDIVGRIAKWVVELSQFDVHFVPRTAIKSXVLADFVADWTMPDNKSDNQGDNETWTMSFDGALNSQGAGAGFILTSPSGDQFKHAIHLNFRATNNTAEYEGLLAGIRAAATLEAKGLIVKGDSELVANQEHKDYKCSNSELSKYLAEVRKLEKRFDGIKVRHVYRKDNVEPDDLARRASRXESLEPGTFLDILTKPSVKEVSGEVSPNTPDISSEVTEAERAVADIETTDDWRIPLIKFISNEELPEDDTEAEKITRKSKIYCMVGNNLYKKAPNGVLLKCVSTDDGRHLLLDIHEGICGSHAAGRTLVGKAFRQGFFWPTALKDACDMXTHKATRAGAPDYPSDLAILVLGARFTWAIPTRTRRLQIPIXVAIDKFTKWIEAVPTGEIKADNAIKFIKGIFCTYGLPHRIITDNGSQFISADFXNYCIGLGVKICFASVSHPQSNGQVERANGIVLQGMKTLLWAVRTTPTTSNKETPFFFVYGSEAMLPGELQHQSTXVQKYSNENQDEQRDIDVNLLEEHRERVAVRATNYQQTLRRYHEKRIRARILSIGDYVLRRVQSQAGRNKLSPKWEGPYTITQVLRPGAFKITDGNSRELANSWNIDQLRKFYV

SEQ ID NO: 184038 - protein, 68 aa, Oryza sativa
  Clone ID: PAT_MRT4530_8106C.1.pep
PPLVEKDNERKLSQSGGARNLTFLSPGSSKPNSESDASPVLNLYSSVRVKIFIRSLTTHAHGINIIIK

SEQ ID NO: 184039 - protein, 103 aa, Oryza sativa
  unsure (1)..(103): unsure at all Xaa locations
  Clone ID: PAT_MRT4530_81070C.1.pep
AKKMGEQGDGGSQKTKFLAAKIVKKQNGLAGGPQSNGERGNKPGGEKFKTPSLTKNLAQKKGGQKKETGKEPGISGKSYPPGRKKKKKXXXXXXXXXXXXPXX

SEQ ID NO: 184040 - protein, 1446 aa, Oryza sativa
  unsure (1)..(1446): unsure at all Xaa locations
  Clone ID: PAT_MRT4530_81071C.1.pep
MSYYVDPRTSVPQYPLYPVYRYPPSTVARQVGALGAQGSTTMTSSFVDNSVNTNCNQGVLTSTTLVWTQVGEIVFLVYTTVPISAGPPMAGNENAVATTQDDSMSKDPPAEAEIGTSTTSEPEKDPSEAKSCLSDKNHEPTRMTSEVTRHPRRAYNRRQPTAPSARCRAFGRSLRDVRWPKRFRSGAIEKYDGSTDPEEFLQVYSTVLYAAGADDNALANYLPTALKGSARSWLMHLPPYSISLWADLWQQFVANFQGTYKRHAIEDDLHASTQNPGESLRDYVRRFNECRNTIPEITDASVICAFKSGVRDRYTTQELATRRVTTTRRLFEIVDRCAHADDAVRRKNDKPKTGGEKKPAKDAPKSSKKKNRKSGKRKAQAKVLATEYADPPPKRPDPQGSDVKKIWCLIHKSDRHSLEDCLVFKKSLAKHMALEKGKRIRVVEKDAEAVTQESDSAYPDSDLHVSHIFGGSTAYSSKREYKKVERRYPIVVEPTIRNINVARVLIDGGSSMNLLFASALDAMGIPRSELTPTDQPFHGITPLSSSKPLGKITLPVTFRQANNFRTEQITFDVAEFVIAYNAIIGRTALAKFKAASHYTYQMLKMLGPKGTITIQGNAKLTVQCDKRSLDMVKHTLSPPAIAEPPKKPSDMLGVPKEVIEHKLMVRPDAKPVKQKLRRFAPDRKQAIREELDKLPKAGFIREVLHPEWLANPVMVRKANGKWRMCIDFTDLNKACPKDHFPLPRIDQLVESTAGCELLSFLDAYSGYHQISMAKEDEEKTAFITPFGVCCYVKMPFRLITAGNTFQRTVQGALSNQLGNNVEAYVNDIVVKTKTSNSLIDDLRETFDNLRRYRLMLNPEKCTFGVPSGKLLSFLVSERGIEANPEKIKAIENMKSPTRLKEVQKLTGCVVALNRFVARMGERGQPFFALLKKQDKFVWTQEAEEAFIALKRYLSNPPILVAPQPNEELFLYIAATPYSVSTVIVVEREKVQRPVYYVSEALHDAKTRYPQIQKLLYAVIMTLRKLRHYFQAHRVTVVSFIPLGEVVRNKDVVGCIAKWIVELSQFDVRFVPRTAIMSQVLADFVADWTIPDNRSNNQVDKETWTMAFDDALNSQGAGAGFILTSPSGDQFKHAIHLNFRATNNTAEYEGLLAGIRAAAALGVRRLIVKGDSELIANQVRHVYRKDNIEPDDLARHASRREPLEPGTLLDVLTRPSMTEASDEDSPVAPNISSGATEAERAVADIETSNGWRTPLIKFIGSEELPEDDAEAEKISRKAKVYCMIGNDLYKKAPNGVLLKCVSSDDGRHLLLDIHEGICGSHAAGCTLVRKAFRQGFFWPTALKDACDMVQRCEACQFHSXTHKVTSASTPDYPSHLAVLVLGARYTRAIPTRTGRLQVPIXVAIDKFTKWIEATPTGEIKADNAIKFIKGIFCRFGLPHRIITDNGS

SEQ ID NO: 184041 - protein, 263 aa, Oryza sativa
  Clone ID: PAT_MRT4530_81072C.1.pep
MAAAATRAVRRLLIASRSLHAISSEGAAREAATSFVHPAAVVHPDAVVGQGVSIGPFCTVGASARIGDACQLHAGSHVMGDTELGERCVVLTGAILGSDIPGQTIIGENNVIGHHAVVGVKCQDLKYKVIGDNNLIMGSCHIAHDCRIGNNNIFANNTLFAGHVVVEDCTHTAGAVVVHQFCHIGSFSFLGGGSVFNLNQIAQDVPRYMMVAGDRAELRGLNLEGLKRNGFSDQEVRMLRKAYQQVFMPSINSQSSFDERLAE

SEQ ID NO: 184042 - protein, 198 aa, Oryza sativa
  unsure (1)..(198): unsure at all Xaa locations
  Clone ID: PAT_MRT4530_81073C.1.pep
MARCLEHAAHLDTKRKRGLLTSSKGRGGAGKRAPPVSGTRAPVHRGPGPPRQSTTGPREPTVRIGPSRSGGQGRRGWGTARHKAGLAEPWRGXRGLRRRRPTGGAGEVARMGGGGARDRRATGAAARTGDRGGRQGGRGGAHQGRGDEGRGKAGSSASALLGTRAERRPGGVPRAGTGGRRLEGPARGEPCPGGILAV

SEQ ID NO: 184043 - protein, 580 aa, Oryza sativa
  Clone ID: PAT_MRT4530_81074C.1.pep
MADNEKGNKVRSQDIGTSSSRVNEAPDTSCVAVVQHLINQNKLLIEILQQHRMPILNPSQMQPQVQLEAVQALTPQVSAPPTSQKAPHAMPHVDPKEASIICFMCDEQGHYARNCPQQKRKAPMRTEDEVRKMIITSTEWPPPGMTKHQRRNSFRGAQQLTEHLLANGGRVSDSEDSDQVSSDDEDEVELKACPRCGEIGHVASSCASTCVHCEEDHLPDRCPTSRITCFFCEGTDHVPKDCQFSFLLTKKMANQPASSNGEKHQGNTNPRQDHRFSLTPVPGQRNRNEKRKCRVREDICCFNCQGMGHFADKCPKPRNIAAGTSVHATPCNQKLAPQRIVIHASRSSPIARVATAPIPMNALPQGVNAQFQPQPPADKTGASICVVPLEVPIQQLRNQVQDEEPELKKGIIPKTVPNQGKIDLHITANLHEADIPIVLWSLEQTPYPFHRKAASQRTSSSPEASAIHIKEYHLLDISRKKIDKKRLAKMFSSMKEVGRKVDSEDMNHEKFWNGSITALPQPSLSQPKGAPWSKSGEEKIPSATGGQAKQFRVVKFCWKFVKTQRKKSDKKRRPPNLSSC

SEQ ID NO: 184044 - protein, 231 aa, Oryza sativa
  Clone ID: PAT_MRT4530_81075C.1.pep
RRAYVLSWGFNLQGGGFGEARDFQSCDRRADRRILAPTTIRPVYSRPSSTQGFGSPATTYSRRCFGGNRWSYLNSDLRLWCDLPFSTGHAGRQGLLKRRRSSARRRRRCSGGLRWWRSGGRGRRRLGDHDDGLPERRRRLERRRRTAGVTAATAALGHTALERYGRREAKAKVAAGRGDTGGPFKGARRRRRRPTATGDEKESRGDREDHFPSIDSAGNGKERLDLEGNGG

SEQ ID NO: 184045 - protein, 72 aa, Oryza sativa
  Clone ID: PAT_MRT4530_81076C.1.pep
MLEAGRVLFKNLATDFEDRLYSVPLDDVRRPLAPRWRHYTLHRGGEGGSGEVRGRLQCGGTTPPVVASLAKR

SEQ ID NO: 184046 - protein, 655 aa, Oryza sativa
  unsure (1)..(655): unsure at all Xaa locations
  Clone ID: PAT_MRT4530_81077C.1.pep
MPGVPREVIEHKLMVRPDAKPVKQRLRRFAPDRRQAIREELDKLLKAGFIREVLHPEWLANPVIVRKANGKWRMCVDFTDLNKACPKDHFPLPRIDQLVDSTAGCELLSFLDAYSGYHQISMAIEDEEKTSFITPFGVFCYVKMPFGLITTGNTFQRTVQGALSDQLGNNVEAYVDDIVVKTKKSDSLIDDLRETFDNLRRYRLMLNPEKCTFGVPSGKLLGFLISGRGIEANPEKIKAIENMRSPTRLKEVQKLTGCMAALSRFVARMGERGQPFFTLLKKQDKFVWTQEAEDAFIALKRYLPNPPVLVAPQPNEELFLYIAATPYSVSTAIVVEREKVQRPRCEACQXPQQAHKATCTSAPDHPSYLAVLVLGARYTQAIPTRTGRLQVPIXVAIDKFTKWIEAVPTGEIKAANTIKFIKGIFCRYGLPHRIITDNGSQFISADFQDYCIGLGVKICFASVSHPQSNGQVERANGIVLQGIKTRVYDRLMSHDNKWVEELPSVLWAIRTTPTTSNKETPFFLVYGSEAMLPSELRHQSTRAQKHSDEEQEEQRNDDVNLLEEHRERVAVRAAAYQQALRRYHEKRIRARILSIGDYVLRRVQSQAGRNKLSPKWEGPYTITQVLRPGAFKIADGDGRELANSWNIDQLRKFYV

SEQ ID NO: 184047 - protein, 311 aa, Oryza sativa
  Clone ID: PAT_MRT4530_81078C.1.pep
MAPPPPSPPRSLTSVSLRTPLSPLLFLRPASCNPSAVSGSCSSGACRGVRCSAANKPSPSTAPGTEVSSTSMAKIRSEVLSPFRSVRMFFYLAFMASAGLGALIALTQLIPALSSPARAAAAGETLNGLRIDVAAVSVFAFLYWRESKAKDAQGRPPVPLGELRGTARLVIVAGPAAFVTESFRRSKPFLKDLMERGVLVVPFSTDGNAPDLQFDEADEEEEEAAAAAGKMKRRLWQLTPVYTSEWAKWLDEQKKLANVSPDSPVYLSLRLDGRVRGSGVGYPPWQAFVAQLPPVKGMWSGLLDGMDGRVL

SEQ ID NO: 184048 - protein, 949 aa, Oryza sativa
  Clone ID: PAT_MRT4530_81079C.1.pep
MESIDGRSPTRIELGCHCIVSGPMSPSPTWRPVDLRSSYQRTPIPSISGLNVHAEIRDCKERGIQRTSPTRDVYCPIHKTKNHDLSSCKVFLSAMKTPPPKVQQSRIPIMDKDKEQGATPISDRFVGVIDIDPHEPSVLHLLEDYGSSTTSTPCEIEEAVQAKTETVITATTATITMITNGGCWAILVEDVATMTTMMEIGAETTTGDDDRILENPADVLVINPGESLRDYVWRFNECRNTIPEITDASIIHAFKSGVRDCYTTQELATRRITTTWRLFEIVDRCAHADDALRRKNDKPKTGGEKKPAKDAPESSKKKNHKSGKRKAQSERLGRDGDPTKRVDTHRSALPWNHSSVIVQTIGQNYVACDFRPTYNAIIGRTALAKFMAASHYAYQVLKMPGPKGTITIQGNAKLAVQCDKRSLDMVEHTPSLPAIAQPPKKMPFGLITAGNTFQHTVQGTLSNQLGNNVEAYVDDIVVKTKTSDSLIDDLRETFDNLRRYRLMLNPEKCTFGVPSGKLLGFLVSGRGIEANPEKINAIQNMKSPTRLKEIQKLLYAVIMTSRKLRYYFQAHRVTIVSSFPLGEVVRNKDVVGRIAKWVVELSQFDIHFVPRIAIKSQVLADFVADWTTLDNSRIEGLLAEIRAAAALRVRRLIVKGDSELVANQVHKDYKCSSPELSKYLAEVRKLEKSNDLYKKAPNGVLLKCVSSDDSRHLLLDIHEGICGSHAASRTLVGKAFRQGFFWPTALKDACDMVQRCEACQFHSKHTKLPAQALRTIPLSWPFSCWGLDILGPFPRGQGGYRFLFVAIDKFTKWSEATPIVEIKADNAIKFIKGILCRFGLPHRWESRSVSHPQSNGQVERANGIVLQGIKTRVYDRLMSHDKKWVDELPSILWAVRTTPTTSNKETPFFLVYGSEAMLPTELRHQSTRVQKYSDEDQEEQRYDDVNLLE

SEQ ID NO: 184049 - protein, 115 aa, Oryza sativa
  Clone ID: PAT_MRT4530_8107C.1.pep
HGLGRSTISMRSRSIAWSTPFTSRRAMVSTRPSLLRNGFKIPRLPNFPNPQPPTRPRLLEEPLPRGPHPGPAPFPVAAQVRGVWAPAPPLARPLRRTAAAGAMTTSSLTAGPMTT

SEQ ID NO: 184050 - protein, 268 aa, Oryza sativa
  Clone ID: PAT_MRT4530_81080C.1.pep
MDTPPPLSVKASRGPRLGFHPIAPLEVKGRHDNALKKASTTCRPRLDVLRRPPLPPVASPRAVSASIAIVRASSRRVSLRPCSAAIKLLTPSLSPTTHHARMRPSLSFFPIAATVAAASTTGRRHQNHSSPAAIASRHPRQIRPAQRGSGRGALPPPLPPLSPTASLHPTRSGQNGADLDGCHHRRPEQLPRPPDARWAQPRRRRPCGHAALPTPAQAAARQRRKKGEEGVGGGVTSRVAHVESDTRSYVSRLPSHRPGSPAGGSAGA

SEQ ID NO: 184051 - protein, 53 aa, Oryza sativa
  Clone ID: PAT_MRT4530_81081C.1.pep
MEMPISNYSPRLAKGWQAVGIHLDLGQEEDPYDYYYDDPDNLENPALKVIPSS

SEQ ID NO: 184052 - protein, 158 aa, Oryza sativa
  unsure (1)..(158): unsure at all Xaa locations
  Clone ID: PAT_MRT4530_81082C.1.pep
SSIPSISGLRVPTVDSGAPGRGPWCSRFWPFSCWGXNILGPFPRGQAGYKFLFVAIDKFTKWIEAIPTGEIKADNAIKFIKRIFCRYGLPHRIITDNGSQFISADFQDYCIGLEVKICFASVSHPQSNGQFERTNGIVHTDNVQQGDTLLSRVQLRSH

SEQ ID NO: 184053 - protein, 216 aa, Oryza sativa
  unsure (1)..(216): unsure at all Xaa locations
  Clone ID: PAT_MRT4530_81083C.1.pep
MWKVDKPHPRARAADGRXPLGSREGAPEGXLAGTADGRGTRPRPDGHRRRPPARRSGTRERGGKGEANGAVFGSPRSTATTGTAAETEEGGGAVRDGEGDGAPAVGGRNEGADEVDDDAAKPMEVTPSGEEVRSDDGGEPELGGDGGEKEDGASXESDGESERRAAETEERRGGXDYIAPGGGERGRRGRKRAXDLGSIEDAGDDCGIQIGRIRGG

SEQ ID NO: 184054 - protein, 406 aa, Oryza sativa
  unsure (1)..(406): unsure at all Xaa locations
  Clone ID: PAT_MRT4530_81084C.1.pep
LTRGHAPTSPVSGGVEVGTSHYIGASSGVHPSPPLLHHRXDSCRLPLIWTSWIRHAQLPSPFDFFLPSSTTTSTTPSSSSSPLHSFSSLLLSNHYPPWKWSVSRILLNSYMXNIVLKTSSLPLYMVIYIXSSSGGLASGEEGYNKNWEGQVLFPTTPAAAAAEADHGSNSYNNNHNALQQQASSPRSSCITSTTSLGSNGVLEFSNNTSPLKIGSHVDNXLVMYESFVTLLSILLCFSXCISTASGAAFKKARTQEPSPAQATVKVRKEKLGDRITALHQLVSPFGKTDTASVLLEAIGYIRFLHGQIEALSSPYLGNGGSSSNGGGGEVQGERNSIFPEDPGQLLHDNAVKKRGQPDQVSPDESCEEAKTMDLRSRGLCLVPVSCTVDVGVDAGPADYWAAPPAF

SEQ ID NO: 184055 - protein, 188 aa, Oryza sativa
  unsure (1)..(188): unsure at all Xaa locations
  Clone ID: PAT_MRT4530_81085C.1.pep
DSHDDAAMTSPPAAAARRLGXCCSPANDGTAARTEGTNGSGRHGELTGDQSDGGRXTDGDGDEEEAATLFGXTTATVLRRSTATAKGRXRTATTWRPRRRSSRATXTSGTAAAHGWSDGDDXGARAHGARAFPTTRGEXEGGGGRRKGRGDLEDXFSSIDSAGEGKDRPNXSGGGGAALGFRPEEDDT

SEQ ID NO: 184056 - protein, 153 aa, Oryza sativa
  Clone ID: PAT_MRT4530_81086C.1.pep
MGATATTTSTAPPRLAMGAARVMMLPNWQWLQGRRLLHGVASMAITPTTTPCSSKLPPLGLLASPLPPPLEATACWSSQTTLYHVSTASGAAFKKARTQEPSPAQATVRKEKLGDRITALHQLVSPFGKEGAYREGRLIKRLPFHRGGFPPPY

SEQ ID NO: 184057 - protein, 72 aa, Oryza sativa
  Clone ID: PAT_MRT4530_81087C.1.pep
VNDKHHHSLQTFNSASWVVALLQALTKGAYHHTHDRCVAHVFVHAGLHTDPEPTESSTWRRSTLIAHATLCG

SEQ ID NO: 184058 - protein, 86 aa, Oryza sativa
  Clone ID: PAT_MRT4530_81088C.1.pep
NRNTDLTQGTKKTPPQKAGRAQTGPLFFFFPKTHRSKFFFLLKNPLFGWKKTIFGGIPPKKGMARGRGPPPRQTWGWGARGCPRTP

SEQ ID NO: 184059 - protein, 60 aa, Oryza sativa
  Clone ID: PAT_MRT4530_81089C.1.pep
MAPRNNDERAGRSHVSSRYDDYDSFLKSMVLGRSSPCGAHHGQTTRAICQQYAEPSDNGI

SEQ ID NO: 184060 - protein, 271 aa, Oryza sativa
  unsure (1)..(271): unsure at all Xaa locations
  Clone ID: PAT_MRT4530_8108C.1.pep
VGSETPCGNTDKLLFTTATTLTIGSGAKAKFWESAWLQGVRLKDLAPLVFSTSRKKXTLQQAIQSDQWLLNLNLPAEIAWTTKLIDXLVNVLSVIQSINLIDNEELGQNHVEYTASLAYRXKAQLLGTTTSNFNVLIXSPXAPRKCKTFAXLMIKNRVXTSYRLASQGXRLAQETALHLLVGCGYTRRIWRELAVXMSYNMLSPTXWELATIVHEWXEATGNIRGVPKQAIHTLMLLVSWENWKEWNQRTFQHRELSTPSLLSKITEKAKN

SEQ ID NO: 184061 - protein, 149 aa, Oryza sativa
  unsure (1)..(149): unsure at all Xaa locations
  Clone ID: PAT_MRT4530_81090C.1.pep
LHCALATKFETVSDLPPSLAAAASQMVQYAGTCVELETDEVTKQDKRRFDWPSFKKCFDDYGGIDLAMLDYKEFTISRSEIDLSMMVQRIVESFVREFHIIGYENVTTLLRTTIEKTFTNLEEKSSNECLYFSKSAGGQGSXLGIWCFI

SEQ ID NO: 184062 - protein, 68 aa, Oryza sativa
  Clone ID: PAT_MRT4530_81091C.1.pep
MLVASTEESPVTPLCLWLARSLKREERREGEEKRRKKCAADMWAPRCHVSKTGQKYCRGTSGEWFESV

SEQ ID NO: 184063 - protein, 380 aa, Oryza sativa
  Clone ID: PAT_MRT4530_81092C.1.pep
MEHVNPIFNESGALHKYEFSLHTATRVSYAEPSIFALGELRDYIYSKAFVFTDTFTGGCIVVLIHEPAGQISFARVGDDKWTWHPSHSHYSDCIYIDGLLYALTAQGEIHTLDLSGPTITMKMIIGSLSYSRYIVQAPWGGLLLVWREIKIYSVDTMGKKHVEINNLDGHDAWANLEKPCGSMFFSILKDTMYFIFYNYRDRRLRAGAGKHSGNDSILLKLDEIIAKIKVFDYAPKGRTEQAGRVCPIISNSKILNKQNKQGVAGKTQKTWKTQWHPSFVEQIGASRLGCMFDPFWRPCLRPRHGLLGWSPASARGAGPGSRAAASFCPWFLSGRRADDGGGRRDFLARRPAHAFLPRRQGKHGWWWSAAERGGIPGGRG

SEQ ID NO: 184064 - protein, 67 aa, Oryza sativa
  unsure (1)..(67): unsure at all Xaa locations
  Clone ID: PAT_MRT4530_81093C.1.pep
KXWWXXXTXXRLKQGCXMHAXXWHWITEXNFMNXRSHNGRLEXLYVYATXLKKIWGIVMGGTTKLQV

SEQ ID NO: 184065 - protein, 100 aa, Oryza sativa
  Clone ID: PAT_MRT4530_81094C.1.pep
MQAEDPNWEKQWCIADEQTPDDVLQQALSWACGPGGANCTMIQPNKYCYFPNNVKDHASYAFNSYWQKFKKQGGSCYFNAAAMVTDLDPSHDSCHFEVVP

SEQ ID NO: 184066 - protein, 49 aa, Oryza sativa
  Clone ID: PAT_MRT4530_81095C.1.pep
FFYQTMGCDPFNYFLVQQLNVAYLSEKSYETHMCYKPNSVQSLLCYKPT

SEQ ID NO: 184067 - protein, 79 aa, Oryza sativa
  Clone ID: PAT_MRT4530_81096C.1.pep
MGRDIPASTPLGTGANVGARLPVRSDVTGDRPVTVWSRLIDLPEGLGARQREGPRGVMWHPEAPWLPLRLPRRGGRARL

SEQ ID NO: 184068 - protein, 135 aa, Oryza sativa
  unsure (1)..(135): unsure at all Xaa locations
  Clone ID: PAT_MRT4530_81097C.1.pep
MYYKLVECGSPYAXRQLTDQKRPRPAQQHNPHAACRKNPAHVGVCEPTPRSHGPXAPDEKIPIDQAXKLIVERQSKRSEXADAAHTHARTSASNNSRHVQCDRLPNSFSESDPVLITGYLHRLRKDVIALIMGMK

SEQ ID NO: 184069 - protein, 125 aa, Oryza sativa
  Clone ID: PAT_MRT4530_81098C.1.pep
MLYSYNPTFPGVTFPIECRYFKLQGQTFLQQAAEHFDIHQKISHPFKIPYITWSNQKESLRCSSAVVVRELVRMSLAGEKRNASLQVRVKRRRGTPVIYRLSDHVATREREREIHMRKNTAVLIE

SEQ ID NO: 184070 - protein, 93 aa, Oryza sativa
  Clone ID: PAT_MRT4530_81099C.1.pep
MATLSLPLPHLTQAIPARARPRPRPLRGIPARLLSCRAAMAVAPDKEEAAAVALDKAVKVAVAAPDRAAVAAVGVGEELPEGYDQMMPAVEEA

SEQ ID NO: 184071 - protein, 74 aa, Oryza sativa
  Clone ID: PAT_MRT4530_8109C.1.pep
MAQANPRREIQKQTTSALPGGSNISTGSDGDGDGNLGGRMMRVANTVVTHPEEEATHEAMSGEASAAAHREVSD

SEQ ID NO: 184072 - protein, 560 aa, Oryza sativa
  Clone ID: PAT_MRT4530_810C.1.pep
MAAASAGAAGRRRAWRVIPRPVLETVLHNHALRPRVPQPLILHGPRGVGKSTLLLRRLLPQWSEPPHAAAFVDFLRPGPDAPWSLLLPAAEGAAPSLPDLRLRLESALEGLARDAVLRGAVGSKDVLAALSRSHGLHTALTRLAGPAARRGGRGGGGYPVPTLWARAVLAASSSARGDDSTFCIGEGEATNCSMEEKAYMQEAMAALRVAKEVLRMQEGWRKEAVREMNRTGRFSRPLANSATDWPCLLLDVLSGAAEVDFFQPKLVLNNVDVLRKATCKDDTMVPAAMYHDSLIWRVIALGANEQCLPVIMSTSDGYYSSQAFVDFGFPNIFISRETFGWTPQEAKLHMVPEFFSEKEVWKVVDEVLGTNPRQLSEIYMLKQNADSTGVLHDQNIEEIIDIYLAHLQVSVVNPAMEAALGMVQKFASDVREGKVPENRLSFGAPWRHPPQGGNPDASYKWAKIQLMDFVQSFVNTEFGVNYLADDSLEIFDDPAALAMSEACSAEVTIELSRINSILMATCDTWAKLSTLDERSRLQVEISMEQDRSPLSILALHMQLT

SEQ ID NO: 184073 - protein, 127 aa, Oryza sativa
  unsure (1)..(127): unsure at all Xaa locations
  Clone ID: PAT_MRT4530_81100C.1.pep
MVERVRSFSAELMAFIVAISGPHRSESDMKLRDRHCQPEVHDSPLDACRLVLDRQLTGRERFQSMFPQPGALGLRIRRCQQLEDASRECRCTSIRRMVRSYEESMPVTLDQGWSTSXAEYYRGEGSS

SEQ ID NO: 184074 - protein, 76 aa, Oryza sativa
  unsure (1)..(76): unsure at all Xaa locations
  Clone ID: PAT_MRT4530_81101C.1.pep
IXQSARPYXQRAVLKFAXYTXAXAXAGRHTPXTFTNQLQTXFXEPXLXILTXXXTDHQPIKESXLXNIPTIAFCDT

SEQ ID NO: 184075 - protein, 130 aa, Oryza sativa
  Clone ID: PAT_MRT4530_81102C.1.pep
MPGRSKGGSAVVKGDAAGLRRPFALHRSRSTQARIDVQAWAIGPILAAPAPLKSQDDDTSIIQWLDAHPRRSVLYISFGSQNSISIHQMAELALGLETSGRPFLWAVQPLVGFDHKDGFDPGWLPVGFED

SEQ ID NO: 184076 - protein, 375 aa, Oryza sativa
  unsure (1)..(375): unsure at all Xaa locations
  Clone ID: PAT_MRT4530_81103C.1.pep
MKNTSSLCLLLLVVLCSLTCNSGQAQVLFQGFNWESWKQQGGWYNLLNGQVDDIAKAGVTHVWLPPPSHSVAPQGYMPGRLYDLDASKYGTAAELKSLIGAFHGKGVQCVADFVINHRCADNKDATDLGFDGWRLDFAKGYSAPLARIYVDNTNPTFVVGEIWSSLIYNGDGKPSTNQDADRQELVNWVEGVGKPAXTSFDFTTKGILQAAVQGELWRLHDGNGKXAPGLMGWMPDQAXVTFVDNHDTGSTQSLWPXSPPTKVMRGYAYILTHPMHTPSMRRPVCSYWNLXKRKIATLAEIRSRNGIHAESTLDILKAEGDIYVAMIDGKVITKLGPRYDAGGIIPSDFHVVAHGNDYCVWEKEGLRVPAGRKHY

SEQ ID NO: 184077 - protein, 76 aa, Oryza sativa
  unsure (1)..(76): unsure at all Xaa locations
  Clone ID: PAT_MRT4530_81104C.1.pep
VCRNVLKTSALPYVNNEPHLRNIMRXVLSDDAGERYXRLRGHNVLYVCGTDEYGTATETKAMEEGCSPXEICDKYH

SEQ ID NO: 184078 - protein, 1248 aa, Oryza sativa
  unsure (1)..(1248): unsure at all Xaa locations
  Clone ID: PAT_MRT4530_81105C.1.pep
DSREPGRHPHRHPWRTYDHQQPTAPGSGCRAFSRALRDVRWPERFRPGXIEKYDGRTDREEFLQVYSTVLYAAGADNNALANYLXAALKGSARSWLVHLPPYSISSWADLWQQFVANFQGTYKCHAIEDDLHALTQNPGESLRDYIRRFNECRNTIPEITDASVIHAFKTGLFEIVDRCAHTDDALRRKNDKPKTAGEKKPAKDAPESSKKKSRKSGKRKAQTEVIAAEYADPPKHLDPQSNDTKKIWCPIHKSDRYSLEDCFVFKKSLAKQLALEKGKRVRVVEKAAEAATQDSDSAYPDSDLHVSHIFGGSTAYSSKREYKKVEREVCSTWQGAAPKMKWSEQKIEFSEEDHPKTAVTPGRYPIMVEPTIRNIKGNAKLAVQCDKRSLDMVEHTPNPPATAEPPKKKQAIREELDKLLKAGFIREVLHPEWLANPVMVRKANGKWRMCVHFTELNKACPKVHFPLPRIDQLVDSTAGCELLSFLDAYSGYHQINMAKEDEEKTAFIMPFGVFCYIKMPFGLVTAGNTFQRTVQGALNDQLGNNVEAYVDDIVVKTKTSDSLIDDLRETFDNLRRYRLILNLEKCTFGVPLGKLLGFLVSGRGIEANPEKIKAIENMKSLTRLKEVQKLTGCMAALSRFVARMGERGQHFFALLKKQDKFVWTQEAEDAFIALKYYLSNPPVLVAPQPNEELFLYIAAMRIFSIMTSRKLCHYFQSHRVTVVSSFPLGEVMRNKDVVGRIAKWVVELSQFDVHFVSRTAIKSQVLADFVADWTMPNNRADSQDDNETWTMAFDGALNSQGAGAGFILTSPSGHQFKHAIHLNFRVTNNTAEYEGLLTVIRAAAALGVKRLIVTGDSELVANQVHKDYKCSSPELSKYLAEVGKLEKRLMGSRREPLEPGTFLDVLTKPSVKEANDENSIVAPDISSGATEVERAVANIETAYDWQTPLIKFLSSDELPEDDAEVEKITRQAKIYCMIGNDLYKKVPNGVLLKCVSSDDGKHLLLDIHEGICGSHAASRTLVEKAFRQGFFWPTALKDACDMGLDILGPFRRGQGGYRFLFVVIDKFTKWIETTPTGEIKADNAIKFIKGIFCRYGLPHRIITDNGSQFISADFQDYCIRLGVKICFASVSHPQSNGQVEMANGIVLQGIKTRVYDRLMSHDKKWVEELPSVLWAMRTTPTTSNKETPFFLVYGSEAMLPTELQHQSTRVQKYLDEDQEEQRNDDVNLLEEHRERVAVRGASYQQALR

SEQ ID NO: 184079 - protein, 436 aa, Oryza sativa
  Clone ID: PAT_MRT4530_81106C.1.pep
MKNTSSLCLLLLVVLCSLTCNSGQAQVLFQGFNWESWKQQGGWYNMLKGQVDDIAKAGVTHVWLPPPSHSVAPQGYMPGRLYDLDASKYGTAAELKSLIAAFHGKGVQCVADVVINHRCAEKKDARGVYCVFEGGTPDDRLDWGPGMICSDDTQYSDGTGHRDTGEGFGAAPDIDHLNPRVQRELTDWLNWLKSDVGFDGWRLDFAKGYSTDIAKMYVESCKPGFVVAEIWNSLSYNGDGKPAANQDQGRQELVNWVNAVGGPAMTFDFTTKGLLQAGVQGELWRLRDGNGKAPGMIGWLPEKAVTFVDNHDTGSTQKLWPFPSDKVMQGYAYILTHPGVPCIFYDHMFDWNLKQEITALAAIRERNGINAGSKLRIVVADADAYVAVVDEKVMVKIGTRYDVGNAVPSDFHQTVHGKDYSVWEKGSLRVPAGRHL

SEQ ID NO: 184080 - protein, 1090 aa, Oryza sativa
  unsure (1)..(1090): unsure at all Xaa locations
  Clone ID: PAT_MRT4530_81107C.1.pep
MASKLKSMEMEISKGFLVHFIMSSLPQEFSPFTINYNAMKIKWGIDELIAMYVQEEERLKAERVDHANLFKHSKKKKYKKFKKEYLKPKPSQFKEKGQSSNQSQQNKSGGNPYTEEKGKEKDGCYFCGKSGHRQKDCIGFMRWLSKKDTDVISFVDESLNIDYATNSWWIDSGATIHVANSLQGFAMRRTLRRGERRIRVANGERISTHGDCQRGPLGCKRACPGEGGTLQYYSPAVPIEIQGIPFPSDLILLDTKNLDVILGMNWLAQFQGVVDCARRTVTLYRGLEQPVVFFAPPTSVGSSELHQIGLSETPIVREFRDVFPEELPGMPPKREIEFRIDLAPGTTPLYKRPYRMAANELAEVKKQLEELKEKGXDHQQHLRLVLGKLREHQLFXKLSKCEFWLSEVKFLGHVISTKGVAVDPETVTAVTDWKQPKIVTQVRSFLGLAGYYRRFIENFSKIARPMTQLLKKEEKFVWSPQCEKAFQTLHEKLVSSPVLILPDTRKDYLVYCDASRQGLGCVLMQEGHVVAYASRQLRPHEGNYPTHDLELAAVVHALKIWRHYLIGNRCEIYTDHKSLKYIFTQSDLNLRQRRWLELIKDYDVGIRYHPGKANVVADALSRKSRCNTLGVRGIPPELHQQMEALNLSIVGRGFLAMLEAKPTLLDQIREAQKNDPDMHGILKNMKQGKAAGFTEDEHGTLWNGNRRVKAEHQRPARLLQPLQVPEWKWDEIGMDFITGLPKTQGGHDSIWVVVDRLTKVARFIPVKTTYGGNKLAELYFARIVSLHGVPKKIVSDRGSQFTSHFWKKLQEELGTRLNFSTAYHPQTDGQTERLNQILEDMLRACVLDFEKTWDKSLPYAEFSYNNSYQASIQMAPYEALYGRKCRTPLLWDQVGESQVFGTDILREAEAKVRTIWDNLKVAQSRQKSYADNRRRNLEFAVDDFVYLRVTPLRGVDRFQTKGKLAPRFVGPFRIIARRGEVAYQLELPASLGNVHDVFHVSQLKKCLRVPSEQADSEQIEVREDLTYVERLVKILDTMERRTRNRVIRFCKVQWSNNAEEEATWERESELKAAHPDLFASSSESRGRDSV

SEQ ID NO: 184081 - protein, 103 aa, Oryza sativa
  Clone ID: PAT_MRT4530_81108C.1.pep
SAHPGIPCIFYDHVFDWNLQHEIATLAEIRSRNGIHAESTLDILKAEGDIYVAMIDGKVITKLGPRYDAGGIIPSDFHVVAHGNDYCVWEKEGLRVPAGRKHY

SEQ ID NO: 184082 - protein, 395 aa, Oryza sativa
  Clone ID: PAT_MRT4530_81109C.1.pep
MSTEMIAKFDKYWKEIQGPMGLATILDPKFKTDYLLGFIESITSQSSEECTDKLEEVKNNLYDLMKEYEMEEDEDNTESSAHSLANSETCTSLRHEESKTVPSKLTDGPAHSKTTKNSGRLGRRPQALDGRHELDTKAFIFQGLLFWVWEKLSKTEYNHHRTGNPTLGPSSSQANPGQPFHILVVKQPRGEGARTGSTGAGPTRQPHGPRWTGCTRLTPTGAVGPRRQPHPRARAADGRAPRGSRSVRPGGRPLRRGRREAAPVPRWSPPATTGTAEQRPREGRERGKRSGGPRLTPSRRRRRKRRPERRKAAARLGSTGSTAFRRSVSEAEGRTRSARMRRSRRRRRRGGRWSGATAAADRSSAATAERECDGAGSIPTGRKGGEWRKRWRGRG

SEQ ID NO: 184083 - protein, 87 aa, Oryza sativa
  Clone ID: PAT_MRT4530_8110C.1.pep
MSLPAGRRPCPHRRRRRQRQAAAAPRPSGGLPATVHGGAAAAAPSPRCLATPTPCPCTSSRRRSTRASRSSRTASPTSTPSHSLPPP

SEQ ID NO: 184084 - protein, 79 aa, Oryza sativa
  Clone ID: PAT_MRT4530_81110C.1.pep
FHELPPKYLKIPFCRPNKFYPNLVPFIPFPLTSVTTSPFFFPPLFFPPLSKYLCHQVYPIFFFSPTSPFWEWPISSLGK

SEQ ID NO: 184085 - protein, 1350 aa, Oryza sativa
  unsure (1)..(1350): unsure at all Xaa locations
  Clone ID: PAT_MRT4530_81111C.1.pep
MSYYVDRRTSVPQYPPYPVYGYPPSTVARQVGAFGTQGSTTMSSSFIDNSVNTGINQGVSTSTMLVWTQVGEIVFSIYTRVLISTGPPMTGSENVMVKTLGDSMSKDPPIEVENGTSTTSEPEQDPSMAKSCPSDKNHEPTRITSEATRNTIPEITDTSVIHAFKTGVRDSYTTQELATRRITTARRLFEIVDRYAHADDALRRKNDKLKTGGEKKPAKDAPESSKKKSHKSEKRKAQAEVLAAEYADPPKHPDPQGGDTNKIWCPIHKSDRHSLEDCLVFKKSLTKQLALEKGKRVHVVEKAAEAAIHYSDSAYPDSDLHVSHIFGGSTAYSSKQEYKKVEHEICSTWRGAAPKMKCSINLLFASTLDTMGIPRSELTPTDQPFHRITPQSSSKPLGKITLPVTFGQANNFRTEQITFDVAEFDTAYNAIIGRTALAKFMAASHYAYQVLKMPGPKGTITIQGNAKLTVQCDKRSLDMVEQTPSPPATAEPPKKPFDMPGVPKEVTEHKLMVRPDAKPVKQKLRRFAPDRKQAIREELDKLLKAGFIREVLHPEWLANPVMVRKANGKWRMCVDFTDLNKASPKDHFPLPRIDHLVDSTAGCELLSFLDAYSGYHQISMAKEDEEKTSFITPFGVFCYVKMPFGLITTGNTFQRTVQGALNDQLGNNVEAYVDDIVVKTKTSDSLIDDLWETFDNLRRYRLMLNPEKCIGVPSGKLLGLLVSGRGIEANPEKIKAIENMKSPTRLKEVQKLTGCMAALNRFIARMGERGQPFFALLKKQHKFVWTQEAEEAFIALKRYLSNPPVLVAPQPNEELFLYIAATPYSVITVIVVEREKVQRLVYYVSEALHDAKTRYPLIRKLLYAVIMTSRKLRHYFQAQRVTVVSYFLLGEVVRNKDIVGRIAKWVVELSQFDVHFVPRTAIKYQVLADFVADWTMPENRSDNQTDNETWTMVFDGALNSQGAGAGFILTSPSRDQFKHAFHLNFRATNNTAEYEGLLAGIRVATALGVKRLIVKGDSELVANQVHKDYKCSSPELSKYLAEVRKLEKIFDGIEVRHVYRKDNIEPNDLARRASRREPLESSTFLDIRTKPLVKEANDEDSTLAPDISSVATEAERVVADIETTDDWWIPLIKFISSDELPKDDAKAEKITRHVKIYYMISNDLYKKAPNGVLLKCVSSDDGKHLVNIHEGICGISSHAAGCTLDGKAFRQGFFWPTALKDACNMVQRCEACQFHSXTHKATNASAPNYPSHLAVLVLGAQHTRIISTRTRWLQVPIXVAIDKFTKWIEATPTGEIKADNAIKFIKGIFCKYGLPHCIIMDNGSQFISADFQDYCIGLGVKICFASVSHP

SEQ ID NO: 184086 - protein, 410 aa, Oryza sativa
  Clone ID: PAT_MRT4530_81112C.1.pep
MDISRTNEGFTSCGPVVEMSWHRAGVLLLGAQSCLPVPEVPAVGGVGSVLLSMARMGWKLCHVFRPYTVVVDELPMPEEDVPFCHDCREQGHYALNCPWVYAKEAPSFGLAGQASLNQPPRTKSSLQPSVQSREPNGENPLNPENCFPPILSYHVGSRTKQAKGKKSKNQKRKAPMRTEEEVRKMTITSTEWPPARITIPRRQRGNTFRGARQLTQHLLSHGGRVSDSEGSDQVSSDDEDESPRHLGEEEMESKACTRCGEIGHVASMCLTLCPHCEEDHPPGECPTRKVTCFLCEGTNHVLKDCQLSVLLTKTAEIQRTTLRLSHQLVSSNSNIDNIIHNTNAPPAPPDSAINHSNNTFSTNHSLHRQPQQRIVVDGRSCVSPRPTPGRAKGNQSQEGDTKQKTVLCFK

SEQ ID NO: 184087 - protein, 1597 aa, Oryza sativa
  unsure (1)..(1597): unsure at all Xaa locations
  Clone ID: PAT_MRT4530_81113C.1.pep
DPCTNVPQYPLYPVYGYHSSTVARQXFVDNSVNTNLSQVLPASTMLVWTQVSEIVFLVYTTMPISTGPPMTGHENTVATSQGDSMSKNCPAETENGASTTSELEKDSDTAKHCPSDMNRELTKMTSEATRSWCPIHKTRKHTLQACWVFLNVRAEIRACKERGIQRTSPTRDVYCPIHKTKNHDLSSCKVFLGTMKAPSPKLYVPIRDNGMEQGATPTSDRFVGVIDIDPHEPLVLHLLEDYGSSTTSAPREVLAIDDVGMSAHANAEAGNQSTTPAQHIRAVQAILRETPYDPVLNDDLERWTERLRESVTNLSNAFEEAATAAHPEQPPIGDANGRHPRRTHDRRQPTAPNAGCRAFCRFLRDVLWPERFRPGAIEKYSTLLNDGSTDPEEFLQVYSTVLYAAGADDNAFANYLPTVLKGSARSWLMHLPPYSISSWADLWQQFVANFQGTYKHHAIKDDLHALTQNSGESLREYVRRFNECRNTIPKITDASVIRAFKSDDALRRKNDKPKTGGEKKPATDASESSKKKNRKNGKRKAQAEVLAAEYANPPKRPDPQSSDIKKAWCPIHKTNIHSLEDCPVFKKSLEKHITFEKGKQVRVIEKNEEAVPHESDSAYPDSDLHVSHIFSGSTTYSSKRKYKKVEREVCSTWQGAAPKMKWSEQRIEFSEEDHPKTAVIPGRYPIVVEPTIRNIKITFDVAEFDTTYNAIIGRTALAKFMAASHYAYQVLKMPGPKGTITIQGNAKLEVQCDKRSLDMVEQTPSPPATTEPPKKPSDMPGVPREVIEHKLMMRPDAKPVKQRLRRFAPDRKQAIREELDKLLKAGFIREVLHPEWLANPVMVRKANGKWRMCVDFTDLNKACPKDHFPLPRIDQLVDSTAGCELLSFLDAYSGYHQISMAKEDEEKTTFITPFGVFCYVKMSFGLITAGNTFQRMVQGALRDQLGNNVEAYVDDIVVKTKTGDSLIDDLRQTFDNLRRYRLMLNPEKCTFGVPSGKLLGFLVSGRGIEANLEKIKAIENMKSPTRLKEEAEEAFVALKRYLSNRPVLVAPQPNEELFLYIAATPYSVSTVIVVEREKVQRPVYYVSEALHDAKTRYPQIQKLLYAVIMTSRKLRHYFQAHRVTVVSSFPLGEVVRNKDVVGCIAKWVVELSQFDVHFVPRTAIKSQVLADFIADWTMPDNKSDNQVDNETWTMAFDGALNSQGAGAGFILTSPSGDQFKHAIHLNFRATNNIVEYEGLLAGIRAAAALGVKRLIVKGDFELVANQVHKDYKCSNPELSKYLAEVSKLEKMFDGIEVRHIYRKDNIEQDDLARRASRREPLKPGTFLDIRTKPSVKEVSGEVSPDTPDISSEVTKAERAVADIETTDNWHIPLIKFINSEELPEDDIEAEKITRKAKIYCMVGNDLYKKASNGGGYRFLFVAIDKFTKWIEAVPTGEIKADNAIKFIKGIFCRYGLPHRIITDNGSQFISADFQDYCIGLGVKICFASDSHPQSNRQVERANSIVLQGIKTRVYDRLMSHDKKWVEELPSVLWAVRTTPTTSNKETPFFLVYGSEAMLPDELRHQSTRVQKHSDEDQEEQWDIDVNLLEEHRERVAI

SEQ ID NO: 184088 - protein, 157 aa, Oryza sativa
  unsure (1)..(157): unsure at all Xaa locations
  Clone ID: PAT_MRT4530_81114C.1.pep
LNISTNSWLSAEISIGEHINQFLAQCGEVSVKDGLNVRLFPLLLSGSAFTWFSPLPSNSTKRWTDLENXFHKYFFTGINEMKFTNLTSVKQRVDESVPEYIQRFLDVRSXCYNLSLSDRRLAELASQGLLSSIKERFFSQEFESLAHLMHKILAHES

SEQ ID NO: 184089 - protein, 559 aa, Oryza sativa
  Clone ID: PAT_MRT4530_81115C.1.pep
MPISAGPSMTGNENTVATTQDDSVSKDPPAEAENGTLTTSELEKDSNAAEPCLSDKNHEPTRITSDATSCKVFLSTTKTSSPKVQQSGISLRDEDKEQGTLVSDRFVGVIDIDSHVPSVLHLLEDYGSSPMSTSSELLAINGTSKSAHANAEAENQVTTPAQHIRTLNTILRETPYDPVLNDDLARWQERLRESVTNLSHAFEEAAAATHQEQPPTGGVNGKNPEQRESPPRATPPPRGTGDLCDHLNGRREARRTRDDGNRSRHRVSSRHRDNEDRDRTNRHNRHDHDDCERRTQGDTGRGCRYNDEDDRDRRRDNNGGRRQDSREPSRRPRTYKRHAIEDDLHALTQNSGESLREYVWRFNECRNTIPEITDASVIRAFKSGVRDHYTTQELATRRIRTTRRLFEIVERCAHVDDALRRKNDKPKTGGEKKPATDAPESSKKKNRKSGKRKAQAEVLAAEYANPPKRCRDRENCLFPNASVLIPVPGKAGRCPSTPNFVHLHPCTFVYNQTEPQTKPYPLDMWKYGSALQQRPEDRSLYGRGATIKTMHPEPSLKPF

SEQ ID NO: 184090 - protein, 699 aa, Oryza sativa
  Clone ID: PAT_MRT4530_81116C.1.pep
MSSQGAGGGVGDPELFAELWRACAGPLVEVPQRDERVFYFLQGHLEQLQEPTDPALLAEQIKMFQVPYKILCKVVNVELKAETETDEVFAQITLQPDPDQENLPTLPDPPLPEQPRPVVHSFCKILTPSDTSTHGGFSVLRRHANECLPPLDMSMATPTQELITKDLHGSEWRFKHIYRGQPRRHLLTTGWSTFVTSKKLISGDAFVYLRSETGEQRVGVRRLVQKQSTMPASVISSQSMHLGVLASASHAIKTNSIFLVYYRPRLSQSQYIVSVNKYLAASKVGFNVGMRFKMSFEGEDVPVKKFSGTIVGEGDLSLQWSGSEWKSLKVQWDEVTNVNGPERVSPWEIETCDGTAPAINVPLQSATKNKRPREPSETIDLQSLEPAQEFWLSGMPQQHEKTGIGSSEPNCISGHQVVWPGEHPGYGAVSSSVCQNPLVLESWLKDFNSSNKGVSPTLSEISQKIFQVTSNEARIATWPARSAYQAEEPTSKLSSNTAACGYRTEEVAPNASKVVEGKKEPAMFRLFGVDLMKCTSISTTTDDKSSVGAGEASAKGTGSHEDSGQLSAFSKVTKEHIAADESPQEIQSHQNYTARTRIKVQMHGNAVGRAVDLANLDGYEQLMNELEEMFNIKDLKQKWKVAFTDDEGDTMEVGDDPWLEFCQMVRKIVLYPIEDEKKIEPHPKLLSSANPEQDQKTGF

SEQ ID NO: 184091 - protein, 117 aa, Oryza sativa
  Clone ID: PAT_MRT4530_81117C.1.pep
LTHIELEQIINQKLNSYAIKDFVPNGLQVEGKTNIQRIITGVTASLPLIEQAIAKKADAILVHHGYFWKNESPCIRGMKSKRIKQLLLNDINLFSYHLPLDVHPELGNNAQLAEKLG

SEQ ID NO: 184092 - protein, 1008 aa, Oryza sativa
  Clone ID: PAT_MRT4530_81118C.1.pep
MPRYKPEYLFGVEGFVQELRTMSFVIGFGTAPFYAQIPHDRHEEKCRVKVTFNSNSEDIPSVMFEAGGRNYIHVCQEVARIAIGELRDRYSDQLADTEYRYHPRQPQGSDRGSYLETEGIENDATTKHLVEMLWAMDESRAETVLAAQDREDRNRGKICKLEDKVDRLEKELAALKGEAPPQKARIRLTARKRALFVPRYQLAPKVRVVEKEVAPAQADPPVIIISSDEEEESKRINSKIEWVATQDDKDKPSIDLRCLEELDTTNPVEASDWLHAIEKKLDLLQCTDQEKVSFASHQLHGPASEWWDHFRLNRTTAEPITWLEFTAAFRKTHIPSGVVSLKKKEFRSLTQGSRSVTEYLHEFNRLARYAPEDVRNDEERQEKFLGGLNDELSYPLMVGDYPDFQKLVDKAIRQEDKYNRMEQKKRRIAQFKTQQGNNQKPRLTLGPQPMPQGGSSSVVRPQCQFFNNNAGNNIRNQAPRPVAALAQQQPAKREQGSKPVVCFNCGDPGHYADKCPKPRRVKVVPAQNNSAVPASKARVNHVAAAEAQDAPDVILVREYPDVFPDDLPALEAKPTLIDQVREAQINDPDIQEIKKNMRRGKAIGFLEDEQGTVWLGERICVPDNKDLKDALLKEAHDTLYSIHPGSTKMYQDLKERFWWATVAVAREDHRRARQVVAVLVRPFAVAGDRRSFVAVDNPKVSAVSSSSSSSSVVFPPPFWSPVCSPRRPLRAGALRLRPGAAVRRQACAARAVRSAEPPPLSVTSPLTSSGSSAGIPAPTPPPYLAVVSRSSSSPPSPPPPPPPHLWGEQGQAMMERNKENAAKKKYHHYLGSGGYSVAMPKWEEMEASLLERGIEPATANWPERSKFWYYAQGGTLNPADGSLVFGDQIREAAHRLTDAMEASSQGTFRPDRERVELSLALQTPEHQGRTRGKGVIPWKIGFKEDIHTYRSRMRSKRDTLAKIADLEFRVSSYERIIQVEVARKVDERMAAHQSHDPQPTIPPAMVSP

SEQ ID NO: 184093 - protein, 1369 aa, Oryza sativa
  Clone ID: PAT_MRT4530_81119C.1.pep
MVRPSFPALHGGSGSPLLPALVANAQQFWNEWEIQCLVLASFSLQVFLHFFSSIRKGNTSRLLSSLLWLAYLLADYVATFTLGRLTLHVDDPRHQLVLFWTPLLLLHLGSQETISAFSIEDAMLWKRHLLGLVSQVALAIYIVAKSWRPDKQLLGPLVLMFISGTIKYAERTWALMTASSSMSPGSDSMADHVLGVQDDVILDAKSYFDELHSIFPGKNVLDIEGHNGGRRTDDDGYEGLVMAAGKGFRLCLDFLTDMTPFLVWSNTDTIIDSAIKKLRTSNPETQVQMAYKLVEIQLSLIYDYLYTKYGALQFRLGLVSSGIERLITFFSTLAALGLFVGANLKGPFNYSREDVMVSYVLLAGAITLDISSIFMLISSYWLQLHRRGGLFGCSFSLAKCVHAGSKPLWSEKIAQYNLIDACIQEERGGIICGWVMRRTGIVSDINMSNTVSPELKKLVLDKLFEVASTRSVSDYWDWDFSKYRGMWLQWWLQEGRIQADIAQGILTDGITDTDLYFPMTVIVWHIATEMCWFADEDDYSPCRAPSMELSRYVMYLVAKRDVMSGSNGHFELGKARRQVKRILEGRGISDERGLLKYARQATGQVTEPCFGRGRAISEHLLKISNRALRWELISMLWIEMLCYLGPNCGAQFHAKHLSTGGEFVTHVRILLVVLGIPFLSSNLVFLMLKLLSSCLIRLRSSLARALQLWNEWEIQCLVLASFSLQVFLHLFSSTRKANTSRVLSFLLWLAYLSADYIATFTLGRLALYVGDPHHHQLVLLWTPLLLLHLGSQETISAFSIEDAMLWKRHLLGLVTQVALAIYIMVKSWHPDKQLLAPLVLMFISGTIKYVERILVLMAASRAMEPGGDSVADHVMDVQDDVIIDAKSYFRELHNIFPGKEVQDLDVRDGRIREADEAYQGLVMAAGEGLRICLGFLTDMTPFLVWSSKEDTIIERTVEKLRSSDPDTQVEMAYKLVEIQLSLIYDYMYTKYGALQFRLGLVYSVIARLITFCSTSVALRLFVGTDLKGPFNYRREDAMVSYVLLVGAVTLDISSIFKLISSYWLQLHQTGGLFGCVFSLVRFVNPWSKPLWSEKIPQYNLIDACIQEERGSIICGWVVRKTGIMPDIDMSKTVSPELKKLVLDKLTEVATTRSVSDYWDWDSSKYSGMWLQWWLQEGRIQDDIAQGILTDGIIDTVLYFPMTVIVWHIATEMCWFADKDDRSPCRVPSMELSRYVMYLVVKRDVMSGTNGHFRLGKARRLLKRIIRASTVHDEKTLLRYVRQSPGVTEPCFSRGRVITDHLLKISNGAQRWELISMVWIEMLCYLGPNCGAQFHAKHLSTGGEFVTHVRILLVILGIPFLRSDMKPGKF

SEQ ID NO: 184094 - protein, 216 aa, Oryza sativa
  Clone ID: PAT_MRT4530_8111C.1.pep
PRAAGIRHEASSFVGADLKALVDKAGNLAMKRIIDRRRAQFCQEHDENSKHDWWRQPWDANEIEGLSITMDDFEEATKMVQPSLRREGFSSIPDVTWDDVGGLDSLRKEFDRYIIRCIKQPEEYKTFGLNMQAGFLLFGPPGCGKTLIAKAVAHEAGANFIHIKGPELLNKYVGESESEVRKIFIRAQTNTPCILFFDEVDALTTKRGKEGGWVVE

SEQ ID NO: 184095 - protein, 219 aa, Oryza sativa
  Clone ID: PAT_MRT4530_81120C.1.pep
MDLLRQPRGGARGPGPRGWGPRGSPTVHGGPGAPGLTPAGAVGPTRQPHPRARAADSRAPRGSRTVRPKAATPAQRREAARPRPYGVDEVAGDAAKPKEAAPRGEVVRGDNGGGPELGGNDGERGRRVAPDTYFKNIKEAGSMGASLALAMTKSLYPRVDMDAIDGFADGTSEEAALDLINDAQKAADKIAADVVERFQDVDLRPTGSDNSDDEKTDTD

SEQ ID NO: 184096 - protein, 458 aa, Oryza sativa
  unsure (1)..(458): unsure at all Xaa locations
  Clone ID: PAT_MRT4530_81121C.1.pep
MAQGRCPVAGGSVLPTCPGGSGRFIHLAYPTVEMALIPACRDRENXCIFPNASVLIPVPGKAGRCPSTPDFVHLHPCTFVYNQTEPQTKPYPLDMWKYGSALQQRPELNPYSGRGATCHNWHAPKPHRKIGCRGFERGRERERPSEPSATTTNHASRTSGTTEATRSTQAKLQAYKEAITIHKKKTEYTETVHGSTEADPVCQPRRVADKRTPLDTTRAAHXETTRLPSGHTNRVTTRTSERLPTPVHGRYAAGATLDDAEPRTKTTTGXAAAHLTERGRRTRTAXRRDERHDDEDDDRDRRGGNEGSRRQLHGDEDGVEHAAANPTTEAAPRDDEPAMSRFIKRKRKYYFITWAAKAQHTQRQTGNSGRLGGGGARTGSTGVGPTRQPHGPRWTRRTRARTGRRRGPHTSAAPEGAGRXGPAPTRNQSGGPRRPAGAEVEGGLCGGPARCATLHARS

SEQ ID NO: 184097 - protein, 108 aa, Oryza sativa
  Clone ID: PAT_MRT4530_81122C.1.pep
MQAPHVSGCGRWSMVDRVHGPGKDGAPRGADVAPTRRPRGSHVGGRTGGPDLPKGRSDGGGGSRPARAGTAQAGPATMAHGGATRMRRWCGTATGGDRPAAESGGAGG

SEQ ID NO: 184098 - protein, 93 aa, Oryza sativa
  Clone ID: PAT_MRT4530_81123C.1.pep
CLKQIQYTMSGARSILTVIIDMCRNKKKVYNKQRHRLSKSSLMFPCCGIVRSIYHLISRSCATKKLPSVLGSTNLNYHSLRANCVFHDILQFL

SEQ ID NO: 184099 - protein, 167 aa, Oryza sativa
  Clone ID: PAT_MRT4530_81124C.1.pep
MHSFGHRANAVATFAVTILAAMCFAASFSDHFNSPSPTASVKILNINWFQKEANGNDEVSMTLNISADLSSLFTWNTKQVFVFVAAEYETPQNALNQVSLWDGIIPSKEHAKFLIHTTNKYRFIDQGSNLKGKDFNLTMHWHIMPKTGKMFADKIVMTGYRLPEQYR

SEQ ID NO: 184100 - protein, 49 aa, Oryza sativa
  Clone ID: PAT_MRT4530_81125C.1.pep
GYELPHYFSAFLIFSNFNLHPFFILECLYRCNSLNMYLYYSFLGKKKKK

SEQ ID NO: 184101 - protein, 86 aa, Oryza sativa
  unsure (1)..(86): unsure at all Xaa locations
  Clone ID: PAT_MRT4530_81126C.1.pep
QDSADTCYLAKQLAASAXAXVGEXXCSXEERVLTVRKTXHFSPGDGFXXXDXRXGGLAFRAXPYCRXLXXGAXSSGXLXLLXFFTA

SEQ ID NO: 184102 - protein, 133 aa, Oryza sativa
  Clone ID: PAT_MRT4530_81127C.1.pep
MLASASRHGQPQRNGTAALPIDADRTHRSTYGPEPPGVEHQNFLSAQKVRNFRCSYTGTSGQQTNSGITNRNLAKIHEMNHRKHHTRKTSRTSAQDSLLTYLVSLRRMAQDQVEEANKLLGEASNGYGMEKQK

SEQ ID NO: 184103 - protein, 66 aa, Oryza sativa
  Clone ID: PAT_MRT4530_81128C.1.pep
MVTQTFILVQALNASRHPPQAAVASAPFMRRAGVLQESSSRRGTTVMTGYAASCCPSTPTTAGGTA

SEQ ID NO: 184104 - protein, 120 aa, Oryza sativa
  Clone ID: PAT_MRT4530_81129C.1.pep
MASERMHQSRSYCCRVPCVLSHYHRETTSPARTDGGYGHLFTSFEYNLILQGPKDVQFILKITTQLTLQQQFNDNILLAVKSRKILSDYKWIQTSNLYLSTRYMSSHAETNEAMAATTLL

SEQ ID NO: 184105 - protein, 38 aa, Oryza sativa
  Clone ID: PAT_MRT4530_8112C.1.pep
QALPPDSMNHKLGAPAGSGPLRMCNLSIDQDPSCPMNE

SEQ ID NO: 184106 - protein, 104 aa, Oryza sativa
  Clone ID: PAT_MRT4530_81130C.1.pep
FFCNTSSKILMIHKNAGDAHNNTTKTAVYQQMSKAHHIGAETLQLAHTLLLIASCLAQYCCKTTDRKKIISQDTKLALPKAYERKIRIPVSCEDCWRFGLSHMV

SEQ ID NO: 184107 - protein, 126 aa, Oryza sativa
  Clone ID: PAT_MRT4530_81131C.1.pep
SRGRRLCRERGRHLRHAQAPAATASASSRGRRRARPHAAATSAVSAAAVSAAAARSPPLFQATRSDIAPSRRPVPGSRGGRRGGRSRGRGRGRDGTIGAAAGNRMRGFVPPGRGGSMSNGAGVVGH

SEQ ID NO: 184108 - protein, 192 aa, Oryza sativa
  Clone ID: PAT_MRT4530_81132C.1.pep
IEHSSSNPIRSARARAPPWALAMASSPMAMDADKRSYEIFSLLESKFLFGWLAAAGACRRGRARRRGRFLAAVAAWTGGCGCWPSTGCGSSGAGDALLAAAALARLEAGLRKRTGDSDARVADFFDVAAGAGAGGVLAAMLFLRGPDGRPRYTAEEALEFVAASVGRDWAGRRGRWARLFRGGARGAERSFR

SEQ ID NO: 184109 - protein, 209 aa, Oryza sativa
  unsure (1)..(209): unsure at all Xaa locations
  Clone ID: PAT_MRT4530_81133C.1.pep
NXXPRXXXIXPXNXXRRNXXDXGGDDRWXXTWPPPQXLYSPKPPEICTXFPNVKVETRXEKGDPRDXXCGAVVEARXXXGXDGEPXLXFPAEDXXGERQQPXRPAVQVPRFXXXEAXHQRQGLLMRQXRGAGCNMXNXLNIXXXXXXSPRRXTQKRILLXDXPLPVEIITPTSXXDYHQSGGGGGGGGXKRRRGKGEERERERERXSPG

SEQ ID NO: 184110 - protein, 252 aa, Oryza sativa
  unsure (1)..(252): unsure at all Xaa locations
  Clone ID: PAT_MRT4530_81134C.1.pep
MVLLRCRKSCCLHWMNYLSPDLKCSNFXDGGGGRASELHARRRNEWNTHIKRKLMSQGIDPQTHQPVSAGTSVAAASELTTTTSTVSFPSLQRGRRREGARGGRREGWEGSSSKSSLAAEVSPAEVESAAEVSLSSASRSTAKSSLPLDDDEEDGDGDLAAGLMAEGKGCALVGWGGLDAPPCSPTSAPLPCSPSTAPPAAALALRFSARGRARAPLLGLPRLRPPPLRWRLPSAAPPASACVAPPATGLPH

SEQ ID NO: 184111 - protein, 274 aa, Oryza sativa
  Clone ID: PAT_MRT4530_81135C.1.pep
PRHPYALNPRPPRSRVAARSGRRGRGGAAQRGGEWGFRRLGKVREEREVSVREAGGRRSSACGCGRGGRGQARQRSGGRRKRSGPSSGARARPRAEKQRASAAAGGAAEGERGSGAEVGERGGASSPPQPTKARPLPSAISPAAKSPSPSPSSPSSSSGSDDFAVLLDAELELTSAADSASAGDTSAANDDYEEDPSQPSLLPPRAPSRRRRRLQGWEADSAGRRGQLACRGNAGPGANRLMRLRIDALAHGLALDVRVPPAEPINQHQEHKKS

SEQ ID NO: 184112 - protein, 111 aa, Oryza sativa
  Clone ID: PAT_MRT4530_81136C.1.pep
MTEARRRKGDNQDGGGAGTPCNDAHARSDDISGDSCGVDQVRRERWKRGAPTAACGAQAEVGGSVTSSRGATGCTASKVQQEDTVRECKEQWRHMKGAVALWQQLASAHAD

SEQ ID NO: 184113 - protein, 80 aa, Oryza sativa
  Clone ID: PAT_MRT4530_81137C.1.pep
MARGPNLQRSKVGPTCQPLARKPPRRVVRGKQPLRAMESIGLGMDKKALEEKAAKKVAQAVGGGGGTSTDNKSKAGGAKK

SEQ ID NO: 184114 - protein, 149 aa, Oryza sativa
  Clone ID: PAT_MRT4530_81138C.1.pep
SLLPQSQLRRIGGGGFGGAVFGRRRGDGRRTTGPAATAVRDLEIAARPALVFYDTPDCWLASLYLGFRFSRLLFFLLSITTALYISTSTFLLTRRAPSHDDDYDHHHNHHDHHQHLNPSTYKPNQTSSPFNLSNHTALDAGRCGRTHPE

SEQ ID NO: 184115 - protein, 455 aa, Oryza sativa
  Clone ID: PAT_MRT4530_81139C.1.pep
MGKQPAGGSEPRSRARASGTAAPTTRGPAPQTHAPPQERRQEEIVHGVRHAVAPGDGGAGTSARPDRRTRFVTQVTEVPQSPVHGDAVAGEEAALARRPGKKPSYLPARLRRAEEGSHGRTPWSAPAGHPAPPAAVPEEPQEPRLGPPGLKPAKILDTHKSIERTSTIRDEDDGVTYPAEPAPPGRTFPAARPPQDEPGFATAARHPRTSPGTPALPGRSSPSPWRPHNEPGSYASPSPSSEAPARTPAKSPMLRPRNDKKRRPVAFCFTACCILFWLLVIAVGAAVLVIFLIYHPQSPRMRVTSATLNAGYVDELGIVGGARALNADLTVLAAIYNPNTKLHVVLRYMQLDLYFQGSMIGTQAVWPAPLHEGPRGSVLRSVHLVVSEVTMTQEDVYEWQNATSKGGPVVLHLAGRFRARLIFGRWFKFNYWVSPQCTLWLDPPPSGALRRARCS

SEQ ID NO: 184116 - protein, 90 aa, Oryza sativa
  Clone ID: PAT_MRT4530_8113C.1.pep
PTKTFPIKSPTPSSPKATNFLPLKEGKPFGLTKGLQKVPTPKVKNPKWATQAPRKELGRRKPSRGGRPKPQPGRNRALEPTKSGLAKGRN

SEQ ID NO: 184117 - protein, 72 aa, Oryza sativa
  Clone ID: PAT_MRT4530_81140C.1.pep
KRAPVPEWLSRQEIPVAPRQASLRQRLVARCRGVHYIDTRTYILPGQPGMMHDGVHAHRYTYIHVALVIEFL

SEQ ID NO: 184118 - protein, 644 aa, Oryza sativa
  unsure (1)..(644): unsure at all Xaa locations
  Clone ID: PAT_MRT4530_81141C.1.pep
MITLRKREFRYLKQGDLTVTEYLHEFYRLAHYAPEDVETDEDKQEKFLQGLKDELAVQLLLEDYEDFEKLVDKAMQLESEHNRMTNCKRRIVNIPVFPGGNQRQRTEPLQITGSSVAHQEFPPQEDGRNADNNTSNTNDDDTTNNHDSCSISDHSNKACNVSSIHQDVNDSINVGTQNDNLSNFDTEKDSNGDSNYGTTDANVISLEIVHSRSVTCAITPAIMQEEDRPKDLIATRSIHNSRSEEYLVTKNPLFAFYRFGLLPSSPVVSSHLPTVALSLPRCRPASSRLSRLAGESSGRAIASSSVAATSSTPACPPFREETPGTTFPPSPSSFLRAGHLQPPSSPRPSAARPRRLLPRXAAASSFPASPPFRGEITGDASSPASSGVATTSPPPAASAASPVHRPTSPPPLPAPECRPLSRPGHGVARISPERRRLRAGLSFLLVGXVAPLHHHLHQHRSGVFHAVPPSAQPLLPAIIVSSSSPIVLVVDVPSVARLVVSRRRLRHRHRSGVFHVVLVPVQPLPAVLVASSPVPVVVVVVVVVLSSFPVVVAFVPPSSRSRSSSXFVKIAAAPSSCSSSAPRRQASCRPRLAFAQGSPPKPSPRRSSPLCPFRRSGGSRSVVRGRRRRFGRPFSLSKASHIIL

SEQ ID NO: 184119 - protein, 59 aa, Oryza sativa
  unsure (1)..(59): unsure at all Xaa locations
  Clone ID: PAT_MRT4530_81142C.1.pep
CPHPXKKKREGEKKKKKKKKEKKNIKESKTYIRVLCRFNIPCFRVTLMSIYWPVVITPP

SEQ ID NO: 184120 - protein, 263 aa, Oryza sativa
  unsure (1)..(263): unsure at all Xaa locations
  Clone ID: PAT_MRT4530_81143C.1.pep
YQMCRHQPRARLSPDEQLAAEESFALYCKPVELYNIIQRRSIKNPAFLQRCLLYKIHARRKKRSLITISLSGGTNKELRAQNIFPLYVLLARPTNNVSLEGHSPIYRFSRACLLTSFHEFGNKDYTEATFVIPDVKNLATSRACSLNIILISCGRAEQTFDDNNCSGNHVEGSTLQKLEGKCFWGKIPIDLLASSLGNCVSLSLGHTVEMSSTVEMTPSFLEPKFLEDDSCLTXCSQKVDATGSFQLQVSISAQEAGAKTCPS

SEQ ID NO: 184121 - protein, 1462 aa, Oryza sativa
  unsure (1)..(1462): unsure at all Xaa locations
  Clone ID: PAT_MRT4530_81144C.1.pep
MDISRANEGYTSCGPVVEMSWHRAGVLLLGAQSCLPVPEVPAVGGVGSVLLSMARMGWKLCHVFRPYTVVMAGSINRRGLDLTGFVLELRGMCVVLGYPHGVDYQGKQLLEQEGDDVEPHAAWEVTVVVLTGSPERTSLAVTAGGDSFSAACQNAALLAIGTLHQRYPDELQHSPYRYHPRRGGARDYATFRDASSEDDATIMHLARMVQAYNATRINFHHMVRRGLVENNMKILELRQENLQLKKDLDAVEAQLCQLKIAQGEMVTTRRSAAFLHHIQNPPQHNAPPLPPPPQHSKLAEFLRIRPPIFSSSNNPVDALDWLHAVGKKLDTVQCNDEEKVIFAAHQLQGPASLWWDHFQATQPEGQPITWARFTAAFRRTHVPAGVMALKKREFRELKQGNRSVMEYLHEFNNLARVRYTIPYPGGSSSQQQQQQQPRSAPRPQFVVRVPQPQQQQSQQGTRAPRPPAPVVQPGQGRRDAQGQQRLCFNCFESGHFADKCPKPRRQQGQAPPRPNNGGKDVIRGRVNHVTAEDVLTTPDVIVGVVDCARRTVTLYRGLEQPVVFFAPPTSVGSSELHQIGLSEIPIVREFGDVFPEELPGMSPKREIEFRIDLAPGTTPLYKRPYRMAANELAEVERQLEELKEKGYIWPSTSPWGAPVIFVEKKDKTKRMCVDYRALNEVTIKNRYPLPRIDDLFDQLKGATVFSKIDLRSGYHQLRIREEDIPKTAFTTRYGLYEFTVMSFGLTNDPAFFMNLMNKVFMEYLDKFVVVFIDDILVYSQSEEDHQQHLRLVLGKLREHQLYAKLSKCEFWLSEVKFLGHVISAKGVAVDPDTVTAVTDWKQPKTVTQVRSFLGLAGPQCEKAFQTLKEKLVSSPVLILPDTRKDFLVYCDASRQGLGCVLMQEGHVVAYASRQLRPHEGNYPTHDLELAAVVHALKIWRHYLIGNRCEIYTDHKSLKYIFTQSDLNLRQRRWLELINDYDVGIHYHPGKANVVADALSRKSRCNTLGVRDIPPELNQQMEALNLSIVGHGFLATLEAKPTLLDQIREAQKNDLDMHGILKNMKQGKAAGFTEDEHGTLWNGNRVCVPDDRELKKLILQEAHESPYSIHPGSTKTYLDLKEKYWWVSMKREIAEFVALCDVCQRVKAEHQRPAGLLQPLQVPEWKWDEIGMDFITGLPKTQGGYDSIWVVVDRLTKVARFIPVKTTYGGNKLAELYFARIVSLHGVPKKIVSDRGSQFTSHFWKKLQEELGTRLNFSTAYHPQTDGQTERLNQILEDMLCACVLDFGKTWDKSLPYAEFSYNNSYQASIQMAPYEALYGRKCRTPLLWDQVGESQVFGTDILREAEAKVKTIRDNLKVAQSRQKSYADNRRRNLEFAVDDFVYLRVTPLRGVHRFQTKGKLAPRFVGPFCIIARRGEVAYQLELPASLGNVHDXFHVSQLKKCLRVPSEQADSEQIEVREDL

SEQ ID NO: 184122 - protein, 149 aa, Oryza sativa
  unsure (1)..(149): unsure at all Xaa locations
  Clone ID: PAT_MRT4530_81145C.1.pep
MMNIGEVFRMPCMLRWSSLGLGVCDVTMATTDATIAHIMDEQEDIKIKSSKCWNPIRPPTTLLTSNGCRICIRPPFSAREYLMESSWSPLSNGSSLIAKFHLIEPQLKQQGAASPIMGLWACNFVWDPGPGGAXCGVRPSQVEHDPRHP

SEQ ID NO: 184123 - protein, 122 aa, Oryza sativa
  Clone ID: PAT_MRT4530_81146C.1.pep
MPRYKPEYLFGVEEFVQELRTMSFVIGFGTAPFYAQIPHDRHLEHYLETQGIENDATTKHLVEMLWAMNETRAETVLAAQDREDRNRGEESKRTPSKVDWGATQDDEDEPNEPSINSDARKN

SEQ ID NO: 184124 - protein, 221 aa, Oryza sativa
  unsure (1)..(221): unsure at all Xaa locations
  Clone ID: PAT_MRT4530_81147C.1.pep
GGAGAGAGAGSTGVLRDAKRVSARATMDTTIAHIMNQQEDIKIKSSKCWNPIRPPTTLLTSNGCRICIRPPFSAREYLMESSWSPLSNGSSLIAKFHLIEPQLKQQGAASPIMGLWACNFVWDPGPVWGPCGVRPNLVEHDPWTLLVILPPLXIVRNRVYLHRQDQQPTERCIDRXGATQRLVRTTHRKIGPTTALSVERNSGFIIVFMPWWILWRTSANR

SEQ ID NO: 184125 - protein, 1505 aa, Oryza sativa
  unsure (1)..(1505): unsure at all Xaa locations
  Clone ID: PAT_MRT4530_81148C.1.pep
MTELVAPHRETAQAPLCQFGRGLRRFCQVRNTIPCIPAHAVIYAFRGGVRHNRMLEKIASKEPQTTAELFQLADRVARKEEAWTWNSSGSGVAASAAPGSAAQTGRRDRRRKKRPDRSGDEGHVLAVEGAPRATRKGRPASDKKNEAGTPSRERLAGRWCSVHNTSLHDLADCRAVKNLAERTRKWEEDRRQERREGKSPAVPSGKRRSEAKQKAPAVDIDDGDDDLGFQEPGATIATVDGGACAHVSRRSFKAMKRELLAMAPTHEAMRRARWSEVALTFDQTDHPPCIARGGQAAMVVSPTICNVKLGRVLIDGGAALNILSPAAFDAIKAPGMVLQPSQPIIGVTPGHTWPLGHIDLPVTFGGPANFRTERVSFDVADLSLPYNAVLGRPALVKFMAAVHYAYLQMKMPGPGGPISVRGDLKAALACMEQRADRLAAASKPEGGDERLGPSAPTAPRQRMATCDEVPEDALVSFLRANADVFAWRPADMPGVPREVIEHRLAVRPGARPVRQKVRRQAPERQAFIREEVAKLLEAGFIREVIHPEWLANPVVVPKANGKLRMCIDYTDLNKACPKDPYPLPRIDQIVDSTAGQIGRNVEAYVDDLVVKTRNQETLLSDLAETFENLRSARIKLNPDKCVFGVPAGKLLGFLVSARGIEANPEKIRAIERIRPPSKLRDVQCVTGCMAALSRFISRLGEKALPLFKLLKRSGPFTWTEEAEHALTQLKAYLSSPPVLVAPEPNEPLLLYLAATPQVVSAALAVERDEDNPHSAHPHPVLTWPGSKQGGEAPEPNGGLRPLTTGVGPLPARQTVLGAPDPQEGPEATAGRPHLSPSDPEANPVPIRPGREQGEEAPKPNGGLRPLTTGVGPLPACPMTPGAPDPQDGPEATVGRPLLSSSDPEVIGTEDECAPRGHSDEERPGGTVPSEEDRPRRKVQRPVYFVSEALRDAKTRYPQAQKMLYAILMASRKLRHYFQAHRITVVTSYPLGQILHNREGTGRVVKWAIELSEFDLHFEPRHAIKSQALADFVAEWTPAPETVSIPEASTNPSQLPHTAHWVMQFDGSLSLQGAGAGVTLTSPNGDVLRYLVRLDFRATNNMAEYEGLLAGLRVAAGLGIRRLLVLGDSQLVVNQVCKEYRCSDPQMDAYVRQXKTLPEDREGSERVQRISKRYXCQFHAKQIHQPAQALQIIPLSWPFAVWGLDILGPFKRAPGGFEYLYVAIDKFTKWPEAYPVVKIDKHSALKFIKGITARFGVPNRIITDNGTQFTSELFGDYCEDMGIKLCFASPAHPRSNGQVERANAEILKGLKTKTFNILKKHGDSWIEELPAVLWANRTTPSRATGETPFFLVYGAEAVLPSELTLRSPRATMYCEADQDQLRRDDLDYLEERRRRAALRAARYQQSLRRYHQRHVRARSLCVDDLILRRVQTRAGLSKLSPMWEGPYRVIGVPRPGSVRLAMGDGTELPNPWNIEHLRRFYSTPERGGGRVSGFGSGQPRTPLGLS

SEQ ID NO: 184126 - protein, 70 aa, Oryza sativa
  Clone ID: PAT_MRT4530_81149C.1.pep
LFSYSLESIHTVSFRTIVSSLVGRSIAYTIAYTASSHCVCHCGMNALRLAAALSKSRFQYPLDHSASTRA

SEQ ID NO: 184127 - protein, 120 aa, Oryza sativa
  unsure (1)..(120): unsure at all Xaa locations
  Clone ID: PAT_MRT4530_8114C.1.pep
ATSRLCLGIAIVAFVIYFVCYVSYNLFFCSFFVFLYYLFLSLVSLFIFYFFLLFNFSLXFFLFYIFYLKFFLIFFIYFLILFLLFFFIFIFFLKSICFNFFYIFLNCFFIIFLLLFLFYF

SEQ ID NO: 184128 - protein, 436 aa, Oryza sativa
  unsure (1)..(436): unsure at all Xaa locations
  Clone ID: PAT_MRT4530_81150C.1.pep
MARCLEHAAHSDTKRSNTEKRVADVIKGEGRRRQAGPTGQRHKGAXSTVDRDHXAVHHRSTGTDGPDRPKPIGRPGAAQLGHSTXKAGLAEPWRGGSAVSGDGDRWAARERRHAWAAAAHXDRRGATRGGPGGPGERGGGARPGGRRRRPPARQRARDTEEGGKEGEEELTKELLGTKAERRPGGVGWRWLGMHGGRVVAAIKWGNGAGAGVRRGTEKPAVQTARRGXARAAARGGRSSLGTDGEREHGGEVVRVVEGEEETAAEHSLEVAKPAVAAEQCGDDPSDGKRRPEFAGVWRRAGAAWGERGRECRARETRGNGRGEHGGAFYGLGKAGSRPDVAESAGEVGHRRGVVEGLTGADFRGESXGGERWRRWRGYISRARGAGWSAGAAASWGETGGHGGSWGDGRLGKKMTGGASGPTCRGEREGKTGEGGK

SEQ ID NO: 184129 - protein, 104 aa, Oryza sativa
  unsure (1)..(104): unsure at all Xaa locations
  Clone ID: PAT_MRT4530_81151C.1.pep
MEAVDLCAAIPLEERDMKSDQALRDLHERRYEHHHVQSNHRXKLRRFDAIMDNWRYIQEHYTRGSQRXRLRLIRLFYMLREETRAKFAXARSNDLRRTGISRRS

SEQ ID NO: 184130 - protein, 1397 aa, Oryza sativa
  unsure (1)..(1397): unsure at all Xaa locations
  Clone ID: PAT_MRT4530_81152C.1.pep
MTGNENAVATNQGDSMSKNPPVETENGSSTTSKHGKDSDTAKPCPSNINHEPAKMTSEATRSWCPIHKTKKHTLQDCWVFLNVRVEIRACKERGIQRTSPTRDVYCPIHKTNNHDLSSYKVFLGAMKAPSPKSYVPVRDNGKEQGATPASDRFVGVIDIDPHEPSVLHLLEDYGSSTTSVPREVLAIDDVGTSAQANAEAANQSTTPAQHIRVVQAILRETPYDPVLNDDLERWTERLRESVTNLSNAFEEAATAAHQDQPPTGDANDSXPGAIEKYDGSTDPEEFLQVYSTVLXTGADNNALANYLPTALKGSARSWLMNLPPYSISSWVDLWQQFVANFQGMYKRHAIEDDLHALTQNSGESLRKYVRRFNERRNTIPEITDASVIRAFKSGVRDCYTTHELATRCITTTQRLFEIVERCAHVDDALRCKNDKPKTGGEKKSATDASESSKKKNHKNGKRKAQVEVLTAEYANPPKRPDPQGSDTKKSWCPIHKTDRHSLKDCLVFKKSLEKHMAFEKGKRVRVVEKNEETAPHESDSAYPDSDLHVSHIFGGSTTTLGAMGIPHSELTPTDQPFHGITPRSSSRPLGKITLPVTFGQANSFRTEWITFDIAYNAIIGRTALAKFMAASHYTYQVLKMPGPKGTITIQGNAKLAPSDMPGVPREVIEHKLMVRPDAKPVKQRLRRFAPDRKQAIREELNKLLKAGFIREVLHLEWLANPVMVRKANGKWRMCVDFTDLNKACHKDHFSLPRIDQLVDSTAGCELLSFLDAYSSYHQISMAKEDEEKTAFITPFGVFCYVKMPFGLITAGNTFQRTVQGTLSNQLGNNVEAYVDDIVVKTKTSDSLINDLRETFDNLRRYRLMLNPEKCTFRVPSGKLLGFLVSGRAIEANPEKIKAIENMKSPTRLKEVQKLTGCMAALSRFVARMGERAQPFFALLKKQDKFIWTQEAEEVFIALKRYLSNPAVLVAPQPNEELFLYIAATPYSVSTVIVVKREKVQRQVYYVSEALHDAKTRYPQIQKLLYAVIMTSRKLRHYFQAHRVTVVSSFPLGEVVRNKDVVGRIAKWVVELSQFDVHFLPRTAIKSQDNVKPDDQARRVSRREPLEPGTFLDILTKPSVKEVSPNTPDISSEVTEAERAVADIETTDDWRTPLIKFISSEELPEDDTEAEKITRKAKIYCMVGNDLYKKALNGVLLKCVSTDDGRHLLLDIHEGICGSHAAGRTLVSKAFRQDFFWPTALKDACDMVQRCETCQFHSKHTKLPAQALQTIPLTWPFSCWGLDILGPFPRGQGGYRFLFVAIDKFTKWIEAVPTGEIKADNAIKFIRGKFCRYGLPHRIVTDNGSQFISANFQDYCIGLGVKICFASVSHPQSNGQVERANGIVLQGMKTRVYDRLMS

SEQ ID NO: 184131 - protein, 73 aa, Oryza sativa
  Clone ID: PAT_MRT4530_81153C.1.pep
WIPGLQESHEGIISFPHIVPHADGSHAAHPARAASAAGKSRSFDLDLATSYYLGRSIDRSRDIASCCSQIRSE

SEQ ID NO: 184132 - protein, 97 aa, Oryza sativa
  Clone ID: PAT_MRT4530_81154C.1.pep
GDQSDGGRPTDGDGDEVETAALFGMTTATMLRRSPTVAKRRTRTATTWRARRRSSRATTMTGTAAAHGWSDGGDGGARAHGARALRATRGEGEGGGR

SEQ ID NO: 184133 - protein, 1523 aa, Oryza sativa
  Clone ID: PAT_MRT4530_81155C.1.pep
MSFVISFTLLIIIEDAITGNNLISSWFGMMPRYKPEYLFGVEGFVQELRTMSFAIGFGTAPLYAQIPHDCDEEKCRVKVTLNSNSEDIPSVMFKAGGGNYIHACQEVARIAIGELRDRYSDQLADTEYRYHPRQPQGSDRGSYLETEGIENDATTRHLVEMLWAMDETHAEVVLAAQDREDRNRGKICKLEDKVERLEKELAALKGEAPPQKARVRLTARKRALFVPRYQLAPKVRVVEKEVTPALANPPIVNMVLTRSNGNGPNINNNNNNNGENPTLAQVLAQQAQLMNMMMQQLQNQQNEGNNHAPPQNKLAKFLRVRPPTFSSTTNPVEAGNWLHAIEKKLDLLQCTDQEKVSFASHQLHGPASEWWDHFRLNRTTAEPISWFEFTAAFWKTHIPSGVVSLKKKEFRSLTQGSRTVTEYLQEFNRLARYAPEDVRTDEERQERFLEGLNDELSYPLMTGDYHDFQKLVDKAIRQEDKYNRMEQKKRRIAHFKAQQGNSQRPRLTLGPQSMSQGGSSFVVRPQRQFFNNNAGNNIRNQAPRPVATSTQQQHAKKEQGSKPGQLYRTSANHVTAAEAQGAPDVILGTFLVNSVPATVLFDSGATHSFLSMSFAGNHRMEVEDLRRPLMVSTPSNQALSLQRSPSIRIEIQEVPFLANLTLLESKDLDVILGMDWLARYKGVIDCANRKVTLTSNDGRVVTVHALSSESLRSSLNQMTLEEIPIVREYPDVFPDDLPGMPPKRDIEFRIDLVPGTTPIHKRPYRMAANELAEVKRQVDDLLQKGYIRPSSSPWGAPVIFVEKKDHTQRMCVDYRALNNVTIKNKYLLPRIDDLFDQLKGATVFSKIDLRSGYHQLRIKEEDIPKTAFTTRYGLFKCTVMSFGLTNAPAFFMNLMNKVFTEYQDKFVVVFINDIRIYSRTKEEHEEHLRLALEKLREHQLYAKFSKCEFWLSEVKFLGHVISAGGVAVDPSNVESVTNWKQPKTVSEIRSFLGLAGYYRRFIENFSKIAKPMTRLLQKDVKYKWSEECAQSFQELKNRLISAPILILPDPKKGFQVYCNASKFGLACVLMQDGKVVAYASRQLRPHEKNYPTHDLELAAVVHALKIWRHYLFGTRTEGKANVVADALSRKGYCNATEGRQLPLELCKEFERLNLGIVSRGFVAALEAKPTLIDQVREAQINDPDIQEIKKNMRRGKAIGFLEDEQGTVWLGERICVPDNKDLKDAILKEAHDTLYSIHPSSTKMYQDLKERFWWASMKREIAEYVAVCDVCQRVKAEHQKPAGLLQPLKIPEWKWEEIGMDFITGLPRTSSGHDSIWVIVDRLTKVAHFIPVKTTYSGSWLAELYTARIVCLHGVPKKIVSDRGFREAEEKVKIIQERLRVAQSRHKSYADNRRRDLSFEEGDYVYLRVTPLRGVHRFHTKGKLAPRFVGPYKIVSRRGEVAYQLELPQSLAGVHNVFHVSQLKKCLRVPTEEANLEQIEVQEDLTYVEKPIRILEIDERRTRNQVIRFYKVQWSNHSEEEST

SEQ ID NO: 184134 - protein, 60 aa, Oryza sativa
  Clone ID: PAT_MRT4530_81156C.1.pep
LCKPFFNNFIRHVGISKTLMLDFQSIFKNSSSEQITSEDNLLLKISTLVQPETITKCLDA

SEQ ID NO: 184135 - protein, 320 aa, Oryza sativa
  Clone ID: PAT_MRT4530_81157C.1.pep
MITLRKREFRYLKQGDLTVTEYLHEFYRLAHYAPEDVETDEDKQEKFLQGLKDELAVQLLLEDYEDFEKLVDKAMQLESEHNRMTNCKRRIVNIPVFPGGNQRQRTEPLQITGSSVVHQEFLPQEDEHNADNNTSNTNDDDTTNNHGSCPISDHSNKACNVSSIHQDVNDSINVGTQNDNLSNFDTEKDSNGDSNYGTTDANVSKDSQPPIPTPSQNDRPQMDSSVKKTLICYNCKEPGFVLAPLSSLSAVADEFRFAAAVAPDFLPTRRHLHRVRRVPVDLVRAFASPADRRSSVVLAVPNRAAAFFRFGRRSRRRRRP

SEQ ID NO: 184136 - protein, 92 aa, Oryza sativa
  unsure (1)..(92): unsure at all Xaa locations
  Clone ID: PAT_MRT4530_81158C.1.pep
AQRQTNFDYLFKVLLTSTSGDGKISTLLRWTSNCSEDMSATMXASDCKVKMVNTASTRLETGDXDTARQEPFRTXTSSYYSGAHGFSMAHDF

SEQ ID NO: 184137 - protein, 796 aa, Oryza sativa
  Clone ID: PAT_MRT4530_81159C.1.pep
MSSSFVDNSVNPSINQGVPTSTMLVWTQVGEIVFPVYTTVPVSTGPSLTGSENAVATTSDDSMSKDPPVGAENGTSTTSKPEEDPSAAKSCPSDEKHEPSRTTSKATRSWCPIHKTRKHTLQACWVFLNAQAEIRAYKERGIQQRLRESVTNLSNAFEEAAAAAHPEQPLAGGANGKPPEQWASPRQATLPPRGTSDLRDHLNGCREARLTDYVRRFNECRNTIPGITNASVIRAFKTGVRDRYTTQEWATRRITTTRRLFEIVDRCAHADDALRRKNDKSKTGGEKKLAKDAPESSKKKSRKSGKRKAQVEVLATEYEHPPKHPDPQGSDTKKIWCPIHKSDRHSLEDCIVFKKSLAKQLALEKGNSINLLFASTLDTMGIPRSELTPTDQPFHGITPQSSSKPLGKITLPRTFGQANNFRTEQITFDVAEVDTAYNAIIGRNALAKFMATSHYAYQVLKMSGPKGTITIQGNAKLAVQSTHPAHLSQLSHPRNMAKEDEKTAFITPFGVFCYVKMPFRLITAGNTFQRTVQVALNDQLGNNVEAYVDNIVVKTKTSDSLIEDLRETFENLRRYRLMLNPEKCTFGEAEEAFIALKRYLSNPPVLVAPQPNEELFLYIAATPYSVSTVVVAREKVQRPVYYVSEALHDAKTRYPQIQKLLYAIIMMSRKLRHHFQAHRVTVVSSFPLGEVVVELSQFDVHFVPRTTIKSQVLADFVADWTVPENRLDSQTDNETWTMAFDGALNSQGAGAGFILTSPSGDQFKHAIHLNFRVTNNTAEYEGLLAGIRDAAALGVK

SEQ ID NO: 184138 - protein, 105 aa, Oryza sativa
  unsure (1)..(105): unsure at all Xaa locations
  Clone ID: PAT_MRT4530_8115C.1.pep
TIVVRHTPRIHQQEKNPQYLSLISTKKDSSSKTSISITSSSKSLQQQQQQYLSISCIPYVHRLXIRPPKSMKVPCTALLHCTRRCQPSTAAAAAAAAVSPQLTPS

SEQ ID NO: 184139 - protein, 420 aa, Oryza sativa
  Clone ID: PAT_MRT4530_81160C.1.pep
QRLRRRARRGCYHVTDYGADPTGGADATAAINSAIADAFRRPSNATMTGGIPDLGGAEIHLDGGSYLLKGPLSLPASGGGNLKIHSGSLRAADDFPTDRYLIELSAKAAGGGGGSSPAMSYYYEYVTLRDLMLDCNYRGGGVRVVDSLRVGVDNCYVVHFATDGVAVSGGHETFVRNTFLGQHMTAGGDPGERSFTGTGIRLDGNDNSVSDVVVFSAATGIMVTGGANAISGVHCYNKATGFGGAGIYLKVPGLTQTWITNCYMDYTGIVAEDPVLLHVSGSFFLGDANVVLKAVNGVARGVQIVGNLFNGRGKGVDIVELDGEFATVEQVYVAQNAATGMTVRSTTARAAAEGNGSSWTVDFSPVLLFPDRIGHVQYSLAAGDAFPGHALRNVSGNRVVIATDAAVSATVHVLVDQNSS

SEQ ID NO: 184140 - protein, 177 aa, Oryza sativa
  Clone ID: PAT_MRT4530_81161C.1.pep
MADHHGGHHADGHRRQQQLQGEAADQAAAEIIKEQDRLLPIANVGRIMKQILPPNAKISKEAKETMQECVSEFISFVTGEASDKCHKEKRKTVNGDDVCWAFGALGFDDYVDPMRRYLNKYRELEGDRAAAAATSRSGAGAAAGPDHPSSSSSAAAATAGHFMFNAMDRSTDSSRQF

SEQ ID NO: 184141 - protein, 131 aa, Oryza sativa
  Clone ID: PAT_MRT4530_81162C.1.pep
MVQTDHFRQQDISIYYPLFSSIFFGTELPPTQLLPPTRRRDLSSPHPHRLAIRQPATVGKLNGAAGRGPSVRAPRAAMAAATRGVELLAAPTRRSPTDLASSSLNSVRLKSPDTVKTSCGTSGRSIVLCQC

SEQ ID NO: 184142 - protein, 78 aa, Oryza sativa
  unsure (1)..(78): unsure at all Xaa locations
  Clone ID: PAT_MRT4530_81163C.1.pep
PLPARGXPXXLXTAXNRTDXGPXXAIRPVPPTXKGGGXTRXRNRXXSKRXRVERFLXPEXNXXMKEMGXVKMLXXDGN

SEQ ID NO: 184143 - protein, 56 aa, Oryza sativa
  Clone ID: PAT_MRT4530_81164C.1.pep
MGVIAKEGANYGSDLDVYGDVEVDEVHERSSGFFMLLGSPSLLLAGIVYKYVIVDT

SEQ ID NO: 184144 - protein, 207 aa, Oryza sativa
  unsure (1)..(207): unsure at all Xaa locations
  Clone ID: PAT_MRT4530_81165C.1.pep
GQSKPHPWRQRRPXRSFGSGQNAXTATSRQSIRFMSISRTAMLASVRFLPTGCLFPAREVVLSCQCRQLDQAGAHRVDLPGKATQKVFDEALTSLARDAPPVPGFRKSKGGRTSNIPSSILLQMLGKSRVTKFVLQEILSITVGDFVKKENLKVNPEIKTTQSEEELESSFTPGSSFSFSVVLQLEKPESDETSENSESDEASEPSS

SEQ ID NO: 184145 - protein, 142 aa, Oryza sativa
  Clone ID: PAT_MRT4530_81166C.1.pep
MNCTTLAAPERFRLAPEDLDQNDGEFVGAALRGLSGYQAISMMGITLKNSQESHLTFTRCSHVKANYMRITSPEDSPETTGVHVVSSRNVHIMEDSISTCHDCVSIVGNSTDVRLRAEEEKCSTYGSHLLKTYNGNGRWRGC

SEQ ID NO: 184146 - protein, 185 aa, Oryza sativa
  unsure (1)..(185): unsure at all Xaa locations
  Clone ID: PAT_MRT4530_81167C.1.pep
MATKDTTIAHIMDQQEDIKIKSSKCWNPIRPPATLLTSNGHPICIRTPFSALEYLMERTRCPLSNESSLTAKLHPSWQQLKKQGDAIPVMGLWACNFIXEPRPKWGPCEVRPNQVEHNPRNPXVILPPLXIARNKIDLHRQDQQPAERCIDRXGSTQQCLSSTHQKIGPTTALSXLEWSSGFIRF

SEQ ID NO: 184147 - protein, 147 aa, Oryza sativa
  Clone ID: PAT_MRT4530_81168C.1.pep
MASGAIIGETNDDLSKERFRALSPASSEEFPRLSAATTLVPSTVTVITTTSHPPPPATGGHRLLIVTPLDQDEKWPTPIYLLPLLSPVSVHTPIKVLVTSTRKRRRSPLPVPPPAGPFAPLTIGQPLRFLVHRHWPPQSPQFNPVAV

SEQ ID NO: 184148 - protein, 141 aa, Oryza sativa
  Clone ID: PAT_MRT4530_81169C.1.pep
MARFQIVALAMAMLFAAASAQAPAATPTPAPKASPPPATPPPTPAPVSAPPAQAPATPPPAPAPAPKASAPAPAPKASAPAPVPAAAAPTPEISSPPAPSPAGLAPSPTAEVTPPPSAAAGVSPADAWVAAAAVAAAAAFY

SEQ ID NO: 184149 - protein, 153 aa, Oryza sativa
  Clone ID: PAT_MRT4530_8116C.1.pep
MADPPIRDCILRVSVIVVVIRYGIPETELVQRGDWVAEFQQPVDKSFEQRRRLTVSRFRMRHLELLVIGVDAGHGAPEVAPPLGQHARLHCLARGEEGHDVVEDSFREVAEPVSTGGAPRGRGLHALARRSFHGGRARRGLSSNRWRASKLQK

SEQ ID NO: 184150 - protein, 67 aa, Oryza sativa
  Clone ID: PAT_MRT4530_81170C.1.pep
HEGTSKEKATRSIEEQPLFRCPLVGESLCLFSVFTFTRYIHSEHCRSMLGPTDYPVPKFATLNQMWP

SEQ ID NO: 184151 - protein, 125 aa, Oryza sativa
  unsure (1)..(125): unsure at all Xaa locations
  Clone ID: PAT_MRT4530_81171C.1.pep
MYAIELGAKRVPLLLVGKSCYSATARKLAVEVLSEGSIGLAGQTSVEWAVRPASARSDRHRLGLTDYGSVGSVSATPSSTIPASRGRSXPRMYRRSDRPYAPVRPPSCGRSDRPRHAALVINYQN

SEQ ID NO: 184152 - protein, 43 aa, Oryza sativa
  Clone ID: PAT_MRT4530_81172C.1.pep
MTFNRPTQCLETNKQLRPAITRDEIQIPPEKASQPRPLAPTEA

SEQ ID NO: 184153 - protein, 139 aa, Oryza sativa
  unsure (1)..(139): unsure at all Xaa locations
  Clone ID: PAT_MRT4530_81173C.1.pep
KTPDIDFRDKHGXVPYGVYGYYXERHSAVFDLAGYEFEEEGYPVVDYESMNKEQHQIRPTGCMAITYQIRGPNLYKNLCLHLFYLNLAYTLVPTIPMPSKYPSHDIKRRHLRRQASDAGHRARXRFREGGRRRPAAMVS

SEQ ID NO: 184154 - protein, 547 aa, Oryza sativa
  unsure (1)..(547): unsure at all Xaa locations
  Clone ID: PAT_MRT4530_81174C.1.pep
MKTASMAASLLIPLCLCILLLRGASAVSDQQEAGRRDSCDRIDRRIRALEPTRRVXTPRPATPSSTTTATASSPAPASPPRXITIQRNGLLLPSYSNSPRLAYIVHGRXASSASSSPAAPRRTRRPRRRRRRSRRTTSAAAVAAVVMRRDGDRARERRRRKRRPAAAASSSPSATSTRGSPPSARXRRRGHPRRRAVLGPQRRRLPARRHLRSRRQQQRQPARPNLQAXFRLAGGQARSEGRQRYGEGESSESETERGGEESYNILSGFDTELLAESMRVSPDIARKLQGRSDKRGNIVRVRRGGLRMLRPATERVTDEEMMRGANAXPPPPGTXDRRGRLLDEAPRERRRPDEGRPLHPQWRPHHRPQQPEAPRPQXLIKMSVNRGVMRRNAILAPHWNINAHAAVYATSGSARLQVVSSEGRRVFDGELRRGQMVVVPQSFAWRGAPATKGSRWRGXRRRGVRVGVVPDERRRHERAGGWQVVGAARXMPADVLDNAFGVSREEARMVKFGRGQELAIFSPKSGAAARRRRSPGHRDDGVLAAPA

SEQ ID NO: 184155 - protein, 1778 aa, Oryza sativa
  Clone ID: PAT_MRT4530_81175C.1.pep
MAYNEKIKFMTYNVWSNEHVAVYRRIQAISKLIVRHEPHVIFLQEVTEYISSIFEEDHWWMQYKKLWSSTTQESHFCLLLSKLDADDAHIRRWSESVSPPRIAPPGLLSQMVYKPFPPGHPHSAHRVCAATCRLVPPTPMDVGAAERRPLPGAFRVRRRPRAVTLPVADIDKGNPLRSYRRPTRAKKPNVRSARILEYLNKPRYHSRAQLKAQEMEQQLADLAAAMAAIQKQNTAIQTSVGSLEEIKPMVVELAGWKPTVERTVAELRDKMAELRTQVEQISRSPARVTKLADLPPLLPTPPGPKLNEIKDEEPKPSLELKLPQVDEHARLFSHRAATSNRGKTLGNENFPSSLPGKGTFYSSPGNNSRFEFGESSGRFGSSHHVHHHGGSVRVDCPSFDGDNPRAWKLKCETYFRVSGVYFDHWVGVAALQFMGAALTWLQSTDAHIECVCWEDFAEVVCKKFGREEFQGLNRQFNQLRQTGTVTSYAERFSELIHQLQAHHSSWNPVFFVTQFMDGLRADIRAAVVLHRPQDLDTAVDLACLQEEVLEVLRKEMRRSDFAGGVRTVARPNSLTSVSTVRQNTSLGNKPDEWRITEESRASMAEDKLSALRAYCRAKGLCYTCGERYNRDHKCGPTVQLHVVEELLEMLSAPSVDNSGDEQSSVQDPTEGISEGEICQISKEAMMGIEASGTLRLQGFIQKHEVLMLVDSGSSRIALYLKVCVADGGVLHCSQEIADCEWWVQGYTFRSDLKILPLGSYDVILGMDWLVKHSPMQVDWRAKTLLFQQEQQSVCLKGVQLNTVHCPAISASQVRGLVSRNAVVQTVELCLLDTIAPSSDIPAVIDSLLQEFASVFEEPQGLPPQRDFDHSIPLLPGAKPVNLRPYRYNPAQKDEIERQVTEMLRQGVIQPSSSPFSSPVLLVLKKDLTWRFCIDYRHLNAITVKNRYPLPVIDELLDDLAGATIFTSLDLRAGYHKIRMRPEDEHKTAFKTHHGHYEFRVMSYGLTGAPATFQGVMNTVLSPLLRKGVLVFIDDILIYSATLTEHVQLLRQVFQLLTEHQLKVKRSKCSFAQSSLIYLGHVISHAGVSTDPKNILAVQRWPVPTNVKEVRGFLGLAGYYRKFVRHFGVISRPLTDLLKKNVVFVWTISHQQAFEALKSALTSAPVLAIPDFSKPFEIETDASDKGVGAVLMQAGHPLAFLSKALGPRNRGLSIYEKECLAILLAVDRWRSYLQFGEFVIRTDQRSLIHLGDQKLATPWQQKAMTKLLGLNYRLVYKRGLDNRAADALSRCSTDDHIQACALSVCIPDWLTEVQEGYLSDPYSADLLSKVTLQASAVPNFSLRDGILHYKNKIWIGNNTTLQHRILSALHSGAIGGHSGVQVTYSRIKKLFAWQGLKKSVLEFIDQCSVYTQLKMSSAYHPQTDGQTERVNQCLETFLRCFVHACPTKWYRWLALAEFWYNTAYHSALGTSPFEVLYGHTPRHFGVLDISAAAVPDLAEWLKERAMVSGLLLQHLLRAQQRMKVQADKKRSEREFAVGDWVFLKAQPYAQTSLAVRSNHKLAFRYFGPFQVTARVGAVAYRLQLPPGCSIHPVIHVSQLRQAPPPDSATVVKLPAALAPDSSVPMQILVRRLYKLGAAVRPQFKVRWFGHGVDEATWEDAESLRVRFPAAPAWGQAESEGGENVTLPVADIDKGNPLRSYRRPTRAKKPNVRGWLKPEIRKRPDRFLCRLRDFKLDSVEMVGVEPIPGVTHCDDKGGMLPVLPSHHFGLLLTIAPQIHK

SEQ ID NO: 184156 - protein, 90 aa, Oryza sativa
  unsure (1)..(90): unsure at all Xaa locations
  Clone ID: PAT_MRT4530_81176C.1.pep
MEIQYELNSDRDPNRSPTGLGGPSNGSYIFVRGVTGGGIASLWEYSEENAXGEGRAGAIDYFLYIDARYFARIPSTSXRLLPLRSASSGN

SEQ ID NO: 184157 - protein, 76 aa, Oryza sativa
  Clone ID: PAT_MRT4530_81177C.1.pep
GPGGWTYDVAANPMLKGWLKPEIRKRPDRFLCRLRDFKLDSVEMVGVEPIPGVTHCDDKGGMLPVLPSHHFGLLLT

SEQ ID NO: 184158 - protein, 87 aa, Oryza sativa
  unsure (1)..(87): unsure at all Xaa locations
  Clone ID: PAT_MRT4530_81178C.1.pep
LYNYRAENFMTGLRVVVDRERXIFGWKKINWFLPSAPENYSLEETKGGNPTSVTQLRPLINSYPIMWXYDCLITQVSLVNLAALILF

SEQ ID NO: 184159 - protein, 1138 aa, Oryza sativa
  unsure (1)..(1138): unsure at all Xaa locations
  Clone ID: PAT_MRT4530_81179C.1.pep
MAGVVFLVLFVAAAAMPASVTAATSQTDALLAWKASLLLGDAAALPCRTRAAPVRTRCGVARXALLAGRVTWLRLRAAGLSGGLDTLDFAAFPALTELDLNGNSFAGDIPAGISQLRSLASLDLGDNGLNGSIPPQIGDLSGLVELRLYNNNLVGAIPHQLSRLPNIVHFDLGANYLTDHDFPKFSPMPTVTFMSLYLNSFNGSFPEFVLRSGSITYLDLSQNALFGPIPDMLPNLRFLNLSFNAFSGPIPASLGRLTKLQDLRMAGNNLTGGVPEFLGSMAQLRILELGDNQLGGPIPSVLGQLQMLQRLDIKNASLVSTLPPQLGNLNNLAYLDLSLNQFSGGLPPTFAGMRAMQEFGLSTTNVTGEIPPALFTSWPELISFEVQNNSFTGKIPSELGKARKLEILYLFLNNLNGSIPAELGELENLVELDLSVNSLTGPIPSSLGNLKQLIKLALFFNNLTGVIPPEIGNMTALQSFDVNTNILHGELLSIGTWRYAIFGFVDGMQCKVKQKVSSVDKFLSRGNTASSICSWVFFLYHRRCSMVSLSSASIQIIWNMSILYTXQKKKNISEAFGVHPSLEYLDISGNKLTGELSSDWGQCTNLTLLSMDGNRISGRIPEAFGSMTRLQILSLAGNNLTGGIPLDLGHLNLLFNLNLSHNSFSGPIPTSLGNNSKLQKIDMSGNMLNGTIPVALGKLGALTFLDLSKNRLSGKIPRELGNLVQLQTLLDLSSNFLSGWIPQAAFCKLLSLQILILSNNQLTGKLPDCLWYLQNLQFLDLSNNAFSGEIPAAKASYSCSLISIHLSSNDFTGVFPSALEGCKKLINLDIGNNNFFGDIPIWIGKGLPSLKILSLKSNNFSGEIPSELSQLSQLQLLDMTNNGLTGLIPRSFGKLTSMKNPKLISSRELLQWSFNHDRINTIWKGKEQIFEIKTYAIDIQLVTGISLSGNSLSQCIPDELMNLQGLQFLNLSRNYLSRSIPENIGSLKNLESLDLSSNELSGAIPPSLAGISTLSSLNLSNNHLSGKISTGNQLQTLTDPSIYSNNSGLCGLPLNISCTNYALASDERYCRTCEDQYLSYFVMAGVVFGSWLWFGMLFSIGNLRYAVFCFVDDIQRKVMQKVSCINQLLSRGNTAQYL

SEQ ID NO: 184160 - protein, 148 aa, Oryza sativa
  unsure (1)..(148): unsure at all Xaa locations
  Clone ID: PAT_MRT4530_8117C.1.pep
MSPPTVAVLRLAPSPCVWSPIVAFHGGGGEEEVGLGKCXLSPSVVINLIAGVSLLLGRFVLLKFHRVNALSPXPEQNGLCFHDAGCPGFAACLAQPQGLHPGCKPCLRLIRPTGCVLYAGRVLSLCVLCLLYCCLILSGSRSLRRVFC

SEQ ID NO: 184161 - protein, 1272 aa, Oryza sativa
  Clone ID: PAT_MRT4530_81180C.1.pep
MPLKIKIFMWYLLKGVMLTKDNLARRNWTGHFQGNILASSVGTVTKEVAIERKEAQNAFINKGQDLIPSFVQDSNVALMDMASILGVNLGCAIDNIDSNLSLIKDLECARISLFLKEQEVMKNKNCESKTEIEFPVENLLDELCSSEGYDSDLEHIDSLLKGSHFSGSKHKNKRGNLEIFKDFSAGLLRGLSGNKNMKWEWLPAMGHSRGFLEIFMLKLNCKICVTTGINPTGVPYVRVLFLVPGGKGAAIRIDYTLIRGVHLYPQDTSSSRVTTCHIPPRLSHKLSRTVGPTRQPHPRARAADGRAPRGSHSARPRAAKPAQPAGGGARALWSPAAAIGTAERRPREGKGRGKKKRRSTAHPRSTATTKKVAGAEEGGGAAQVDGVDGVPAAGERNGGVDEVGEDAAKPKEAAPRWEVVRGDDGGGPELDGDGGERERWRELDSGEEEGRREAETDGGAVYGAAQNAHKDRFLTELANIIQKQMKPLVMGGDFNIIRKESDKNKAGGYNRWSFIFNAVIEQANLREIFLGGRKFTWCNNQENPTLEKLDRIFVNTDWEKEYPLTMAKTLTRSISDHNPLRIDTGVLKITHKSFKFELSWFLREDLKEIVESVWKINYYGSSIERWQKRFRALRKKLNGWNNNWEGRYRREKESILEKIENLDAKVERCGMSKEDREERKELEDKLNFVIREEKIKWFQRSKENELLEGDCNTKYYHAKANGRKRKSYIHSLTQEEGEIEGQEKLLTYITSFYKDLFGHPKQNTLFLDMRGVTTIMEEHKVMLTKPFSEEEVRIVVFELKKNKAPGPDGFIGEFYTQFWDLIKGDLLKLVNDYHKGLVDIDRLNFGVITLIPKIKDAAQIQKYRPICLLNVSFKIITKVLMNRITEIMTYIISKNQTAFLKNRFIMEGVLILHEILNSLHQKKQSGVLFKVDFEKAYDKVDWVFIYRMLKAKEFPDQWCDWVMKVIMGGKVAVQVNDQVGPYFKTHKGLRQGDPLSPLLFNLAAEALTLLVQRAEDNLLIEGLGENDNNKVVILQYADDTIFLLPDNETYAKNLKYILCLFEQLSGLKINFNKSEVFCIGEVADKAEVFSQIFACSVGVLPMKYLGIPIDQKRITKKDWRNAENKMESKLGCWQGKLQSIGGRLILINSSLSSVPMYMISFFKLPKGVKEKMDFFRRRFLWQEDQGIRKYHLVQWPIICSPRDQGGLGVLDLDIMNKALLGKWIWNLENKEGWWQEILRGKYLKNKTMSEVNFKQGNSHFWHGLMEVNDDFF

SEQ ID NO: 184162 - protein, 343 aa, Oryza sativa
  unsure (1)..(343): unsure at all Xaa locations
  Clone ID: PAT_MRT4530_81181C.1.pep
CFATEARRPVLIWPRCFPNAGFNFHEERIFRSCSVGSTGVGPTRQPLGPRWTGCTRXGAVGPTRQPHPRARAADGRAPPGSRGARPKAASPARPTGGGAPAPRWSLPATTGAAERRPRERREEGSEAAVFGSPRVDGGDGNGDRSGGRRRRGSGRRGRRCSGGRRAKRRSGRGRRGRGEAKGGDAETRGGPGRRQRRTGARRRRRRERTTARARFRRGEXAASGGNGGGRHGERLNSVGRGRERPGEGETAAKDAAAIDADEVXGERFRANPREREREKWGKRERESRGMIPPTLLRAGTAGCGGIRGGGGGARARAXRRERREDRDDRRAPQEDTQQTKARA

SEQ ID NO: 184163 - protein, 155 aa, Oryza sativa
  Clone ID: PAT_MRT4530_81182C.1.pep
MDGEMDWIAARFVLSAIMGVHPLVAVDDAGADDEHFPVDDAAAVHGHASPPPVALPAAVLAPEEVAGAVVCAVCTEEVAARQAVVRLPCAHWYHAGCIGPWLRIRTNCPTCRAELPREPAAADWRVPRRPAVAETAGSRLRREASYTMLAGTLPS

SEQ ID NO: 184164 - protein, 188 aa, Oryza sativa
  Clone ID: PAT_MRT4530_81183C.1.pep
RKGAQCFTVKRQHAVLILSDFLYYAKFKRYCKLFTDLVIALLQPGNEWHNCYSDEHYLPTLFNLCLLPSDFRPLLYLQMVDPTGIANWSVTHVDWSEGKWHPKAYRAVDTSFELLKNISSIDESIHVTSNAKCFIAEEDEKSREICQFFLESSLGTSNGFLLRTVMMMFEHNDFDQQLPYMKNIQFEE

SEQ ID NO: 184165 - protein, 751 aa, Oryza sativa
  Clone ID: PAT_MRT4530_81184C.1.pep
MVNTRSNGNGLNNLNNNNPNNNNGENPTLAQEKVSFASHQLHGPASEWWDHFRLNRTTAEPITWLEFTAAFRKTHIPSGVVSLKKKKFRSLTQGSRSVTEYLHEFNRLARYAPEDVRNDEERQEKFLGGLNDELSYPLMVGDYPDFQKLVDKAIRQEDKYNRMEQKKRRIAQFKTQQGNNQKPRLTLGPQPMPQGGSSSVVRPQRQFFNNNAGNNIRNQAPRPVAAPAQQQPAKREQGSKPVVCFNCGDPGHYADKCPKPRRVKVVPAQNNSAVPASKARVNHVAAAEAQDAPDVILVREYPDVFPEDLPERIHQTEFITMGSSGYYRRFIENFSKIAKPMTRLLQKDVKYKWSEESLEAKPTLIDQVREAQINDPDIQEIKKNMRRGKAIGFLEDEHGTVWLGERICVPDNKDLKDAILKEAHDTLYSIHPGSTKMYQDLKERFWWATVAVAREGRRRHRQVAAVLVRPFAAVGTRRSFVAVDNPKMPRYKPEYLFGVEGFVQELRTMSFVIGFGTALFYAQIRHDRHEEKCRVKVTLNSNSEEVPSVMFEAGGRNYIHACQEVARIAIGELRDRYSDRLADTEYRYHPRQPQGSDRGSYLETEGIENDATTRHLVEMLWAMDESRAETVLAAQDREDRNRGKICKLEDKVDRLEKELAALKGEAPPQKARIRLTARKRALFVPRYQLAPKIRVVEKEVAPANPPVIIISSDEEEEPKRNNSKFEWVAIKDEEDEPNEPSIDLLCSEELE

SEQ ID NO: 184166 - protein, 49 aa, Oryza sativa
  Clone ID: PAT_MRT4530_81185C.1.pep
IYEEGDHVQWASGLECARVSRNKPFGWRLNAYNYDLITLKMIESTERLV

SEQ ID NO: 184167 - protein, 1418 aa, Oryza sativa
  unsure (1)..(1418): unsure at all Xaa locations
  Clone ID: PAT_MRT4530_81186C.1.pep
SNQLDHDLADSCTNVPQYPLYPVYGYHPSTVARQVGALGTQGSTTMSSSLVDNSVNTNLSQVFPASTMLVWTQVSEIVFPVYTTTPISTGPPMTGNENAVATNQGDSMSKNPPAEAENGVSTTSELKKDSNVAKPCRSDMNREPTKMTSEATRSWCPIHKTRKHTLQACWVFLNVRAEICAYKERGIQRISPTRAVYCPIHKTKNHDLSSCKVFSSAMEAPSPKVQQSHIPIWDKDKERGATPTSDRFVGSCTFTSAPREVLAIDDVGISACTNAEAENQLTTPAQHIRAVNAILRETPYDPVLNDNLARWTERLRESVTNLSNAFEEAAAAAHPEQPPTGDANEKYDGSTDPEEFLQVYSTVLYAAGADDNALANYLPTALKGSARSWLMHLPPYSISSWADLWQQFVANFQGTYKRHAIEDDLHALTQNPGESLREYVQRFNECRNTIPKITDASVIRAFKSGVRDRYTTQELATRRITTNRRLFEIVERCAHADDALRRKNDKPKTGGEKKSATDAPESSKKKNRKNGKRKAQAEVLAAEYANPPKRPDPQSSDTKKAWCPIHKTDIHVLEDCFVFKKSLEKHIASEKGKRVRVVEKDVEAAPQESDSAYPDPDLHVSHIFGDSTTYSSKREYKKVEREVCSTWLGAAPKMKWSEQKIEFSEEDHPKTAVIPGIYPIVVEPTIRNIKVARVLIDGGSSINLLFTSTLDAMGIPQSELTPTDQPFHGITPQSSSRPLGKITLPVTFGQSNNFRTEQITFDVAEFDTAYNAIIGRTALAKFMAASHYAYQVLKMPGPKGTITIQGNTKLAVQCDKRSLDIVEQTPSPPATTEPPKKPSDMSGVPREIIEHKLMVRPDAKPVKQRLRRFAPDRKQAIREELDKLLKAGFIKEVLHPEWLANPVMVRKANGKWRMCVDFTDLNKACPKDHFPLPRIDQLVDSTAGCELLSFIDAYSGYHQISMAKEDEEKTSFITPFRVFCYVKMPFGLITAGNTFQHTVQGALSDQLGSNVEAYVDDIVVKTKTFDSLIDDLWETFDNLRRYRLMLNPEKCTFGAPSGKLLGFLISGRGIEANPEKIKAIENMKSPTRLKEVQKLTGCMAALSRATNNTAEYEGLLAGIRAAAALGVKRLIVKGDSELVTNQVHKDYKCSNPELSKYITEVRKLGKRFDGIEVRHVYRKDNIEPDDLARRASRREPLEPGTFLDILTKPSVKEVSGEVSPDTPDISSEATKAERAVADIETTDDWRIPLIKFINSEELPKDDTEAEKITRKAKIYCMVGDDLYKKAPNGVLLKCVSSDDGRHLLLDIHEGICGSHAAGRTLVGKAFRQGFFWPTVLKDACDMVQRCEACQFHSXTHKATRASAPDYPSYVAVLVLGARYTRTIPTRTGWLPTGEIKADNAIKFIKGIFCRYGLPHRII

SEQ ID NO: 184168 - protein, 785 aa, Oryza sativa
  unsure (1)..(785): unsure at all Xaa locations
  Clone ID: PAT_MRT4530_81187C.1.pep
MSSSFVDNSVNTNLNQGVLTSTMLVWTQVGEIVFPVYTTVPISAGPSMTRSENAVATTLDDSMSKDPPAEAENGTSTTSEPEKDPSAAKHCLFDKNHEPTRMTSEVTRSWCPIHKTRKHTLQACWVFLNVHAEIRACKEHGLQRTSPTHDVYCPIHKTKNHDLSSCKVFLSAMKTSPPKVQQSRIPLRDEDKEQGATMISDRFVGVIDIDPHEPSVLHLLEDYGSSSTNLWQQFVANFQGTYKRHAIEDDLHAXHTTREYADPPKRPDPQGSDTKKTWCPIHKSDRHSPEDCLXFKKSHAKHMALEKGKRVRMVEKDAEAATQESDSAYPDSDLHVSHIFGGSTAYSSKREYKKVEHEVCSTWQGAVPKMKWSEQKIEFSEEDHPKTAVIPGQYPIVVEPTIRNIKVTRVLIDGGSSIKLLFASTLDAMGIPRSELTPTDQPFHGITPQSSSKPLGKITLPVTFGQANNFRTEQITFDVAELDTAYNAIIGRTALAKFMAASHYAYQVLKMSGPKGTITIQGNAKLEVQCDKRSLDMVEHTPSPPATAEPPKKPSDMTGVPREVIEQKLMVRPDAKPVKQKLRRFAPNRKQAIREELDKLLKAGFIIEVLHPEWLANPVMVQKANGKWRMCVNFTDLNKACPKDHFPLPRIDQLVDSIAGCELLSFLDAYSGYHQISMAKEDEEKTAFITPFGGALSNQLGNNVEAYVDDIVVKTKTSDSLIDDLRETYDNLRRYRLMLNLEKCMFGVPSGKLLGFLVSGRGIEANPEKIKAIENMKSLTRLKEV

SEQ ID NO: 184169 - protein, 199 aa, Oryza sativa
  unsure (1)..(199): unsure at all Xaa locations
  Clone ID: PAT_MRT4530_81188C.1.pep
CGQTLFFRHEPRADKDDFRSHKVLSNTFEEAAIAAHPEQPPTDDVNGEDXDNVNRSRRHVSSRRHDNGNQRDRSNEDRDQDNHHDHNDRERRVRDNTGRGRRHNDDDDGDRRRDNSGRRRQDSRDPGRHPRNRTLEASDLSSSSSSSSSSSSDRHPRRTHNRRQPTAPNAGCRAFGRSLRDVRWPERFRPTALKGSARS

SEQ ID NO: 184170 - protein, 38 aa, Oryza sativa
  Clone ID: PAT_MRT4530_81189C.1.pep
MAGLSGHPMARLPSPRWLVEVFPCDLSKEIMKKARRQL

SEQ ID NO: 184171 - protein, 377 aa, Oryza sativa
  Clone ID: PAT_MRT4530_8118C.1.pep
MAAAAAAGAAAGGGFVGERRKLFVGGIPTSAQEAELRGHFGQYGAVRSVIVMRDKETGHGRGFGFVEFEEEEDAARALGDGEHPRHLICGRVVDVKRARARPQRNHDDQSSQHQHFGQGQDQGHQPAPVSGTEDGGDGMNYASKKVFIGGLRDNITEEEFKTYFESFGTVTDVVVIYDSMTNRSRGFGFVTFDSEEAVRKVIEHSFHDLKGTRVEAKIAIPKDASYYRNGRGRGSRNFGGRGHAGFDGPSYQPYNDRYGFYNSYNMPQPVPPHPYYPGVYYGMGGGYPYANAYSNMGAPANIPPGMMTRRPVYGAYPPMFPGYGVIYRGYVGAAPSIQHDSNGGSDSKKDQTSVDVQEVDSAASVATKLEFMKLGSQ

SEQ ID NO: 184172 - protein, 171 aa, Oryza sativa
  Clone ID: PAT_MRT4530_81190C.1.pep
GRTNPSEHKQLKLARSLTRGIIDKDLKPSSNERKCLQRIIKFPPTRSLQVDEKQLVWKFRFSLMSEKKALTKFVRAVDWSDIQEAKQAVELIRKWETIDVADALELLSPDFESEEVRAYAVDILERADDEELQCYLLQLVQALRFERSDESCLAHFLVKRAVSNIEIASFP

SEQ ID NO: 184173 - protein, 58 aa, Oryza sativa
  Clone ID: PAT_MRT4530_81191C.1.pep
MEVDAERARQADSGDEAERVVRAAFAPAHRRPWLPSAAPSRLCPRLLPSSAPLRRRHQ

SEQ ID NO: 184174 - protein, 167 aa, Oryza sativa
  Clone ID: PAT_MRT4530_81192C.1.pep
MHPNPTENSREGAPEGGLAGTADGRGTRPRPDGHRRRPPARRSGARESGEEREAKGTVHGSPRDTRTAETTNGAEERGGAVRDGEGDGAPAVGGRNEGADEVDDDAAKPMEVTPTGIFSSPDLSPVEPLADFDWVVALDDGASDPELLTIHIFGVNLTQVTTSCHAS

SEQ ID NO: 184175 - protein, 134 aa, Oryza sativa
  unsure (1)..(134): unsure at all Xaa locations
  Clone ID: PAT_MRT4530_81193C.1.pep
SEYGLLLGIALLRLIALCSAWKTEPQTKPYPLDMWKYGSALQQRPEDRSLNGRGATIKTMHPEPSLKPFXGILNRGGDDVSCLARFPNRRLRLPRRADLPKLQRLHDQRKRKXFNTKXLHITAETKHKNGFFTS

SEQ ID NO: 184176 - protein, 619 aa, Oryza sativa
  Clone ID: PAT_MRT4530_81194C.1.pep
MVTAGDHRRGGVAPEREEGRGKREGRSTAHPGTTRTAETTTEAEESGGAVRDGEGDGAPAVGERSGGADEVDDDAAKPMDVTPRREEVRSDDGGEPELGGDGGEKMRRREHDSDGESERRTVETKCEFWLSEVKFLGHVISAKGVAVDPETVTTVTDWKQPKTVTQEGHVVAYASRQLRPHEGNYPTHDLELAAVRRWLELIKDYDVGIHYHPGKANVVADALSRKSRCNTLGVRGIPPELHQQMEALNLSIVGRGFLATLEAKPTLLDQIREAQKNDPDMHGILKNMKKEFVALCDVCQRVKAEHQRPVGFLQPLQVTEWKWDEIGMDFITGLPKTQGGYDSIWVVVDRLTKVARFIPVKTTYGGNKLAELYFARIVSLHGVPKKIVSDRGSQFTSHFWKKLQEELGTCLNFSTAYHPQTDGQTERLNQILEDMLRACVLDFGKTWDKSLPYAEFSYNNSYQPSIQMAPYEALYGRKCRTPLLWDQVGESEVFGTDILREAEAKVKTIRDNLKVAQSQQKSYADNRRRNLEFAVDDFVYLRADSEQIEVREDFTYVERPVKILDTMERRTRNRVIRFCKVQWSNHAEEEATWEREDELKAAHPDLFASSSESRGRDSV

SEQ ID NO: 184177 - protein, 85 aa, Oryza sativa
  unsure (1)..(85): unsure at all Xaa locations
  Clone ID: PAT_MRT4530_81195C.1.pep
AGSLRSTTCQKRRRGRRHGTSMGNTLTRKKSGALGGADKKDSGDSRDTPAIDVRHGWIADTAKISXIYDPQNTEDQMQRNQTMSM

SEQ ID NO: 184178 - protein, 350 aa, Oryza sativa
  Clone ID: PAT_MRT4530_81196C.1.pep
MPLSSQLPLVGSQDQNQYVFDRAFATQVNELPMPEEDVPFCHDCREPGHYALNCPWVYAKETPSFGLAGQTSLNQPPHTKTSLQPSVQSREPNGENPWNPGNCFPPSLSYHVGSRTKQAKGKKSKNQKRKAPMRTEEEVRKMAISSTEWPPAGITIPRRQRGNTFRGARQLTQHLLSHGGRVSDSEGSDQVSSNDEDESPRHLGEEEMESKACTRCGEIGHVASMCLTLCTHCEEDHPPGECPTRKVTCFLCEGMGHFADKCPRPRNIAASTSVHATPCNQKLAPQRIVIHASRSSPIDRVATAPTLASALPQGVNAQFQPQPSVDKTEASIGIVPLDVPAQQPKKSSTR

SEQ ID NO: 184179 - protein, 399 aa, Oryza sativa
  unsure (1)..(399): unsure at all Xaa locations
  Clone ID: PAT_MRT4530_81197C.1.pep
MEDPPPPPPPPQRLRCAVQHYEWGRRGAASIVARLADQQDPXWPARTPDALGPAVAARWGGDLPFLFKPAPATLVTCXVLSVAKALSIQAHPDKKRAEALHALRPSVYKDDNHKPEMAIAITEFRALYGFAAIQELKDVLRTVPEVEGLIGHEHAAKLMSFKEYDAGNQVKSTLQSAFANLMLASKDMVSEALSKLISRLNIESKIRTLTDKEELVLSLERQYQEDVGVLAALFFNYVKLSPGEALHIGANEPHAYLSGECIECMATSDNVVRAGLTPKYKDIQTLCSMLTYKQAFPEILQGVPVQPHVRRYSPPFDEFEVDWCLVPADEVVTISSVPGPSVFLVITGEGELHAESLSGGKKEAKEGDVFFVPAYTEINLSTHKSMQLYRAGVNSRFFS

SEQ ID NO: 184180 - protein, 59 aa, Oryza sativa
  unsure (1)..(59): unsure at all Xaa locations
  Clone ID: PAT_MRT4530_81198C.1.pep
MIHEIKDFLXTARRKDARTXRNKXTKDVXKFKVRWSKDXYTLCVFDADKATSSSRSVPP

SEQ ID NO: 184181 - protein, 52 aa, Oryza sativa
  Clone ID: PAT_MRT4530_81199C.1.pep
RIKRGFIIISRKTGQYIAAKQLLAIYLFSYSLSACYDHSCAHYNEAIVSSCQ

SEQ ID NO: 184182 - protein, 684 aa, Oryza sativa
  Clone ID: PAT_MRT4530_8119C.1.pep
MQHMVKPVCILCLQCSLLYGVHLAAAVAAAGDGNGGDQFAYSGFAGVKDLTLDGTAMVTPDGLLELTNGKPQVKGHAFHPTPLRFEELSSPEGGEKKAAVRSFSASFVFGIVTASPGVGGHGIALVITPTKDLSSGLASTYLGFLNRSSNGDNRNHIFAVELDTIQSPEFSDIDDNHVGIDINSLVSSNASDAGYYDDNTGEFKSLTLVSGKAMQVWVDYDDDATQIDVRLAPVGIKKPMKPLVSTRSNLSTVITDEAYVGFSASIGTMTSQHYVLGWSFGVGTQAPAIDMDKLPKLPGRRSKKSYPPKTMVIALPIVSVVLVIVVAAGVFLLIKRKFQRYVELREDWELEFGAHRLSYKDLLQATERFKNKNLLGIGGFGRVYKGVLPTSSSEVAVKRVSHDSRQGIKEFVAEVASIGRLRHRNLVQLLGYCRLKEELLLVYDYMPNGSLDKYLYSHDDKPTLNWAQRFQIIKGIASGLLYLHEEWEQIVIHRDIKPSNVLLDNDMNGRLGDFGLARLYNRDTELQTTVVAGTFGYMAPELALTGKASPLTDVFAFGAFLLEVTSGRRPVEQDIEGHRLLLTDWVFENCSKEQILAVIDPRLNGNINISEASLVLKLGLLCSHPMSNVRPTMRQVVQYLNGDMPLPEMSPMRFTFSLSALMQNQGFDSSLKSLGTISNLSIGR

SEQ ID NO: 184183 - protein, 91 aa, Oryza sativa
  unsure (1)..(91): unsure at all Xaa locations
  Clone ID: PAT_MRT4530_811C.1.pep
VPWLKMHSSCPVCRFQLPTDDDDDSSKSARGGAXHSXGGRRLSQPAPRVDGGXGLGRLPAVMQELRSILSQPSPAXSTSGSSSHAQQHSDE

SEQ ID NO: 184184 - protein, 52 aa, Oryza sativa
  Clone ID: PAT_MRT4530_81200C.1.pep
ISLATGDALQESRLPFVLIIGNYFDFVGVDDRETCMHVREDLYTVIASRNPS

SEQ ID NO: 184185 - protein, 937 aa, Oryza sativa
  unsure (1)..(937): unsure at all Xaa locations
  Clone ID: PAT_MRT4530_81201C.1.pep
PSAARQFQPHFFVIDRKGSYSVLLGRDWIHANCCIPYTMHQSLIXWQADQIEIVPANSQLEMESPSFYFEGIVEGSNFYTKDRGDDLDGKLGXGFMLANELEEVHIRPGDRPRPTYISAKLLDVFKKKXVELLKEYRDCFAWXXYEMPGLSRSIVEHQLSIKPGYRPFKQPXRRFESDMYDPIRAEITRLYDAKFIRPCXYAEXISNIVPMIKKNGKLRVCVDFRDLNKATPKDEYPMPIANLLVDAASGYKIISFMDGNAGYNQNFMAEEDIHKTAFRCPGAIGLYEWVVMTFRLKSATAAYQRAMNYIFHVLIDLLVEIYIDDVVVKSKXIVAHLAHLRQVLERTRKYGLKMNRNKCAFGVSIKEYLSSSLVLIPPXKGVTYXLYLSADEKTIGSVLIQEFEGKERAIFYLSRRILDAETRYTPVEKLCLSLYFSCKKXRHYLHSNECTVICKANVVIYMLSAPVWKGRIGKWILALTEFDLIYESAKAVKGWAIADFIVEQXNDSIGXIKLVPSTLFLDRLVRTHGCVIGLVIILPRGGGGGGRASFEFAFTIIPYYTNNQAEYEAILKGLQLLKEVEGDAIEIMGDSLLVINQLXEYECKNDVLRVYNVKYHELMKEFKMVSMKHIPKEHNVEANDLAQXASAYKXMLKDIEIEIAAIQVDDWRYGIFEYLKNPSQXASRKLKYKALKYVILDDDLFYQMIDGVLLKCFKLEAKVVMCEVHEGICGTHQSAHKMKWSIRRVGYFCPTMLEDCFRYYKGCQDYQKFGSIQRTPASAMNSIIKPWPLRGWGIDMIVQINPPSSKGHKFILVATDYXTKWVEAIPLKKVDSRDVIEFVKEHIIYRFGIPQTITTYQGSMFVSXEIVQFAESMGIKLLNSSPDYTQAIGQTEACNKSLIKLVKRKIIEQPKTWHIALAESLWSYXIACHVSIQVPPY

SEQ ID NO: 184186 - protein, 1001 aa, Oryza sativa
  unsure (1)..(1001): unsure at all Xaa locations
  Clone ID: PAT_MRT4530_81202C.1.pep
LILSPQQAVFEKPEGTEDRHLKPLYVKAFVNGKPMSKMLVDGGAAVNLVPYTTFRKLGKAPEDLIKXNMVLKDFGXNSLETKGVLNMELTIGSKTISTTFFXVIDRKGSYSVLLGRDWIHANCCIPYTMHQSLIXWQADQIEIVPANSQLEMESPSFYFEGIVEGSNFYTKDRGDDLDGKLGXGFMLANELEEVHIRPXIGLGRHILVELLKEYRDCFAWXXYEMPGLSRSIVEHQLSIKPGYRPFKQPXRRFESDMYDPIRAEITRLYDAKFIRPCXYAEXISNIVPMIKKNGKLRVCVDFRDLNKATPKDEYPMPIANLLVDAASGYKIISFMDGNAGYNQNFMAEEDIHKTAFRCPGAIGLYEWVVMTFRLKSATAAYQRAMNYIFHVLIDLLVEIYIDDVVVKSKXIVAHLAHLRQVLERTRKYGLKMNRNKCAFGVSYGQFLGFLVHGRGIEITQRSLKAIKNIEPPVNKKKLQSLIGKINFVRRFISNLSRKLEPFTTLLRIKADQEFVWGXEARQRALDSIKEYLSSSLVLIPPXKGVTYXLYLSADEKTIGSVLIQEFEGKERAIFYLSRRILDAETRYTPVEKLCLSLYFSCKKXRHYLHSNECTVICKANVVIYMLSAPVWKGRIGKWILALTEFDLIYESAKAVKGWAIADFIVEQXNDSIGXIKLVPSTLFLDRLVRTHGCVIGLVIILPRGGGGGGRASFEFAFTIIPYYTNNQAEYEAILKGLQLLKEVEGDAIEIMGDSLLVINQLXEYECKNDVLRVYNVKYHELMKEFKMVSMKHIPKEHNVEANDLAQXASAYKXMLKDIEIEIAAIQVDDWRYGIFEYLKNPSQXASRKLKYKALKYVILDDDLFYQMIDGVLLKCFKLEAKVVMCEVHEGICGTHQSAHKMKWSIRRVGYFCPTMLEDCFRYYKGCQDYQKFGSIQRTPASAMNSIIKPWPLRGWGIDMIVQINPPSSKGHKFILVATDYXTKWVEAIPLKKVDSRDVYQF

SEQ ID NO: 184187 - protein, 112 aa, Oryza sativa
  Clone ID: PAT_MRT4530_81203C.1.pep
TLYLNPLLCLGNHFYTVFLGNPNPLLNFLKRKFCKKKMVIKPFPRSSFGLQWPRGGGSSLGGAPLFRRRGRAPRTGGLAQPHELSTLLEGIPPIRPQAKGMGSRISPRGGKP

SEQ ID NO: 184188 - protein, 101 aa, Oryza sativa
  Clone ID: PAT_MRT4530_81204C.1.pep
PILTKNGQKKNYPPTLKRGGALRPHQPLAPHYCQEACSWPVQTPWNGPTPSGQKNPPKGSFLFFKTEGRKGETGAAPGPQGGGPLRQNKKTREDLGGALKQ

SEQ ID NO: 184189 - protein, 843 aa, Oryza sativa
  Clone ID: PAT_MRT4530_81205C.1.pep
MVKFTVEELRRIMDKKNNIRNMSVIAHVDHGKSTLTDSLVAAAGIIAQEVAGDVRMTDTRADEAERGITIKSTGISLFYEMSDESLKLYKGERDGNEYLINLIDSPGHVDFSSEVTAALRITDGALVVVDCIEGVCVQTETVLRQALGERIRPVLTVNKMDRCFLELQVEGEEAYQTFSRVIENANVIMATYEDTLLGDVQVYPEKGTVAFSAGLHGWAFTLSSFAKMYASKFGVDEFKMMERLWGENFFDPATKKWTNKNTGSATCKRGFVQFCYEPIKQIINTCMNDQKDKLWPMLQKLGVVMKADEKELMGKALMKRVMQTWLPASNALLEMMIYHLPSPSKAQRYRVENLYEGPLDDVYATAIRNCDPEGPLMLYVSKMIPASDKGRFFAFGRVFSGRVATGMKVRIMGPNYVPGQKKDLYVKSVQRTVIWMGKKQESVEDVPCGNTVAMVGLDQFITKNATLTNEKESDACPIRAMKFSVSPVVRVAVQCKVASDLPKLVEGLKRLAKSDPMVLCTIEESGEHIIAGAGELHLEICLKDLQEDFMGGAEIIVSPPVVSFRETVLEKSCRTVMSKSPNKHNRLYMEARPLEEGLAEAIDDGRIGPRDDPKVRSKILSEEFGWDKDLAKKIWCFGPETTGPNMVVDMCKGVQYLNEIKDSVVAGFQWASKEGALAEENMRGICFEVCDVVLHADAIHRGGGQVIPTARRVIYASQLTAKPRLLEPVYLVEIQAPENALGGIYGVLNQKRGHVFEEMQRPGTPLYNIKAYLPVIESFGFSSQLRAATSGQAFPQCVFDHWDMMTSDPLEAGSQASTLVQDIRKRKGLKEQMTPLSDFEDKL

SEQ ID NO: 184190 - protein, 66 aa, Oryza sativa
  Clone ID: PAT_MRT4530_81206C.1.pep
NTKLFHNIINLIIRTYYSFDKSMRSIQADIRNKIPKICLCRHSRGRGGLQGGNVSLPTVKHMSYNV

SEQ ID NO: 184191 - protein, 60 aa, Oryza sativa
  Clone ID: PAT_MRT4530_81207C.1.pep
ESNMDPYIVTSMIAKTSIILKPRTGLLRPRHPSHRPPQQSVSLRLIHSPDDLVNCIFTTP

SEQ ID NO: 184192 - protein, 88 aa, Oryza sativa
  Clone ID: PAT_MRT4530_81208C.1.pep
KVESLYLMALEEHIYVIRGTHLCQKGFFLKIMDRKTGGYRWPTESNTYSIRDGEGRVSYPDMASSSSIVVHYLPSSRQKSPWNFLHQV

SEQ ID NO: 184193 - protein, 373 aa, Oryza sativa
  Clone ID: PAT_MRT4530_81209C.1.pep
MHKIFSNAIVVSYSHLMPVVPYNAFNPPPPEFALMKSDPPIIQRRSPRRHTSQASGGQKIQSDVQPNPSRSTNQPDSHERKLVSSDDEGDDAKKTGKKEGTEKQPKQANPKKKTSSHPMPKIRKSSRKPSDIDPSGKDPTPIGTETGPSAETGPTAVREPPTGNQSGTKQNKNIPEVETQANSPHRTDIGADPGTNSPVRMQGPTCPRPEIITVENNTVQAAKISELEKRIKALEKDKGELAKQRDSALKDVEDRKIKSQAQFNVLVNKIKKLEGARDEVANAATPLIQAMFFNNSGPSSFDAVEIFDKLRTGSDTYFKNIKEAGSMGASLALAMTKSLYPKIDIDAVDGFADGTSEEAALDLISDHKKLLTR

SEQ ID NO: 184194 - protein, 525 aa, Oryza sativa
  Clone ID: PAT_MRT4530_8120C.1.pep
MTMCAAVAVLLVLTSTMAAAAGDGDGDGGGFDYKKALHSGLLYFEAQRSGHLPYNQRVRWRGHSGLADGLQQGVDLVGGYYDAGDNVKFGLPMAFTMTMLSWAAAEFWDEIAAAGERRHVLEAIKWGTDYLVKAHTAADELWAEVGDGDTDHYCWQRPEDMTTSRQAYKVDRDNPGSDVAGETAAALAAASIVFRRSKPRYSRLLLRHAEQLFDFGDRYRGKYDSSIGEVRAYYASVSGYGDELLWAALWLHRATGRRGYLDYAVAMADELGGVGWAVTEFSWDVKYAGLQILAAKVLMDGGDHPAAHAATLEQYRSKAEHYLCACLGKNAAAGDNVNRTAGGMLFVRRWNNMQYVTNAAFLLTVYSRYLRDSGGDTIRCSGGAMATGDELAAMARAQADYVLGDNPAGVSYMVGYGRRFPRRVHHRGASMVSHRADGRFVGCVQGYDRWFRRGGANPNVVAGAIVGGPDDRDRFRDSRDNYMQTEACTYNTAPMVGVFAHLHAQKMAARTANNNADRSMIKRVD

SEQ ID NO: 184195 - protein, 68 aa, Oryza sativa
  Clone ID: PAT_MRT4530_81210C.1.pep
MEEATAAAAGGSSSEASKERDDHASKSLFDLHIGPSVTTPSATLADPFCTRRRVPASPPFTCQVDKQG

SEQ ID NO: 184196 - protein, 86 aa, Oryza sativa
  Clone ID: PAT_MRT4530_81211C.1.pep
MRIPMAFADVPEMQDTPLANNVRLVNFHVTIALLHPYLWRVPYLLYRQDGVRVEGHCQALLALGLEGEVKVMEDQQYGRCKHNVMR

SEQ ID NO: 184197 - protein, 80 aa, Oryza sativa
  Clone ID: PAT_MRT4530_81212C.1.pep
IWRVSYDLSSKKIGISTIRHGLWVIRLSYMVINLAIKLLLDQISYLAELRLTTGTSLQRTYLLRPATCMYHILQIRWLPI

SEQ ID NO: 184198 - protein, 53 aa, Oryza sativa
  unsure (1)..(53): unsure at all Xaa locations
  Clone ID: PAT_MRT4530_81213C.1.pep
EENFSALCNXQKGVRTSGRPWNIMGSSCYRKSPENMLKGKHYTWGERTGGDHI

SEQ ID NO: 184199 - protein, 136 aa, Oryza sativa
  Clone ID: PAT_MRT4530_81214C.1.pep
KLLHCGKRSCYEASEFQDHESLYATGGVIPETATKADDSTLKSGFASFNGLPDTAAQASKPKKSRTTSKKNSENFDWDKLRRQACGNYQMKERIFDRRDSVDWEAVRCADVQRISHAIRERGMNNVLAERIQVCTT

SEQ ID NO: 184200 - protein, 135 aa, Oryza sativa
  Clone ID: PAT_MRT4530_81215C.1.pep
SSAPPGPSACRSSRAPAPAQQPPRRSATATGTGPSCPGGYRSRTSPARGPWRTPATTPGTGPAGCWSGTSPAPAAPATGPAGCSSGTSPAPAATATATPPATGPAASRSGTSLAPAASPPWVATGPAPALQDPLP

SEQ ID NO: 184201 - protein, 58 aa, Oryza sativa
  Clone ID: PAT_MRT4530_81216C.1.pep
WIPRAAGSHVDKFRTLICILLLISCCSDALVGIFNRLILQYPKFVHIEKTKSRLKSKL

SEQ ID NO: 184202 - protein, 496 aa, Oryza sativa
  Clone ID: PAT_MRT4530_81217C.1.pep
MAKRHLLLVTTCLWALSCALLLHASSDGFLRVNLNKKRLDKEDLTAAKLAQQGNRLLKTGSSDSDPVPLVDYLNTQYYGVIGLGSPPQNFTVIFDTGSSNLWVPSAKCYFSIACYLHSRYNSKKSSSYKADGETCKITYGSGAISGFFSKDNVLVGDLVVKNQKFIEATRETSVTFIIGKFDGILGLGYPEISVGKAPPIWQSMQEQELLADDVFSFWLNRDPDASSGGELVFGGMDPKHYKGDHTYVPVSRKGYWQFNMGDLLIDGHSTGFCAKGCAAIVDSGTSLLAGPTAIVAQVNHAIGAEGIISTECKEVVSEYGEMILNLLIAQTDPQKVCSQVGLCMFDGKRSVSNGIESVVDKENLGSDAMCSVCEMAVVWIENQLRENKTKELILNYANQLCERLPSPNGESTVSCHQISKMPNLAFTIANKTFILTPEQYIVKLEQGGQTVCISGFMAFDIPPPRGPLWILGDVFMGAYHTVFDFGKDRIGFAKSA

SEQ ID NO: 184203 - protein, 167 aa, Oryza sativa
  Clone ID: PAT_MRT4530_81218C.1.pep
MQRAFTSRIVTLTKPAICQLRCAAAGIFWSVNYNWLCLCTEWKCRPDRRRRGSLSQSDDVFHPPSAFPVRSAGKNDGCSVRRSRAGLPTPRGATAAAAAGYGRTREGGRVGGAAASESATLVTSGLGTLLLTLEICTSNDSPRGRANAALLAIRAWNCCAYVHTSIR

SEQ ID NO: 184204 - protein, 111 aa, Oryza sativa
  unsure (1)..(111): unsure at all Xaa locations
  Clone ID: PAT_MRT4530_81219C.1.pep
VSNRRTYPVVALILVGCTTPIPCRSTLVVLQYPCSLSAHTKYPTYTVXCRKLGKWVCEALKTRHVVSTRLSEXKRNVVLLGSXTLGVRENEXGSGSRLIKXNGSGSQEVMI

SEQ ID NO: 184205 - protein, 64 aa, Oryza sativa
  Clone ID: PAT_MRT4530_8121C.1.pep
SPFRFRCALPAEDLTAAAAHDRQTTATTTTSHQKQPPPRAVTMCGSGLLTPRAHLSSNPHFTHA

SEQ ID NO: 184206 - protein, 111 aa, Oryza sativa
  unsure (1)..(111): unsure at all Xaa locations
  Clone ID: PAT_MRT4530_81220C.1.pep
VSNRWTYPVVALIPVGYTTLTPCRSTFVVPRYSCSLSAYTKYPTYTIVCRKLGKWVXEAFKTRHVVSTRLPKWKRIVVLMGSWTLGVRENEXGSGSRLIKWNDSGSREIMI

SEQ ID NO: 184207 - protein, 72 aa, Oryza sativa
  Clone ID: PAT_MRT4530_81221C.1.pep
YFITSPDPKSDYVHYFIQRKGNIIKCRHLEKHWSFIIWLHPMRHNCWILYSIAHNKKKIVWSRDYMGTYGNS

SEQ ID NO: 184208 - protein, 112 aa, Oryza sativa
  unsure (1)..(112): unsure at all Xaa locations
  Clone ID: PAT_MRT4530_81222C.1.pep
VPNRRTYPVVALIPVGCTTLIXPCRSTFVVPQYPCSLSAYTKYPTYTVVCRKLGKWVXEALKTRHVASTRLPEWKRIVVLLGSWTLGVRENEKGSGSRLIKWNGSGSREVMI

SEQ ID NO: 184209 - protein, 163 aa, Oryza sativa
  Clone ID: PAT_MRT4530_81223C.1.pep
ANNEPPQLVVPARRHVCLAATPSAPPFPLMATPKQHWGMVVCAFVLQIAPLPVPCSRRRRAQSRAAAGRTTLIPCRSTLVVPRYSCSLSAYTKYPTYTVVCRKLGKWVCEAFKTRHVVSTRLPEWKRIVVLLGSWTLGVRENEKGSGSRLIKWNGSGSREVMI

SEQ ID NO: 184210 - protein, 159 aa, Oryza sativa
  Clone ID: PAT_MRT4530_81224C.1.pep
ARSMAVKLLLWLARQPGHAVISFWIPCRAHNPSSRSREAPCQNDLRKSIPDIAPGATVGDMVPGVCEVEGNYFPSGHVTLQVSPIRASRESWKPRGGGGGPRGMASPPRAIPRLRPEALTRLPRGGGKEREHRLNSYKCATPQLSLTAFNAVRADVRRA

SEQ ID NO: 184211 - protein, 209 aa, Oryza sativa
  Clone ID: PAT_MRT4530_81225C.1.pep
MPAVADPALLGGVQDGLVLVILAARGMGQTVQTRGANGGRRRAGRAARGEKGTAASARMRHASCRTGCGRAAASMAPRGRSVTAEALQDGVTAGATSDGGGGRFLGPVVGKCPTAKEDGVTVGTGDRRGGGRFLGAQDPEHEVVIITAFCTAASPPEIRPHSDASFGVWVHPHCFTAARSVAPGARAAQPKQATAMAPPRLRSKLRAGA

SEQ ID NO: 184212 - protein, 111 aa, Oryza sativa
  unsure (1)..(111): unsure at all Xaa locations
  Clone ID: PAT_MRT4530_81226C.1.pep
VTNRRTYPVVALIPVGCTTLIPCRSILVVLRYSCSLSAYTKYSTYTVDCRKFGKWVXEALKTRHVVSTRLPEWKRNVVLLGSWTLGVRENEXGSGSRLIKXNGSGSREVMI

SEQ ID NO: 184213 - protein, 84 aa, Oryza sativa
  Clone ID: PAT_MRT4530_81227C.1.pep
SAPLEKTSEQCYYHHYPLCKLYLLRSSLFVVVVVVTSILDVLLYVVGVIIIHTLGRTQVAEATLASFMFCVLAEIPIIKPLCKW

SEQ ID NO: 184214 - protein, 108 aa, Oryza sativa
  unsure (1)..(108): unsure at all Xaa locations
  Clone ID: PAT_MRT4530_81228C.1.pep
KCRSSQPENATDDTDEANTNNSGSSGTNGLTPNTTGSSRELGXNPNLYFTSTSSSELAELYLYRARPESPSPCRMATSGDLRAFXQGISRAYTGLPYADERGPRPTTG

SEQ ID NO: 184215 - protein, 178 aa, Oryza sativa
  Clone ID: PAT_MRT4530_81229C.1.pep
TASSNSMAATGGALAPLVSGRVAGHDDDDGCNDAAAAEDIELAQAGGGNSELVIDSLVEGVSWAPLPSPRCRGRGRSPPSTTGTAPFRSSSSLATAMLTSPGAAGRRSSRHPEAAAACEMSTAMAVLKKRKRREGRDSEPVVASPDWRARHPPAGAAYILAPLLPALPLSPRCSRRSR

SEQ ID NO: 184216 - protein, 57 aa, Oryza sativa
  Clone ID: PAT_MRT4530_8122C.1.pep
MGHRSPPCLPPHFSPKPKTRVCWCPPSTFVNSDELDLRSRAPPRGKSGTQELKLDQI

SEQ ID NO: 184217 - protein, 67 aa, Oryza sativa
  Clone ID: PAT_MRT4530_81230C.1.pep
AAVTDNPQSYLMFCLIRWGMVLVETLWHGKKWIVCQMVRPPLRTQPRREGDMLAMGFCLGGVPDCCL

SEQ ID NO: 184218 - protein, 51 aa, Oryza sativa
  Clone ID: PAT_MRT4530_81231C.1.pep
PFKKSAFKVWAPNKNVFFERSVKIIKRIDKYLEIDGYFCGCKKFCNLCLNY

SEQ ID NO: 184219 - protein, 110 aa, Oryza sativa
  Clone ID: PAT_MRT4530_81232C.1.pep
MGGGGGKKKKKKKKKKKKKKKKKSRALLKKSNLPSPSFQHHTSFLVSPNFNSFAGLLRRLSWKTPAFPHLNPFPPHPLFPTWLTPKKAPTNPPSQHFPSLIGKCPPPFPP

SEQ ID NO: 184220 - protein, 92 aa, Oryza sativa
  unsure (1)..(92): unsure at all Xaa locations
  Clone ID: PAT_MRT4530_81233C.1.pep
CKNHHIIHGFPGTRNTREKNKASSIGSRNHADAGSWIKHRLRPLPELXFMASSALHITLRRRRLDHPQWNIGRERSLARSGSPRRRRRSRSP

SEQ ID NO: 184221 - protein, 104 aa, Oryza sativa
  Clone ID: PAT_MRT4530_81234C.1.pep
IYRWHLHISNLELYIFLAYISELRFHGLPAQFLKQHLIWGIIWAGLRMEGVLQRMNHQTIIWGTNWTRLVCPQIMCECTILDGNNYLETKACHQQIMLSNMRRL

SEQ ID NO: 184222 - protein, 394 aa, Oryza sativa
  unsure (1)..(394): unsure at all Xaa locations
  Clone ID: PAT_MRT4530_81235C.1.pep
QRLIAFTSQWLQGQALLKNPNPTNVEAVDPVNLQSPNQNSAEPLELNKELXTTAFERDPGKHVQISALPINQRDDGRRFYISEGPYQFILEEYPLNGAFHARRFQSNWFKQFSWLEYSPHTDRAYCLPCFLFSKNQLASXLSYFHSEGVSKWKKVNDGKECAFVKHMGNATSAHNFXVGCYNNIKNFMAHIDEVMVKQNDILVEGARLRLTTTIESIRWLTFQGCPFRGHNESLNSLNRDNFLEMVKLLASYSKDVREVVLENSPRNEKYTSSDVQKEILSIIAQKVQKSVREEIGNSKYCIMVDEARDKSKKEQMAIVLRFVNKGXYKDTSSLTLKNSICAVLSDINFLQDIRGQGYDGASNMRGEXNGLKALILNEQQYMYSLPCHSINLIK

SEQ ID NO: 184223 - protein, 90 aa, Oryza sativa
  Clone ID: PAT_MRT4530_81236C.1.pep
SSCGGSLSGGRPPAPPGWPPHPPPPGRTADPRAPPSPSPRRGTCGASRDAARRAACRGEASAVAHSQPPPPPPPQPPPPPRQPLLPPTPG

SEQ ID NO: 184224 - protein, 466 aa, Oryza sativa
  unsure (1)..(466): unsure at all Xaa locations
  Clone ID: PAT_MRT4530_81237C.1.pep
MVYDGAVKDQESSANPASASAALSEASAAASEVTAAAAAGAGAGAAEEGAAVSGRPPRPPHDKRLGVRHPLKHRRFRAGGKVMVEPGDPPSAQEVADEEASEVEQEAAPVEREPPQEEGGDVEVSSAPAEMEVVEGDAMEVSPEPAVAVGESELEGRPGEEEEVSSPVVSQGERKQETAAAAPVPAVEEKKHKDQENKHKEREREKERERVDEVGYMSGGWKSEDGFLSCGYSSFRGKRASMEDFYDIKSSKIDDKQISLFGIFDGHGGSRAAEYLKEHLFENLMKHPEFMTNTKLAISETYKKTDSEFLDSESHTHRDDGSTASTAVLVGNHLYVANVGDSRAVISKAGKAIALSEDHKPNRSDERKRIESAGGVVMWAGXPEIQEQEIDDELEFLILASDGLWDVVPNEDAVSLVKIEEEPEAAARKLTETAFSRGSGDNITCIVVKFQHDKMDGDSSPTSDKS

SEQ ID NO: 184225 - protein, 932 aa, Oryza sativa
  Clone ID: PAT_MRT4530_81238C.1.pep
MAGLTKNRSTSACRLCFILLLVLSATTTTLSTALSGPYSSRCASPSPAADQHTGVDDASALLRSFRITSGIFSGEGAETLFSPRSYYSIVGQHSFTDSFARRSFSLLPHAVSRTTEPSVIHLTATLTLFGSRVQLFESDLTRESAKEGHSISFYLDGYYSSATTQLCMVGKGSDLSIDGSVKHYMDVALRLRIPSISSLTDPFVTGILEGADFEPFSLLTYAEGSSYRYSENTSCLPLPVPEAAAAARRAIQTTPDGNFSCDTLKARLAASYRLEYGRAHAVSFPSLHEPRLHVNQLHCTAGGAVRAYAVFSNDTANMWGFRDFFSSQEAAVVADGHWDSDTNRLCLRACLVARSSPATPSASTELEVRECGIGMSFWFPAVWTVRDRSVTAGVLWNATQLNSSDNHASVGSDVALITASSFEEWKGNLSDVNYNYSFTMLEEAKKHYLKTGPSDSKKNSKGSFPGNYSHSYRDFRFPFFLEGETGSGTAYPVAIGSAMVDGDRLAAEHSFSRHAAAQLEQGTLVNVSYGVTYYVAPKNWSSFGQLKDRYIRAEGVYDPTTGSLCMVGCGELNGSMDCQILITVQFSSFGNGTGFSHGRGRISSLRNSTDRLYFPRRDITLFGMYSHEVSKSIWRMDTETVVVVISTTLTCVFTVLQILHTKRNPSAAASTSITMLAVQALGLVTPLVVNSELLVMNKRRQLGGLDGDGWLRLNELMLRVPTLIAFALQLRLLQLAWSGRTTAACSSEGETSPAPAPAAERKVLRTCLPLYLLGAAVTAVVHVVNVRAAREAGLVDRRFAPAEVTTLWADLASYAGLVLDGFLLPQVVFNAASGSRSRVRAISPWFYAGGTVIRAAPHAYDAFRAVSYAATHVYASSRDDFFGVAWDIVVPLGAALLAFVLFLQQRLGGDLLLRSRNRRRPCDYQLVSTFQR

SEQ ID NO: 184226 - protein, 219 aa, Oryza sativa
  Clone ID: PAT_MRT4530_81239C.1.pep
LSLVSLVAVLEPLEHGEQHRLEEMRQHPVAGPRASSGDAAERRHLPKPAAAANCSSSATATPPNAATSPSKRPPWQRPQPPSQRDAPATDVGDGLTKLRGVDDGGYMDVVELSMAWTQMWLLTIRVVEEIHNGPRVKIAMLGIFLCSLRQTWERDERIGGYPDNLKFINTKLPIQLVAGSIQPFTFNSANPTTQIVAARRAGGKKNNSRCPPRKRSARD

SEQ ID NO: 184227 - protein, 79 aa, Oryza sativa
  unsure (1)..(79): unsure at all Xaa locations
  Clone ID: PAT_MRT4530_8123C.1.pep
MGTEKTHINIVVIGHVDSGMSTTTGHLIYMLGGMDKRVIVRFAREAVXMNKRSFRSARVLDTLRAVRARGITIAFALRP

SEQ ID NO: 184228 - protein, 360 aa, Oryza sativa
  Clone ID: PAT_MRT4530_81240C.1.pep
MEKYEAVRDIGSGNFGVARLMRNRETRELVAVKCIERGHRIDENVYREIINHRSLRHPNIIRFKEVILTPTHLMIVMEFAAGGELFDRICDRGRFSEDEARYFFQQLICGVSYCHHMQICHRDLKLENVLLDGSPAPRLKICDFGYSKSSVLHSRPKSAVGTPAYIAPEVLSRREYDGKLADVWSCGVTLYVMLVGAYPFEDQDDPKNIRKTIQRIMSVQYKIPDYVHISAECKQLIARIFVNNPLRRITMKEIKSHPWFLKNLPRELTETAQAMYYRRDNSVPSFSDQTSEEIMKIVQEARTMPKSSRTGYWSDAGSDEEEKEEEERPEENEEEEEDEYDKRVKEVHASGELRMSSLRI

SEQ ID NO: 184229 - protein, 486 aa, Oryza sativa
  unsure (1)..(486): unsure at all Xaa locations
  Clone ID: PAT_MRT4530_81241C.1.pep
MPSTPPTSMSALATTPHSPLKQPIAKHLCYGVINLNKPSNLLSHEVITWNKNLLHIEKTSHNGTLDPKVTGNLIVCVNRATRLVKSWYGVRLLCVLFKRVGYIESLSLMIRMLLYCECFAARVYCDGCHCSPCGNKIENENIRKEAIETILLRNPLAFQPKIENSPNTVTVPKHASAAXPPLPKHNKGCHCRKSECLKKYCECFQANILCSKNCRCQDCKNFEGSEERKALVQMKNASDRNHIQEAANFALNGATGSLGYKNSPVRRKKYQENSLGEQILSEAQFQPAGPAGVAQLASSCTGFGGDIAINYQSKSSEMIYRSPLANTIPLIEVNDLVKNALVACRKAPEAFLTKAGNKVEMQAEKQYQTNDEINNDKTKEQNLKEASLKDIQNKACIDRQNINGTEPHLANSFKDSRPASPGTQALMCDEMDTTFGNEDYRSPFVVPSRDQDISELNADQERIVLTGLRDYLRVLITRGNINEILL

SEQ ID NO: 184230 - protein, 330 aa, Oryza sativa
  unsure (1)..(330): unsure at all Xaa locations
  Clone ID: PAT_MRT4530_81242C.1.pep
MLSSSSSAAAAAVVLTTTSGRAPLLHLPRTPRPTTAARIAAAPDSSRARAGGAPLLLGSAVPRRRGWALVCRDSSLPGPPGVDPVAEEEENRKKTEAVAAAAAARIASSGGGGGGGGGSLSDWTTSVLIFGIWAGLMYYIFQLAPNQTPYRDTYFLQKLCNLKGDDGFRMNDVLVPLWYIMGLWPLVYSMLLLPTGRSSKSKIPVWPFLILSCIGGAYALIPYFVLWKPPPPPIDEEEIGQWPLKFLESKLTAGVTFAVGLGLIVYAAKAGGEDWQEFIRYFRESKLEKXGSWLLPLALIPFVGPSLYLLLRPSLSSLLAATGPSDDKTQ

SEQ ID NO: 184231 - protein, 125 aa, Oryza sativa
  Clone ID: PAT_MRT4530_81243C.1.pep
AFANLYPHDERDGCEWLISSGASVRSPSRAGEAKICLLPPHVACRWALAGSSHPMPRGPGARVGLVARTARRGPARDTPARHHVLPLIHPSFQPRARACRWERGGGRGAPTRPRTRGRTRGRTRG

SEQ ID NO: 184232 - protein, 261 aa, Oryza sativa
  unsure (1)..(261): unsure at all Xaa locations
  Clone ID: PAT_MRT4530_81244C.1.pep
MDRYQRVEKPRPEAAVISENEIRITTQGLIRNYVTYATSLLQEKRVKEIVLKAMGQAISKTVAIAEIIKKRIPGLHQDTSISSVSITDVWEPIEEGLVPLEMTRHVSMISISLSPKELNKSSAGYQAPLHAEPIKPQRYQQTQQYQQQQHQSRPSQVQTGEYLFTNRSIFVRRGRGXVVGEAMVEGMVDMITTKEVMVDMDTRVDMDTKGGMATREDMATIKVVMEGMVTTKVDMEDMVSNMMVARAEDPRLREAGDVAGA

SEQ ID NO: 184233 - protein, 158 aa, Oryza sativa
  Clone ID: PAT_MRT4530_81245C.1.pep
DHKDQVQTDSYGRGRGRGRGRGRGWGGRGGYGGGYGGYDNNQGGYGGYGHQGGYGHQGGYGNQGGYGHNQGGYGGYGYNQGGYGGYENGGWNYNRNRGGGGGGGRGRGNWGYGGPGGYERSGPAYERGGRGGGSPGGRGYARGRGRMGGGRGRGNQNY

SEQ ID NO: 184234 - protein, 343 aa, Oryza sativa
  Clone ID: PAT_MRT4530_81246C.1.pep
MRPQRTPPSGRGPRGESRAPRLLHIPRGIAGSQAAARRDPSRRAPTGQAAAPPGRGGPVPGRGAGGVPVEASLPECSAGAPVGETGGAAEWEKAKGWERSRWKGRLHDLIRSAPCDHATRVTPPVGWGSFHSTFILLGHVYMGTHATHGHAHGHVHSHGHGPGHSHGSAPAAATSPEDASVAETIRHRVVSQVLELGILVHSVIIGVSLGASLRPSSIRPLVGALSFHQFFEGIGLGGCIVQANFKAKATVIMATFFSLTAPVGIALGIAISSSYSKHSSTALVVEGVFNSAAAGILIYMSLVDLLAADFNNPKLQTNTKLQLAVYLALFLGAGMMSLLAIWA

SEQ ID NO: 184235 - protein, 43 aa, Oryza sativa
  Clone ID: PAT_MRT4530_81247C.1.pep
LFFIPCHFFPLKFIIWLFCKTTNQAISIFPCKHVFCSWHVSLV

SEQ ID NO: 184236 - protein, 46 aa, Oryza sativa
  Clone ID: PAT_MRT4530_81248C.1.pep
EQKHLLFRKVFECMVVQLSACFQLRVDRLSIIHLGLSSASEQAYNT

SEQ ID NO: 184237 - protein, 242 aa, Oryza sativa
  Clone ID: PAT_MRT4530_81249C.1.pep
MGRSPRGRNLPARRRGSSSSSSDLPSCCWKMKGTCEQNDIALVSEKKEWKGASCPVCLEHPHDAVLLLCTSHHKGCRPYMCGTNHQHSNCLEHFKEAYAKEKLAHSVLIESSPGLSLSLNSQPASKQQCAMELACPLCRGDVKAHHKGCRPYMCGTNHQHSNCLEHFKEAYAKEKLAHSVLIESSHRHFVSLISHMASKRQSLIVKESAMIHWHYQKDALWANQLGSFLIESKEGVNNKALS

SEQ ID NO: 184238 - protein, 735 aa, Oryza sativa
  Clone ID: PAT_MRT4530_8124C.1.pep
MEFRSAFCRSALLLVLLVLLPLSASASTKLYIVYMGEKKHDDPSMVTASHHDALTFVIGSKDGAMKSIVYSYKHGFSGFAAMLTESQAEELAKYPGVINVKPNTYGKAHTTRSWDFLGLNYYEKSGVLKDAMYGEDVIIGVVDTGIWPESPSFNDDGYGPVPARWKGVCQTGDAFNTTNCNRKIIGARWYSAGATDDMLKGEYMSPRDFHGHGTHTASTIAGGRVWNVSHHQGGLGAGVARGGAPRARVAVYKVCWGVGGNFGDAAVLAAVDDAINDGVDVLSLSLGGPNEIHGTLHAVARGITVVFAGGNDGPTSQTVQNTVPWVITVAAATIDRTFPTTISLGNNEKLLGQSLYYNATVSSIKFQTLVVVNGSSAINVTAGNVVLWPEPYNKDTIDLLAKEGAKGIIFAQGNTFNLLETLDACNGIMPCAVVDKEIANRIASYATSTRHFFSLSSMPVVKVSPAVTVVGNGVLSPRVAGFSSRGPGTKFPGILKPDIAAPGASILAAVGDSYKFMSGTSMACPHVSAVVALLKSVHPDWSPAMIKSAIVTTASVTDRFGMPIQAEGSARKVADPFDFGGGHIEPNKAIDPGLVYDIDPKDYTKFFNCSLDPQEDCKSYMGKLYQLNLPSIAVPDLKDSVIVWRTVTNVGGSEANYKVVVEAPAGVNVVVEPQVITFAKGGSQSATFKVTFTARQRVQGGYTFGSLTWLDDNTHSVRIPVAVRTIIQDFVSDTA

SEQ ID NO: 184239 - protein, 70 aa, Oryza sativa
  Clone ID: PAT_MRT4530_81250C.1.pep
AASGGASAASCGASTAGGRRQATGSGGWRLAATSAAAGGGASPAAGGGGRRRRQAAGSGPREIRWWVLAI

SEQ ID NO: 184240 - protein, 89 aa, Oryza sativa
  Clone ID: PAT_MRT4530_81251C.1.pep
HSALRIHALCSVALEIISMGNISREELGESLPYHLIPMRFESLAVCNPCHSLIETLPLFSTGENKTAAVCSKASNENTLFHIPSRPRAN

SEQ ID NO: 184241 - protein, 158 aa, Oryza sativa
  Clone ID: PAT_MRT4530_81252C.1.pep
MRPAIPPPVRGQGRGAPRPPSIVPAAPRGGAAWRGVPLSIGVDAASPLVPATASTHRREIVLDDVDKRPHVDDDAALLLHIGVRLPATATPPPEDVAGDDMIDAPPPPPPPPMEVQLGADVLPPQPAVEIDDDDVRDAPLPPATEVFHDDGAAAAKAP

SEQ ID NO: 184242 - protein, 68 aa, Oryza sativa
  Clone ID: PAT_MRT4530_81253C.1.pep
VLVMPQKHAVRNNIEASEVNAVHFSEIVLDKCCSSEVIPTSCLPIIQVDQRAIPHAIFSEQSTKFKLK

SEQ ID NO: 184243 - protein, 93 aa, Oryza sativa
  Clone ID: PAT_MRT4530_81254C.1.pep
MSPELAAALAKVALFPVVQALVYLIRAPWAGVFSPDRTAAAGSRSLSFRPMRSMSVRRFLAALSDVPVGVTEDGGSPAPAPAPPHRGPADLAE

SEQ ID NO: 184244 - protein, 91 aa, Oryza sativa
  Clone ID: PAT_MRT4530_81255C.1.pep
GGRPTGEREGGAGRSWRLPQHKANSAGAAQASTPKRQARPAEAKEGMLQSRTDVLTECTIHMPQCKTSGTGWLCCYVTTATAILLVPRGHW

SEQ ID NO: 184245 - protein, 194 aa, Oryza sativa
  unsure (1)..(194): unsure at all Xaa locations
  Clone ID: PAT_MRT4530_81256C.1.pep
RASYHFGLRDDDNDVFSATCKXKCISLNAKTFRSRSFSHFXSSAFTFVNVSITFVRVSFTFVRVRSXHSRSFTFRSRSFAFHSRSFTFRSRSFAFVHVRSRFXTVRSRSLIGVERERQRAXIEIEREGGGSHPRDAAAASAAEAARTARRRXETTAASARGCPRXGGEGEAXLDLDGKMSKCWWRRRGRTGNII

SEQ ID NO: 184246 - protein, 162 aa, Oryza sativa
  Clone ID: PAT_MRT4530_81257C.1.pep
MAAAFSSTRGASESTRTSFLGKKLYTHVPSAAIYQGKNFTINMFTVMATELVEGKQTDHDRWKGIAYDIYDHQQDTTRGIELAKLLAQALTVDGSHEAILSSYEYLSQGLTTYDSVNSMGGSYIAPAFMDKLVVHIFKNFMNIPRWKAPLSLGYQEKTKGHR

SEQ ID NO: 184247 - protein, 303 aa, Oryza sativa
  Clone ID: PAT_MRT4530_81258C.1.pep
MKKLYQGKGRRVHPAPAQQAQADAAAAAAVVLPAAVLALASALTAEEQEVLAYLLSGGGAAGGRRRRRGAHPPEMGCGCFGCYKSFWARWDASPNRHVIHRIIDAVEEAAAAAELARRAALPAAAAAANAEAATARRMQEDGDYEGDGDDEEEEEEGDSMDGDADDETTLSEGDCSSSSSSNAEKSTVGRLVRFIGEKIRRRKKTTKKVRSSLTVTVIVVLQYEMKDRKQVADNLWALHCTSLCREINKLQHGEAEAEAGWKKKRDVQEEMLHLMATTDVFDRQFGRRALLCEDAKAKRKREP

SEQ ID NO: 184248 - protein, 36 aa, Oryza sativa
  Clone ID: PAT_MRT4530_81259C.1.pep
MPGGQATYLGKPVPWGTLTTILVIEFVAIGFAEHQR

SEQ ID NO: 184249 - protein, 152 aa, Oryza sativa
  unsure (1)..(152): unsure at all Xaa locations
  Clone ID: PAT_MRT4530_8125C.1.pep
HEAGKGTGRVLQXAPAVVRQRARHPGDRRGVAPRKEKWEIIPHTRSPSSVTTPRTSTLSASHRHCIGTAASSRQARLQGTRRGGSXAGVHXGXXXXXAPPAAPPVLCYDGYRVTGDTALPHAGQVLAERRRVGPTPXXHXRRARTARHACAE

SEQ ID NO: 184250 - protein, 328 aa, Oryza sativa
  Clone ID: PAT_MRT4530_81260C.1.pep
MKKLYQGKGRRVHPAPAQQAQADAAAAAAVVLPAAVLALASALTAEEQEVLAYLLSGGGAAGGRRRRRGAHPPEMGCGCFGCYKSFWARWDASPNRHVIHRIIDAVEEGSGGGGGGGAGPPRRPPRRRRGGKRGGGDCEEDASATKEADASVEHHHHACGFDGEEDGDYEGDGDDEEEEEEGDSMDGDADDETTLSEGDCSSSSSSNAEKSTVGRLVRFIGEKIRRRKKTTKKVRSSLTVTVIVVLQYEMKDRKQVADNLWALHCTSLCREINKLQHGEAEAEAGWKKKRDVQEEMLHLMATTDVFDRQFGRRALLCEDAKAKRKREP

SEQ ID NO: 184251 - protein, 49 aa, Oryza sativa
  Clone ID: PAT_MRT4530_81261C.1.pep
MASGAIPRRRVVSGKREAGRSAERGEPSGARDVGVASAGFGASGALADV

SEQ ID NO: 184252 - protein, 207 aa, Oryza sativa
  Clone ID: PAT_MRT4530_81262C.1.pep
MRGSDHHQDVVAAPRGGGGGGDDGQAHDMVMPGFRFHPTEEELIEFYLRRKVEGKRFNIELIAFVDLYRYDPWDLPALASIGDKEWFFYVPRDRKYRNGDRPNRVTPSGYWKATGADRMVKVEGDRPIGLKKTLVFYVGKAPKGLRSSWIMNEYRLPHGDADRYQKVEISLCRVYKRPGIEDNCSAIESRSTRHLAICRLITSSALL

SEQ ID NO: 184253 - protein, 63 aa, Oryza sativa
  Clone ID: PAT_MRT4530_81263C.1.pep
PRPTYYNLDKEFQLHNSKVDLILKIESHASNHGMGYPRAGFTFIPGAYLTCPSTESIGVRNEA

SEQ ID NO: 184254 - protein, 147 aa, Oryza sativa
  Clone ID: PAT_MRT4530_81264C.1.pep
NPTKMKIIFVFALLAIVACNASARLDALSQRYRQYQLQSHLLLQQVLSPRRELARPPHALEAPRVRTTRYRKTTKKRPSSAHSLLPDTWPTDLSHLHNLSNHPKTLCAPTLCSRTLTTLAVFAWTSSWNRSVLHSPHQRPSRQFVHC

SEQ ID NO: 184255 - protein, 74 aa, Oryza sativa
  unsure (1)..(74): unsure at all Xaa locations
  Clone ID: PAT_MRT4530_81265C.1.pep
AXRXLSRPPYHIYACMPRGYSFFFCLSKXXPLREWMNESMLCMISFLFLFYPPYMSSXTVWXASLKLNWPCLHS

SEQ ID NO: 184256 - protein, 47 aa, Oryza sativa
  Clone ID: PAT_MRT4530_81266C.1.pep
KGGAHIIKIFNFFIVRGLVIEFFFFFFIYFFFYLKIIVIVFFFFFFF

SEQ ID NO: 184257 - protein, 631 aa, Oryza sativa
  Clone ID: PAT_MRT4530_81267C.1.pep
MVQWWEEWQLRVLALTSLFLQLFLLVSATFRKYRVPALLRSCIWLAYLGGDALAIYALATVFNRHRQTASTDHGSVLEVMWVPVFLVHLGGQDSITAYNIEDNELWARHAVAMSSEAAVAVYVFWRSWSGGQVPESSPALLLFAAGFLKLGERLWALRRASFTRLAAVRSSAAGRRTPAREEEEDAGDDHIPLESYVHLASGYVQSQATGDHVPRPKDNYVFHVHPLIEPELQDVLMELFVDFPAPYPRRLAYLRSFLALEDDDAYEELCALLNQAFQFFYTKKEAAYTVVGIYLRTLHHAPGHRGHCKLQRQSQGRICALLWLADWRFVTSRIQPEMQRTVAQFNLIGFATRRRWPTMVVMRIAALFRCKKYVNQHWYLGHLSSTPIIIEFIGKDLKSRWVDDLTNAAAYRRFNDRRGQWTLRRERCYQELGWSVTELPFDEAVLVWHIATDIYLDCNNGIENPPATADERAAVKCSREISNYMMYLLLFQPDMLMPGTRQSLFAVACREIKHALRDQRQRLDERGVARWISENPNAAQPGDHLAAARRLAEAMMQMNDAGRMLKVISGVWVEMICYSASRCRGFLHAKSLGAGGEFLTVVWLLLHRMGMEVLADKLQKPEIPRHVQILP

SEQ ID NO: 184258 - protein, 191 aa, Oryza sativa
  unsure (1)..(191): unsure at all Xaa locations
  Clone ID: PAT_MRT4530_81268C.1.pep
MAEDELLLPLPPPTASPPPLSHRPPLSSTSQASFATTRRHPFHARHRLSAMATAASARASSSTPPSPSLSTSPSSPVVAAAALSPAYHPSSALLRCVEHTMGQKAEKPDIHTHPPPSGPRQGGNNPFYPRRAAPHARPLLSASADVAXRRPHPLSPHRPPLSCRIVAVYLVPARGAVRRVRARFPRLKVSI

SEQ ID NO: 184259 - protein, 172 aa, Oryza sativa
  Clone ID: PAT_MRT4530_81269C.1.pep
MAMGLNRFTQWLWPASTARAAAAAATTHELPTTAAGLTSASFPDFPSGFREPDTVTFAATTRRRGGRRSRREEDRVDREFDMVIVASDDGGGGGWLSGSESDDSDWAIGWQEKLSPELQTDGDPDGCFAVLVRCYRHGQPEPAGRPDGGAHFLATAASLANGGGLSDGRNFV

SEQ ID NO: 184260 - protein, 68 aa, Oryza sativa
  Clone ID: PAT_MRT4530_8126C.1.pep
MGCVDFDLRRMVRANKDPTPLGPCQQRSDTIGRVRNFRQHQHVLGTNHERIIKPHLLISPGHSHKEII

SEQ ID NO: 184261 - protein, 123 aa, Oryza sativa
  unsure (1)..(123): unsure at all Xaa locations
  Clone ID: PAT_MRT4530_81270C.1.pep
PHHNNHYNSYMNFMHQNEEANYFISGYYPGKHAPRYNIPFGTLTNRHKKVESANENNFKQTGERFRSWDPARIDPVIKKRXIDTLCDPALTHEIRSIWLSYWSEAHRYLGQKLSSRLSSKPSM

SEQ ID NO: 184262 - protein, 145 aa, Oryza sativa
  unsure (1)..(145): unsure at all Xaa locations
  Clone ID: PAT_MRT4530_81271C.1.pep
TPSSSPLHPLPLHFPCRSSPSPRSGAAAGRAVAAAPGRSGGARRERRRWPGGXGAAASRAGAVAAAGRAGLAASRAVAAAPGRSRGGGRAWRPSWRRRREDGDREAGGALPSREIAVSVVVVERRHDMSESPANARKGFFATATA

SEQ ID NO: 184263 - protein, 83 aa, Oryza sativa
  Clone ID: PAT_MRT4530_81272C.1.pep
RIEVIRSPTPAIPGLTEQGLREMSIFAFNWKGKQAGRQIESVAALGFLKQKRIDRLGGLAGAWPCEEEGGLGLHLDQARERGA

SEQ ID NO: 184264 - protein, 187 aa, Oryza sativa
  Clone ID: PAT_MRT4530_81273C.1.pep
RAVAAVGLTSPPTSSMARGKFKGKPTGERSFSSEEQIAAGTSAGRPKNFKKKQSEKEVYDRRQESDEEYDRSQESDEEESDNFQKNKHKGTEGLIEIENPNLVKPKNIKAKDIDIGRTSDLSRREREELEKQKSHERHMKLQEQGKTEQARKDLERLTLIRQQRAEAAKKREEEKAAKDERKAEARK

SEQ ID NO: 184265 - protein, 640 aa, Oryza sativa
  unsure (1)..(640): unsure at all Xaa locations
  Clone ID: PAT_MRT4530_81274C.1.pep
TITRYSGKSEPSEILPFHKSTIQTVHGDENTKVKVAHLVLDSFARSWYFNIHPSNIYSWEQLRDVFVMKFHGTYEEPKTQQDLFGIRQKPSESTREYMRRFSQARCQVQDITEVSVINAVRQGFDQANGRGKSLGETPNHXATFFISLTGTREANRIRSARSKYKPSMTKLXFRPKRSNKKQAEVNQGRLRSQWHGKNFEQTSQAYNNYRRSREPSKKTSMPKQVITWGNPEGHMSKCQQNVHNHGLXGSGEPEYQASKISFDPADAEGVHFPHQDPLVISAVVAGCEVRHILVDGRSSMDIIFFNAYMKMDQPTLALSQATAPLQGFDGISLXALGQVQLRVSFSPEENKRKXLIMFNMVDIPYHYNAIFSRATLNKFDIVVHHNYLXGYEAGKEEKRSIMRVIMNNLDIFVLSPDKVGGVSPDIILQHLAVKPDARPQKXNVRKMSVXDRQEAAKTKVYKLLMVGVIXEIDHPSXSANPALVKKANDKWRMCVNFTDLNKACPNDDFLLPRIDQPIDSIAGCELMSFLAAYSDYHHIFMMLENWAKTAFITPFGTVCYVRIPFGLRNVGAXTFVRLVYKVLKRQIGQNIYSYVDDIVVKSQKVNDHAANLXETIDNPRVAGIKLNPEKCVFAPLPLSR

SEQ ID NO: 184266 - protein, 55 aa, Oryza sativa
  unsure (1)..(55): unsure at all Xaa locations
  Clone ID: PAT_MRT4530_81275C.1.pep
ALGQVQLRVSFSPEENKRKXLIMFNMVDIPYHYNAIFSRATLNKFDIVVHHNYLH

SEQ ID NO: 184267 - protein, 53 aa, Oryza sativa
  Clone ID: PAT_MRT4530_81276C.1.pep
SLKQGHQQLLLLHIFSLLAPGLQLCLELKTSLAICFMSLAPSTNLLRFASNFL

SEQ ID NO: 184268 - protein, 464 aa, Oryza sativa
  Clone ID: PAT_MRT4530_81277C.1.pep
MSTKQSAEWMRERTNKLKEEVCTLFTPSKDMLRRMYLVDEIVHLGIDHLFEKEIETALKDIHESEFASSNLHEVALRFRLLRERGFWVSPDVFQKFKGDDEFEETISFARNHLESMIWDSVLKGPLADQVKHAIRLPLPRTLKRVEMLHYMFEYDQDNGHNPVLLELAKLDFNLLQHVHLKELKEISRWWKDVSGYMGLNHIRDRVIECYTWSYAVYHEEELSFARMLFAKIVVIITLLDDTYDVYAFTSIEECRTLNAAIQGWDDSAVSLVPEYLRKFYEIMLSTFREFEDQMLSNKRYLVAFNKAEFQKLSSYYLEAAEWSHRNYKPSFSEQVALATETTGARLLAAGVMLGMSDAATTREAFDSIGSQNKADMPCAVETYINEHKVTVDVAIAKINELVEDEWKTTNRARIDNQAVLPVAQRLINLTMAIPMFYGYDSDAFTFGEQLREILENLYVKPMPI

SEQ ID NO: 184269 - protein, 65 aa, Oryza sativa
  Clone ID: PAT_MRT4530_81278C.1.pep
MLSIPSIFKRTPRRGTHMTLTVGPYLTAAELGPTRQSPPSKVIHLDPNSQRVELKFPSKFQEAAQ

SEQ ID NO: 184270 - protein, 50 aa, Oryza sativa
  Clone ID: PAT_MRT4530_81279C.1.pep
MAGRPGKTQTTGSLTTTTNRTSPTLGNNSTTFGRQARQGDPLESTCRHHT

SEQ ID NO: 184271 - protein, 166 aa, Oryza sativa
  Clone ID: PAT_MRT4530_8127C.1.pep
MSSSTFSGDETAPFFGFLGAASALVFSCMGAAYGTAKSGVGVASMGVMRPELVMKSIVPVVMAGVLGIYGLIIAVIISTGINPKAKPYFLFDGYAHLSSGLACGLAGLAAGMAIGIVGDAGVRANAQQPKLFVGMILILIFAEALALYGLIVGIILSSRAGQSRAD

SEQ ID NO: 184272 - protein, 90 aa, Oryza sativa
  Clone ID: PAT_MRT4530_81280C.1.pep
MPKGPGTAKRALTRMEGWRWSGVGGRRKEEERRRRAPRLPGGVENSWGAGAGAANDTADDEEDVWFNPHATQFKRLSLSNHACVQHLLRT

SEQ ID NO: 184273 - protein, 75 aa, Oryza sativa
  Clone ID: PAT_MRT4530_81281C.1.pep
MGYIGRTDCAGSILVRFVLRPEPFSDSNSGSGSPSVGHPLKPSRAAAGVRTTHARSSAKSTRRAMASPSAAPNPR

SEQ ID NO: 184274 - protein, 263 aa, Oryza sativa
  unsure (1)..(263): unsure at all Xaa locations
  Clone ID: PAT_MRT4530_81282C.1.pep
MGSEGRSWSGAAAVGGGVEGEAAIARPVAPAPGDVPASGASVDIALPLPEMTPRIIGICKELVRGWSSLDSSRFSIETVSGGITNMLLKVSAEDGKGNKSSVTVRLYGPNTDLVIDRKRELQAIPHLSAAGFGAQLLGTFENGMVQSFIYARTLTPSDMKEPRIAAEIAKEIRRFHQVDIPGSKEPQLWDDIFKFMKKASILEFEDKEKQKRYETISFRKIQDEVXNLRDLSDLLHAPVXXXHNDLLFRHLMLNDLERKLYFI

SEQ ID NO: 184275 - protein, 367 aa, Oryza sativa
  Clone ID: PAT_MRT4530_81283C.1.pep
MFARLCRGICKELVRGWSSLDSSRFSIETVSGGITNMCESLLLGSFMACRVVLNFFFFFLFHLSNSLKLYNLLSLKILPIYQKLSGNHNCNLLLAVLKVSAEDGKGNKSSVTVRLYGPNTDLVIDRKRELQAIPHLSAAGFGAQLLGTFENGMVQSFIYARTLTPSDMKEPRIAAEIAKEIRRFHQVDIPGSKEPQLWDDIFKFMKKASILEFEDKEKQKRYETISFRKIQDEVKELKLYFIDFEYGSYSYRGYDIANHFNEYAGYDCDYSLYPDKNSQYHFFRNYLQPDRPSEVQLQDLDALYVETNTYRLASHIYWALWALIQAKVSPIDFDYLGYFFLRYDEYKKQRESCLSLAESSLSALKNG

SEQ ID NO: 184276 - protein, 524 aa, Oryza sativa
  unsure (1)..(524): unsure at all Xaa locations
  Clone ID: PAT_MRT4530_81284C.1.pep
MEIPNDLLICEVLTRLPVKSLLRFRSVCRSWRDAVADPAFVRRHLELSRAATPPSTTVLAVHTRMDHDPDDRAAPEDVVSFHRVRPGQSPAAAAAAIVELMHXRLWSAPASTCSPRTATASSPSRLHAGKIFVCNPATKEFFLLPPGAATARXKETAALGFDPCTGRYVVARCFFRRDVYYRDEDTGVLQYLEYDINDIVHQVFVLGPSGSGDWEATVTPPCIIYTNLPAACAGGAFYWVAHDKSDGTFAVECPNCLVRFAMNDGTFTIVPLPQGVTFMDVDFDSISELGGELCYTQRTSGTAYNIWTLQLPGDEEEEGHRWSLRWRVDFRRRVGVVLPLAVSDDGGTLTVYEHRVGIHRLDGGRESHPEKVVDMAAVTRGLVGQWIAGYGCARQCGGSGDHDREQCDGGGAAHDRMQCGDGDYYCERCGGDGDYCERCGADDEDDWEQCGGDDGDGDGDGDGVGEPLGLGQGDHGDHDGDEYDDGYDYDGEEEYWYLQGGRYKPLRPALRSLFAYVPSLVKID

SEQ ID NO: 184277 - protein, 58 aa, Oryza sativa
  Clone ID: PAT_MRT4530_81285C.1.pep
QRRRWARLGTARRRRRRARLASPSTALQPLCESRPPVPLHEIPPKPRLHRKPVPLPPP

SEQ ID NO: 184278 - protein, 215 aa, Oryza sativa
  unsure (1)..(215): unsure at all Xaa locations
  Clone ID: PAT_MRT4530_81286C.1.pep
MRRSMWAKIKGLAPSFAVRKTTWAKGIWRRAFSEAYGHHPRRALGGEGPMGHYAPGGPFAMARPSLTHLSVPCPKLEACWAGLSSAELPNPNGDGSAWPSTDYCDDMGIKLCFTSPAHPKSNVQAERANTEILNGLKTKTYNVLKKLGDSSILELPAXQLRHDDLNYHKERRQRAALRATRYQQSLRRYHQCNVRAWSLQVKELVLCHVPTRARL

SEQ ID NO: 184279 - protein, 47 aa, Oryza sativa
  Clone ID: PAT_MRT4530_81287C.1.pep
PGKGSFSLFVGCKQPTNSGLGGPPSPPLLALFIKKVCRQKKKAQFFF

SEQ ID NO: 184280 - protein, 153 aa, Oryza sativa
  Clone ID: PAT_MRT4530_81288C.1.pep
MPILEPITWLSLVLPISGGCFIIGSSSRVANARENPSLARPLRWGNNITRKWSRYDYDWSSTSSVAVLVPRLPMDEGTPRADKDLLDAESQTTMSDLVIDKPRQTQYGVCGGQEEGSSTTSDLTECGFEEEDYPVVDYMRAISGSAWNQANAG

SEQ ID NO: 184281 - protein, 60 aa, Oryza sativa
  Clone ID: PAT_MRT4530_81289C.1.pep
QAQDMAALALRCLHHDPKLRPAMPDDVLPQLRLLQQNTKPSSSSTSAPAHRSRPFQALAS

SEQ ID NO: 184282 - protein, 458 aa, Oryza sativa
  Clone ID: PAT_MRT4530_8128C.1.pep
MHPSGEYSPYYQPYPSPTSAPLATYPSASAPPYTPYPATDYAAPAAYPTYPPPPADPPQYAPPPAAPQPQPYYPYEPPPHNPAPSPYPSLDRAGSYTYVPRSQDLYPRKPPGGGSWKDGVYAFSGGEGEPPEPYGARDTTTRSNSPLFGDYGRTTGSTRKTAGAGGGGGGSSASPKVVRAVPKVETSEDTSGGVQKFRVKLLPEGAGSPMDVLCQVGLDGIRMLDPNTSRTLRIYPLETVTRWDVLDSSIFAFWSKSSVDFEARRIRLKSNSYTTNTILDTVTAASVQFKEMGGSSISRSRAIADAAKPPEQQNDRRKNFLDWRNLMKPMNEEKDHWVPDEAVTKCTACTADFSAFNRRHHCRNCGDIFCDKCTQGRTPLTTDADAQPVRVCDRCMDAMDINKKSSSASSRSTDGSSRRMREVACPTCTVHLQVQVPTSGSETIECGVCQQPFLVSAR

SEQ ID NO: 184283 - protein, 318 aa, Oryza sativa
  Clone ID: PAT_MRT4530_81290C.1.pep
MEMAAAVGGSGRRDAEAELNLPPGFRFHPTDEELVVHYLCRKVARQPLPVPIIAEVDLYKLDPWDLPEKALFGRKEWYFFTPRDRKYPNGSRPNRAAGRGYWKATGADKPVAPKGSARTVGIKKALVFYSGKAPRGVKTDWIMHEYRLADADRAPGGKKGSQKLDEWVLCRLYNKKNNWEKVKLEQQDVASVAAAAPRNHHHQNGEVMDAAAADTMSDSFQTHDSDIDNASAGLRHGGCGGGGFGDVAPPRNGFVTVKEDNDWFTGLNFDELQPPYMMNLQHMQMQMVNPAAPGHDGGYLQSISSPQMKMWQTILPPF

SEQ ID NO: 184284 - protein, 135 aa, Oryza sativa
  Clone ID: PAT_MRT4530_81291C.1.pep
QGRPDPRGAPGFVFQPYRFPPESALGDAFRPPVRSFFARPWRGFSRPFFLNSAIPPFVAKAGSLPWSGDLGLKPFWFPGFGNKGAGPPPPGRVNWPGFKKVFPKKGAPKFPVQNFLPPDPWFKPPGPPVKFGMWA

SEQ ID NO: 184285 - protein, 78 aa, Oryza sativa
  Clone ID: PAT_MRT4530_81292C.1.pep
GSPLTPIRDVPRHTVCKYRGVLAVLYTYGDTGAPQARYGVSELQQAACAWSPLCSIPASVHKLSTTNCHVNRRSRTSS

SEQ ID NO: 184286 - protein, 69 aa, Oryza sativa
  Clone ID: PAT_MRT4530_81293C.1.pep
YSARAYARATFLVHIDANKSRHTYLSKFINIYINVDNARKSYNMKGRNYFSDFYQKTTAGQTIIYISII

SEQ ID NO: 184287 - protein, 431 aa, Oryza sativa
  Clone ID: PAT_MRT4530_81294C.1.pep
MAACSRGLVARPFDLTARGAAHWPCPAPRRRAIRCCCRAQQEPRRRLSKAAAAAPERTEEWRIDGNKPAAAARGRRRASLTAMPSLPFPSPRSRRQWKQQNFYPRCTPRGPAPQSRDTPPKRDTGIASEKEWGINLLDEAVKESGTNEDGSTWYRESGDDRGDNGYRCRWARMGGQSHDGTTEWKETWWEKSDWTGYKELGAEKSGKNGEGDSWWEKWKEVLYQDEWSNLARIERSAEKQAKSGAENAGWYEKWWEKYDAKGWTEKGAHKYGRLNEQSWWERWGEHYDGRGFVLKWTDKWAETDLGTKWGDKWEEKFFAGIGSRQGETWHVSPGGDRWSRTWGEEHFGNGKVHKYGKSTTGESWDLVVDEETYYEAEPHYGWADVVGDSTQLLSIQPVERPPGVYPTIDFSASSPAPPSDDPPGMPPSPLE

SEQ ID NO: 184288 - protein, 175 aa, Oryza sativa
  unsure (1)..(175): unsure at all Xaa locations
  Clone ID: PAT_MRT4530_81295C.1.pep
NLESLIDPFFTQXIDNLISMLPIDKAPRSDGFNGLFVKKCWPIITHDFXRLAAHFHAECTDLQCINTSYITIVPKKLSPQKVNDYRXPISLMIISLKILTKLMADTMQGVILKLVHTNQYGFIKGRTIQDCLAWSFEYIHQCEQSKREIILLKLDFEKAFDTIELLLLVLLIRYI

SEQ ID NO: 184289 - protein, 196 aa, Oryza sativa
  Clone ID: PAT_MRT4530_81296C.1.pep
KILSSHAGCPPAKIFARRTPPPSSAAAPPATFALRPSSSTAADRRRPPRSTEAALSSSPPPPAHPPSPSSSPPPPAHPPPPSRALSSATGSSTAAGPSTACTATAGATPPRARPPPAPPPPSPTPPLAAERLHRPIVVHERIRPRPRMTSSAGRRPRPKLVVGRSSSTAEPRRRPFLRHSGPKLVVGRSSNTDVRA

SEQ ID NO: 184290 - protein, 128 aa, Oryza sativa
  Clone ID: PAT_MRT4530_81297C.1.pep
DLCQTSPGDRQRLLTSGNDPQAMVKSAPSTRYDGMQSNPSLRMQDNQHAPPENQEDLTPRANDQIYRGGPRSPRLQMLLFTSCTILCASHRRACTPSLGKLFWGTRQRGGNEQCLYCAKWSLGAGCHA

SEQ ID NO: 184291 - protein, 567 aa, Oryza sativa
  Clone ID: PAT_MRT4530_81298C.1.pep
MDGGAGDGGWSTLSYDADVLHIHQVCAHWRASTAPLAAARPWIVAGHETSRIVSAIGEDYSFWLPHGGGQRIIPCFGDAPPAGLPYCCGTPRGWLALADAPRSPTRLVLWEPVSRAEIAMPPLPRAGFAPQIFLSGDPLAAAASPGWMAIASQPFSVAGKWQTLFFWRPGDAAWTPQREPPMDRIDSAAFHGGFFYLTVRYWYLYAYDLRHDAGAPWPPPRVRSTFVYLDADRACELSRQGRSLRAAHVVAAADGVDLLLAVLYWECHRRSVQMVAKVFRMEWAAAAADLELSPVTDLGEHALLLGRGDALALSAAEFPAIRRNCVYFVEHDNAPHRHWAIAMDLGANASELIPHPQFQEDEPSEEDGKCAADRSLLPVKSALPVCQFGRMRKHQHLLLPISISMGWLRKQWILSLRISDVKAGFETMFRSAIPKRICFGGMKKKNAKGHPIISHATERCAAGVLQPAGHFKLGFYLNAMDFGVEAQHLSAIFHGVNVNGLDIDMVGRSAKAYGAELREYGDNGTCHELKLRLLEKGGRSMSSYGGDIGGFEVSQRLPSTGNPFATL

SEQ ID NO: 184292 - protein, 93 aa, Oryza sativa
  Clone ID: PAT_MRT4530_81299C.1.pep
MWMHEIGLGYTDIIIGVLICRMCDYLRRDLNPDLIFPCNNRPKAGDNGIFQYSIKPSRLGIEDDVHNQQRKSKRKIKENLDIMFLRHFALLQS

SEQ ID NO: 184293 - protein, 208 aa, Oryza sativa
  Clone ID: PAT_MRT4530_8129C.1.pep
TRPAASVQFKEMGGSSISRSRAIADAAKPPEQQNDRRKNFLDWRNLMKPMNEEKDHWVPDEAVTKCTACTADFSAFNRRHHCRNCGDIFCDKCTQGRTPLTTDADAQPVRVCDRCMAEVSQRLNNAREAANRPIVHSHEDLAKKLKDAMDINKKSSSASSRSTDGSSRRMREVACPTCTVHLQVQVPTSGSETIECGVCQQPFLVSAR

SEQ ID NO: 184294 - protein, 83 aa, Oryza sativa
  Clone ID: PAT_MRT4530_812C.1.pep
MLRTVMLKAERWTWRNLVVGGRRCRLGNQRWSRGGINGPRRAWWQHGQQSCYFYASRDDGREARVVPAPPSLASAGRWELVVH

SEQ ID NO: 184295 - protein, 554 aa, Oryza sativa
  Clone ID: PAT_MRT4530_81300C.1.pep
MEKDEIRRFDSFEAFEEICSLAEQNKVDFVLLGGDLFHENKPSRSTLVKTIEILRRYCLNDQPVKFQVVSDQTINFPNRFGQVNYEDPNFNVGLPVFTIHGNHDDPAGVDNLSAIDILSACNLVNYFGKMDLGGSGVGEIAVYPVLVKKGTTFVALYGLGNIRDERLNRMFQTPHAVQWMRPETQDGMSVSDWFNILVLHQNRIKTNPKSAINEHFLPRFLDFIVWGHEHECLIDPQEVPGMGFHITQPGSSVATSLIDGEAKPKHVLLLEIKGNQYRPTKIPLRSVRPFHYAEVVLKDEVDVDPNDQASVLEHLDKIVRNLIKKSSQPTASRPETKLPLIRIKVDYSGFSTINPQRFGQKYVGKVANPQDILIFSKSAKKRQTTGVGNIDDSEKLRPEELNQQTIEALVAENNLKMEILPVDDLDIALHDFVSKDDKMAFYACLQRNLEETRTKLNSEADKFKIEEEDIIVKVGECMQDTGGRSVTAQSNLNSFSDDEDTREMLLGARTTNAGRKASGFTRPSKDATDVAKTGTSRRGRGRGTASMKQTTLNF

SEQ ID NO: 184296 - protein, 79 aa, Oryza sativa
  Clone ID: PAT_MRT4530_81301C.1.pep
HEGSSIGGPKETKEKKNIVEVFPAKRSAKIKGRSLILSGPDGFHTTIKLLNCTVFAVSASSMPSRKWAIKGIEKPYLFL

SEQ ID NO: 184297 - protein, 553 aa, Oryza sativa
  Clone ID: PAT_MRT4530_81302C.1.pep
MSPPPLRLLLFLLLLHLPSSLSSRHHHHAPSPSKPAPASYAAPLAVLLACNATRFQPACVSTLSNASADASTPDLLAATLSALRARIPPAVSTARSVLAASSNVNLTNAATNCLTFLSLSTHRLSPPPSTSSPSLLSASTALLHLYDCWSAYKYVNFSRTISDAMAYLDDTIAVNSNYISMLAALQRYGDDTFRWAPPQTERDGYWPPAAAGSAADEDALGVPKGLPPNVTVCGAGCHYKTVGEAVAAAPDYGDEMFVVHVKEGVYKETVNVPLEKTNVVVVGDGMGKTVITGDLNADTPGVSTFNTATVGFTLPSVTTRLPQGVLADGFMARDLTISNTAGPDAHQAVAFRSTGDRTVLDTVELLGHQDTLYAHAMRQFYTRCRVSGTVDFVFGNSATVLRDTALIVLPRQLRPEKGENDAVTAQGRTDPAQPTGIVLRGCVVNGSDDYMALYREKPDVHHVYLGRPWKEYSRTVYVGCTLSEIVQPRGWMAWNGDFALKTLYYGEYESAGPGGDGASGSRIGWSSQVPRDHVDVYSVASFIQGDKWIPKIH

SEQ ID NO: 184298 - protein, 132 aa, Oryza sativa
  unsure (1)..(132): unsure at all Xaa locations
  Clone ID: PAT_MRT4530_81303C.1.pep
MGVGAPATKRWYFKEKTHPAYKETHLWPIRHKHTDWRAHKSGETAMEQDITAITTIRAHQSVTPPKERPGGGAHGSAEPPQTPLILAFHVYIPDEVPMMVEGILDISHSYNRYIEAINRAPLPHXSRHTTLS

SEQ ID NO: 184299 - protein, 156 aa, Oryza sativa
  Clone ID: PAT_MRT4530_81304C.1.pep
MAPRRPRFLQLNLFSVLFRLVETWWHKCGLEIVGHKCGKLSFKFEMCYWNEGLLDLLLPRATADFSLIMNISGMANSSLNIFLMFMIPNTMKGWLTILTLEGLPTCKIDLIDKKSTSHFQWLNALKSQESVLVSIICSLYVLCTFHTVFIKNLDKI

SEQ ID NO: 184300 - protein, 604 aa, Oryza sativa
  unsure (1)..(604): unsure at all Xaa locations
  Clone ID: PAT_MRT4530_81305C.1.pep
QTFSSFVEAQKFWNHYGGQIGFDVRKRCENTSKLDGKVTSLGFVCXQEGLRRKDKRDHLIKTPRVETRTGCKVRMGVTLNRVLGKYEIHDLVLEHNHIHQTPEPXHLMPSQXRITELQAFKIKIADSTGIQPRIAHELASHRVGGTANLGYTCRGHKNYLRTKRXRELKYGEAGSLLYYFHNXSVENHMFPYAIQLDSVEQITYIIXLMLKCLFDYAHFGDVVTFDTVFGTNQDIXHLNQGRSDNSNLLRDFTACMYXYESEEKFEDVFASIRSRIQKQTWLGSIYKLKKKWAKCHMKNLYTLGMRSTQLSESLNNDLKEYLNSELYIIRFFGHFERVVQAKREXKEIQSKCESRQRLPXIKMRTPMLLQASKXYTTQIFEAFQSXYERCMAAYTRPSSEGNTYIVRNXSLGEDFVLEDDIXVLSNSYERTVSYTCKLFERTGILCSHALKALVLMNIKQLPEQYVLGRWTQVAHPRAAKDANGKNVXEDPMLDVTRRYKFLSHRFLXASRTAGFEECFLLVDNVIDGLSTQASSSFAHVVGLKKRQTXTSGSKRKKNWLDKYHKNNQQRSEKNNPCKQTNEVCQLLNQQIDDTSCLLEDKSNS

SEQ ID NO: 184301 - protein, 328 aa, Oryza sativa
  Clone ID: PAT_MRT4530_81306C.1.pep
MEKEVEEEEEEEEAEASRKKGERGLGEGECGAPSSKKRDPELELRMKQKAAEWHRKAREETLKEIAKEMAKYPNEDWSDTPGVKAREYREDWEYRCILIVIHWEYIGIDWIGFFRVDHYFVRIALSTDRYLLLTGPTRAVVVSDPVYFEAPLKVKGSVESEDKDLSFLAVPLTGASDRGETRLVNREYTSRLSTLELTFGFVVESLEASISVRIIDGSWKDGFRGAFTAHTPSLKDNKVLLLDSGYCEMVPVTADRMIKLSRHVVSVEGEGDLTVSVLALGTDNVIEDEKDFTPKEAGMSQSSLDVGFCKLEVTVNWSLLSLLPDGYT

SEQ ID NO: 184302 - protein, 139 aa, Oryza sativa
  Clone ID: PAT_MRT4530_81307C.1.pep
KKLSKCHTEDKDSSMNFCHQQYPQHLFSQPPYAMNFPFPPFPHYPPYTQNLQYAVPPQYAPYTLPPPAGAMPSTFLPAPVIPSKAPSDQGTPRSITGPGEQGTDNAEPEKATKRLYWTEQEDIRLISAWLIYYQTDRYW

SEQ ID NO: 184303 - protein, 121 aa, Oryza sativa
  Clone ID: PAT_MRT4530_81308C.1.pep
LGGIFFTPSNFKGFFFTVPHKRGNWPKFWLSLPDFLGFWPQKIFPGGANFWGGAPLQKKFFFRPGPPVFFLRAWGGGPGVLFFPWPNFYFFWPRKPPPNPNSSIWPCFRPNFFFSPFFNPG

SEQ ID NO: 184304 - protein, 122 aa, Oryza sativa
  Clone ID: PAT_MRT4530_81309C.1.pep
MSSDPLKYTPAVSVALAIVFVVINVGIATIKLMRGQIPMPKLFPDVHDWSSTWRLHTAAPVLVSCDRLHLPLQRFFDFLLFGEATLDDMLVFPIVFHALRFNMDGLLFPSARPLSCEAATTG

SEQ ID NO: 184305 - protein, 40 aa, Oryza sativa
  Clone ID: PAT_MRT4530_8130C.1.pep
WWRLHRPPPASEHLYAGHRQSLTLQPRGKIKRVGDPESGR

SEQ ID NO: 184306 - protein, 1125 aa, Oryza sativa
  Clone ID: PAT_MRT4530_81310C.1.pep
MACYISYGHEIKLDGRQTIAATSPSADARDESTLVQQMLSSQMEKAEQRQYHELFETMFVVKDRACRVIIDSESCNNFVSSDLVEELELSIQLHPHPYYIKWFNSCDDLERLKNRINETFRDIWNDTNIAMPLTKYELLPNQRIVVPIALNTNILQASEKNQGNEEEKKDEEEKNLSIASCMLEECLIDQAPTISEDEKNGKDNGATTAQEDHMRISNSLSSSSSCLNELHVSLQEGECGGFSTTKISGSNHMAIEKCSSPDVETDNDKFNTLYDKVKLRTVSNQEGENDEDTTSSNITMTTLRINQPKRLAFLGRGRSSGRRHGHRCTWEIKEASPCRGDQMGRTSISFIVHTGCTTGGSSRKSGGERICSSIYLLDRDSLKFIDLEESLLIHGYQKGDGVYYLKPSYVPPQGLVQILNDEQIKMMLDDHKTETECSLYFFARPRELVTDNGSTSRFVSPSSIPLIGHHNSVPGDFDKDDLILHEEYVQQQLREKKKGKEPVIGKEPVMFFQGDSDTEDLYGTNQVDVEVNQAEPHRGKTTQEKELVGKKTNKRKEKDIGQSAEVDYLSDEPNDDTIDFNDEAPIYVHRSRGIEDIIFYESTLRRPHMQVGMLFSNVDLFRAALKNMIINMGREVFKGKNDRNQVSVKCKADNCPWYIYASKLPGEDTFKIKKYVSKHSCGKSHNIAQLDWRWLTNEYMEFFRSDKKWDAHAFQDCVRRDTNVEVSISKAYRARREAYKKVMGDHDLQFKRIQDYAHAVLSANPGSKVFVKCEVSPEPEIRPRFQRLFLSFDAQITGFLGGCRPFIGIDGCHIKLNNGSQILAAQGRDANNNLFPIAFAVVESECTESWTWFLLCLEKAIGKGEEFGGWVFMSDRQKANNLRAWEWLSKVPTKHWCRYMFSSRAKTDLLLNNISETYNSKILGARDEPIITMVEHIRTKMKGDFNNKREGAERDNWQIPPNILKKLEAEKNEARYCKSVYSSSVPFMQRPESYVDDILTKDAYARTYCGMIYPVPDETQWEKTPFPDVDPPVARTQPGRPKTKRTRASDEPRVQGRSVAKTTIRCSVCKEFGHNSRKHGKDNQSSSSQNRHVVLPVWLAELKADGDARTFAAKVARGNSIHGLR

SEQ ID NO: 184307 - protein, 1127 aa, Oryza sativa
  Clone ID: PAT_MRT4530_81311C.1.pep
MACYISYGHEIKLDGRQTIAATSPSADARDESTLVQQMLSSQMEKAEQRQYHELFETMFVVKDRACRVIIDSESCNNFVSSDLVEELELSIQLHPHPYYIKWFNSCDDLERLKNRINETFRDIWNDTNIAMPLTKYELLPNQRIVVPIALNTNILQASEKNQGNEEEKKDEEEKNLSIASCMLEECLIDQAPTISEDEKNGKDNGATTAQEDHMRISNSLSSSSSCLNELHVSLQEGECGGFSTTKISGSNHMAIEKCSSPDVETDNDKFNTLYDKRLAFLGRGRSSGRRHGHRCTWEIKEASPCRGDQMGRTSISFIVHTGCTTGGSSRKSGGERICSSIYLLDRDSLKFIDLEESLLIHGYQKGDGVYYLKPSYVPPQGLVQILNDEQIKMMLDDHKTETECSLYFFARPRELVTDNGSTSRFVSPSSIPLIGHHNSVPGDFDKDDLILHEEYVQQQLREKKKGKEPVIGKEPVMFFQGDSDTEDLYGTNQVDVEVNQAEPHRGKTTQEKELVGKKTNKRKEKDIGQSAEVDYLSDEPNDDTIDFNDEAPIYVHRSRGIEDIIFYESTLRRPHMQVGMLFSNVDLFRAALKNMIINMGREVFKGKNDRNQVSVKCKADNCPWYIYASKLPGEDTFKIKKYVSKHSCGKSHNIAQLDWRWLTNEYMEFFRSDKKWDAHAFQDCVRRDTNVEVSISKAYRARREAYKKVMGDHDLQFKRIQDYAHAVLSANPGSKVFVKCEVSPEPEIRPRFQRLFLSFDAQITGFLGGCRPFIGIDGCHIKLNNGSQILAAQGRDANNNLFPIAFAVVESECTESWTWFLLCLEKAIGKGEEFGALGIHANNLRAWEWLSKVPTKHWCRYMFSSRAKTDLLLNNISETYNSKILGARDEPIITMVEHIRTKMKGDFNNKREGAERDNWQIPPNILKKLEAEKNEARYCKSVCAGRGIWQVSPFGNQYVVDLNKHTCGCRKWDLTGIPCLHAVSAIQGFMQRPESYVDDILTKDAYARTYCGMIYPVPDETQWEKTPFPDVDPPVARTQPGRPKTKRTRASDEPRVQGRSVAKTTIRCSVCKEFGHNSRKHGKDNQSSSSQNRHVVLPVWLAELKADGDARTFAAKVARGNSIHGLR

SEQ ID NO: 184308 - protein, 100 aa, Oryza sativa
  unsure (1)..(100): unsure at all Xaa locations
  Clone ID: PAT_MRT4530_81312C.1.pep
EAPKEKEAKPVXLGPQGSXPRPSKCSTYFLALLXSWAPQLEINKVRVAXRLSIRGRPLAVFGREKKFLALLMTREVTMCVVVAKLWYDKSFILVAVVISW

SEQ ID NO: 184309 - protein, 1169 aa, Oryza sativa
  Clone ID: PAT_MRT4530_81313C.1.pep
MALPATMKVLSLVLGLILVMLAAVLTDASIELLVQFSRAVGATSYGEAMGDAFDPLKYTPAVSVALAIVFVVINVGIATIKLMRGQIPMPKLFPDVHDWSSTWRLHTAAPVLVSCDRLHLPLQRAHNSQRAQGPLPDQANSAGVTAALLGRVHHHQLLRLPPLRRGDAGRHARLPHRVPRAAIQHGRPPLPLSEAPLLRGCDNRRFGAITAALLTVIFLAANFDPNIWDAFQFTGSSCMGDDVDCGGGGDSCLAAMGRTSISFIVHTGCTTSGSPRKSGGERNCSSIYLLDRDSLKFIDLEESLLIHGYQKGDGVYYLKPSYVPPQGLVLILNDEKIKMMLDDHKTETECSLYIFARPQELVTDNGSTSRFVSPSSIPLIGHHNSVPGDFDKDDLTLHEEYVQQQLREKKKGKEPAIGKEPVMFFQGDSDTEDLYGTSQIDAEVNQAEPHPGKTTQEKELVGKKTNKRKEKDIGQSAEVDYLSDEPNDDTIDFNDEAPIYVHRSRGIEDIIFDESTLRRPHMQVGMLFSNVDLFRAALKNMIINEGREVFKGKNDRNQVSVKCKADNCPWYIYASKLPGEDTFKIKKYVSKHSCGKSHNIAQLDWRWLTNEYMEFFRSEKKWDAHAFQDCVRRDTNIEVSISKAYRARREAYKKVMGDHDLQFKRIQDYAHAVLSANPGSNVFVKCEVSPEPEIRPRFQRLFLSFDAQITGFLGGCRPFIGIDGCDIKLNNGSQILAAQGRDANNNLFPIAFVVVESECTKSWTWFLLCLEKAIGKGEEFGGWVFMSDRQKGLRKAVAEVFPGAEHHYCLRHLHANFSQAGFRGEYLKGLMERAAYAYRQSEFNAAMQELKVNNLRAWEWLSKVPTKHWCRYMFSSRAKTDLLLNNISETYNSKILGARDEPIITMVEHIRTKMMGDFNNKREGVERDNWQIPPNILKKLEAEKREARYCKSVCAGRGIWQVSAFGNQYVVDLNKHTCGCRKWDLTGIPCLHVVSAIQGFKQRPESYVDDILTKDAYARTYCGMIYPVPDETQWEKTPFPDVDPPVARTQPGRPKTKRTRASDEPRVQGRSVAKTTIRCSVCKEFGHNSRKHGKDNQSSSSQNCKTQITRRKKRSNSQPISSSSRDDIPTTSTQPPVYMDNAFGVGLYHHVPDGPYIGPTGRKLQIRRN

SEQ ID NO: 184310 - protein, 114 aa, Oryza sativa
  Clone ID: PAT_MRT4530_81314C.1.pep
GLPPMVPPPHPFGFLQNFLAKTPYTEPPKGDPKMGPFLKNKKPGVGLFFFFPFKTFIFKFLTSSQEKSSYNLLEKFFHTCHWLRVGNPFPPQNDFPLLNPPPSPKLPPRFFPKG

SEQ ID NO: 184311 - protein, 363 aa, Oryza sativa
  Clone ID: PAT_MRT4530_81315C.1.pep
MDGSRLAPARRDAGGFPGHERRGEEPRASFSGAVFNLSTTIIGAGIMALPATMKVLSLVPGLILVMLAAVLTDASIELLVWFSRAVGATSYGEAMGDAFDPLKYTPAVSVALAVVFVVITVGIATIKLMKGQIPMPKLFPDVHDWSSTWRLPTAAPVLVSLHTIHNELKDHSLIRPIVRASLLLGLVVYTTTSFFGFLLFGEATLDDMLVFPIVFRALRFNMDGLLFPSARPFSCDNRRFGAITAELLTVIFLAANFVPNIWDAFQFTGSSCTGDDVDCGGGGDSCLTAVILVAAAVSPMRPRSSSASSTPVAGKKEKTATRWCSQSTAPRCEKAAAGHGMPPPAPPARHHQRPTLSGPSLAT

SEQ ID NO: 184312 - protein, 448 aa, Oryza sativa
  Clone ID: PAT_MRT4530_81316C.1.pep
MVMPMPTEGSEPLLPRKQRDGGDDGAASSHDHFDGASFSGAVFNLSTTIVGAGIMALPATMKVLGLVPGLILVMLAAVLTDASIELLVRFSRAVGATSYGEAMGDAFGAFGRGLLQLCVVVNNVGVMVVYMIIIGDVLSGKSSSGGVHHHGVIEGWFGPNRWNGRFSILVIVTLGVFTPLTCFKRVDSLKYTSALSVALAVVFVVITAGITTIKLMRGQIPMPKLFPDVHDWSSTWRLFTAAPVLVTAYICHYNVHPIHNELKDHSQIRPIVRASLLLCLAVYTTTSFFGFLLFGEATLDDVLANFDSDLGIPYSLVLDDAVRVSYVLHLMLVFPIVFHALRFNMDGLLFPSARPLSSDNRRFGAITAALLTVIFLAANFVPNIWDAFQFTGATAAVAIAYIFPAGMALRDRHGIATKGDKYLAVFMIVLALVANGVAVYSDACLGTF

SEQ ID NO: 184313 - protein, 819 aa, Oryza sativa
  Clone ID: PAT_MRT4530_81317C.1.pep
MGRTSISFIVHTGCTTGGSPRKSGGERNCSSIYLLDRDSLKFIDLEESLLIHGYQKGDGVYYLKPSYVPPQGLVLILNDEQIKMMLDDHKTETECSLYIFARPQELVTDNGSTSRFLSPSSIPLIGHHNSVPGDFDKDDLTLHEEYVQQQLREKKKGKEPAIGKEPVMFFQGDSDTEDLYGTSQIDAEVNQAEPHPGKTTQEKELVGKKTNKRKVKDIGQSAEVDYLSDEPNDDTIDFNDEAPIYVHRSRGIEDIIFYESTLRRPHMQVGMLFSNVDLFRAALKNMIINEGREVFKGKNDRNQVSVKCKADNCPWYIYASKLPGEDTFKIKKSDKKWDAHAFQDCVRRDTNVEVSISKAYRARREAYKKVMGDHDLQFKRIQDYAHAVLSANPGSGCRPFIGIDGCHIKPNNGSQILTAQGRDANNNLFPIAFAVVESECTESWTWFLLCLEKAIGKGEEFGGWVFMSDRQKGLLKAVAEVFPGAEHRYCLRHLHANFSQAGFRGEYLKGLMERAAYAYRQSEFNAAMQELKVNNLSAWEWLSKVPTKHWCRYMFSSRAKTDLLLNNISETYNSKILGARDEPIITMVEHIRIKMMGDFNNKREGAKRDNWQIPPNILKKLEAEKSEARYCKSVCAGRGIWQVSAFGNQYVVDLNKHTCGCRKWDLTGIPCLHAVSAIQGFKQRPESYVDDILTKDAYARTYCGMIYPVPDETQWEKTPFPDVDPPVARTQPGRPKTKRTRASDEPRVQGRSVAKTTIRCSVCKEFGHNSRKHGKDNHSSSSQNMGLISVLLEESCKLEENDLLFLCSGIIYIKILSYN

SEQ ID NO: 184314 - protein, 159 aa, Oryza sativa
  unsure (1)..(159): unsure at all Xaa locations
  Clone ID: PAT_MRT4530_81318C.1.pep
ARRQLSVETXDDKKHPPRTMSGGMHVSLSAILAEELSSCSCPHPFPHPPPCPPPPALVCLLNLPDFGRSAKIVDEEAVTQTGTRRQQTQPRHEFGSARLIGNRRTENRSRRKKRKTRVTRRAKRAPRPSSATAAAPLTSGRLGAGVARVRGPSAAPHRA

SEQ ID NO: 184315 - protein, 47 aa, Oryza sativa
  Clone ID: PAT_MRT4530_81319C.1.pep
REAHCPPDLAEQYYQKLQGNDMKAFKSFYESLVMKIRQQQNGSLVFR

SEQ ID NO: 184316 - protein, 44 aa, Oryza sativa
  Clone ID: PAT_MRT4530_8131C.1.pep
FLFFWVFLQNCIHFLFKQIGLFLKAIGLQFQDMYIRNPSPGKQT

SEQ ID NO: 184317 - protein, 46 aa, Oryza sativa
  Clone ID: PAT_MRT4530_81320C.1.pep
HWRHLNNHGLVLTRYSTCFRAYVFFSSPVQRELVAQIKKDSNVRAR

SEQ ID NO: 184318 - protein, 986 aa, Oryza sativa
  Clone ID: PAT_MRT4530_81321C.1.pep
MDDLEQAILLASDSPAAAAASPAVRAEALAYCARARDETPPSSLLHLCLYGLASSPHAHVHFWCLQTIHDALLLRRRLALPDDLALLRSSLLSLAVSSNAASPPFLRNKLAQLLALLVRFEYPHVYPSYFLDLIPPSPPLPGPTDMFARVLVSLDDDLLSQDYPRNAEEASDAGRVKDAMRAQCVPQIARHWHEAAVSLRAADPAVAAVALDAARRCISWIDVSLVANDVFVPLLFDIALSPGSVAPLAAAAVGCLSAVAAKRMDARAKVALLRSLMSAQKGFGSPDSGLKMAHLVTAYAVEALECYRKLGSSDADGAAALEMLEEVLPAVFAAAESGDDDEVDSGSVLEFLSGYVSTMKAPTEKQLGHLGQILEVVRMQMSYDPVYRGHLDVLDKIGKEEEDLMAEQRKDLIALFRSICRVAPGATQLFIRGLLVTALSSAEVSVEDVEVALTLFYRLGEIVGEEEIRTGAGLIRELVPMLLSARFSCHTHRLVALVYLDTISRYIKFMQENDQYVPHLLTVFLDERGIHHQNAHVSCHAGYLLMRAIRLLKAKLVPYLDTILQSLQDALVQFTATDWANKDIKFSSSEDGSQIFEAVGLLIGIEEVSPDKQVQCLTALLNPLCQQIESLVMDAKAQGLEESSPRAIGLQQIIVALTMISKGFNERLVMGSRPTLGVMFKKTLDVVLQVLISFPNVKPLRSKIISFLHRMVEILGISVLPCIPIALRQLLVDNEAKDMSEFLYLINQIICKFKSSANALLEDVFPAIASHLSVILSHDAFSNGFASNTEEMRELQELEKRFYAFLLHIATHDLSTVLLTPSCRHYLENIMQLLLITSCSHKEISHRKTCVQTFVNLIKDWCSSSEIEDKLPGFRVFMIEKFATGCCLQSVLDKSFNFRDGISIALFGEIMMAQKVMYERFGENFVVNFVTKLREAHCPPDLAEQYYQKLQGSCIIYVHKALPFLRSEDVYCGNIFTEPGYRGKVP

SEQ ID NO: 184319 - protein, 132 aa, Oryza sativa
  Clone ID: PAT_MRT4530_81322C.1.pep
MPIWLIYVARLLQEMRELQELEKRFYAFLLHIATHDLSTVLLTPSCRHYLENIMQLLLITSCSHKEISHRKTCVQTFVNLIKDWCSSSEIEDKLPGFRVFMIEKFATGCCLQSVLDKSFNFRDGISLANGMQ

SEQ ID NO: 184320 - protein, 112 aa, Oryza sativa
  Clone ID: PAT_MRT4530_81323C.1.pep
GFNERLVMGSRPTLGVMFKKTLDVVLQVLISFPNVKPLRSKIISFLHRMVEILRISVLPCIPIALRQVLVDNEVFHVPVSWLLGLQAIAISNSNCSTCVPFFGNCPVLAVFL

SEQ ID NO: 184321 - protein, 175 aa, Oryza sativa
  Clone ID: PAT_MRT4530_81324C.1.pep
MAWVSMTWCWHRSFLLMMACVCSWSITCCKSDEAAAGAFHGQKRSTEDIVARAIICFSDRYIFSGCQGQYRLGPEGALRVPAAAAEAFCGGPCLAETRLVLGCVDGIMDSFRFYNGASVRDVRLALDRGCGLRGDFDVLRRLGGDGYDYGGGPRGLVTTPAPLLLGAVVAVLLWG

SEQ ID NO: 184322 - protein, 142 aa, Oryza sativa
  unsure (1)..(142): unsure at all Xaa locations
  Clone ID: PAT_MRT4530_81325C.1.pep
PGELGHRDPAPVVGAGGEANAVAEHDSLSQLHPLRHLLPPFPFFSFAGCRGRQDPAPVVGADGEADAAAEHDSLPQLPATAAAAVAATXSPPRASSASLAEVGRGDQRWCGQEEKPTSCRPWRRIKYRNLLSCHQTSFSSSP

SEQ ID NO: 184323 - protein, 56 aa, Oryza sativa
  Clone ID: PAT_MRT4530_81326C.1.pep
CTPKLRTTNIEVLMAATPEDFAASKRAMDYVLGKHVNLEPNTICTSWKEERETAPL

SEQ ID NO: 184324 - protein, 59 aa, Oryza sativa
  Clone ID: PAT_MRT4530_81327C.1.pep
LAPGDAACGNNGEQQSQRERRRGGHRRKIDAGGWFIRCARWCMPARRTHTQIISLVETR

SEQ ID NO: 184325 - protein, 558 aa, Oryza sativa
  Clone ID: PAT_MRT4530_81328C.1.pep
MPRKIWVSPTMLRAVADEDLGVTDEVARDTEEDLGVTDADEVSRAPRAMPTRIWVSPTRLPAVADKDLGVADADELKVFLRCTDLMAVASRLAVARVAPDGGAAGRRRRRRGRPVVAVPTAAGRGRGRGGAVAASPPTEEAVQMTEPLTKEDLMAYLVSGCKPKENWRIGTEHEKFGFEVDTLRPIKYDQIRDILNGLAERFDWDKIVEENNVIGLKQGKQSISLEPGGQFELSGAPLETLHQTCAEVNSHLYQVKAVGEEMGIGFLGIGFQPKWALSDIPIMPKGRYEIMRNYMPKVGSLGLDMMFRTCTVQIATAIFANSPFKEGKPNGYLSLRSHIWTDTDNNRSGMLPFVFDDSFGFERYVDYALDVPMYFVYRNKKYIDCTGMSFRDFMVGKLPQAPGELPTLNDWENHLTTIFPEVRLKRYLEMRGADGGPWRRLCALPAFWVGLLYDEESLQSISDMTSDWTNEEREMLRRKVPVTGLKTPFRDGYVRDLAEEILQLSKNGLERRGYKEVGFLREVDAVISSGVTPAERLLNLYETKWQRSVDPVFQELLY

SEQ ID NO: 184326 - protein, 803 aa, Oryza sativa
  unsure (1)..(803): unsure at all Xaa locations
  Clone ID: PAT_MRT4530_81329C.1.pep
MAVASRLAVARVAPDGGAAGRRRRRGRPVVAVPTAGRGRGGAVAASPPTEEAVQMTEPLTKEDLVAYLVSGCKPKENWRIGTEHEKFGFEVDTLRPIKYDQIRDILNGLAERFDWDKIVEENNVIGLKQGKQSISLEPGGQFELSGAPLETLHQTCAEVNSHLYQVKAVGEEMGIGFLGIGFQPKWALSDIPIMPKGRYEIMRNYMPKVGSLGLDMMFRTCTVQIATAIFANSPFKEGKPNGYLSLRSHIWTDTDNNRSGMLPFVFDDSFGFERYVDYALDIPMYFVYRNKKYIDCTGMSFRDFMVGKLPQAPGELPTLNDWENHLTTIFPEVRLKRYLEMRGXADGGPWRXRLCALPAXFWVGLLYDEESLQSISDMTSDWTNEEREMLRRKVPVTGLKTPFRDGYVRDLAEEILQLSKNGLERRGYKEVGFLREVDAVISSAGITDNEIGHTDPDWVAAVSAQAATLVHASNVQYTVPQVALAKRLVEASFADRVFFANTGTEANEAAIKFARKFQRVARPDGDAPTEFMSFTNCFHGRTMGSLALTSKVQYREPFAPVMPGATFAEYGNLEEAKKVIQSGKIAAVFVEPVQGEGGIHSATKEFLQGLRDACDEAGALLVFDEVQCGLGRTGYLWAYEAYGVLPDIMTLAKPLAGGLPIGVVLVTEKVASAINFGDHGTTFGGGPLVCQAALTTLDKIQKPGFLAEVAKKGENFKQLLSTKLSGNAHVKEIRGIGLIVGIELDVPAGPLVDACLDRGVIVLTAGKGNVVRLVPPLIISEKELEQAAEVIRDCLPALDASTS

SEQ ID NO: 184327 - protein, 101 aa, Oryza sativa
  Clone ID: PAT_MRT4530_8132C.1.pep
LGRPTQHGPRPAMPRLRLVGPARPDRHGRAVPRAAYTAQARPNTTRAVPGRPEGTMAHRRSTVPRVQPRHDPAVEPGRYGHDPSQAVPCLGRAKIVCFRPG

SEQ ID NO: 184328 - protein, 69 aa, Oryza sativa
  Clone ID: PAT_MRT4530_81330C.1.pep
VSAPWCFSVGPTFRVLLLVWSSQSQGLSKKVSLGIYLWPVGCYHSNICLKRSINAVQAFVLVLPRVFIV

SEQ ID NO: 184329 - protein, 147 aa, Oryza sativa
  Clone ID: PAT_MRT4530_81331C.1.pep
MAEEEEKKAITGSAATAAAPPPAAAQQKKPCAAAAKKKKVRMPDNYVASILTLKRNPRRSPEYMESLSPEEREGEVEDAELGDEFEAFQEEVRRAVENDGCYMVGESYFAETAAIQAAMEEEWTKIDMSRVIFGDWDYDDPESVQYL

SEQ ID NO: 184330 - protein, 83 aa, Oryza sativa
  Clone ID: PAT_MRT4530_81332C.1.pep
KKKKKNPVSTYSLICASQLPFKKKKKKIRSQHIRSSVLVSLPSKKKKKNPSQHIPHLLSLPFKNPFSTYSAHLLSASLQKKKK

SEQ ID NO: 184331 - protein, 369 aa, Oryza sativa
  Clone ID: PAT_MRT4530_81333C.1.pep
MAAASRPPHGRLSRGHLAPPPDRLPHGRRHPSTARAPAVRPATSVAAARPAAERRRIGGGGEGNRRRGEGGGRGDEGEEAVPVFIASGTIVEFGRPTKDGFSTSVKMKQANVKYLKIHICMYFLRFIRWHGETLRESLKRREHFLALQLGLKKGMKVLDVGCGIGGPLRKLPDSASVTGLNNNDYQISRGQELNFSVGLSETCNYVKGDFMNMPIPDCTFDAAYALDATCHAPDAVILAKDMAEESPLPWYQPLDPSQLSLTHFQFTRIGRFLGQTLVSKQFITQTEATEFLACSWERLYSTIDFFLPAKNPQLKWLEFLHLAPEGSLRICRFLATSVDSLVKGGKEGIFTPLFFVLARKPLQKQEEQI

SEQ ID NO: 184332 - protein, 151 aa, Oryza sativa
  Clone ID: PAT_MRT4530_81334C.1.pep
MARWCSICWFWRRVAANPAAAAACGFELACAGGVDTARHGAAAAHTGMGESAGWHLAEEELETAATSSVGEAVTKNGRKPCSIAVVYFGSHNMEVTDNASPVARDPVRRRATCLRPLSLLPNGSLLIAYTCNDDMNDDMLGPVVFKSGRLT

SEQ ID NO: 184333 - protein, 101 aa, Oryza sativa
  unsure (1)..(101): unsure at all Xaa locations
  Clone ID: PAT_MRT4530_81335C.1.pep
SXRRVETPLASRSRAWPKRACSEFYLLLLPGRTRSISRNGTPVLLVAGFDGLGASGAADQGRLRCSMAVADDNHRLALLMPYRAGHCVGSLQHPSSGAEPA

SEQ ID NO: 184334 - protein, 83 aa, Oryza sativa
  unsure (1)..(83): unsure at all Xaa locations
  Clone ID: PAT_MRT4530_81336C.1.pep
YHRALLKRTHPTXQTLLNYSAATCMHSTLLLRVVVVYLSARQGKERSLPLNSRLSSCIYEHALFASTLLRSHLAHLLDSTTWV

SEQ ID NO: 184335 - protein, 249 aa, Oryza sativa
  Clone ID: PAT_MRT4530_81337C.1.pep
GGSRRGSSPAAFSAAAAAAATRRGNGNDRRPRLDRSMTGAARPLRGLQFLNSSAVTNGWPEVEKRFERLAVDGFLLRSRFGQCIGMVGSEEFAVQIFYSLARRRGITAQLLTKDQLREFWEQLSDPGFDAKLQTFFDMVDKNADGQITEEELKEVLTLTASANKLSKILERVDEYTALIMEELDPDQLGYIDISNLESLLLLPPSQAPSKLVTHSSNISQLISQKLVPTHDRNPLRRGLLRLFYFMEDN

SEQ ID NO: 184336 - protein, 216 aa, Oryza sativa
  Clone ID: PAT_MRT4530_81338C.1.pep
MNHPSSAATATVLLLLALLGVAAGGGEDGQKRAAGVYIVIVQPPADGADTVAYHTCILAAALGSEERAKEALLYSYRAVASGFAAKLTPPELSALQKERAKAQGDPLGNSEVNVRLGSVVALAHSFADDALHSSECLTLPRRPRKITHDVAIVANATRGDKLITFKNIIYKILLATKKKKKKKKKKKKKKKKKKKKKKKKKKNRNRKRSLHVALMA

SEQ ID NO: 184337 - protein, 100 aa, Oryza sativa
  unsure (1)..(100): unsure at all Xaa locations
  Clone ID: PAT_MRT4530_81339C.1.pep
MFGAGKVDDEMALKRQRTVRFYDEKAKPTIPTHQKQAGFAASKLGVASSGKNKIFVPGEELWYKRILDPSSDFILTWNHIFXISCFVALFIDPLYFYVPK

SEQ ID NO: 184338 - protein, 139 aa, Oryza sativa
  unsure (1)..(139): unsure at all Xaa locations
  Clone ID: PAT_MRT4530_8133C.1.pep
KYRWSTGPPDTARPTPSHAXAEASRASTARPTRPCRATGGIHGPGTTQYHSGRAGXPEGTMAHRASSCYLSLFCIPIFFYLIGXVPGRSTVPRVQPRHDPAVEPGRYGHDPSQAVPCLGRAKIVCFRPGRGPRAIWPSI

SEQ ID NO: 184339 - protein, 65 aa, Oryza sativa
  Clone ID: PAT_MRT4530_81340C.1.pep
SSACLVSFAFAIIIRSDPTNQFGRPDRRNEPQLRVSDSPDSSPALTKLIYGGARARRLRRRRGLC

SEQ ID NO: 184340 - protein, 82 aa, Oryza sativa
  unsure (1)..(82): unsure at all Xaa locations
  Clone ID: PAT_MRT4530_81341C.1.pep
SKRQQCPEEHSHRGGPPPPHCKSKMVQMLKKKPGIPMRASYNLMPXKSKXKHQKKKKKKKKKKKPKTKPRGCFRGXKKTYAC

SEQ ID NO: 184341 - protein, 148 aa, Oryza sativa
  Clone ID: PAT_MRT4530_81342C.1.pep
ISVESCKILSAGCINPPHPGLPLDHHPHPAAASIVDSASPVRSPHPRRQSVAYATSRNWIRSSPSISTTVPFAPHRKLPASPLIVAGCCRRVMQYSPVSPPSAAPEAARQSSDRRWMLSAGDAVLTRLPSITEGHSHQQKVHLAASLI

SEQ ID NO: 184342 - protein, 177 aa, Oryza sativa
  Clone ID: PAT_MRT4530_81343C.1.pep
MAPHPLLRGGARRGRKYAHGMHPAQMEALRAMCGALIPSLPVDADGGDGGRRPGDKDLERFYLASAADSSIPDEVAELLVTRCIWEAVALTWVVLWALSTRAGTLLLCGRDSVAAVDGGGFPFVSVRRFADMPAARREAALWRWSGARWLFFPLRIAFAIAKILCHYVFYSMILVSA

SEQ ID NO: 184343 - protein, 111 aa, Oryza sativa
  Clone ID: PAT_MRT4530_81344C.1.pep
MPSLRPILLAAAAAVAVVSLWPAARVVADIDPSSGMPSPPATTSPFPFCPTTPAGISTQPFPWAEPSPTTTTTMFPQDPGFLASAACHARTAALAWIPVVFVFSAFLVFLQ

SEQ ID NO: 184344 - protein, 202 aa, Oryza sativa
  Clone ID: PAT_MRT4530_81345C.1.pep
HNATSEVIPLPAVTPSPQEINNSKDSERSKEDSTTVVINDRKVNLMDSESGSLYALCRSWVRNGVPHESQFLQPSFGTGAPILPRPLPASVVDSRISEKDNDAEKENSEEEKHFSYANSSYSITLSYILSRQFWIILAFSDFWHNETGEYTASDLLKQHVKRAKKIRAGLQKERLRRIERYKQRLALLLPPPSELGKHDGHS

SEQ ID NO: 184345 - protein, 75 aa, Oryza sativa
  Clone ID: PAT_MRT4530_81346C.1.pep
MAPLDAGFGVDVQDCIPMMKSGVRKSSEEFGVSRLRDIIIWGYMLRMIGGPLMVTAQYGNSAVRGGFSKYQEGIG

SEQ ID NO: 184346 - protein, 59 aa, Oryza sativa
  Clone ID: PAT_MRT4530_81347C.1.pep
IGVLDELDPEFLLFVALQSKEFRISSLRWCHPIYLQLIFPACSISYQFIFLKQANNSQL

SEQ ID NO: 184347 - protein, 152 aa, Oryza sativa
  Clone ID: PAT_MRT4530_81348C.1.pep
NSTFLLSADTLEGCPRSCGNLSFNYPFGIGSGCFRNPDFNLTCDNTAQPPRLFLQGGTTEVVDDIDPITYGTPYFMSVDVDFSQVISMRPGANTYNMSWPAPGRSFALDYAFLNITGCDFDIYPDEKRPIPHRRNPIHDGGIGSNHPSSLWQ

SEQ ID NO: 184348 - protein, 956 aa, Oryza sativa
  Clone ID: PAT_MRT4530_81349C.1.pep
MRSARPVRPGARPVRPPTHLRSDRPGSSAEGSVDAVRDGPLEITTSTSTDTKRGSTSEVAAPLHIQRRHPPEQIIGNIGERTTRSKEEVYVKQPPGFENPNFPNHVFKLSKALYGLKQAPRAWEFEMSIMGEFSYFLGLQIKQTPQGFGGLTGNSPAVRPAALWRSDRREHGGQTGGSDSERQAISAVRPAVLHILLDPAGLRDHRFQKHLVASAFLVAVYSDNMLRKMVVSCSGELLSGQSVQICLVPALHQPARQCRDNPSGPPPATVLPSTRPTAACHLLPPIATAAAVVAGPAVAAPAEADGAVILVGGRAAARKMSPRKKCAGKKSSLRLTSSEVPLKALDMSWVPQGKPSKPTKPKEKVDDWGESDEVEYVGVDDEKEKYNDLVSDDEAVDADYDPGSDEDQDDLAVDDEEGCESVAHIKKLPYAHNCASTAGLENNCMATNSWVRDRVINKLRQEPTLGATALKKFLEEKYKINISYYVVWDGRQMALDEILGKWEDSFDAAYNFKAELERTSPGSIVEVDHVTVDGKNHFSKMFVALKPCVDGFLNGCRPYLGIDSTVLTGKWRGQLASAIGIDGHNWMFPVAYGVFESESTDNWAWFMDKLHSAIGSPEGLVLSTDAGKGIDTAVTRVFTNGVEHRECMRHLVKNFQKRFSGEVFERNLWPASRAYRQDIFESHYNEMKEACPKATEWIDNFHKHIWTRCQFSTLSKCDYVTNNIAETFNSWIRHEKSLPVVDLMDKIRQMIMERMSVRKRLAVKLTGTILPSVMKSLYARSRDLGYKLYSAHSHLGEIGGTVISRRGLELEQFVDDCYSVATFKKAYAGHVVPMTDKSQWAKINVGFKLYPPLLKRSAGRPRSRRIKGMEEGGSGKRKYRCKRCGQFGHIKKTCNEPVADPSAPPPAPPKPKRKRVKKVVLSVQDPVIQVPTATVHTFKITSIWGNSNKPNNKEQG

SEQ ID NO: 184349 - protein, 486 aa, Oryza sativa
  Clone ID: PAT_MRT4530_8134C.1.pep
MELAAEGQAEICIETLLTNLTACWERSRTGSNRPECKIPLLCPPQRPAAVCIGPNHHNPFYHLMEQEKKVMLYGILILVDEQHKAAVLRRLVDAVTALESVAKEHYYMEQVPCDAMRRTAGFVQMLLLDGCYILGKFVLHDLLPVRANGAGTSQQQQHGTGSAMQNMELVRDVFYRLDNQIPFCVLRAIYGVLRECRTTPGVMARELDETLAVQVQALLKHFGYSIRTQVPREIWHLHHMLHKHFVPQDDPIPTGDAVRLPVDVVDTGRRSATAAAPTLYRWRAATFYHATGVIFMKRHLRHGASSGAWRWFVDGGGARSVLDVKFHPLTLRLSIPPLMVDMNTSTVLRNLMMLEQHNPSLGSQVTAYCYFLSQLAGTASDVALLAKKGIIVSLLASDGDVARMLGELCVGITINPADERSHNYLLDTRKGLERMYKTRVIRWIAQLYHRYLSNPFVLTVLVAAMVGFVCELIQAIYAVKSFKRRP

SEQ ID NO: 184350 - protein, 68 aa, Oryza sativa
  Clone ID: PAT_MRT4530_81350C.1.pep
IIFPRDKINTIPLEYSQVKCYNGISVRLWINSVTIIYQEYFCAIARNYISSNVIKKYQHTIGKGGRDG

SEQ ID NO: 184351 - protein, 210 aa, Oryza sativa
  Clone ID: PAT_MRT4530_81351C.1.pep
MPVLYRQHLFGFTTEPLARCRYTQPVRRCTPRPALPQPCRWHVHDLSSSPFSTPPPISTSNFVTRTSSRRRARLVGFLCAPDLGLLRAPTVDTILPAISTHPTTPAAPSLHLVNRLCVSTGLGLFNNISRFDLINRKYIELHFNLFLYIILAPPRPTLSDSLSTPIDFWSTLFLFDFGSVANIDRPIEAWPVLTNGVAAAAIFTVTDICS

SEQ ID NO: 184352 - protein, 181 aa, Oryza sativa
  Clone ID: PAT_MRT4530_81352C.1.pep
MGLLLPNNNAVWIMPEEPKKLFPIFRNLKDVYLYNISNDSGLDWTLFVLEGAPSLKSFHVKISHHICGGDGFEHNAGSSNVVWEASSDIIKHKNLRLLDIIGFETEENLIKYIRLAIQRAIALQRIHLHEKEPCEDCDDIYLNTPSLSRTRFPNNEQEKDLLREQLLQGFSSSIEIIIGCY

SEQ ID NO: 184353 - protein, 630 aa, Oryza sativa
  Clone ID: PAT_MRT4530_81353C.1.pep
MWRGCVSRGLRSLSKGKGSSSSAPVSAAARLFSTASSSYTVVDHSYDAVVVGAGGAGLRAAIGLSEHGFNTACITKLFPTRSHTVAAQGGINAALGNMTEDDWRWHMYDTVKGSDWLGDQDSIQYMCREAPKAVIELENYGLPFSRTEDGKIYQRAFGGQSLDFGKGGQAYRCACAADRTGHAMLHTLYGQAMKHNTQFFVEYFALDLIMDSEGTCQGVIALNMEDGTLHRFRATNTILATGGYGRAYFSATSAHTCTGDGNAMVARAGLPLQDLEFVQFHPTGIYGAGCLITEGSRGEGGILRNSEGERFMERYAPTAKDLASRDVVSRSMTMEIREGRGVGPLKDHIYLHLNHLPPEVLKERLPGISETAAIFAGVDVTKEPIPVLPTVHYNMGGIPTNYHGEVVTMKGDNPDSVVPGLMAAGEAACASVHGANRLGANSLLDIVVFGRACANRVAETAKPGEKQKPLQKSAGEKTIAWLDKLRNANGSLPTSKIRLNMQRVMQNNAAVFRTQETLEEGCKLITKAWESYHDVKISDRSLIWNSDLIETIELENLLINACITMHSAEARKESRGAHAREDFTKRDDEQWMKHSLGYWENEKVRLAYRPVHMNTLDSEVESFPPKARVY

SEQ ID NO: 184354 - protein, 916 aa, Oryza sativa
  Clone ID: PAT_MRT4530_81354C.1.pep
MSPRKKCAGKKSSLRLTSSEVPLKALDMSWVPQGMDASAACRVDVRVGPYVEFDENGRPDYHVSRDIKWVIDKDTICWIDLINDLDGEVKHSYLQEITVTYWDKNVERYAEIASDSSLLDAFDMYWEMRRLPLLVNVSDDPRNRTEPCMDQGSIDGPASTVAGDGQVACTDIVLATQESQVIASKRSKPSKPTKPKEKVDDWGESDEVEYVGVDDEKEKYNDLVSDDEAVDADYDPGSDEDQDDLAVDDEEGCESVAHVTDVDNPKIAVGVTFEDGNCFKRCIRQYAVLKEVELAVPYSESRRYRAYCKAKRCKWRIHASRLPDGRTWQIKKLPYAHNCASTAGLENNCMATNSWVRDRVINKLRQEPTLGATALKKFLEEKYKINISYYVVWDGRQMALDEILGKWEDSFDAAYNFKAELERTSPGSIVEVDHVTVDGKNHFSKMFVALKPCVDGFLNGCRPYLGIDSTVLTGKWRGQLASAIGIDGHNWMFPVAYGVFESESTDNWAWFMDKLYSAIGSPEGLVLSTDAGKGIDTAVTRVFTNGVEHRECMRHLVKNFQKRFSGEVFERNLWPASRAYRQDIFESHYNEMKEACPKATEWIDNFHKHIWTRCQFSTLSKCDYVTNNIAETFNSWIRHEKSLPVVDLMDKIRQMIMERMSVRKRLAVKLTGTILPSVMKSLYARSRDLGYKLYSAHSHLGEIGGTGRDLKTWRHTVDLNTRECSCRQWQVTGIPCTHAIFLVISRRGLELEQFVDDCYSVATFKKAYAGHVVPMTDKSQWAKINVGFKLYPPLLKRSAGRPRSRRIKGMEEGGSGKRKYRCKRCGQFGHIKKTCNEPVADPSAPPPAPPKPKRKRVKKVVLSVQDPVIQVPTATVSTPSRSQASGVTQTSPITRSRARALNLDVDAPSNKAAGAI

SEQ ID NO: 184355 - protein, 214 aa, Oryza sativa
  Clone ID: PAT_MRT4530_81355C.1.pep
VFGRACANRVAETAKPGEKQKPLQKSAGEKTIAWLDKLRNANGSLPTSKIRLNMQRVMQNNAAVFRTQETLEEGCKLITKAWESYHDVKISDRSLIWYAISCKDCTDLFCLLVTILHWLSIIHYLFHRNSDLIETIELENLLINACITMHSAEARKESRGAHAREDFTKRDDEQWMKHSLGYWENEKVRLAYRPVHMNTLDSEVESFPPKARVY

SEQ ID NO: 184356 - protein, 75 aa, Oryza sativa
  unsure (1)..(75): unsure at all Xaa locations
  Clone ID: PAT_MRT4530_81356C.1.pep
CSNKATLRHTIVTTIKKLYHIXLPXXSGSYLSITRRQFTVMNILSGGTPNPPSLDVLLTLWVLGSNXHCGVELCT

SEQ ID NO: 184357 - protein, 102 aa, Oryza sativa
  unsure (1)..(102): unsure at all Xaa locations
  Clone ID: PAT_MRT4530_81357C.1.pep
MTGDGNAMVARAGLPLQDLEFVQFHPTGIYGAGCLITEGSRGEGGILRNSEGERFMERYAPTAKDLASREXLXSRSMTMEIRESXXXXGPXKDHIYLHLNHL

SEQ ID NO: 184358 - protein, 332 aa, Oryza sativa
  Clone ID: PAT_MRT4530_81358C.1.pep
MASSPSLPLVTCALLLLLAVACQAHPYWPLELAYYRDKCPQAEAVVKAVVGEAVRQNPGNGAAVIRMLFHDCFVEGCDASILLDPTPFNPTPEKLSAPNNPSMRGFDLIDAIKHAVEAACPGVVSCADIIAFAARDATYFLSGGKVYFDMPSGRRDGTFSNDSGPIDFLPPPTSNLSDLVSSFAVKGLSVEDMVVLSGAHTVGRSHCSSFVPDRLNASVFSDIDGGFAWFLRSQCPLDATPGGNDPTVMLDFVTPNTLDNQYYKNVLDHKVLFTSDAALLTSPETAKMVVDNAVIPGWWEDRFKAAMVKLASIQVKTGYQGQIRKNCRVINY

SEQ ID NO: 184359 - protein, 208 aa, Oryza sativa
  Clone ID: PAT_MRT4530_81359C.1.pep
MTYTLYIGNKRYSSWSMRPWVILQSFAIPFEEKLNLFKPGLRQPDFLEFSPSGKVPCLHDSENSIVVWDSLAICEYMAEKHPEMWPSDVAARAFARSAAAEMHSGFPAIRDECSMNVGLCIELGEPSEALQLDIDRFNALFKEGLERFGGPWLAGKFSIADAMYAPVASRLKTYGIVLDGAAKEYADVFCNLPSRIGLREGFKETSRE

SEQ ID NO: 184360 - protein, 127 aa, Oryza sativa
  Clone ID: PAT_MRT4530_8135C.1.pep
PHAARPSRRAVPPPCAGDEPPSGVLAPPPPSQRLRGFRRRRGGERRGGCRRPGARVRPRSPARGRLLRCSLIQEVSVVFFACRRRRQPPCSSSSSSGSSFASGAMGARWRAMGGGDDGGRRRGVISR

SEQ ID NO: 184361 - protein, 386 aa, Oryza sativa
  Clone ID: PAT_MRT4530_81360C.1.pep
MEKRRRPAAAAMLLVLIPAASRPPHGIVAATESSVQNSEQSFGFNLTLAKTIVEYASAVYMTDLTELYTWTCSKCNDLIQGFEMRRLIVDVQNCLQAFVGVDHNLNAIIVSIRGTQENSGFYGSYDIPLYSCLNFLLSVQNWIKDMLWKQSDLNYPDMPDAKVHTGFYSSYNNTLLRPAIANAVHKARKLYGDISIIVTGHSMGGALASFCALDLAITHGGNNVYLMTFGQPRVGNAAFASYFTKYVPNTIRVTHEHDIVPHLPPYFFIFPDQTYHHFPTEVWEHEVDGSTVYQVCDGSGEDPDCSRSVLVLFWSASDHLTYLGVDMEADDWSTCRIVLGRSAAETLLLQHARQLAGGDDESGGVNVVVRDHGVQVVGSEIAVAAR

SEQ ID NO: 184362 - protein, 94 aa, Oryza sativa
  Clone ID: PAT_MRT4530_81361C.1.pep
MRKNPVPQPPLIEHVAAGHCLAQKMGHPLFCSPTKEKPPPASVNFGKSNINVIFPCGLTPPFWSPSQCPEIQTGLPYGGIDRLSGPINLVLRQN

SEQ ID NO: 184363 - protein, 205 aa, Oryza sativa
  Clone ID: PAT_MRT4530_81362C.1.pep
SGVSRPRSGPSASGRTDGCRWTSAAPRPARRRCRRRAARPRLGRTATSARRRGRRRRRGRRCSAFVGGGGGLAGLEALEEALPIRRSISKFYNGKSKSFACLKEAVSSCGSAKDIAKAESAYSRKRKNLLAYSIMYETSQETAAEVYETGPPKRLASLSRNSFVTLASSSFRSSSSISIEETELTEQLHSPPSLANDENSAVYNA

SEQ ID NO: 184364 - protein, 484 aa, Oryza sativa
  Clone ID: PAT_MRT4530_81363C.1.pep
MARSVSYVSAAKLLAMARSNPRVAIIDVRDEERSYQAHIGGSHHFSSRSFAARLPELARATGDKDTVVFHCALSKVRGPSCAKMFSDYLSETKEESGTKNIMVLERGFNGWELSGQPVCRCTDAPCKGTCSPEEPELLLQFKPDPGQRLLGWAHPERRRSPEEPAHFDGLTSPHLLRRAAVAWAASRSAAKPGARLALASPLSPIPLRFPHLPDPPPMASSRLLSSRRLLPALLHTPSPVPIPRAAAAAAGEVGGTPVASFLRRPARFFSSAARRGPARPRATDIGARARQLQSRRLWTYALTFGCAAGFVVTVLATFQDQLVFYLTPTDALARYATDRSKSRVRLGGLVLEGSVAHPSASSSEIEFVVTDLITDVLVRYEGALPDLFREGHSVVVEGFLKPFTDDLRRDTAGRKVSDKARDCECFFSATEVLAKHDEKYMPKEVGEALERNKKKLEEEAAAAAAASQESATAAVALDGAKSSS

SEQ ID NO: 184365 - protein, 219 aa, Oryza sativa
  unsure (1)..(219): unsure at all Xaa locations
  Clone ID: PAT_MRT4530_81364C.1.pep
MPAACSSSSIGKDSDECSPPGKEEEEGEEVXRARSSGEEGALAGLEALKKALPIRRSISKFYNGKSKSFACLKEAVSSCGSAKDIAKAESAYSRKRKNLLAYSIMYETSQETAAEVYETGPPKRLASLSRNSLVTLASSSSRSSSSISIEETELTEQLHSPPSLANDENSAVYNAPALQLGSCDPKTSSVPVRSFSMMDLRRLHRPRSSCRLKDQKTTE

SEQ ID NO: 184366 - protein, 142 aa, Oryza sativa
  Clone ID: PAT_MRT4530_81365C.1.pep
AFSAHIADIHSAAPPSPTPAAQLTCSVAPGSLALPLTMELAVRTSRGHSIQIWWPLVVRGLTPNHGVAAAPDLPLRSLWAPDPRGPVAGERRGGVSGGEGGGGYDKKRRKASPRQVSGGEDGCAATKMAMSRVEAKRANEEE

SEQ ID NO: 184367 - protein, 82 aa, Oryza sativa
  Clone ID: PAT_MRT4530_81366C.1.pep
RVQSKFFGLFKQHGSKSTSFWNFLQLTLFRRLRVKLKLLVPPFVKSIFFSYKTTKLYLKTKQRWFTFSTSPKHSTFSNKFLL

SEQ ID NO: 184368 - protein, 83 aa, Oryza sativa
  unsure (1)..(83): unsure at all Xaa locations
  Clone ID: PAT_MRT4530_81367C.1.pep
MSVRRRSESMEGLFSFDERKDRRSDVENSEDERRRLSIGSLKKKALNASNKLTHSLKKRGRXKVENRPSFTIEDVRDEEEERA

SEQ ID NO: 184369 - protein, 114 aa, Oryza sativa
  Clone ID: PAT_MRT4530_81368C.1.pep
MEELVYTVWMDGGGARHGGPTVVQMTGCLPSDFFLSLSIGHPLVARRSGRGGLVAVAKGGSGEHKDAGSTTGTNDTRRTYESRWESVGAWGGDGGGSGVILVVDEECLEPPVRA

SEQ ID NO: 184370 - protein, 505 aa, Oryza sativa
  Clone ID: PAT_MRT4530_81369C.1.pep
MALRAAELRRLVVLLRGEAALPLPLAWRGRPVSTAARDDELAGKSAYEVLGVGETSSSAEIKASFHRLAKETHPDVAAAAGSSRFLQILAAYEILSDSQRRAHYDIYLRSQKRVLQKHPRPSHHVYPNPSGSGIVVTRESNVVEWLKWYRLTIDDIVTKKRVATGSGYFDKLESELYTAIHAAYYGPDVRSVDLLPDCFEAEERSVYETPELLHLVSGRDLFGIVSLADRVQQLPDAFQEKQTLPGFKTYGISQHVSTNLEKGTVHASPVYIHKREIDKNDGPHSDAYKDIELWICGKLVATATRSPKCNCIDKSDVEDHIHVFLVPNEVASSDFTQELPILGTITGLATTGEEGSCCVYDSRGIKTHLIVKHRTLMVKHMHWYQVGDEISPCECRCSRARLPPSRYWLFEPRCYMHDTGGWYIETFGRDKKGRKILSPRQWDGSNEHSERRLHPAMYLAALAYRSLDIEDAQRKKWSITTFLELQSSHICQLCKKIFNGGKESS

SEQ ID NO: 184371 - protein, 114 aa, Oryza sativa
  unsure (1)..(114): unsure at all Xaa locations
  Clone ID: PAT_MRT4530_8136C.1.pep
MLSSALFTPCNPTQLSTCRASVSTPLKALRLXHERVPGTSTTITCQAWSSIPCERVSYMGKCQLINLVLLGAMSLPTFGMLVPYGALFMPARTRNASXCQVGKDKLDNDVITEE

SEQ ID NO: 184372 - protein, 292 aa, Oryza sativa
  unsure (1)..(292): unsure at all Xaa locations
  Clone ID: PAT_MRT4530_81370C.1.pep
FFFXNXKXXGNKIXNRPKKRXXXGFXXKQKFXXXKXKQEXXGEFXIPXXXNXXGXGTKSPRKIXPPGENKXGGNXXXIQFNLXPQRXRXXFKGGPPNFLXNPQNNPLIPPGKKTFQVFSQWXEXMARGDAXFGPFXXIQGRKRPVFEFSXRKRATXXXWXMKFXSHLSQXPFFFXXRRXGRNVWGKIRVAVXFVKFAGKEXFPPGRSSXFRFQGKVSXGGGVLLEISGVPFGXGQTAGTPKNKPNXPPKPHSNGNNNFQKWLGDSXGRLDVCPKCQFQTXRCPERXXQPXRK

SEQ ID NO: 184373 - protein, 278 aa, Oryza sativa
  Clone ID: PAT_MRT4530_81371C.1.pep
MAAVAAAAGLILALAFASSSPPAAAAVKFNVTEILHEFPEFSVFNGLLSQTRLAEDVNLRPAVTVLVVDDAAAGAITSLPEATQGEVVALQVLLDYYDPVKLYSLKAKTALLPTLLRPTAAGGGGGGVGLVKYTQVADDQMAFGSGEPGAPIGSQLVKVVACRPYNLSVMQVSAPIVAPSLGGPSSGGGTPPSSPATAKSADDASASSMTDYDDDPIAPAAVDGPGIVDTPPTKTTSPSTNGTSAAADGTTTSAGSCAVVAGAGVGLMAAGLVMFISV

SEQ ID NO: 184374 - protein, 90 aa, Oryza sativa
  Clone ID: PAT_MRT4530_81372C.1.pep
ELIGLFRDLWDASIYRYIAVVVVIPGLSRGMSGQRGDQWIRSPPAFSSSICTARVSFNRSSGMPVPRMERCQKPLSTCHVLFRFIINLFF

SEQ ID NO: 184375 - protein, 64 aa, Oryza sativa
  Clone ID: PAT_MRT4530_81373C.1.pep
KRFLPLKTWSVFTSREPLMCISVQVRFEEESVWWLKLETIIQPSFQSTGHETVGKLLRSIPPFP

SEQ ID NO: 184376 - protein, 74 aa, Oryza sativa
  Clone ID: PAT_MRT4530_81374C.1.pep
TREAARAVQSPTHVRPKAGSQQRYRMGFRLSTRNRALQWSHIFGFKRLKLDLLLLADIFALAKATPQINRAGNM

SEQ ID NO: 184377 - protein, 474 aa, Oryza sativa
  Clone ID: PAT_MRT4530_81375C.1.pep
MAQAERERLRVLMFPWLAHGHINPYLELATRLTTTSSSQIDVVVHLVSTPVNLAAVAHRRTDRISLVELHLPELPGLPPALHTTKHLPPRLMPALKRACDLAAPAFGALLDELSPDVVLYDFIQPWAPLEAAARGVPAVHFSTCSAAATAFFLHFLDGGGGGGGRGAFPFEAISLGGAEEDARYTMLTCRDDGTALLPKGERLPLSFARSSEFVAVKTCVEIESKYMDYLSKLVGKEIIPCGPLLVDSGDVSAGSEADGVMRWLDGQEPGSVVLVSFGSEYFMTEKQLAEMARGLELSGAAFVWVVRFPQQSPDGDEDDHGAAAARAMPPGFAPARGLVVEGWAPQRRVLSHRSCGAFLTHCGWSSVMESMSAGVPMVALPLHIDQPVGANLAAELGVAARVRQERFGEFEAEEVARAVRAVMRGGEALRRRATELREVVARRDAECDEQIGALLHRMARLCGKGTGRAAQLGH

SEQ ID NO: 184378 - protein, 56 aa, Oryza sativa
  Clone ID: PAT_MRT4530_81376C.1.pep
IKRAFCFSRVVSRCLVLAKLGHHACNGHGYTRGMESSELGDPVFCSTRLIRGSGLG

SEQ ID NO: 184379 - protein, 80 aa, Oryza sativa
  Clone ID: PAT_MRT4530_81377C.1.pep
HLFAGSNRCYIRSPIGPQHGAKPSSHSGRKYISSSTFCCFSIPIPSSLVTRHTEKMSALSIRPHTAGWSGPSPGSSFASL

SEQ ID NO: 184380 - protein, 99 aa, Oryza sativa
  unsure (1)..(99): unsure at all Xaa locations
  Clone ID: PAT_MRT4530_81378C.1.pep
DRKGPFPPXKLAIEVRGSPTYILGPLPFHNXSHLPFLNQCRTIQQSPPSHIGIPQXFTVSGPHWPMVHQDRKGPFPPQKLAIEVRGSPTYILNYLPFHN

SEQ ID NO: 184381 - protein, 66 aa, Oryza sativa
  Clone ID: PAT_MRT4530_81379C.1.pep
QSCSLETASASRRGSSAAVRSTSRHESVHGFAAAAAVAGSLPRFMSSAFPHRTTYNPVITAAAPIK

SEQ ID NO: 184382 - protein, 87 aa, Oryza sativa
  Clone ID: PAT_MRT4530_8137C.1.pep
NTCGFVFEKSGSCPFLFLKNKQSSRYPAFFLFPYPPTQCGVPPPHLSYLKFLIFFLPHSLSNNIVCRRICKQPVCVDVNKFGKCKIM

SEQ ID NO: 184383 - protein, 326 aa, Oryza sativa
  unsure (1)..(326): unsure at all Xaa locations
  Clone ID: PAT_MRT4530_81380C.1.pep
VSGPVDSAAADWCSRLHGWXLVAPTWLGIHVFTNWXTSPPPTGVSACTAGLLCRRCRVSTTSPXGLPSSPPTGALTQTVGWSHHRSWASTSSPTGWPLPPPTGVSACTAGLLCRRCRVSTTSPPACLRRRRLVPSPKRLVGHTTVHGRPRLHRLAGLRRRRLVFSPAWLAYYAAVVGRLRLHRRPASVAADWCPCLYGWLVTPLFMGVHVFTDRLAFAAVDWCFHGWLVTPLFMGVHVFTDWLAFAAADWCFRGWLVTPPFMGVHVFTDRLAFTAADWCLCLHGWPIMPPLVGIFAFTXRPPSSPSTGVFIVVDGRLYSHIGHLCH

SEQ ID NO: 184384 - protein, 72 aa, Oryza sativa
  Clone ID: PAT_MRT4530_81381C.1.pep
IFTGGMIDRSILDVRCIGCQSAFLLVISGWLVMMVSERSLGVSSLCTLITTFFWFYRGKICVYFWCIIFGGS

SEQ ID NO: 184385 - protein, 454 aa, Oryza sativa
  Clone ID: PAT_MRT4530_81382C.1.pep
MAAASPLAAAAALALLLLLLLAAPAAAEIRETVIRSDPRSIIPLDEFGFSHSGVLELNVSGIAFDPPASSELDLSQLGFFLSTLDAWVHVLRQLQDLDVTCALQADLVKLAYSFDRLRPPSNPAGVEVARSSSFSTAFPVSEPGQYTLVFANCLGGGLKVSMDVRSAMYNVDPPTGERSYLSAGATALPTIFGFFGVAYAALAAGWIAILLRKRAAVFRIHYFMLAVLVLKAVNLLAEAEDKSYIERTGTAHGWDVLFYIFSFLKGISLFTLIVLIGTGWSFLKPYLADREKKVLMVVIPLQVVANIAQVVIDESGPYARAWVTWKQVLLLVDVICCCAVLFPIVWSIKNLREAARSDGKAAVNLMKLTLFRQYYVVVICYIYFTRVVVYALMTITSYRYQWTSYVAKELATLAFYVFTGYKFRPEVHNPYFAIDDEEEEAAAEALKLDDEFEL

SEQ ID NO: 184386 - protein, 60 aa, Oryza sativa
  Clone ID: PAT_MRT4530_81383C.1.pep
SMSAASRWWWWWLSSSSVHPLLQRLLFFPDGRSRSPQSSRDRGTNGLRRIRGQLDRRIQP

SEQ ID NO: 184387 - protein, 1335 aa, Oryza sativa
  Clone ID: PAT_MRT4530_81384C.1.pep
MAAAARCPGDHRGGGLLPRRRRPRQQQHTASSRSRATCRHCQGRQVINRYYYVPFMYLWTLSISPVTPIPIPLATHHLSAAATSQSPRRSLVPAKLLPSSFTSSVQQDLPSLSLPTFLHLHIQYLCTYQNYKEREQGDSKFNPMAEVALASLRLAASPILNKLLADASTYLGVDMASELRELETSIMPQFELLIEEAEKGNHRAKLDKWIRELKEALYNAEDLLDEHEYDILKRKVKNGGEDPSPDLEHASSIGSIIKKPMRAASSSLSNLRPKNIKLVRQLKELKAILAKARDFREMLGLPAGSSVEGAQTGHTKTVVVTAATSTPPPKVFGRDADRDRIVDLLTQHKTCAEASRFVVSIVGPGGMGKSTLAQYVYNDKTIQEHFDVTMWVCISRKLDVHRHTREIIESATKEKCQRVGNMDVLQYKLKEILQKKEKVLLVLDDIWFDKSQDVEEWDLLLAPILSSQNGATKVLVTSRSKTLPPALFSEDVIDLENMKDTEFQALFKHHAFSGATIRDLQMCGWFEEHAVKITERLGRSPLAAKVVGSNLKRVMNIDDWKGALTIKIDNLSEPKRALLWSYQKLDPCLQRCFLYCSLFPKGYKYIIDELVHLWVAEGFIDARDTNKRMEDTGMDYFKEMVSGSFFQPFSERFDSTVYIMHDLLHDLAESLSREDCFRLEDDKVREIPCTVRHLSVRVESIIQHKPSVCKLQHLRTLICIDPLVDVGSNIFEQKVARIIGQLKHLRYLNIKKTLISELPKSLCDLYHLELLYLRPKSRLPDKLCNLCKLRHLQMYSDGLELSRIPDIGRLTLLQRIDSFHVLKQKGHELRQLRNMNEIGGYLSLRNLENVIGKDEALESKLYQKSRLEGLTLEWNDANNMNPENCLHVEILEGLVPPPQLEHLSIRGYKSTTYPSWLLEGSQLENLESFALYNCSALERLPSNTKLFRRCRELSLKNLPNMKELSFLPAGLTTLSIRRCPLLLFVTNDELEYHDHNALSSDHSSMKQLAALMDSDISKNLQTIERALEREDEVVMTKDVIKAWMRCHEQRMRLIYARRIGLPLVPPSGLSDLSLKSCTITDTALSICLGGLASLRCLSLSKIMSLTTLPSEEVLKKLTKLDCLIIDACLFLGSLGGLRAATSLSHLRLNSCPALELAHGAEFMPASLKRLAISCCVLAPDLFCGHWPHLKDIFIHDCRSSVSLFVGDLSSLKEFTLYHLPDLCVLEGLSSLQLHSVCLVDIPKLTAECVSKFRVQDLLHVSSSAVLNNIISAEDLPSSLQRISIVDCPNISSLPDLPSSLQHIYIRDCPLLKESCRVPDGESWPKIAHIRWKRID

SEQ ID NO: 184388 - protein, 721 aa, Oryza sativa
  unsure (1)..(721): unsure at all Xaa locations
  Clone ID: PAT_MRT4530_81385C.1.pep
LHQPACXTVTDWCFRLYGWRTSPLSMGIIIVFTXGCLICRQLVSSPTWLDGHTTIVGXQHLHRPAASFIAXDWCFRLHGWLVTPPLFGVYVFTDRLPRPPPTGVLAYTVGWSHHRSWASTSSPXPAGLHRRRLVFPPARLAYYAAVVGRLRLHRRPASIAADWCPRLYGWLVTPLFMGVHVFTXGLPLPPPTGVSACTAGLLCRRCWASMTSPPACLRRRRLVSSPIRLVGHTTVHGSPRLHRPACXTAADWCLCLHGWPIMPPLVGIFAFTIDXPSSPSTGVFIVVDGRLCSRXWISQNITTGLRRSRRLVFPPARLAYYAGGVGRLRLHRRLAFAAADWCLRLHGWPIMPPLLGVYVFTDRLAFAAADWYLRXHDWPIMPXLLGVYVFTXDLPSPPPTSVSACTAGLLCRRCWASPSSSPAHLRXPPTGVSACTAGLLCRRCXDVYIFSDRPSRMTPTGAIVFTAGHVTATANRRHHLQRKLSTSAADCCASSSSLTDVVVIASLPSPPPMVSSLSWLAYFATIKGRLRFRHHSTSSSNFIFIFFCTGKPNYRYFASFATSPITTSTRASTSRHVLPYSMQCYSTTTSGSLIFKISIRTSSTRIFTQAMATRRXATVLDSMFSCFPTNQRVRGYTNTRLXKFDRCYVNMKQSINQLTSSMESTSGVISFVLAPKQAFYFSNLNYFTGNFGFLALPXLLQKSQVSSSRFNLHVRELRVIN

SEQ ID NO: 184389 - protein, 124 aa, Oryza sativa
  unsure (1)..(124): unsure at all Xaa locations
  Clone ID: PAT_MRT4530_81386C.1.pep
HASALSKIMSLTTLPSEEVLKKLTKLDCLIIDACLFLGSLGGLRAATSLSHLRLNSCPALELAHGAXFMPASLKRLAISCCVLAPDLFCGHWPHLKDIFIHDCRSSVSVFGGDLSSLEEFTLYH

SEQ ID NO: 184390 - protein, 574 aa, Oryza sativa
  unsure (1)..(574): unsure at all Xaa locations
  Clone ID: PAT_MRT4530_81387C.1.pep
WQQRLHRRPASVAADWCPRLYDWLVTPPFMDVYVFIDRLAFAAADWCFRLHGRPIMPPLLGVNVFTXRPASVAADWCPRLYGWLVTPPFMGVHVFTDRLAFTTADWCFRLHSRPIMPPFMGIHVFTDRXPSPSPTGVSAYTVGWSHHRSWASTSSPTGVPSPSPTGVSAYTAGLLCCIWWASSLSPSXPSSLPTGVFTVIDGRLCSHIXTSQNITIGLLSSSPTGVLAYTVGWSHHRCWTSSSSPPTCLRRCRLVSPPARLAYYATVVGRLRLHRPACXVAADWCLRLHRWPIMPPLLGVYVFTACLPSPPPTGVSACTAGLLCXRCWASISSPTGLPSPPPTSVSACTAGLLCRRCWASMSSPSACLHCHRLVSSPAWLAYYAVVTGRLHLHRPATSYDTDWSYRIHGWPXSPPLIGVIIFNVSCLRLLLTAARLRHHXWRHHRRFAFAAVHSVFTLIAGLFCHRSWTSSFSSSYYFFRRRLVMSPXLVCLSSQLHAFATVRKICYFTNHDIYKSFDISTCVTKYDALLFYYSKWCSNHQYFYSDIFNTYLHSSNGYSTTSXSSRLYVQLFSN

SEQ ID NO: 184391 - protein, 153 aa, Oryza sativa
  unsure (1)..(153): unsure at all Xaa locations
  Clone ID: PAT_MRT4530_81388C.1.pep
KNLPNMKELSFLPAGLTTLSIRRCPLLLFVTNDELEYHDHSEXSTRTEQLVAQFALVGVMGPFLDALSSDHSSMKQLAALMDSDISKNLQTIERALEREDEVVMTKDVIKAWMRCHEQRMRLIYARRIGLPLVPPSGLSDLSLKSCTITDTAL

SEQ ID NO: 184392 - protein, 244 aa, Oryza sativa
  unsure (1)..(244): unsure at all Xaa locations
  Clone ID: PAT_MRT4530_81389C.1.pep
MAGHEVNSSSSSSGAESSSSSSGRQQYKKRPAGRTKFRETRHPVYRGGRRRGGAGRWVCEVRVPGKRGARLWLGTYVTAEAAARAHDAAMIALRGGAGGGGAACLNFQDSAWLLAVPPAAPSDLAGVXRAATEAVAGFLQRNKTTNGASVAEAMDEATSGVSAPPPLANNAGSSETPGPSSIDGTADTAAGAALDMFELDFFGEMDYDTYYASLAEGLLMEPPPAATALWDNGDEGADIALWSY

SEQ ID NO: 184393 - protein, 552 aa, Oryza sativa
  Clone ID: PAT_MRT4530_8138C.1.pep
MDSKPTRPHRRPPPLPSKTSGVWPVALLVVLCFAALPLFLALSRARPTLSDVSQMGVTVTVHDEDPAGTPPESSPANRDRLLGGLLSPDIGESACLSRYKSSLHRKPSPHSPSPYLVSRLRKYEALHRKCGPGTLFYKKSLMQLTSAYSMGLVECTYLVWTPCGGSHLGDRMLSMASAFLYALLTHRVFVVHVTDDMAGLFCEPFPAASWELPAGFLVHNLTQLGRGSEHSYANLLGAKKIKTDDPAGVRSESLPSYAYVHLEHDYQQSDQLFFCDDDQTVLAKVNWLILRSNLYFTPGLFLVPQFEDELRWMFPARDTVFHHIGRYLFHPSNKVWELITRYHTSYMAKFEENIGIQITTFAGSKVSSEEYFKQIVACTSQEKILPEIDPNATSSANEAALATTASKAVLVSSAQPSEYAEKLKAMYYEHATVTGEPVSVLQPAGAGKQAPNQKALVEMFLQSYCDVSVVSGRSTVGYVGHGLAGVKPWLLLTPTNRTASANPPCIQTTSMEPCFHAPPSYDCRAKKDGDLGAVLRHVRHCEDVGDGLKLYD

SEQ ID NO: 184394 - protein, 103 aa, Oryza sativa
  unsure (1)..(103): unsure at all Xaa locations
  Clone ID: PAT_MRT4530_81390C.1.pep
FRPARHGPAQXGPPAIGPARPDRHFVPGRADPWAAPPAQARPTSRRAVPGRPEGAGGPAHRAVPARHGRAGPVVGPGQHGPNPXRAVPCLGRAKTPCRGPGHR

SEQ ID NO: 184395 - protein, 98 aa, Oryza sativa
  Clone ID: PAT_MRT4530_81391C.1.pep
GCGPSPFPPRNFYNWWPGHGPKLDAGNGVRNPPLCFIAQVGAQIVKVVHFFQRCLWVWFPLGLAPFFHFCPFGHFPSMGFCCLLDTLRGLGWAPRWLC

SEQ ID NO: 184396 - protein, 68 aa, Oryza sativa
  Clone ID: PAT_MRT4530_81392C.1.pep
LHQAGTAQQDRETEYRTTGMGVQDLLPVVCFVSVCDSWSRHIIYLIISLAPKCKNHLVIMFPHITYKI

SEQ ID NO: 184397 - protein, 58 aa, Oryza sativa
  Clone ID: PAT_MRT4530_81393C.1.pep
DCILHGSGLCLTCIYSTACLLILDLLRSNKNYLEIPIPHGTDNSSAQLDPTIENNLVP

SEQ ID NO: 184398 - protein, 127 aa, Oryza sativa
  unsure (1)..(127): unsure at all Xaa locations
  Clone ID: PAT_MRT4530_81394C.1.pep
MAEFQEMAAEVPPSLKAITLTHVRYRRGDTLGLFLAWVSLVPVFISLGGFVSHFLFRRELQGICFAAGLLASQLLNELIKHSVAQSRPVYCELLEACDSHGWXSSHSQYTFFFATYLSLLTLRRSPS

SEQ ID NO: 184399 - protein, 328 aa, Oryza sativa
  Clone ID: PAT_MRT4530_81395C.1.pep
MGTVTTADPHASFLADKGGKVFVAGHRGLVGSAILRHLVSLGFTNVVVRTHAELDLTRQSDVEAFFAAELPRYVVLAAAKVGGIHANSTFPADFIAANLQIQTNVVDAALKCGSVRKLLFLGSSCIYPKFAPQPIPENSLLSGPLEPTNEWYAVAKIAGIKMCQAYRIQHGFDAISAMPTNLYGPQDNFHPENSHVLPALIRRFHEAKASNAAEVVVWGTGSPLREFLHVDDLADAVIFLMDHYSGLEHVNVGSGSEVTIKELAELVKEVVGFQGKLVWDSSKPDGTPRKLMDSSKIQEMGWKPKVPLKEGLVETYKWYVENVISAKK

SEQ ID NO: 184400 - protein, 150 aa, Oryza sativa
  Clone ID: PAT_MRT4530_81396C.1.pep
MQAGKNAMQSTKEAAANVGASARAGMDKSRAAVQGQVEKATARNAADKDAAEVRRQERLQAAEEEKQHAMAANAAAKERATGGAGAYHPSQGAPGVDPRAAQPTGGHVQDGVAESRPVGTATGTARPSAAHNPHVGSDFSQAHGTGGQYQ

SEQ ID NO: 184401 - protein, 107 aa, Oryza sativa
  Clone ID: PAT_MRT4530_81397C.1.pep
RNNHPSARWVQVSPCSRQRLCLRFCGPNSSPQPAGACWSSRPSPVRPCGRPCSALREVDPPEVSMNSSSPLGLALCHACWVVVRGRRAPVVPNHGVGRPLLKGPYGG

SEQ ID NO: 184402 - protein, 323 aa, Oryza sativa
  Clone ID: PAT_MRT4530_81398C.1.pep
MAGAALAGGGASAGWQHVHEVRLARAEASEARQVAAEAALVRGGAVEVPVRRDEAARRGGSGRCGGRRGQWPGEARPVAARGDWPVGGAGAVVPTLRRRFWMAVEQCGGRSRLAAADPVLAFSWICVLALSPLNSSYITLVPKKILPETVNDFRPISLVGGIMLKLVHENQYGFIRGKTIQDCLAWSFEYIHQCHQSKREIILLKLDFEKAFDSIEHSVLLSIMQSMGFNNKWLQWVQMVFSPSHTSVLLNGVPGNSFKCRRGVRQGDPLSPLLFVLGAKLLQRVINRAFSLRLLSKPINEQDGKGFPVIQYADDTLVLLKAS

SEQ ID NO: 184403 - protein, 73 aa, Oryza sativa
  Clone ID: PAT_MRT4530_81399C.1.pep
RMLALCARFSSRGSRVFTRVCSQLRWRLGSYVVAHEATSHSALYMPFEKCSGVFLLPPQGGGLNDLGSKPHPF

SEQ ID NO: 184404 - protein, 96 aa, Oryza sativa
  unsure (1)..(96): unsure at all Xaa locations
  Clone ID: PAT_MRT4530_8139C.1.pep
KSKCNRRLHLPEXKPFPPPPQFLYSXRSGTSSISKRRHHFLHTLXSLXNGEXQSCCAKWTAQDLKFFMVDHLTSENRAKWTLLHPSHAWLDVLGTV

SEQ ID NO: 184405 - protein, 62 aa, Oryza sativa
  Clone ID: PAT_MRT4530_813C.1.pep
CHTQAQHISLILVDRHAGRAHLLSHQLLTAIYVLVLNRSIVVAEVKNNHGTAACWALAAISC

SEQ ID NO: 184406 - protein, 61 aa, Oryza sativa
  Clone ID: PAT_MRT4530_81400C.1.pep
SSQEESIGFPTVSLIPVPPTKVDGPPPWSVEEGASSLRLSTTAAAAAAAAIAADQGMIPLV

SEQ ID NO: 184407 - protein, 82 aa, Oryza sativa
  Clone ID: PAT_MRT4530_81401C.1.pep
MTVTHNGKQYTAKKLNDNEWQLTSVSNPRMINHYGTTPLIRQCVTPGMMALHEGRTYRVSAVIQERKWVYLHTDAEIIRLSD

SEQ ID NO: 184408 - protein, 91 aa, Oryza sativa
  unsure (1)..(91): unsure at all Xaa locations
  Clone ID: PAT_MRT4530_81402C.1.pep
VHAFVHAFVHAYVHAFAHAXDKLQLXLGLRARDPGCASXFPSRRRATPVKRELRIKKCPWQGKPRPVDKQRESHSNATHILMLELRLVLLN

SEQ ID NO: 184409 - protein, 201 aa, Oryza sativa
  Clone ID: PAT_MRT4530_81403C.1.pep
MAISRLMVTKKQQAALLAVVAVAALAQVAAAAVHPVGGNGAWDTTGNYNAWSVSQKFSQGDSILFTYPSSHDVVEVPKASYDACSPANALASYTGGSTTVKLDAPGKHYFICGVPGHCAAGMKLEVTVAAATATKPRHKKGAAPAAAPAMPPAVSSPTEEMPAVTSPTGSPAPSSASAASTIAINVAATLAAGMALAFLAM

SEQ ID NO: 184410 - protein, 146 aa, Oryza sativa
  unsure (1)..(146): unsure at all Xaa locations
  Clone ID: PAT_MRT4530_81404C.1.pep
TSKKTSDEVYTYPPNSHHLSMDSNXYTTIRPLPRPHFIHSGTQFNSIQLHNTTHYTQHRNKHSPSGRQLAVGQVAAPASTARRMQVCIAASNAAINQHSTSHRRMSLVSRFLRGIPSRHGRRRXRCTAAACIGAAWRQKGKGSSRG

SEQ ID NO: 184411 - protein, 139 aa, Oryza sativa
  Clone ID: PAT_MRT4530_81405C.1.pep
PRVRRVNRWGFVHVGVRGKAFCVASRDVWSLFVLRGISKLVDSDLTGSFCFLSAVTGGALASLVAGSWALAMDKEHKELALPVAIYSFLIGYYMCRMIIAWPQACVATYHVAYAENPQNPHLGTLIPDHLRELQALATD

SEQ ID NO: 184412 - protein, 83 aa, Oryza sativa
  Clone ID: PAT_MRT4530_81406C.1.pep
MPLWRRWFKAKHGGGSQALLEEVAEGDDWSATKLSAVVLAREIILDGASTAGDLVVDCHPREVHPEEQLRSSLPLVSSPPLLP

SEQ ID NO: 184413 - protein, 127 aa, Oryza sativa
  unsure (1)..(127): unsure at all Xaa locations
  Clone ID: PAT_MRT4530_81407C.1.pep
MITSSLVAPARSKGLSSISRRGSSLAIVCSGCKKIXTDKPYXIGGGSXLHIDASGMEEHRGRVCTNSIDKDGAHVDMLWPIYSPEEWSPTGDTYIGVTMVLLIXPVTLIWLLGGGAXLVYNINAFLG

SEQ ID NO: 184414 - protein, 250 aa, Oryza sativa
  unsure (1)..(250): unsure at all Xaa locations
  Clone ID: PAT_MRT4530_81408C.1.pep
MAIKVVCRWLKRKNSPRLVETMDYGRKNFAAAKNIAARGRRCSAWCSVVKLGAMLRLGLSMLEHGRGSCRGQGSSESGMASPDACVEDKVHRIFLDFMTKVARYDELVDAEHFWRPKLLTESSAIIEIVKSNYSDRMRSYLEAGCTHHNEIIQNMNRSKLLLEELQFLEEDVYSAALTASLSSSRNTDDCPDHDNLTNVCSEDEQQPEDWLDGAVSFASVIVLVHNMLKMDYMMQKLEYTXEKIVKAFWV

SEQ ID NO: 184415 - protein, 568 aa, Oryza sativa
  unsure (1)..(568): unsure at all Xaa locations
  Clone ID: PAT_MRT4530_81409C.1.pep
MLRWRRSRVKRRRSRRERKGKRSSSSEDPGRRAVLEEEEEVEVKEKKTEEDGEEGKRKEKAAGLDLDEVMAVSPVGLGRRSRQIFDEVWRKFSRLGQMSSASSTALAEEEQAVLIRGGPMCEFXVPGAQDTTVLVVGATSRIGRIVVRKLMLRGYNVKDLXALVRRNDAEVIDMLPRSVDIVVGDVGDPSTVKSAVSGCSKIIYCATARSTITGDLNRVDNQGVRNVSKAFQDYYNELAQLRAGKSSKSKLLIAKFKSPKSLNGWEVDQGSYFPNTFASRFDEGIDASFDFSEAGQAVFSGFVFTRGGYVEISKRLSLPLGSTLDRYDGLLFSVGGNGRSYVVILETGPLADTSQSKKYFARMTTKVGFCRVRVPFSAFRPVNPQDPPLDPFLVHTLTIRFEPKRQRPGDGSQSATDPRNFELILEYIKALPTGQETDFILVSCSGSGIEPNRREQVLKAKKAGEDALRRSGLGYTIVRPGPLQEEPGGQRALIFDQGNRISQGISCADVADICVKALHDSTARNKSFDVCYEYVAKQGNELYELVAHLPDKANNYLTPALSVLEKNT

SEQ ID NO: 184416 - protein, 121 aa, Oryza sativa
  unsure (1)..(121): unsure at all Xaa locations
  Clone ID: PAT_MRT4530_8140C.1.pep
MSCCGGNCGCGSSCQCGNGCGGCKYSEVEPTTTTTFLADATNKGXWCCFRRIRDGGGERQLRLQHLQVRHQLRXLLLLQLQLEETYLHPIHHLINELPVPLHMPCTSYLACMQVLNLLLAS

SEQ ID NO: 184417 - protein, 217 aa, Oryza sativa
  Clone ID: PAT_MRT4530_81410C.1.pep
MATSGDLEEVPEPGMDHPAEPCMGVGGDQLVPTTEEISLPLAAETTSDHHEAAQLEQSAETSTSESESEEVAAKTTSDSSEAAAVIPKHAAEGSSTASEEEQVAKKELKEAEEDDGLQGESARERLKRHRREMAGRVWVPDMWGQEKLLKDWVDCAAFDRPLVPPDLLTARRALVAECCARRPDRTTTPPGPDDDAARQIQPSPGAKKLLLIIELDY

SEQ ID NO: 184418 - protein, 39 aa, Oryza sativa
  Clone ID: PAT_MRT4530_81411C.1.pep
MKARSRSSNGDSRLSVRKTKAEKDPNKPKRPPSAFFVFM

SEQ ID NO: 184419 - protein, 125 aa, Oryza sativa
  Clone ID: PAT_MRT4530_81412C.1.pep
MDLPVLDVLPVAGAAAAQLALDGGVSASCPPHRSAFPLPRTASGVGVVLLVVVVARMRMPRCDNSALVLRCACGSGPGLRRPRRVGRFLPVSGPSDADRTAGAARHEVGAYGENRGPGLCNGWAG

SEQ ID NO: 184420 - protein, 43 aa, Oryza sativa
  Clone ID: PAT_MRT4530_81413C.1.pep
NKEKPIYCTDLCMNTQTVLRVSRLSIKYIYVGRATTIGRYDRK

SEQ ID NO: 184421 - protein, 477 aa, Oryza sativa
  Clone ID: PAT_MRT4530_81414C.1.pep
MDAPAMLTTKHVPEDVGLRNVAAAEEEGGQRQMHRGEEKQHKPVLKKVKEKVKKIKNTIAGGGGGGHGGNNGGERASGSSSSSEEGEDDVAAQRMGDVDQRGYQEDVEEDKPVAMESDPEVHGAPMYDSARIPSVQEVEGDGGAPRVRLGDLGGPVVEDPAAPRSTTRVPREGEDIGTTPVVRAFESMSVSDDPKHVGAAGKPDADVQNDPMPVSDAATAGEEWKDATPDSAAAGATPGATYTDKIKSAAAGTTEYGKKLATTVYEKVAGVGTAVAGKVRQVTQSAGTATPGVAGGAAGSQSQDDVDASTTLASGEPATGGQQQQDKGVTVTGYIADKLRPGDEDRALSEAISGAVQRRKDDVAQRVPAVAPAAPGDTIAKVREAPAQVLAKARDAVTSLTGGTHVSDTVQPTTTTEADGAEVESAPVIRGEEIGETQRQPNFLFFDVFCVYEVAYKCHEYFEVRVRQRYRVRSPDD

SEQ ID NO: 184422 - protein, 118 aa, Oryza sativa
  unsure (1)..(118): unsure at all Xaa locations
  Clone ID: PAT_MRT4530_81415C.1.pep
VNSTSTQXGSITGTISITFKATKGISMSPITPARHSYSIAAGILKTRETPTHRSGLSTMLNTIIPTIKPPIQXHXSCPLVVPTHQPLCQPLTKXALTLRSLVPRVFLYFQAPFLDQSI

SEQ ID NO: 184423 - protein, 65 aa, Oryza sativa
  Clone ID: PAT_MRT4530_81416C.1.pep
HTEHLVVCYFLTSWKFFCFSFRGRSTTIFCGKENVYWGTRILISYYRSELKIVAVLNKCQQIPND

SEQ ID NO: 184424 - protein, 141 aa, Oryza sativa
  Clone ID: PAT_MRT4530_81417C.1.pep
GLRWTGCTAAVHGNRRPRLTLSKTDGRDRTVHDRSTTNGPDDVSDDVNTGGGSGAQARLRTTARRHERRAPTDRGRRGELTGDQNGGGRATDGAGDEEKAAAEIGSTVTAVLRRSTATAEGRTRTAATWRPRREGKIGEKR

SEQ ID NO: 184425 - protein, 837 aa, Oryza sativa
  Clone ID: PAT_MRT4530_81418C.1.pep
MAPLGSHSIPVLVTILLACFSFFLITAFSLVPTAPLHDASDTTDFQALLCLKLHLNDNAGVMASWRNDSSQYCQWPGVTCSKSHTSRVTELNLESSNLHGQIPPCIGNLTFLTIIHLPFNQLTGNIPPEIGHLRRLTYLNLTSNGLTGTIPEALSSCSNLQIIDISNNSIDGEIPSSMNKCSNLQAICLFDNKLQGVIPEGLGTLSNLSVLYLSNNNLSGNIPFSLGSNSFLNVVILTNNSLTGGIPPLLANSSSLILLDLTNNRLGGEIPFALFNSSSLNLISLAVNNFVGSIPPISNISSPLWYLSLSQNNLSGSIPSSIENLSSLEILYLSQNNFQGTIPSSLSRIPNLQELDLTYNNLSGTVPASLYNMSNLVYLGMGTNKLIGEIPDNIGYTLPNIKTLILQGNQFQGQIPTSLGIAKNLQVINLRDNAFHGIIPSFGNLPDLMELNLGMNRLEAGDWSFLSSLITSRQLVQLCLDKNILKGTLPSSIAKLSTSLQVLLLTGNEISGTIPQEIEKLTSLTLLYMEKNLLTGNLPDSLGNLLNLFILSLSQNKISGQIPTSFGNLSHLSELYLQENNLSGPIPSSLGSCKNLEALNLSCNSFDSSIPEELVTLSSLSEWLDLSHNQLDGEIPSEIGGSINLDILNISNNRLSGQIPSALGDCVHLSSLRMEGNLLDGRIPDSFINLRGIVELDLSQNNLSGKIPEFMESFGSMKLLNLSFNDFEGQVPTEGIFQNASEVFIQGNKKLCGTYPLLQLPLCNVKPSKGKHTNKILKIVGPIAICLALTSCLALILLKKRNKVKQASDPSCKELKTFTYSTLKKIPRIIVTLKIMS

SEQ ID NO: 184426 - protein, 364 aa, Oryza sativa
  Clone ID: PAT_MRT4530_81419C.1.pep
MMMMMRRAFRHLARQQRRPLSHVPESAVYGGPRPQDVGAAAGAGAGAGATRRVTVTTLRGKHRRGEPITVVTAYDYPSAVHVDSAGIDVCLVGDSAAMVVHGHDTTLPISLDVMLEHCRAVARGATRPLLVGDLPFGCYESSSTRAVDSAVRVLKEGGMDAIKLEGGAPSRISAAKAIVEAGIAVMGHVGLTPQAISVLGGFRPQGKTVDSAVKVVETALALQEAGCFSVVLECVPAPVAAAATSALQIPTIGIGAGPFCSGQVLVYHDLLGMMQHPHHAKVTPKFCKQFGNVGHVINKALSEYKQEVETRSFPGPSHTPYKIAAADVDGFANALQKMGLDEAANAAAAAAENAEKDGELPENK

SEQ ID NO: 184427 - protein, 46 aa, Oryza sativa
  Clone ID: PAT_MRT4530_8141C.1.pep
MRFRDHFLDRDNHLRGFAERPEQEEHDRRLAAALVAITATGRRVLG

SEQ ID NO: 184428 - protein, 293 aa, Oryza sativa
  unsure (1)..(293): unsure at all Xaa locations
  Clone ID: PAT_MRT4530_81420C.1.pep
KGKRGLLRQRLGFAVDRVHGGGSRKRTAEIXLTKTNGRDRPVHGRTTTDGNDDVSGDVTTGGGSGXTSSPANDGATTRTEGTSTXRTTRRTHRXQRRSGGNLRLDDDGGAPAVYSNDGGADEDGNATATTTAAFPXRRRRLERRRRTAGAAATTAARGYTVLGFYRRRETKARVAAGARRRRRRLTATGDGEGRSRVRGERRIRFEIESTDFQTILADDSKREKVEEIPKIISPLLISPEKERGGGPHLSAAASARGRLGLTGPAWAEEERERVLGRLSAQSQKKTFKKPFSI

SEQ ID NO: 184429 - protein, 91 aa, Oryza sativa
  unsure (1)..(91): unsure at all Xaa locations
  Clone ID: PAT_MRT4530_81421C.1.pep
KKCAAKVNMEYXLDPTXGEXIXXXXXXXSXGPXGXXXXFVIWKXGGGTQSNMNANEVIANRAAEILGHKRGEKFVHPNDHVNRSQSSNDTF

SEQ ID NO: 184430 - protein, 63 aa, Oryza sativa
  Clone ID: PAT_MRT4530_81422C.1.pep
MSRCPRVVNARGKVLVESNSYHPLRHRIADRIVRAASINKHAAHADVSSSSTPSPTSGGSNPP

SEQ ID NO: 184431 - protein, 150 aa, Oryza sativa
  Clone ID: PAT_MRT4530_81423C.1.pep
MAWHGGLRRRWAWRSSRDDGYSLHTLGHPDPVSSDEAVLGDDWRERWGRGEERLQSLLNVATRWPSPPFPLMLMVATTVVLWLVLLGGSCCHAHRCGLDGGNSPPWQWASVQAIEKIAILVHSDDDIQDLQHGGRSVVGRWRSDRALKWF

SEQ ID NO: 184432 - protein, 88 aa, Oryza sativa
  Clone ID: PAT_MRT4530_81424C.1.pep
GGSPATRWPCRRARTPAAARRADTAAGRVVACAAAWPMISTRRRPSRRSRQRHPRPAARRGRGGRSARRRSPPWIKNEPPLKKRVVVA

SEQ ID NO: 184433 - protein, 127 aa, Oryza sativa
  Clone ID: PAT_MRT4530_81425C.1.pep
RPGSLSHSVSPCPSLFTLQALLLSAHALVQPGEDAVQRIGSGEGSSGQAPGRRSAQRDGVKVEELIRRRRRRVLTLSFSLSHPARRQGRLLGGTQLGEDAVQRAGGGDGSSDQAPGRRSAQRRWRQG

SEQ ID NO: 184434 - protein, 32 aa, Oryza sativa
  Clone ID: PAT_MRT4530_81426C.1.pep
QLFTGLLPVWSYVLITWNAAVNIVKCKQYTSL

SEQ ID NO: 184435 - protein, 686 aa, Oryza sativa
  Clone ID: PAT_MRT4530_81427C.1.pep
MACNGSRAVRFQNDMELPHWKTSSVPECTSSSRSTKHGKAQHQQQQHHDPRKWRRGGGGGGSLKDRVLSRAFSEELESLMSSGANHLFFDPRGQLIHLWSKIFLAACLASLFVDPLFLYLTGTRQNMCIELKYSLAFTLSMIRSLLDLFYAAHIFFRFRTAFIAPSSRVFGRGELVIQPCKIARRYLAGTFWFDLVTALPLPQFVIGIVIPRLKESATANRKNILRFSIIFQYLPRLFQIFPLSRQIVMATGVMTETAWAGAAYNLILYMLASHVLGALWYLFSVQRQEACWREACHVEGPSCQTLFFDCKTVSSNRTMWYELSNITSLCTPSNGFYQFGIYGEALDNGLTSSSFTQKYFYCFWWGLKNLSCLGQNLSTSLFIGEITFATVIGVLGLVLFALLIGNMQATMVRLEEWRTKRTDMERWMNHRQIPQPLKQCVRRYHQYKWLATRGVDEEALLEDLPMDIRRDIKRHLCLDLVRRVPLFDEMDERMLEAICERLRPALYTRGTRLVRELDPVDSMLFIIRGYLDSYTTQGGRSGFFNSCRIGAGEFCGEELLPWALDPRPAASLPLSTRTVRAVSEVEAFALVADDLRFVASQFRRLHSARIRHRFRFYSHQWRTWAACFIQAAWRRNKRRRASMELRMREGGEARPGGSVRCRRHSCDGKALIKKPMEPDFTVEEED

SEQ ID NO: 184436 - protein, 516 aa, Oryza sativa
  Clone ID: PAT_MRT4530_81428C.1.pep
MRRAAALLRLLRSGASAGVRGRPACAAVHPLAVKSGSGSDARVATALADAYAKSGLVDRARRVFDETPLRDQVLWNVMVSCYSSHGLVRECWDVFGSMRRSGFPGDGFTFSALLSVRASSSSSCYDHANLLLVLGSSVHGIVIRLGLHLDVVVATALLDMYAKCGQVAEASRVFDAMVLRNTVSWNAIIVCYGKHDRGKEAFDLFVSMMRHGFCPDELTLASLLSSCADMAAANEATQLHAYTVRRGLQDFLQVGNALIMAYGKNGFVQEAKRTFGMIHNPDLVTWSSMVSSFAYLGLAKSAIDLFDRMLQQGIRADGIAFLGVLSACSHAGLIEDGFKYFLLMTRDYKIDPTPQHLACLVDLLGRAGRIRDAYEFLVNMSCDANVDVIGAFLGACRMRGNIESAKWAASRLFSLKPDDPINYLLISNTYAAAGDWNELAKVFTYHRHEIMYTQEGRKSTVSSSIYWLMVAKQNKALDRFKFSYLLVSQEICAAQSWLLALWESLMSQTSRCNEIE

SEQ ID NO: 184437 - protein, 253 aa, Oryza sativa
  Clone ID: PAT_MRT4530_81429C.1.pep
MAPPPPCCVLVVRCCSGSLPSPPPPPPPRPSPSNNLRIARREFVLRSSELATLAAIFHLSGTKPRYLGVQKSPPSLALCPATNNCVSTCEDITDSIHYAPPWNYNPKDGRRAKPITKHEAINQLIQVVTQTKPDNFTPRLVEKTDDYVRVEYESPIFGFVDDVEFWFPPGNKSIVQYRSASRSGFIDFNANKKRVKARTHAPNIDHFYYGVGVVLLSIIVLIHVSCSVRSIFPLLQALRLALENKGWASESTI

SEQ ID NO: 184438 - protein, 879 aa, Oryza sativa
  Clone ID: PAT_MRT4530_8142C.1.pep
PGSTHASGLMRSGAQAPRGGGGGGAFSKRTLSGYMRIMSSGASTAASSLLSVGASLVNSIASHDEDGSRDQVQWAGFDKLECGGDMLRQVLLLAYRSGFQVWDVEHANDVRQLESRHDGTVSFMQLLKKPIASTNSEDKFADERPLLALACDGTSTGSLISNDGNGPVPNGANGTLHNIGHENHPTVLRFYSLRVHDYVHTIKFRSTVYSIRCSSRVVAVSQANQIHCFDAATLEREYTILTSHIVPPISSYGPLALGPRWIAYSGNPVPVPDTGRVTPQLLNLSPLVPQPGSNGSVVAYYAKESSKQLASGIITLGDVGYKKLSKYCSDLIPSSNNVINQRNSGFKANGATINGHTDSEYAGMVIVRDIVSKSMVVQFRAHTSPISALCFDPSGTLLVTASIHGRNINVFRILPSSHGSSSEAGPNGTCVHLYKLQRGITNAVIKDISFSDDSEWIMISSSRGTSHFFAISPYCGSTSFHYNENNLAENSYAVDSSVNHTAHWSQNSAPSLSLNQKILSVTGPPVTLSVVSRIRNGGNLLKGAVHGAAAFATGVSSPISGAIASTFHNCKGAVKNSDGSSPCMKYHLLVFSPSGSIIQYVLHRSAEQDPGIDFPSSAIPYGSQRETDTRFIIEALQKWDVCHKRNRRDAAESFVYSDFDIGENSKLFQKVAKKGTSVYPSNGTAVEKQKLGDENHNFYISESELQTHVVPTPLWSRSGMHFQVMGDGALEADNTGIISGELEIEKLQTRNIESRSKNLIPVFESLHTSRFQQSRVSTPDSNKYGLLQRQKSGFSEDGRLSCRSSSSSLDCMSEGPISTDDNGFGQCLVEDSGGAVNKNPNVNPRSELVNNTQSLNTEAQLGFVNNKEDCEDREQLPDL

SEQ ID NO: 184439 - protein, 98 aa, Oryza sativa
  unsure (1)..(98): unsure at all Xaa locations
  Clone ID: PAT_MRT4530_81430C.1.pep
PWRLLLLSGAPAASPPPRRPTPTTSASASARREAASPPPPPPATSTTTTPXAPAKAQVVGWPPXXHTGGTPSIXPPPPPPQPRRVVMRNRSSSSEEGL

SEQ ID NO: 184440 - protein, 90 aa, Oryza sativa
  Clone ID: PAT_MRT4530_81431C.1.pep
AWGPMPMILGTSKSYPLVGSWARRTPCASTMVHASCIAAPGPVWIPCQEGWLGRQHLHHLAFPARLAHSCLILLCGGCRSHGILCPGLTF

SEQ ID NO: 184441 - protein, 219 aa, Oryza sativa
  Clone ID: PAT_MRT4530_81432C.1.pep
MASSSSLRSTSCLASAAETDADNLCLRLGPPGSSITTTTTTGGADPAAKRSLGAKRSLESTDSMASGTGTSAAGDEHDDDTAAPAKAQVVGWPPVRAYRRNTFHQAAAAAAATKKGGDEKQKQQQQGGGLYVKVSMDGAPYLRKVDLKMCKGYRELREALDLLFTKCFSATASDGCSDGQFAIAYEDKDGDLMLVGDVPWEMFISSCKKLRIMKGSEAR

SEQ ID NO: 184442 - protein, 105 aa, Oryza sativa
  Clone ID: PAT_MRT4530_81433C.1.pep
PPPPQPPPAWAAVPATHPSPPATVAAVPPPPSPPHPPPSTPCRAEQHGPAAAAGTSPETASAAAAGGGGRRSRRGSSPWRRRCGRTGAAGWKDSMEWLDFEFSRP

SEQ ID NO: 184443 - protein, 493 aa, Oryza sativa
  Clone ID: PAT_MRT4530_81434C.1.pep
MDDRRTILMDRYEIGRQLGQGNFAKVYYARNLTSGQAVAIKMIDKEKVTRVGLMVQIKREISIMRLVKHPNILQLFEVMASKSKIYFVLEYAKGGELFKKISKGKFSEDVARRYFHQLISGIDYCHSRGVYHRDLKPENLLLDENESLKVSDFGLSALSESKRHDGLLHTTCGTPAYVAPEVLSRRGYDGAKADIWSCGVILFVLVSGYLPFHDTNLIEMYRKIAKAEYKCPRSFSAELKDLLYKILDPDPSTRISIPKIKRSAWYRKSSDVNALKSKHETGDKVYKGEATTSDTTECSIFEGNRASSRDKVYTNGEATTSDSPECSNSDGKQASLSLPNLNAFDIISLSTGFDLSNLFEERYGRREERFTTRQPAAAIFAKLNELARRFKLKIKKKENGVLRLVAPKEGIKGLLELDAEVFELAPSFHLVEFKKSNGDTIEYQKLMKEDIRPALKDIVWAWQGGQHQQPEQSMQGMQGEQQPSRLPSQQPQG

SEQ ID NO: 184444 - protein, 404 aa, Oryza sativa
  Clone ID: PAT_MRT4530_81435C.1.pep
MAFAAEPMDLEVSPDSSPAAAAAAAVCSICLDAVACGDGVAARSTARLQCGHEFHLDCIGSAFNAKGVMQCPNCRNIEKGHWLYGNESQPCSHSDTGDWLNGETFDYPFSFEFGWCPFNTPLTSVFGESESEPNPFLEYIGSLHGFHHPMYAPSSSTASTESIPFHQRPTGTEGHATTDLRNTQVFNESEPRNHEREQQYLGSVQMPGTLNHSTAPFGIGMPRYDGGNQQRLRPHMHDNSLFHRPTARRASNLAHLRSLTAASETRGHGHGMTSHAVQQTIPSSMASNPQPPATRRVRPRALSITSFIAASSSAEIRAPHDFPLTETASTTNGNIRNGVGAPRHANQSYSWSSETFWPQTGEPHWWSPMAPVHNRSYDNFSGRSATELLSIYGAQNGLPTPRFL

SEQ ID NO: 184445 - protein, 311 aa, Oryza sativa
  Clone ID: PAT_MRT4530_81436C.1.pep
MVSGSRSPDSERWKIHGDGDLPLSFSYYVTVADLWTIDKCWDAQKLNSIFEQQAVNMILQVPIIQDNSEDKLRWKFTPNGECNSKSAYKEIFNRIFSIMWQIWKARNDLKFQGKVLEPTQVCFAAEAMINTYSCLIEQPHLQDNIDQSPSERRMEQLPEGNRCYVDASWEHNKACIGIFFHLPATHNALFIKAFCHLTESPLQAELLALQLAMEIALVLNFTDTIFLMDCSTVVDTAKKGNFHEDPSHWSLLPIWSQILTFLPGHLLKVHWIPRHLNKLADKLAKDARGNPSSPPIFSCQNIAHIANGDIA

SEQ ID NO: 184446 - protein, 439 aa, Oryza sativa
  Clone ID: PAT_MRT4530_81437C.1.pep
MAAPRHHHLALAVALALLVVTAAAADEGGPRGRRVLVLVDDLAVRSSHSAFFASLQGRGFDLDFRLADDPKLSLHRYGQYLYDGLVLFAPSTPRFGGSVDQNSILEFIDAGHDMILAADSSASDLIRGIATECGVDFDEDPEAMVIDHINYAATDAEGDHTLIAGDDLIQSDVILGSKKIEAPVLFRGIGHAVNPSNSLVLKVLSASPSAYSANPKSKLASPPSLTGSAISLVSVMQARNNARVLISGSLDLFSNRFLKSGVQKAGSKIRHEKAGNEQFVTETSKWVFHERGHLKAVNVKHNKVGETNEPGMYRINDDLEYSVEIYEWSGTSWKPYVADDVQVQFYMMSPYVLKTLSTDKKGVFSTSFKVPDVYGVFQFKVEYQRLGYTGLSLSKQIPVRPYRHNEYERFITSAYPYYAASFSTMGAFFIFSFVYLYHK

SEQ ID NO: 184447 - protein, 90 aa, Oryza sativa
  Clone ID: PAT_MRT4530_81438C.1.pep
ILRLVSEIPTINQLKLRENLILSTIFSVRYLDSRNKYIQELPLSRIMSFLPSNNPEPHFPLKHSGNSRAFLKMSSLITKISYEDVLSFVA

SEQ ID NO: 184448 - protein, 112 aa, Oryza sativa
  Clone ID: PAT_MRT4530_81439C.1.pep
MAVNTPSTCCRSSDGASECACAQKATCSCGQKSALQCTCAKAPVENTVNGPRCSCRARPAGECTCDRAASENVTPSGATCACGSRPAGGCTCEKAADGGFNPANEIDFTTKK

SEQ ID NO: 184449 - protein, 163 aa, Oryza sativa
  Clone ID: PAT_MRT4530_8143C.1.pep
MGKDCGKHGDDDFRQGCRRFITVLVVLAILVGIIALIVYLVLRPTHPRFYLQDATLRQLDLSNSSSTAGGVPSTTIQVTVASRNPNDRVGVYYDRLDVYASYKYQQITVAASLPPVYQGHGDVDVWSPVLAGPSVPFAPYLADAISQDCQAGYLILQVKIDGR

SEQ ID NO: 184450 - protein, 190 aa, Oryza sativa
  Clone ID: PAT_MRT4530_81440C.1.pep
QIQNLGKWVVLSYTSGIQTQGHRQGSPFHVTSHSPSCVAHTAHPAVISRTTWLYHIMSATISGKTPNTQPHTPSPGHHHRHDTTRQQSNTQYVGPHTISGYRALRHPINAHTSSSHMRSSSSLAYTISHQTARASSQLHPPKSPDTPACRLCFNLAPQHSARHIQRVEIRDQPKITMSFTNNPNAIQGDQ

SEQ ID NO: 184451 - protein, 79 aa, Oryza sativa
  Clone ID: PAT_MRT4530_81441C.1.pep
SHGLSRGPTPCTPRCIRRVIARGMPRPLRQQLQQGPSSPLSLSAWMRPLMTSTRPSTTPWMLPHLLTKLKMKLTREIAQ

SEQ ID NO: 184452 - protein, 215 aa, Oryza sativa
  Clone ID: PAT_MRT4530_81442C.1.pep
MVNTTAGVKCGGGGAALPLSTLNHVSLVCRSLSTSLTFYRDFLGFVSVRRPGSFDFDGAWLFNYGIGIHLLQAEDPESMPPNKEINPKDNHISFTCESMEAVQRRLKEMGVRYVQRRVEEGGVYVDQIFFHDPDGFMIEICTCDKLPVVPLDAAAAHSIFAGRSPPPPVACKIRPVKQPSATKLGSVAAGGCVGEVIVVDAINGAAAAGGGGAMS

SEQ ID NO: 184453 - protein, 93 aa, Oryza sativa
  Clone ID: PAT_MRT4530_81443C.1.pep
FLKKYSKKYEQGDHVAFNQVSEQDRKRRTQLQEEWDSWVAKWKQMHEEERAYRRELRDGEASDDEEEYEAKEVEVEEVVDVRQEVLAFDLDQE

SEQ ID NO: 184454 - protein, 609 aa, Oryza sativa
  unsure (1)..(609): unsure at all Xaa locations
  Clone ID: PAT_MRT4530_81444C.1.pep
MDLGMSTSTSASLKKLQEDGALPGRGAMEREPGGTEPEPVLGRIVAIEDYILCGFLPPPSEFLLLVLNFYGLSLLHLNPNSIAFLSIFSHLCEAYIGVEPFLDLFRFYYELRWMESTRVSGCLSDATVERRVGQLMISGLTTASDVPMPLYDKEAIEREAAINALPLTDVIGLLADHQATASLKESVARETPNVAIAAAATTSGSRVPKTGRTFTSVLGRRRRASSPPRCHLNSRLIXQAVDASSPPPQRRKLVTLGENALRPTRGPSANVLTWXELQAEMKRILEAGARGVSREIEEAKTAAASSANKHADKLERDLAEVREDLQKMRELVAGNEWQRRGLEDRMSELENNLSEIRGSLRVTYTGLHQLAGQCGVTTTIPANPDEFSLTSSLAELATAMEAIPSKHAARVVEEASNGIYTGXCHVLACVRLAHPKLDLQQTLDRGAANDAXDVDVEDVQQRGQPKLPVVAPAITLQTPMSQDDMGQDSPVETGVAMTSLSWELRVPRGDPEESAAGYISWLNGACTQLEGVGKRIDEALKQECRRSSRYAGGHVLACIRDHRPQLHLEFLHXARSRRTLAEIEHLAKSMAPLAEEVFQSMDWRWPSCV

SEQ ID NO: 184455 - protein, 125 aa, Oryza sativa
  unsure (1)..(125): unsure at all Xaa locations
  Clone ID: PAT_MRT4530_81445C.1.pep
LKSCCTSMAHVCRELRVPRGDPEESAAGYISWLNGACTQLEGVGKRIDEALKQECRRSSRYAGGHVLACIRDHRPQLHLEFLXFARSRRTLAEIEHLAKSMAPLAEEVFQSXTGVGLPGSLCTSP

SEQ ID NO: 184456 - protein, 65 aa, Oryza sativa
  Clone ID: PAT_MRT4530_81446C.1.pep
KGKQIFYFFSNPPLFKNLNNMHTFIGDGTLKNLPYKTTPTEDTHWLFTKKICVETLGGLTRNENP

SEQ ID NO: 184457 - protein, 678 aa, Oryza sativa
  Clone ID: PAT_MRT4530_81447C.1.pep
MDLGKSTSTSASLKKLQEDGALPGRGTMEREPGGTEPELVLGRMVAIEDYILCGFLPPPSEFLLLILNFYGRSLLHLNPNSIAFLSIFSHLCEAYIGVEPFLDLFRFYYELCWMESTRALPLADVIGPLADHQAAASLKVSAARGVPDAAVAAAATTSGSRVPKTGRTFTSVLGSRRRASSPSAVDASSPPPRRRKLVTLGEKSAQARATPDKSEGASGASPAATSTDVVVAPRSREATPSGPSSALGPSRRPPANVLTWRELQAEMQCILEAGARGISREIEEAKTAAASSANTRADKLERDLAEVREDLQKMRELVAGNERQRRGLEDRMSELENNLSEIRGSLRVTYTGLHQLAGECGVTTTIPANPDEFSLTSSLAELATAMEAIPSKHAARIVEETSNWIYTGACHVLACVRLAHPEHDLRQVLDRGAANDARKGVMEEVGELGESVLPFFEEDVDVEDVPQREQPDSPVIAPAIALQTRVSQDDMERNSPVETGVAMAPLDLESRLADQDRRIQYWKTKCEVAELERAMVEVKKDQAVEALKGREVWFDSYLKSCCTSMAHVCRELRVPRGDPEESAAGYISWLNGACTQLEGVGKRIDEALKQECRRSSRYAGGHVLACIREHRPQLHLEFLCDGFARSRRTPAEIDHLAKSMAPLAEKVFQSMDWRWPSW

SEQ ID NO: 184458 - protein, 200 aa, Oryza sativa
  Clone ID: PAT_MRT4530_81448C.1.pep
KQRRSNRNLIPEIFQSKLPLEGTGASVKMIRCVVKCGGQQQHVVVAARGDRKSPAIAAPPPATVRMPGRVLCCGMRSRGADLAGVEMAAGPQPQGGVSGLFRGPRSSPRYSRVRATATVDPEDIPLEKVQAKSSGSVLPYVGVAWLAAILFGYHLAVVNGALEYLCKDLGISENAVLTGWVVSTTLAGATAGFFTGRALA

SEQ ID NO: 184459 - protein, 709 aa, Oryza sativa
  unsure (1)..(709): unsure at all Xaa locations
  Clone ID: PAT_MRT4530_81449C.1.pep
MDLGKSTSTSASLKKLQEDGVLPGRGAMEREPGGIEPELVLGRIVAIEDYILCGFLPPPSKFLLLVLNFYGLSLLHLNPNSIAFLSIFSHLCEAYIGVEPFLDLFRFYYELRWMESTRVSGCVGFRLRDGLKSRYIPFQCPSSRSKWRARWFLVPEEQPDKIPSWTAKPALTPALQSFIDAIDDLRARGLSDATVERRVGQLMINGPTTASDVPMPLCDKEVTEREAAINAHPLTDVIGPFADHQAAASLKESVARETPDVAVAAAATTSGSRVPKTGRMFTSVLGSRQRASSPSAMDASSPPPRRRKLVTLGEKSAQARAAQDKSEGASGVSPAATSTDVVLQAEMQRILEAGARGVSREIEEVKTAAASSANERADKLERDLAEVREDLQKMRELVAGNERQWRGLEDRMSELKNNLSGIRGSLRVTYTGLHQLAGECGITSTIPANPGEFSLTSSLVELATAMEAIPSKHMARIVEEASNGIYTGACHVLACVRLAHPELDLRQILDRGAANDTRKGVMEEXDVDVEDVQQRGQPKLPVVAPAITLQTPMSQDDMGRNSPVEMGMAMTSVADLESRLAGQDRCIQYWKTKCEVAELERAMVEVKKDQAVEALRGREVWFDSYLKSCCTGNPERIYRAYHKPAWATTGLVVYLSSSRRTQARVGVMELGQPGCPVDRLPDSPRHERGTARCQLGTGANSEVWCDVTP

SEQ ID NO: 184460 - protein, 68 aa, Oryza sativa
  Clone ID: PAT_MRT4530_8144C.1.pep
KKKKKERGGVGGSKQTYAVQCESITYVSRASLNPIHCSSCFITFIDCGKPFHNLNLIAKPLHWGGGGG

SEQ ID NO: 184461 - protein, 63 aa, Oryza sativa
  Clone ID: PAT_MRT4530_81450C.1.pep
SGRSSISKSSRTLTLSSGRQAAANEQGERLVWLGAHHQQVVRRHQQRPHHQPHPEKTVVYPSC

SEQ ID NO: 184462 - protein, 772 aa, Oryza sativa
  unsure (1)..(772): unsure at all Xaa locations
  Clone ID: PAT_MRT4530_81451C.1.pep
MDLGKSTSTSTSLKKLQEDGAIPGRGAMEREPGGTEPEPVLGRIVAIEDYILCGFLPPPSEFLLLVLNFYGLSLLHLNPNSIAFLSIFSHLCEAYIGVEPFLDLFRFYYELRWMESTRVSGCVGFRLRDGLKSRYIPFQCPSCHSKWRARLFYLQIEDSDPIFVIPEEQPDKIPSWTAKPALTPAFQSFIDAIDDLRARGLSGYEVATDFISRRIQPLQVRAHPAFDYSGPEDATWVSPRGLSDATVERRVGQLMISGPTTASDVPMPLCDKEATKREAAINMSALPLTDVIGPLADHQAVASLKESIARETPDVAVAAAATTSGGRVPKTGRTFTSVLGSRRRASSPPVVDASSPPPRRRKLVTLGEKSAQARVAQARAAQDKSEGASGASPAATSTDVVVAPRSREVTPSGLSSALGPARGPSANVLTWGELQAEMQRILEAGTCGVSREIEEAKTAAASSANERADKLERDLGEVHEDLQKMRELVAGNERQRRGLEDRMSELENNLSEIRGSLRVTYTSLHQLAGECGVTTTIPANPDEFSLTSSLAELATAMEAIPSKHAASIVEEASNGIYTGAYHVLACVRLAHPERDLRQILDRGAANDARKGVMEEGXDVEDVQQRGQPKLPVVAPAITLQTPVSQDDMGQNSPVETXRGDDLLRELRVPRGDPEESAAGYISWLNGACTQLEGIGKRIDEALKQECRRLSRYAGGHVLACIRDHRPQLHLEFLREGFAHSRRTSAEIDHLAKSMAPLAEEVFQSMDWCWPSW

SEQ ID NO: 184463 - protein, 83 aa, Oryza sativa
  unsure (1)..(83): unsure at all Xaa locations
  Clone ID: PAT_MRT4530_81452C.1.pep
VSDLVFFSCLRRESRTGQESRLVFVGXRSLHCLPYVCSHSRPVFNPCFEATPSIPALVPGWGVSGFLSSGRSIPSRISRMFSA

SEQ ID NO: 184464 - protein, 155 aa, Oryza sativa
  Clone ID: PAT_MRT4530_81453C.1.pep
MENSFDGMLPLRNLARKKISIHLKDTEATEFFYLGRSSVCKLESLLRLSGIVPSKLFLASISVDNNGRLSTKIERDSFPHEVNAPEGSRSWDLRQRRASRSALESLRNCAKADSGRYGLRKWKKARSRRSWGDIMLALGLVGFLSEPTRGNTYIL

SEQ ID NO: 184465 - protein, 43 aa, Oryza sativa
  Clone ID: PAT_MRT4530_81454C.1.pep
CHVCGTLHNNALCCIPALSVGVNVVHFRISCFTDMLNRRPFLF

SEQ ID NO: 184466 - protein, 497 aa, Oryza sativa
  Clone ID: PAT_MRT4530_81455C.1.pep
MQGSVGVHGILLLAAAAVLTQCLLAAAVNTPVVQCASGTTKCTVTNAFGAFPDGSTCHVAAAAFPATEEELVRVVAGAAASGTKMKVATRLGHNFMKLSCPGGDGLVISTNALNRVVGVNAARMEITVESGVTLSELIDAAAHAGLALPHAPYWLDLTVGGLLSTGAHGSSVSGKGGAVHEYVTGMRVVTPAPASEGYAKVRVVNAGDPDLDAVKVSLGVLGVISQVTLALQPLFNRSVSFRRRGDGDLAERAVAFAGEHEFGDVVWYPARGEAVFRIDDRVATTKTNTISSGDFQNVIQSSRSTEQQQHGDVLPFQAGISVPLSRASAFIRDAQRLLDMNPGALCGGENGGILIRYVKASTAYLGKTEDSVEFDTTSCRHDGDAAMPEEMEQMALRKYGGVPHWGKNRNVAFDGAIAKFPKAGEFMKVKDAYDPDGLFSSEWSDQVLGVSGAGGVNVARNGCGMEGLCVCSEDEHCSPEKGYLCRPGMVYRDARAA

SEQ ID NO: 184467 - protein, 556 aa, Oryza sativa
  unsure (1)..(556): unsure at all Xaa locations
  Clone ID: PAT_MRT4530_81456C.1.pep
LPLSAFAQFRNDSSADRLALLCLKSQLLDPSGALTSWGNESLSICNWNGVTCSKRDPSRVVALDLESQNITGKIFPCVANLSFISRIHMPGNHLNGQISPEIGRLTPLHILNLSMNSLXGEIPETISSCPHXEIVILQNNSLTGEIPNSLFNCTTISYIDLSYNGLSGSIPPFSQTSSSLRYLSLTENHLSGVIPTLVDNLPLLSTLMLARNNLEGTIPDSLSKLSSLQTLDLSYNNLSGNVPLGLYAISNLTYLNFGANQFVGRIPTNIGYTLPGLTSIILEGNQFEGPIPASLANALNLQNIYFRRNSFDGVIPPLGSLSMLTYLDLGDNKLEAGDWTFMSSLTNCTQLQNLWLDRNNLQGIIPSSISNLSESLKVLILIQNKLTGSIPSEIEKLSSLSVLQMDRNFLSGQIPDTLVNLQNLSILSLSNNKLSGEIPRSIGKLEQLTKLYLQDNDLTGKIPSSLARCTNLAKLNLSRNYLSGSIPSKLFSISTLSEGLDISYNQLTGHIPLEIGRLINLNSLNISHNQLSGEILLSLGQCLLLESVHLEANFLQ

SEQ ID NO: 184468 - protein, 60 aa, Oryza sativa
  Clone ID: PAT_MRT4530_81457C.1.pep
TLGSQVSHHRCVTPNSLDSDTDAGWCQWHLRLLRYRGYPSYACVPAEALYRVLRIFIRRS

SEQ ID NO: 184469 - protein, 83 aa, Oryza sativa
  unsure (1)..(83): unsure at all Xaa locations
  Clone ID: PAT_MRT4530_81458C.1.pep
TESTGPGTGAPRGADVAPTWRPRGLPRGRRWTAPIYPLPKGRSDGGGSARPGARASGLSRPGGHGARRRSEAXEQRRAASGSD

SEQ ID NO: 184470 - protein, 203 aa, Oryza sativa
  Clone ID: PAT_MRT4530_81459C.1.pep
MEMVGGKERLERAPQREARRDVGGERGDVAVGHAGEGGGEEEGERRGADGHVAAQVPPPGGERGDEERGDSEPPVALESFLLKKSEKRQKGIHKIVGYDLARHQHFHRDMRNDQHDHYEEVDNHEKEERDMKKPPVLLFTLKVEAPPSSEEGIKEELCDNASLISMPQLVNEHAIPNVNSADFKNMVDLHRQDQQPTERCIDH

SEQ ID NO: 184471 - protein, 456 aa, Oryza sativa
  Clone ID: PAT_MRT4530_8145C.1.pep
MADKTLREFADPSADNLAIGPQINMGDVDFDLNTYTIKGVNLDAVRLRLFPFSLLGRAKQWFYANHAAVNTWDKCSTAFLSKFFPMGKTNALHGRISSFQQTRDESIPEAWERLHEYVAACPHHGIDDRLILQNFYNGLTPMSRDHLDAAAGGAFFSKTGTVKALDSHVTCEVCGNTGHSGNDCLETREGAMYMGNNNNGYRPQGGQGWNQSRPYYQGVPANESGRIPRQPDSSVENVKAITTRGGTNGIEREAPSSDSADKEVQPEKTMPLGYCDTRFLPFPQRSRKPSVDEQFARIVEDILNNKRPLATTEVVKLTEQCSNVILHKLPEKKKDPGCPTITCSIGAQQFDQALCDLGASVSVMPKDIFDKFNFTVLAPTPMRLQLADSSVRYPTGIVEDVPVKIRDFFIPVDFVVLDMDTGKEMPLILGRPFLSIAGANIDVGTGSIRFHINGKE

SEQ ID NO: 184472 - protein, 523 aa, Oryza sativa
  Clone ID: PAT_MRT4530_81460C.1.pep
MLMMLGAASQWILAAAAAAAVAALLWLAVSTLEWAWWTPRRLERALRAQGIRGNRYRLFTGDVPENVRLNREARKKPLPLGCHDIIPRVLPMFSKAVEEHGKPSFTWFGPTPRVMISDPESIREVMSNKFGHYGKPKPTRLGKLLASGVVSYEGEKWAKHRRILNPAFHHEKIKRMLPVFSNCCTEMVTRWENSMSIEGMSEVDVWPEFQNLTGDVISKTAFGSSYEEGRRIFQLQAESAERIIQAFRTIFIPGYWFLPTKNNRRLREIEREVSKLLRGIIGKRERAIKNGETSNGDLLGLLVESNMRESNGKAELGMTTDEIIEECKLFYFAGMETTSVLLTWTLIVLSMHPEWQERAREEVLHHFGRTTPDYDSLSRLKIVTMILYEVLRLYPPVVFLTRRTYKEMELGGIKYPAEVTLMLPILFIHHDPDIWGKDAGEFNPGRFADGISNATKYQTSFFPFGWGPRICIGQNFALLEAKMAICTILQRFSFELSPSYIHAPFTVITLHPQHGAQIKLKKI

SEQ ID NO: 184473 - protein, 149 aa, Oryza sativa
  Clone ID: PAT_MRT4530_81461C.1.pep
ERDLLPLPDTSVSLKSHFAQVEHPASSSSSLPTSRAPPCVASPFPSIRWISGRATAPTTSPRSREKDAQEDRSQYTAVEEIELFFHKSGRRISSSNPCIRAEAWGVVVAVALPFFAATGVLLRSPSPSIHHRPTGDIPLVVTAARAASG

SEQ ID NO: 184474 - protein, 81 aa, Oryza sativa
  Clone ID: PAT_MRT4530_81462C.1.pep
MSHSVKIYDTCIGCTQCVRACPTDVLEMIPWDGCKAKQIASAPRTEDCVGCKRCESACPTDFLSVRVYLGPETTRSMALSY

SEQ ID NO: 184475 - protein, 76 aa, Oryza sativa
  Clone ID: PAT_MRT4530_81463C.1.pep
MEGGGAADLQDGVVGRRWCLMSLFGWCAAVMRDGTVGKEAALLNDAAVVGSGNAAPAKFRPAGPHCGQHPGPTQLE

SEQ ID NO: 184476 - protein, 61 aa, Oryza sativa
  Clone ID: PAT_MRT4530_81464C.1.pep
VLPCSSEIAVRWTFILADPARLAPSRTLLILLSSLTIVLRWPVAVAQPLLQPSNLYLALNK

SEQ ID NO: 184477 - protein, 152 aa, Oryza sativa
  unsure (1)..(152): unsure at all Xaa locations
  Clone ID: PAT_MRT4530_81465C.1.pep
SLAAWDMVCKPKNKGGVLGVIDLEYQNITLLMKHLDKFFNKHELLWVKLIWTKYYLNADLPPHACKETGSFXWKDIFRLIPMFRAITTITIQSGDTALFXKDNWNWTGNSLEQQFATLFSFVAKEDISVFGFLSEQNLENLLHTPLSTQAMQ

SEQ ID NO: 184478 - protein, 510 aa, Oryza sativa
  Clone ID: PAT_MRT4530_81466C.1.pep
MEASTILWLLYVSLASCLLYKVFVSTKNGHPKIAARRPPGPTPVLLLGNVFDLRGELHLALARLAEEHGPVMSLKLGTATAVVASSAAAARDALQRYDHVLAARAVCDAARALGTHERSIVWLPGSSALWKRLRAVCTNHLFSARGLDATRAVREAKVRELVEHLRGHAAGAGEEEAAAVDVGRVVFSAVINLVSNVLFSEDVADLSSDRAQELEMLVRDTVEEATKPNLSDLFPVLAALDLQGRRRRTAVHIRKFHDFFDEIISRRQNAGGEGERKEDFLDVLLQLHSADQLSLDTIKTFLGDLFTAGTDTNSITVEWAMAELLRHPAAMSRARAELRDALGAKPHPDESDIGRLPYLSAVVMETMRLHPPSPLLMPHEAVADGAAVGGYAVPRGTKVIVNVWSIMRDPASWPRPEEFEPERFVAAGGSFRGGEMLEFMPFGAGRRACPGTPMATRVVTLVLASLLHAFEWRLPGGMRPCDVDVRGRFGTSLNMVTPLKAVPVPVPARP

SEQ ID NO: 184479 - protein, 54 aa, Oryza sativa
  unsure (1)..(54): unsure at all Xaa locations
  Clone ID: PAT_MRT4530_81467C.1.pep
LTEVRKNSTYTWLRPXSKTQVTVEYLNDTGAMVPIRVHTVLIXTQHDADVTNLG

SEQ ID NO: 184480 - protein, 70 aa, Oryza sativa
  Clone ID: PAT_MRT4530_81468C.1.pep
LSYSGFHAQQRICSTTPVMPAVSQNRPILSASTATITSAASSRTTAPWRSSSPTKTSSSPTLLCLPLLLS

SEQ ID NO: 184481 - protein, 86 aa, Oryza sativa
  Clone ID: PAT_MRT4530_81469C.1.pep
MEKREDLKLTSKEKTRGGGCGGGGWDETGEGRGWGERIASYIGSHGNTNMDLIDRQAAMATPPLRVWDTIDVIYNTTTDPISPTMK

SEQ ID NO: 184482 - protein, 88 aa, Oryza sativa
  Clone ID: PAT_MRT4530_8146C.1.pep
FISSGRPVVFSMGGLTRVHSGIGSDWGSEPKHWTAWRRHLVRYRKHYKGVDEEPAQAGLRSVLEERSLHPKMPLVLSNKLEEKDRTVW

SEQ ID NO: 184483 - protein, 156 aa, Oryza sativa
  Clone ID: PAT_MRT4530_81470C.1.pep
MGGLRVDLSGAEIRVDPACGAAADDGGSPPVFLPRQPAAPPLLALDIGGTLIKLVYTASCGGGGAELRFAKFERRRMQECFDFVRAQGLVHRNGSTMGSSKENIALKASGGGAYKYTEDFREKLGVCLDKVDEMDSVVSGANFLLQSVPGAAFTHM

SEQ ID NO: 184484 - protein, 349 aa, Oryza sativa
  unsure (1)..(349): unsure at all Xaa locations
  Clone ID: PAT_MRT4530_81471C.1.pep
TRSGVVFFFFSAGTLIKLVYTASCGGGGAELRFAKFERRRMQECFDFVRAQGLVHRNGSAFFCAEIXCDQHCLQASGGGAYKYTEDFREKLGVCLDKVDEMDSVVSGANFLLQSVPGAAFTHMNGKKSSVDISPNNLFPYLLVNIGSGVSILKVTGNRKFERVTGTHIGGGTMFGLAKLLTGCKSYDEFLQLSQKGDNFVLDLIVKDICGELVCQKQGLSTSTLASSFGKVITSKKKLTDYRPEDLASTLLSAFTYNIAQISFLVASILHLRRVFFGGSYIRGHKSTMQNISYAIDFWSKGQVQTTFLCHEGFLGTLGAFWSYENMGIDGLAAHEVIREVLLGAPYTGP

SEQ ID NO: 184485 - protein, 109 aa, Oryza sativa
  Clone ID: PAT_MRT4530_81472C.1.pep
RGLNVFNMSREEEEAKKLSHSELRLRPLDFVHSFFTAMVFLTVAFSDVGLQNCFFGQNPGGNTKELLKNLPLGMAFLSSFVFLIFPTKRKGIGYNDNTPNRKAEDVTKN

SEQ ID NO: 184486 - protein, 136 aa, Oryza sativa
  unsure (1)..(136): unsure at all Xaa locations
  Clone ID: PAT_MRT4530_81473C.1.pep
GHTILPHHGVEVRAAAGGGGGGGAXVCGLDSSNADATTXVGLVRLLPATAAGVSSSLLLATTATAAAAXWETRDKGXVLPLSRWLRAHWTRPRRLRRSHTGAAAAMETXXWSSVSVSKDVTRGKKTGERRKKTERN

SEQ ID NO: 184487 - protein, 39 aa, Oryza sativa
  Clone ID: PAT_MRT4530_81474C.1.pep
PITSTLCRGAAFINSKENIFFYFFFFFFFFFFFFFFFFF

SEQ ID NO: 184488 - protein, 355 aa, Oryza sativa
  Clone ID: PAT_MRT4530_81475C.1.pep
MASEDVVGKSRGDTAVTTIVNLAEEAKLAREGVKGPGYQVLSICKSLFAGGVAGGVSRTAVAPLERMKILLQVQNPHSIKYNGTIQGLKYIWRTEGLRGLFKGNGTNCARIVPNSAVKFFSYEQASSGILWLYRQQTGNEDAQLSPLLRLGAGACAGIIAMSATYPMDMVRGRITVQTEKSPYQYRGMFHALGSVYREEGFRALYRGWLPSVIGVVPYVGLNFAVYESLKDWLLQTNPYDLGKDNELHVVTRLGCGAVAGTIGQTVAYPLDVIRRRMQMVGWNNAASIVTGEGKEALQYNGMIDAFRKTVRYEGVGALYKGLVPNSVKVVPSIAIAFVTYEFVQKVLGVEMRISD

SEQ ID NO: 184489 - protein, 37 aa, Oryza sativa
  Clone ID: PAT_MRT4530_81476C.1.pep
YTSQSIIHIGLHSPPSTSTSHFIYPQHYFFSLTPYSK

SEQ ID NO: 184490 - protein, 565 aa, Oryza sativa
  unsure (1)..(565): unsure at all Xaa locations
  Clone ID: PAT_MRT4530_81477C.1.pep
MAHSTYHRGFGGGSRIGGSARAAGTLEATGLSSPRCRGLPGNVRNVLDKFFVGLCKKSMVHYSSCKHEQAVTIDVNAWTDAGHAVNHLYDMLYMMGRDDIPVGVGGDGGISGHGTIHPNVGGYLPLIDQGMTTFGPCRYRQAIPLEGGGRLDIDTNSGIRKGFLPQGNRRYIPLHQSTAQQVLIETISAGPTTVMLIGSHTNFAIFLMTHPHLKKNVEHIYIMGGGVRSENPTGCCPKNSTTSCTPQQCGDHGNLFTSYRTNPNAEFNMFADPFAAYQVFHSGIAITLVPLDATNTIPVNEEFFYAFQQQQSTYEAQYCFDSLKMARDTWFNDEFYTSYFMWDSFTSGVALSSMRNDNNQSENDFAALKDMHITVIKSNKPYGIHDGSNPLFNDHVIPKFGNQNGGVHSGHVQTGITDSFCLAKESKKGRCEDGYTKEESGPEAVRVCVATKAKVNVDKSSLLDREFFKSFLETLNLPENTGLLKNTAQFPFYREVLYSPDFQXETQGQXVLFETHTKPTDGNELIYLLKVPTKLVDVMGIFVGEIDRQTLANSLAKRHLPLLGF

SEQ ID NO: 184491 - protein, 66 aa, Oryza sativa
  Clone ID: PAT_MRT4530_81478C.1.pep
HGSRKVFVGIRHRRLSILAILCTGGVDQLPPSAGSESVWRSLPCGRQWIWWRRSPSRAISSREPLF

SEQ ID NO: 184492 - protein, 93 aa, Oryza sativa
  Clone ID: PAT_MRT4530_81479C.1.pep
MGGIKAEENTLRGGGDGWQGGTKSLLHGLRSGDRCGGYSEVVKHDCGARDKWRTKLSGALEAGTGNATVVAGDGARAPTGGLWCLVDATASGC

SEQ ID NO: 184493 - protein, 92 aa, Oryza sativa
  Clone ID: PAT_MRT4530_8147C.1.pep
AAVVLLPPVTTHRASMSHVTSSPVDDGNRTVLPLADVSTVPKQNKFVPLLLLLLFSVYPSVCFYSKAALFIAHRTEAIAFNIKHIFLNGIYH

SEQ ID NO: 184494 - protein, 71 aa, Oryza sativa
  Clone ID: PAT_MRT4530_81480C.1.pep
SVALWLHWLPGGRPSIDRWCKQASACLFSFSSYYLISLFLSYTLYGNILKYLVSLQHLCYYSSESCDKLLN

SEQ ID NO: 184495 - protein, 170 aa, Oryza sativa
  Clone ID: PAT_MRT4530_81481C.1.pep
MLSSAMTCSACEEKIKTLLALARLALEQCGSLSSSEKVVDTYPVDGAIEVVEGEKLANIIGGNGFASEVGPASGGDAQDGEPQEGLELARLLGGLPMEEPHCVAQQQQQPCIDPNFVQIACRVVQFIDHPLLSQGIPFPVSPGIPRDEPPVCQQKSNGPQFSCTGIQQLS

SEQ ID NO: 184496 - protein, 1449 aa, Oryza sativa
  Clone ID: PAT_MRT4530_81482C.1.pep
MKQLKPEDEQKILGYAAQREGAGIEQALACWLAVASGAQTWTISNEANRCRCRHPVQCQGGLSFIRVKPGIVDDRSSDILRSPAAQSPAPGGRSSDGVGGRERGAAGGQQGAEPAVRRVRGGVGGQQGARPQRRRRQDGAAVRAGDARQRPWHRRQGGPQPRAEAAAPGAAWPRPRRVDAEDVLDELDYFRIQDELDGTCEAADEHAKGCVVHNLFLNTRHTALSVASNLVLLPCAGDDHPDADGRRSGEDKNRQIGSSCAGGGQVMNRQIGSSPSRTLHAAADEEAVASNCCMHKLSPSARGNTHHIGSQFLRCTCSCGRVLQREDTMKTPKLKFDRVDLSQRMKRIVEQLKPLCAKVSTILNLELLESNRSIGQYIAMSLNAEFSKKPGHAPVLPSGGIGKTTLAQYIYKEVHNYFDVTVWVCVTPNFNVYRLKEDIAKSIPQLKDEKNSGPHDLIVQSLGSKFLLVLDDMWNCGHEDEWKYLLASLKKGQTKGNIILVTTHFLAVVEMVKTIDSPIQLKGLDPQEFWELFKASVFGDEKSANDHANLLETGKMISKKSEGFPFGSENSWEDQNKKIEDIGLSRLNDLVSYGFFEKHVEDGSSYYVMHDLLHELALKVSSYECLTICSSNVKSIQILPSIRHLSIVVDDMDVNDRVTFENIKKDFITLKLSLPNIISRFYHLRILDVRQCKGHFGLPRDMNNLVKLRHFVVQDDKLYSDIANVGKIKCLQELRRFEVKRQVKAFALSQIGQLDELKGSLGIYDLENAKAAEEAKLLNKSHLHKLILDWNVNHSTKDYSQEEHILENLRPHSNLRELHIQGHGGTTCPSWLGPNLSIKGLQSLCINGVCWDKFPPLGGLWLVNKHGEKFLACASGRSFQYLKRLELVAIPRLAKWAGNDACCVLSLLEEFIVRECPELIELPFSHSTCPWSRQEMNLSQFSRLQNLEIAKCPKLLPLSPLPWTSSPCHVLIKEVGSHFHLLDYQRNNQSEQGLQIEGKDGPLDSTFWKLLALSNLTELRELKMKKCPPLPLKHLKLLSALRRLSITDSGIALLPTDCESTVTYHFLVEQLEIYECSASGIEMTQLLSYFPKLMNLRIEKCQKITGLGVAGQEMMATLASPPSLSYNKSEDAQIGNDQQQPRGDNGIASVVTGLLLLPHQLQNLDIRHCSKLILQLDSFVGDTTRNLIRGVGGGLQYLRSLQSLCIKHCPNFLSSYSPSLSCFPFPSSLQDLAIIDCVRGMETLVQNLSSLTRLSIWDFGDLRSGSMCSLLTQGHLRVLAVHKTPEFFVGSKPSGLQQLYMDDIVGVFVEPTCRLLSSSLTKLSLSMNHKVERFTKEQNMALQLLSSLEVLIFVQCSKLQSLPAGLHRLTSLKRLEIAYCPNIHSLPKGCFPSSLEVLHVYESQSEELKRQCRKLKGTIAIIEDEDYLELVTNTHLFDLAQFTFCLAQH

SEQ ID NO: 184497 - protein, 201 aa, Oryza sativa
  unsure (1)..(201): unsure at all Xaa locations
  Clone ID: PAT_MRT4530_81483C.1.pep
TKGNIILVTTHFLAVVEMVKTLIXIQLKGLDPQEFWELFKASVFGDEKSANDHANLLETGKMIXKNLKGSPLAAKTVGRLLKNHLDLEHWTSVLESKEWELQTGENDIMPALKLSYDYLPFHLQQCFTYCAMFPEDHKFASDEIIHLWIGLDILHSQDQNKKIEDIGLSRLNDLVSYGFFEKHVEDGSSYYVMHDLLHELA

SEQ ID NO: 184498 - protein, 291 aa, Oryza sativa
  unsure (1)..(291): unsure at all Xaa locations
  Clone ID: PAT_MRT4530_81484C.1.pep
IFRIGTSPPLLCRQQGGGGGWRWFLPSGGSGQRXRFSMATGMMQRPGFVPAGCRNGLSISMSGEEAGTVTSISAAEETPEARCSYDGGHRRPPSSLQPFPPFFGSGEATAIAAGGFLRFGFFLRVSTWCSHTPGRNRGRRGRTDRNTVRKKRKRNLGIFVNSQISRVHVKLSCSLKXVDWVQLSLGVLLPAMARPTRWDEAPLDXEGIELKSEFTTYVSSCSVHPCRRHNSMARXLEKDDKRRLCQWWWRHWNAILVVILDMGIVKARRRWPTFTPCQNWINNDGNSSAGP

SEQ ID NO: 184499 - protein, 83 aa, Oryza sativa
  unsure (1)..(83): unsure at all Xaa locations
  Clone ID: PAT_MRT4530_81485C.1.pep
FIYSIFFXXFILTKVTMPHILYLLSLXGVSLPSHLHSYHYFHITSLASPNYPWEPHPFDLMYGAPDYCAGVPATVIAIPPLLL

SEQ ID NO: 184500 - protein, 94 aa, Oryza sativa
  Clone ID: PAT_MRT4530_81486C.1.pep
MTVVTVGMVGNTLQPSLGSNLSRPGEPWIKRSCWGFGRTWGRPNPAQFRLAASSVASLRRLVNFGPIRCVNSEFLAHSCISLILDIVRLIYRLS

SEQ ID NO: 184501 - protein, 37 aa, Oryza sativa
  unsure (1)..(37): unsure at all Xaa locations
  Clone ID: PAT_MRT4530_81487C.1.pep
TPKSQXXYISQAXRHFGLHLTLHYPEIQLLLLSVSTG

SEQ ID NO: 184502 - protein, 83 aa, Oryza sativa
  unsure (1)..(83): unsure at all Xaa locations
  Clone ID: PAT_MRT4530_81488C.1.pep
XERRREGRRVSGRERERSRSXXRRLMDSGMTRFFFSRGLELEEVAGEGESGRPSMPMRRATRLGVRGVSASEVGADGLGPRGR

SEQ ID NO: 184503 - protein, 222 aa, Oryza sativa
  Clone ID: PAT_MRT4530_81489C.1.pep
MATDESLKYPRHSHPMVLAISDDVAHSSFKQLAAFTYLESLWSEVTQALATIPGQHSADRPDIINHVFHVKLHLFMNDIVKKKFFWPCHYRLISAQLPDPSIDRVGYDAVAAFMMHGPCGDANPYCSCMVDSKCSKNYPKEYCDKTTILPNGHVRVGLKRKRACAGTNEIHDYLECRCIAPNEAAWRLLQFKIHYTDPAIERLHVHMPLENSVTFIEDDNLE

SEQ ID NO: 184504 - protein, 55 aa, Oryza sativa
  Clone ID: PAT_MRT4530_8148C.1.pep
EKNLQKKKKSFNFFINKPKRAQNIFFTRGTKNTNPIIIPSRKPKKFSHLRNVELF

SEQ ID NO: 184505 - protein, 858 aa, Oryza sativa
  Clone ID: PAT_MRT4530_81490C.1.pep
MGVNVIDSINDGRGPYVFKISGQLCHCIGSLIPKEGRRPEYAQLYIFDTENEIRNRMNVGTYANRSFCPNEDIVAGLIDMFNTHNPIVHLFRTARDRLAENGDDRYIIRLFGDPDKHGDIFSAPVASEVVGLVVGDVGISDVGHDLIVQDQAEVTQALAIIPGQHSADRPDIINRVFHVKLHLFMDDIVKKKFFGPVTAVVYTIEFQKRGLPHVHIILWLDKSGPLTPADIDRLISAQLPDPSIDRVGYDAVAAFMMHGPCGDANPHCSCMVDGKCSKNYPKEYSEKTTILPNGHVRCIAPNEAAWRLLQFEIHYTDPAIERLHVHMPLENNVTFTEDDNLEQILDNPRNRVTKLTAWFAANREYSQAAAYTYAEFPEYFTWHGNGKYWAPQKNCRKKIGRIAHVCPAQGDVYYLRMLLHIVKGAKSYSDLRTIEGHVYPTFQAACQALGLLGDDREWSFAMTDATHWALPYQLRELFVTLLLFCDVTHPLSLFEEHLSSMGQDAAYHLNHATLGINSSAPSVIQYVKSYVLSEIDSILRNVGRTLAYFHLPEPTIQSTSILGNRLLIDEQAYDLEKISIEAADQLGKLNLNQRHIYDAILNSLNSDIGHTFFIYGYGGTGKTFLWNTLLNSVRAERKIALAVASSGIASLLLPGGRTPHSCFRIPLDIQEHSVCSIKKNTHLAQLIQQTSLVIWDEAPVNHKHCFEALDRTLRDILASNDPSLANKQFGRITVVLGGDFRQTLPLTTQEMSYYSSDTIEDTTSNRATLDALYPTEFLNTIKISGLPDHHLQLKIGVPIMLLRNLNPSKGLCNGTRLIVTQLTRRVIEGEIITGKAKGSKAYIPRIQGIYTKDSNHFN

SEQ ID NO: 184506 - protein, 56 aa, Oryza sativa
  Clone ID: PAT_MRT4530_81491C.1.pep
MRTPSPSIAVLGDQAGPGAEPHGGGADLSPKQCWYGGSPDPGAGISTLEMTRTALS

SEQ ID NO: 184507 - protein, 1207 aa, Oryza sativa
  unsure (1)..(1207): unsure at all Xaa locations
  Clone ID: PAT_MRT4530_81492C.1.pep
QLLNHVESVSLLWLPNHLESSTLVPINCGHTQPFATVDGACSSSTSSALLSPSPTHQHHSYSMMLDLLFXLTNVILMLDLMFYNSMFAFTSMGVNVIDSINDGRGPYVFKISGQLCHRIGSLIPEEGRRPEYAHLYIFDTENEIRNRINVGTYANRSFRPNEDIVAGLIDMFNTHNPIVHLFRTARDRLAENGISDVGRDLIVQDQAGHLQKVEEKHCKFMSMQYPILFPYGEDGYHENITYRRCARLQAIKRKKSTMVEYFAYRLHDKADDFNTPMRCKRGTQAYVIDAYCCMEESRLSHYRSKTFQLKYRTTSFSEVTQALAIIPGQHSADRPDIINRVFHVKLHLFMDDIVKKKFFGPVTAVVYTIEFQKRGLPHVHIILWLDKSGPLTPADIDRLISAQLPDPSIDRVGYDAVAAFMMHGPCGDANPHCSCMVDGKCSKNYPKEYYEKTTILPNGHFEIHYTDPAIERLHVHMPLENNVTFTEDDNLEQILDNPRNRVTKLTAWFAANREYSQAAPYTYAEFPEYFTWHGNGKYWAPRKNCRKKIERIAHVCPAQGDVYYLRMLLHIVKGAKSYSDLRTIEGHVYPTFQSACQALGLLGDDREWSFAMTDATHWALPYQLRELFVTLLLFCDVTNPLSLFEEHLSSMGQDAAYHLNHATLGINSSAPSVIQYVKSYVRSEIDSILRNVGRTLAHFHLPEPTIQSTSILGNRLLIDEQAYDLEKISIEAADQLGKLNLNQRHIYDAILNSLNSDIGHTFFIYGYGGTGKTFLWNTLLNSVRAEGKIALAVASSGIASLLLPGGRTPHSRFRIPLDIQEHPVCSIKKNTHLAQLIQQTSLVIWDEAPVNHKHCFEALDRTLRDILASNDPSLANKQFGGITDVLGGDFRQTLPHCILMHLTENMRLQSPTLSNTHRQRLQEFAEWLLAIGEGAVADSSPTDREDVSWVKIPEYLLLPDDTRNLSGLISFVYDASINSHTANYLCERAILAPTNEIAASINSQMIAQLTTEEMSYYSSDTIEDTTSNRATLDALYPTEFLNTIKISGLPDHHLQLKIGVLIMLLRNLNPTRLIMTQLTCRVIEGEIITGKAKGSKAYIPRIIYTKXVTTSIDKKWPFKLKRRQFPVRVSYALTINKSQGQTLSRVGVYLPSPVFSHGQLYVALSRLTSPDGLRILIENSPTEHVTSTHNVGYKEIFNDLDQQGMHT

SEQ ID NO: 184508 - protein, 222 aa, Oryza sativa
  unsure (1)..(222): unsure at all Xaa locations
  Clone ID: PAT_MRT4530_81493C.1.pep
MQYPILFPYGEDGYHENITSRRCARSQAIKRKKXSMVEYFAYRLHDRADVFNTPMRCKRGSXAYVIDAYCCMEVSRLSHYRSKTFQLKYRTASFSEVSTMVHSGITEASYAGQRVILPSSYIGGPRYLYQNYLDSVALCRKYGCPDLFITFTSNSLWSEVTQALAIIRGQHSADRPDIINRVFHVKLHLFMDDIVKKIFFGPVPAVLHTSYIQIFCMCHSHI

SEQ ID NO: 184509 - protein, 56 aa, Oryza sativa
  Clone ID: PAT_MRT4530_81494C.1.pep
ERKKYELLPPKLSWSSELPLNHKTGYSSPSTMQTGRITPLDPIRGGFDLRGVRVAV

SEQ ID NO: 184510 - protein, 288 aa, Oryza sativa
  Clone ID: PAT_MRT4530_81495C.1.pep
WIPGLQATTKKPSGRNLAAMARCSNGLLGLLNAGVLVLAVVVLGGGIWLSNRAATTDCERFMERPVVALGVLLLALSLAGLAGALCGASCLLWLYLLALFLLILALFVFTVFAFVVTNRGAGWVVSGRGYREYRLGDYSTWLQRRVENSANWAKIRSCLQDGKVCEKLGARRETMDQFVGSNLSPIQSGCCKPPTGCNFAYVSETVWTKPSGFNSTDDPDCTTWSNDQTALCYDCQSCKAGVLANLKNDWKKIATVNIIFLIFLIIVYSVGCCAFRNNRRDNSYPAWK

SEQ ID NO: 184511 - protein, 91 aa, Oryza sativa
  Clone ID: PAT_MRT4530_81496C.1.pep
MAETVLSMARSLVGSAISKAASAAANETSLLLGVEKDICSYVPTSRYLPALLAHAPSNHTVTDQLPTAADFCLICHRGPSPSYHRGNCRGS

SEQ ID NO: 184512 - protein, 59 aa, Oryza sativa
  Clone ID: PAT_MRT4530_81497C.1.pep
YLLMYSSILAKTMSSWILYYKVKITTVEYHQHDLNPKEFETNTNLSLWNAPNHHDVCLN

SEQ ID NO: 184513 - protein, 120 aa, Oryza sativa
  Clone ID: PAT_MRT4530_81498C.1.pep
SPSSRRAVDRPCPGILILLMVMLLLGVWGIFTYEDFMEEAAEQLRWALVLAPVEVVLLIRWMSFVDTFDGYFSLYPTERLWNRYYQNPDERSYPWGVAMDVLLILVLDYLHYTLQDMWKP

SEQ ID NO: 184514 - protein, 85 aa, Oryza sativa
  Clone ID: PAT_MRT4530_81499C.1.pep
MANPAQGPLRARTKPAGRRGGAPPPAAEDPSRAAAAAARRSVRKWSTWTMKTAKVAAYYGFIPLVIVIGMNSDPKPSIGQLLSPL

SEQ ID NO: 184515 - protein, 71 aa, Oryza sativa
  Clone ID: PAT_MRT4530_8149C.1.pep
VLLRSDHEAVCVSCVWVVGRSSSEATGAPHPAHRVSERLCSGYFVGIMSSYHPGACEQAVPDGHTVERRAP

SEQ ID NO: 184516 - protein, 100 aa, Oryza sativa
  unsure (1)..(100): unsure at all Xaa locations
  Clone ID: PAT_MRT4530_814C.1.pep
MAREVLISFNPPRWIPSGTKSGGWKQRGRVWRKSLSFWVHLXAKFPLVFIFFFIVLYAIPASAAVLLLNILITVLFALPSFLILYFAYPSLDWLVREIFA

SEQ ID NO: 184517 - protein, 411 aa, Oryza sativa
  Clone ID: PAT_MRT4530_81500C.1.pep
MSAAQSPRRPWPHLSDDLLYEIVRRIPCEVDRLHMSRACRSWRVALTKTEPPAPAPPPALPWLLLPEVDGEHGLTFSCALSGWRRTHPFFLPHAARRARCFGSYDGAWLFLAVDGQGPRGEDHVLVNLNNFEYIDLPNAIFHFDWIDPENVDIVAATLSRAPTEQGCIVAGIINSFLSHHQIAFWHMGDRLFSEAEQMVWLSPLEQVEDLLYLDEDFLFLTEEEHIRVCPELTIFHEYPERILWRFQRRRRGEEEEQVLARYLVESRGSLLMVVRLASGRCQNLPTSEFRVFQKEKFSNGEEEEEEDAFQFHEYYWSELDKLEGRMLFVGRGCSRSYEAADGHAGMEGVYFLDDRSFVEAAIGDAPKLPYRCSDNGKWSKSPSQSQGQVERCFPERGQPRSKYSPPVWILP

SEQ ID NO: 184518 - protein, 136 aa, Oryza sativa
  Clone ID: PAT_MRT4530_81501C.1.pep
MGEKRRSPLPLLSQGPPLSNLCYLGAEFRFQRAELGAEMMTDDVVTAFELSRAIDDGVLQPLPFGSLTCCSFYIACFFHRYKSEQPSTYRKNGKPAAIQYGTGSVDGFFNEDSVTVGDLVVKDQKIAIGDEVNIWL

SEQ ID NO: 184519 - protein, 96 aa, Oryza sativa
  unsure (1)..(96): unsure at all Xaa locations
  Clone ID: PAT_MRT4530_81502C.1.pep
FFFFFISKIRQYIRHLFVRSIAIFFYLELQSLHKFIRGNRLLVNYHTVRGYTSTYLXALLLDWGGWGYVRLTLLYALTEDVGDGTLDDGGTLRTLH

SEQ ID NO: 184520 - protein, 82 aa, Oryza sativa
  Clone ID: PAT_MRT4530_81503C.1.pep
FRVDPRVRAAPKIKQKAFVAVSNIYGVDSIAGNFKGNKILLFGEMGTMAISKKFKKIGKITIVFVGPSKEERKGENKLEYKE

SEQ ID NO: 184521 - protein, 89 aa, Oryza sativa
  unsure (1)..(89): unsure at all Xaa locations
  Clone ID: PAT_MRT4530_81504C.1.pep
FEPFAVPXCXXQXSPYXNCELXRLPEIHPCLTFLTDRXAPGXTVDTKXIMLKRSLIVXWTLXXLRKDAHHLHFPGKRPRTSPWQGQCGW

SEQ ID NO: 184522 - protein, 108 aa, Oryza sativa
  Clone ID: PAT_MRT4530_81505C.1.pep
EFASLSSVSRARSTAAPHRVCQQPRAPHPGSGPLLGAATDACLLYRNCSTSTSTSTLYRTSRGNPLASAAAPTFFPDASSSPLPPAASSPTALPVAGSNRVENLEGSP

SEQ ID NO: 184523 - protein, 188 aa, Oryza sativa
  unsure (1)..(188): unsure at all Xaa locations
  Clone ID: PAT_MRT4530_81506C.1.pep
MGEPSKFSTLLDPATGSAVGEEAAGGRGEEEASGKKVGAAAEARGLPRLVRYKVLVLVLVLQFLYSRQASVAAPKSGPLPGCGARGCWHTRCGAAVDLALDTLERHVQGRLRWFPGHPASDNGATLSAAEGYDGEDRVSALPDDLLVARLPXKDATRTAALAFRWRRVWSSTPLVLRGKPLVRRRGGP

SEQ ID NO: 184524 - protein, 70 aa, Oryza sativa
  Clone ID: PAT_MRT4530_81507C.1.pep
GQNHVSVFLVSVLHFHMIYYASIHSSIHSIWLSSNYSKSINLEPTDSRIILSIASSSWSLGLVHKHRNSQ

SEQ ID NO: 184525 - protein, 427 aa, Oryza sativa
  Clone ID: PAT_MRT4530_81508C.1.pep
MEVGMCGEEQEERRESAYVVVEPRERGDNEQRVVSAYNEAWDVAGADGRAGGEAGVVRAKAGELLLESDERRQRCNLETGSSPSRHTSLLVIGARSRAVVAVVALLTLAGDAAAVTRRQRHGRRGGRRQGEAASAGECGDREAAASTAAATREGRPAPTQNRKLKATAWASVEAEGLFAVGHRTGSCHHRPAPTLEGLTTRDRCSSPSTGARARRPARWPSSATASLMARAPPRFLHAPATTAPWAAANVDLATHRSLQAGARGARRGPRNVQGRLRWFPSHPASGNGATISAAEGYDGEDRVSTFPDDLLVARIPVKDATRTAALAFRWRRVWSSTPLVLRGKPLRGGGGAGRRSPLCRRAVGVVAVGRALVGHPDPFHVVHRFELAESSTICSPASLAARAQLAERERRNRGREEGGERPTDVAS

SEQ ID NO: 184526 - protein, 142 aa, Oryza sativa
  Clone ID: PAT_MRT4530_81509C.1.pep
KLNCSTVRFCRLEYHLLPHYSFLCSLYHMQVFVHIFMATLPCSFLDRFSGSYNNTSLLKMLLYIPDAWWLSLVFKALTRKFTDPEAFYLLRNITGLYHQTAATTFNIHEGVIALAYLIKGVQVVNSSLPVDQKGLLVHFNVW

SEQ ID NO: 184527 - protein, 199 aa, Oryza sativa
  Clone ID: PAT_MRT4530_8150C.1.pep
MAGFATSRPASLALAALLAFLNLFAFLLAVGAERRRSTGKVVPDEYDLRSYCLYDTDASTVYGVAAFFVLLLAQALVTAATRCLCLGPALSSRGCAVASFVLSWITFLTAEACLIGGSVRNAYHTKYLGYYMKHDLVTCATLRKGVFAAAAALMLINLLASLMYYWEYSRAATGGFIKHQNEVGMSMTDYGLDKGGSMP

SEQ ID NO: 184528 - protein, 52 aa, Oryza sativa
  Clone ID: PAT_MRT4530_81510C.1.pep
PPHPLNFQGPSPFRPKFVTALVNVHCPNSCLVFLWPHPYQIFVILFPPSFLV

SEQ ID NO: 184529 - protein, 147 aa, Oryza sativa
  Clone ID: PAT_MRT4530_81511C.1.pep
MAMTPRFSMADDSGGEPSATTATTARDLAPMTSRLVCLDGELPVSKLHRCLLSSDSSNNYNIATVDITADLARLRSHNSCLATGPPVCPCNVPCLIVCTDNPLLVVAALSWLDDDVCTLSTLFLFLPAHAHLHAHEAMLGQRGCTHR

SEQ ID NO: 184530 - protein, 636 aa, Oryza sativa
  Clone ID: PAT_MRT4530_81512C.1.pep
MEAKDGQAWLGTNGYDTRREEDGVCHHDSATPGRANTVDELHSLQRKPQVVEDRHRLQLQSISASLASMTCGIGPKLVNGDPARKKEMAGKAVTHHQHHITVPTITVSDSDLKFTHVLYNLSPSELYEHAIKYEKGSFITSSGALATLSGAKTGRSPRDKRVVKDETTDDLWWGKGSPNIEMDEQTFLINRERAVDYLNSLDKVFVNDQFLNWDPNNRIKVRIISARAYHSLFMHNMCIRPTYEELENFGEPDFTIYNAGQFPCNRYTHYMTSSTSIDLNLKRREMVILGTQYAGEMKKGLFSVMHYLMPKKQILSLHSGCNMGRGGDVALFFGLSGTGKTTLSTDRNRILIGDDEHCWSDNGISNIEGGCYAKCIDLSQEKEPDIWDAIKFGTVLENVVFDEHSREVDYTEKSVTENTRAAYPIEYIANAKIPCVGPHPKNVILLACDAFGVLPPVSKLSHAQTMYHFISGYTALVAGTEDGIKEPQATFSACFGAAFIMLHPTRYAAMLADKMNKHGATGWLVNTGWIGGSYGVGERISLAYTRKIIDAIHSGELLARSYKKTDVFGLDIPTKVEGVPSELLDPINTWEDKDSYKLTLLKLSDLFKRNFKVFANYKKGGVSDLADEIAAAGPNF

SEQ ID NO: 184531 - protein, 38 aa, Oryza sativa
  Clone ID: PAT_MRT4530_81513C.1.pep
SGTVEFKTDSIIIRGNRLVLENQIDLPHNIGLHQTMAY

SEQ ID NO: 184532 - protein, 1033 aa, Oryza sativa
  Clone ID: PAT_MRT4530_81514C.1.pep
MAAAADARRFAVVPQLDIAQILKEAQQRWLRPAEICEILKNYKSFRIAPEPPNRPQSGSLFLFDRKVLRYFRKDGHNWRKKKDGKTVKEAHERLKSGSIDVLHCYYAHGEENENFQRRTYWMLEEDFMHIVLVHYLETKGGKSRTRGNNDMHQAAVMDSPLSQLPSQTIDGESSLSGQFSEYEEAESGGTGYHSFTQMQQQQNGIGPVTDASMFSSRVSASSIGNYQGQHAMGHTTNFYSSSQHDSPLVLSDPNLELANNGHESLWNGVMKPDEGTVQMTHLQPPVHPEQGMFTTEGQGVEYLTFDEVYSDGLSLKDIGAAGADVEPFWQFSSNSYLTEAIAFQLSSATADISATENSVQQNDGSLGAAIGFPFLKTQSSNLSDILKDSFKKSDSFTRWMSKELLDVEDSQIQSSSGAYWNTEEADSIIEASSREPLDQFTVAPMVLQDQLFSIVDFSPSWTYAGSKTKVLVTGRFLHANEVTERCKWSCMFGEVEIQAEISADGTLRCYSPPHKPGRVPFYVTCSNRLACSEVREFEFRPSDSQYMDAPSPLGATNKVYFQIRLDNLLSLGPDVYQATITNPSKEMIDLSKKISSLLANNDEWSKLLKLADDNEPLSHDQQDQYAENLIKEKLHVWLLHKVGDGGKGPSVLDDEGLGVLHLAAALGYDWAIRPTVTAGVNIKFRDFHGWTALHWAAFCGRERTVVALIALGAAPGALTDPHPNYPAESTPADLASANGHKGISGFLAESSLTSHLQALNLKEANMSEISGLPGIGDVTERNASQPAIGDSLGAVRNAAQAAARIYQVFRVQSFQRKQAVQYEGDKGGISDEHALSLLSMKPSKSGQLDPLHAAASRIQNKYRGWKGRKEFLLFRQRIVKIQAHVRGHQVRKHYRKIVWSVGIVEKVILRWRRRRAGLRGFRPTEGAIESSSGGTSSNLVPTRPAGDDYDFLQEGRKQTEERLQKALARVKSMVQYPEARDQYQRILNVVSKMQESQTVQEKILDESTEMDEGDFMSEFKELWDDDTPLPGYF

SEQ ID NO: 184533 - protein, 53 aa, Oryza sativa
  Clone ID: PAT_MRT4530_81515C.1.pep
MARTRRGQARGRAVGEDSAVIGAQDVGTEADAEEERIGGASSVEDSDSSDLLM

SEQ ID NO: 184534 - protein, 77 aa, Oryza sativa
  Clone ID: PAT_MRT4530_81516C.1.pep
HGMFFWRPLDSYEAAPMVPRVVSDAFPGRCGTLRRRLADEPPGAFATWTLHHIGRKVECSAYTGLRRTSGLASYGYI

SEQ ID NO: 184535 - protein, 71 aa, Oryza sativa
  Clone ID: PAT_MRT4530_81517C.1.pep
QLNRCVEHSSCKHGKNQLYIRYSLLHSCHFDHPLSFSTSSRNDHHLTSVFSFICANSKYASLKVLHATNQE

SEQ ID NO: 184536 - protein, 53 aa, Oryza sativa
  Clone ID: PAT_MRT4530_81518C.1.pep
LLSSHLICSGESRGKAPGCRIWKPAISLAVRLKFLSRKGGFLWLLLWLFPRAW

SEQ ID NO: 184537 - protein, 124 aa, Oryza sativa
  Clone ID: PAT_MRT4530_81519C.1.pep
MAAASAAEEEAASASATAHGDCVLAAACRVFDGEPVELSAKVLLLRLRSAEAIAGIHGGYWCTRMGAEFISPDHWPFVQLVRAMERPEEAHEDDLPAAGAGGRLAVPSSGRAAEDATAKQVQTV

SEQ ID NO: 184538 - protein, 227 aa, Oryza sativa
  Clone ID: PAT_MRT4530_8151C.1.pep
MAGFATSRPASLALAALLAFLNLFAFLLAVGAERRRSTVRAPRAVLSLSVSLPVWWWWSLNSGAAQGKVVPDEYDLRSYCLYDTDASTVYGVAAFFVLLLAQALVTAATRCLCLGPALSSRGCAVASFVLSWITFLTAEACLIGGSVRNAYHTKYLGYYMKHDLVTCATLRKGVFAAAAALMLINLLASLMYYWSYSRAATGGFIKHQNEVGMSMTDYGLDKGGSMP

SEQ ID NO: 184539 - protein, 571 aa, Oryza sativa
  Clone ID: PAT_MRT4530_81520C.1.pep
MSDSELSQSTVVFGLRMWVLVGVAVGAAFVLFLVLLSVLCLLASRRRRRRRGPNTSPVQQLPVSAPPKNPQKVKAPKDIQEVPAQATAAAAAKTPLAQVLQMPAPPPPPPPMAAAAPPPETVQIATGKEHRITYPEPPHRSGSSSHGSGEAPSVPEVSHLGWGHWYTLKELEAATEMFADENVIGEGGYGIVYHGVLENGTQVAVKNLLNNRYPTTNSSQLRCTEITTATQLDCLRVIATGIDHPRTVDRGQAEKEFKVEVEAIGRVRHKNLVRLLGYCAEGNQRMLVYEYVDNGNLEQWLHGEVGPVSPLSWDSRVKIILGTAKGLMYLHEGLEPKVVHRDVKSSNILLDKHWNAKLSDFGLAKLLGSERSYVTTRVMGTFGLDSAHYEHTPRIPDECSWLLIFSTLYRYVAPEYAGTGMLNETSDVYSFGILIMEIISGRVPVDYNRPPGEVNLVDWLKTMVSTRNSEGVVDPKMPQKPTSRALKKALLVALRCVDPDARKRPKIGHVIHMLEVDDFPYRDERRGARAPVQARVADKPVAIEAGDRESDSSGNNSARQTEPFRWRNPES

SEQ ID NO: 184540 - protein, 250 aa, Oryza sativa
  Clone ID: PAT_MRT4530_81521C.1.pep
MSRRYDSRTTIFSPEGRLYQVEYAMEAIGNAGSALGVLAADGVVLVGEKKVTSKLLQTSRSAEKMYKIDSHLACAVAGIMSDANILLNTARLHAQRYALSYQEPIPVEQLVQSLCDTKQGYTQFGGLRPFGVSFLFAGWDKHHGFQLYMSDPSGNYSGWKAAAVGANSQAAQSMLKQDYRDGLTREEAVALALKVLSKTMDSTSLTAEKLELAEVFLQPGTGEVQYQVCSPEAMGKLLAKAGLSQPAPEA

SEQ ID NO: 184541 - protein, 151 aa, Oryza sativa
  unsure (1)..(151): unsure at all Xaa locations
  Clone ID: PAT_MRT4530_81522C.1.pep
WTIHKFVYAHKARAFDHADNELLNRRITLGLVLTVKFACFLTANKGFIGVSADKLSGYCIGLQGLHPIGFYWIILLLXLYYHQPIAFLLVFTSSVGIYIGHMVDSSKSYCYRLDQTDWHARISSTFGPALELSRSPRPVCTFCINNWVGTT

SEQ ID NO: 184542 - protein, 225 aa, Oryza sativa
  unsure (1)..(225): unsure at all Xaa locations
  Clone ID: PAT_MRT4530_81523C.1.pep
MLDFKSSWRIPLIRYLKDPTLKIDRKIRRQMFKYXYRRKIDGVLLKCLDNDQSKVAGREVHEGIXWGGEWPTIIDDCFKYYRESEACXRIGNVQLTPTAVLNPIIKLWPFRGWALVFIGQIYPSPSKWHWFVLVAMDYFTKWAEVVPLENITYAEVIDFILKHIVHRFGIPKTLXGASFMSKEVRSFAESYDIKLVSSSLYYARANGXAESSNKTLLKLPFCQLR

SEQ ID NO: 184543 - protein, 166 aa, Oryza sativa
  Clone ID: PAT_MRT4530_81524C.1.pep
PRVRLKLDVIWNLNKITYLNSIQKKKKKKKKKKKKKKKKKKKKKKKKKKKKKKKKKKKKKRGGKRGRPFKRTKVNYPGLATKKFFYGAPKIKLTARVLKTGERENPGVTQIKSLGKKSPFPKWGKNKKAPNQSPFQKFAHLKWKRDPPLKGPIKRGGGGVSPKGTL

SEQ ID NO: 184544 - protein, 423 aa, Oryza sativa
  Clone ID: PAT_MRT4530_81525C.1.pep
MAGDSGNSDGGSNRDEEVQIQIADHINFSDYRDIIEWQSRHDFPEIPSNSLSFDSFTNGQYYSSKAATSSTHEVPIQNSPVKSWQWWLMVGVNMFFLIAGQTASTLLGRFYYNQGGNSKWMSTFVQTAGFPILFIALFLFHSKTSSTQTVTSSPAPTISIPKITLIYVVLGLIIAADDLMYSYGLLYLPVSTYSLICASQLAFNAVFSYFLNAQKFTPLIFNSVVLLTFSASLLGVDEDSQGTTSISHGKYILGFLLTLGASATYSLILSLMQVTFEKVIKRETFSVVLNMQIYTALVATLASLVGLFASGEWMTLQGEMHAFQSGKLSYVMTLLWTAISWQVASVGVVGLIFVVSSLFSNVISTLALPIIPVFAVIFFHDKMDGVKIIAMLMAIWGFMSYGHQLYVDGKKGRKTTVSVEETS

SEQ ID NO: 184545 - protein, 185 aa, Oryza sativa
  Clone ID: PAT_MRT4530_81526C.1.pep
MWLTRFHYHISPEGIETLCSHLEVPHTDVRILMLAWKMGCEKQGYFTLDEWRSGLKALRADTINKLKKAFPELVQEVTRPSNFQDFYPYAFRYCLTEDKKKCIEIPVACELLNLVLGLQFRPQVDKLVNYLKHQSEYKVINMDQWMGFLRFCNEINFPSLDNYDSDLAWPLILDNFVEWLRENKS

SEQ ID NO: 184546 - protein, 187 aa, Oryza sativa
  Clone ID: PAT_MRT4530_81527C.1.pep
MRRRKEYPGTRKQSGDWLAMVCDVRRSLHKRLYVVAAKEQRVCTRNGGEETFLSSTPFSSLKNVRVKNEGNVLGTRGCNTASLTLTNIPLLRKSPTTFRSLSNPGVRRRRRPMSSAASPGGARERPSSRNSAVWPVPSSPSQLASRCLAASADAHDCAHLAMVHRPVHAQHKLIAMSVLKSNKIYNQ

SEQ ID NO: 184547 - protein, 212 aa, Oryza sativa
  unsure (1)..(212): unsure at all Xaa locations
  Clone ID: PAT_MRT4530_81528C.1.pep
MDGETLSWAEPECGDEFALFFLDKAACTTVSGAISTVTASRTGSPGCAWRGRRVPPPEAGGDDEQRLRDDGSGGDGECWRRRSGGCGDAAVGDGDDDDDGSGGATTATTTMESVSESFDGMNKASAIAHCLMISEPPCCCSTHGTARVGVDYHSDDDGIVSILFFFVRFFFLRVVKLTARGRLNTTARDNRFSRAVDLTXPHEKIDYPVRSY

SEQ ID NO: 184548 - protein, 113 aa, Oryza sativa
  Clone ID: PAT_MRT4530_81529C.1.pep
MERGEMEREEEEDEGGPMPSPVSSTGRRSPTGTAAVLGAISMGVFADGAMWMLHALLQQAVEGKALEENISVTLPPNILLSANLDIMRFGMYRGAFTGVRRPVPSRPHPNPAF

SEQ ID NO: 184549 - protein, 149 aa, Oryza sativa
  unsure (1)..(149): unsure at all Xaa locations
  Clone ID: PAT_MRT4530_8152C.1.pep
QFKDPDFATFVCVGIPEFXLSLYETERLVQELAKFEIDAHNIIINQVLFDEEAVESKLLKARIKMQQKYIDQFHMLYDDFNITKLPLLPEEVCGVQALQNFSRHFLTPYKAALKRGTVEEVEQRVSLLKSALQEAESELDRLRKGKQVA

SEQ ID NO: 184550 - protein, 217 aa, Oryza sativa
  unsure (1)..(217): unsure at all Xaa locations
  Clone ID: PAT_MRT4530_81530C.1.pep
MDGETLSWAVPECGDEFALCFLDEAACAAVSGAISTVTASRTGSPSCAWRGRRVPPPEVTSPAGLLRSAGSPELCLLRSAXAGGDDEQRLRDDGSGGATTATTTGAAAXDDECWRRRSGGCGDAAAGDGDDERRLRVDGDDDGSSGATTATAQPRRRXTMDSVSESFNGMNKASAIAHCPMISEPRDFYLYFQVFLRIFRWKFAETKGPFIMAGFVA

SEQ ID NO: 184551 - protein, 86 aa, Oryza sativa
  unsure (1)..(86): unsure at all Xaa locations
  Clone ID: PAT_MRT4530_81531C.1.pep
MIERRCNYHGCTTELAIREDMTVILYAHTIIYDCYSMIHSILVMCYWYTPHCEPKRSNKMNSGAKILIQPYVXACVHWYSIDLEYT

SEQ ID NO: 184552 - protein, 215 aa, Oryza sativa
  Clone ID: PAT_MRT4530_81532C.1.pep
MAEGLGLGASEEGRCVLRRMVVGCEGSDEMLRVNHYPPCLLPPGRDRDECGVTGFGEHTDPQIISVLRSNCTAGLQILLRGDYSSPARWVPVPPDPDSFFVNVGDSLQFTTRNYRGYELGEEVLTNGRFRSVKHRVLAPEGEESRLSVIYFGGPAASQRIAPLEQVMREGEQSLYREFTWGEYKKAAYKTRLGDNRLGPYELQHAAANDEAATKK

SEQ ID NO: 184553 - protein, 77 aa, Oryza sativa
  unsure (1)..(77): unsure at all Xaa locations
  Clone ID: PAT_MRT4530_81533C.1.pep
TFGVPASLDQVLEGIWGXXCXLRHRRRXRRASGGAGGGGGGEESVLXEIFRGSVASGVNCQKCMQPNLLGNMPEIKK

SEQ ID NO: 184554 - protein, 137 aa, Oryza sativa
  Clone ID: PAT_MRT4530_81534C.1.pep
MSVEILDGKTVLSFVEDEGAFNSSVDGRFAALDTNRDGLLSYAEMANELMSLRVLDKHFGVDEAAMGADELVELYHGLFLRFDRDGSGAVDLEEFRAEMKEVLLAVANGLGFLPVQMVVEEGSFLKVAVDRELAKAA

SEQ ID NO: 184555 - protein, 548 aa, Oryza sativa
  unsure (1)..(548): unsure at all Xaa locations
  Clone ID: PAT_MRT4530_81535C.1.pep
EDNYTPLFFGVFMADNETEEQRRAXEADQDRARQEAERRRLEEVRQRQKRERIQREQQDRERVAKEAEDRRQRALESGXFRTPQQNAVAAITLLDTLLKEDALNQADHVVNILNQTKTMIAASVPANSASTRTPTVGFKPTGIEKYDGTTNPESWLTVYGLAIHAAGGDSKAMANYLLVALADSARSCLHGLPRGTIGSWVELRDHFIANFQGTFERPGTQFGLYNVVQKSGESFRDYIRRFSEQRNKISDITDDVIIAAFTKGIRHEDLVGKFGRKPPRTVKQMFEKANEYAKAEDDITASKQSGTTWKPKKDTPTAGGSGSNNHKDHKYGDQGTSKKRDDEDDAPTGFQDHRKELNYIFGGPLTYESKRKQKLTEREINAVQPNTPQYRWSETAIKFDRSDHPDRVVHPGRYPLVLDPVVRNVKLRRTLIDGGSALNILFAKTLDDMQIPRTELKPSNAPFHGVIPGLSATPLGQITLPVTFGTRENFRTGNVCFEVADFETAYHAILGRPALAKFMAIPHYTYMMMKMPGHRKFQKHQVHSGRCY

SEQ ID NO: 184556 - protein, 598 aa, Oryza sativa
  unsure (1)..(598): unsure at all Xaa locations
  Clone ID: PAT_MRT4530_81536C.1.pep
MARGSAPLDGSVLPLSRIVSERQAGLPRRFLPESATGQEIVTLGEGRPAPRYPGRTVFFLPFAMAGLVPLFSSFFMDVLEFYDLQMAHLTPNAVMTLAIFAHLCEMFIGVRPSLRLFRWFFTVQPVSPPSVVGGCYFQPRGPVLNRYIPCVLHKKWDDWKSDWFYTPLADEARLRLPNQPPAQASSWRAPVDLGDGYDAVLDRLAGLRSQGLTGAMVYGDYLRRRIAPLQRRARGAWEYTGSEDCMRTHRGVKWDWVPEDFKVMIQRVLNLSSAEASLIPQGVLPLCSDPDRATILTIMKAVGASEEQAPRGHDGAGGSCRGEQSTPGGGRASGLRDGGSGGCRPADARGKRKQEGSSSPSPPRGGGAARVSSRRPEGAAPTPQPEGERKKIRLRKMGGXQNHPGETLFPLQXEISSRPSRHSKSGQSEAEDTATAEARRRESDRREAADRLREAEEAAREAVRARQAEEAAWEEARLRQAEAATTSEAARDEAAGTSLGPTPSGNTQDKPGPGDVPEPGTSIGGPGRAASSPRRLSPTPSVAPLSAEPLLQALAVANTTVLDGLSAQMEALQAERAELDAAWARVEEGRHSVEAMVE

SEQ ID NO: 184557 - protein, 46 aa, Oryza sativa
  Clone ID: PAT_MRT4530_81537C.1.pep
KTNKISKFFSSNSKPHTDYTHFFAPSKLAGSPGPKLNRWATTTCKF

SEQ ID NO: 184558 - protein, 516 aa, Oryza sativa
  Clone ID: PAT_MRT4530_81539C.1.pep
VDSRGSPCVDYTDLNKSCPKNPFGLPRIDQESDCLKTSFITPFGAYCYITMPFGLKNAGATYQRMIQRCFSTQIGCNVEAYVDDVVVKTKQKDDLITDLQETFASIRAFKMKLNPEKCIFGVPSRKLLGFMWGPEAQKAFEDFKKLLTTPPVLASPHPQEPLLLYVSATSQVVSTVLVIEREEEGHVQKVQQPIYFVSEVLADSKSRYPQVQKLLCGVLITVRKLSHYFQGHSVTVVTSFPLGDILHNREANGRIAKWALELMSLDLSFKPRTSIKFQALADFVAEWTVCQEDTSTEKMEYWTMHFDESKRLSGTVAGVVLISPTGERLSYVLWIHFSASHNVAEYEALLHGLRIAISVGIRRLIVRGDSQLVVNQVMKEWSCLDDNMTAYRQEVCKLEDKFNGLELTHVLRHNNEAADRLANFGTKRKAASSDVFVEHLYEPTVLRKEIIETTDTQEVSTIEADWREPLIRFLAKQELHYWRGRSSLVLKTPGNNGKTPGNHCCRVPHSGIITRE

SEQ ID NO: 184559 - protein, 901 aa, Oryza sativa
  Clone ID: PAT_MRT4530_8153C.1.pep
MATLLLVGSILLRTVMATLLVGSILVLAAGVSKVVGTEVEKGGHGWNNGFGMNAGPNVGNFSGGGQIGFNPNLGFQPQFGASGSHGGNPVGPFLPSGEPVTRGSSVVGGAFPVGGGAALAGVSVPVPAGAGCGVHAQAGAAYPVGGGGGSGAVLGGDAVPGGAAFSVAVASLPKVGGVQPSGSANAASGGAIAQVTGGSGDSTVKGVATLGDGKGSTAVAFGAEGSVLSQMPGDLYNRGKAKVDNKGLDGLGFFHIPLSAGQRIRHDPKAVLVKVTNGQMTINAVISELHRLIPAKLSRMVEWGKVHTKVSEAQMEIVEWGVGNEVKYVVPKVWVQCKGLPSELREFLIIWAVGSILGITKAVDMVFTRRYDIARLQVLVLDPSLIPDVVDVVIGDHLYELTFRVEPENGPEEPMPMEMENLEDGDVEKNDEGNINQKVGKEAGLDDSGNGSKLGSGVQFSERGCPPAPSSQLNLIHEYDGLTASDEDFDGFVEDTLMVDKVQTQQNLVAKLSAIPEAVLSPSRKSKRRASDSDQLVLERAEKLKADKNLENLHTKAQRKKNNDNFDDRWPFLFNAIIDGLSLRELQMSGRNFTWANNLANPTYEKLDRILMSTEWEHKFPLSSVVALNRDISDHTPLLLNTNSSSVGNTHHSFKFELGWLLRDGFVDMVKEVWSSVNEGNTPMERWQEKIRRLRQHLRGWAKHTSGLFGPPDDSDLQFNENHFVYIPQVSQLENEALIQDFTEKEIKDAIFQMEHNKAPGPDGFPAEFYQVFWDVIKDDLLNLFRDFHNGTLPLFSLNFGTIILLPKCAEAMRIQQYRPICLLNVSFKIFTKVATNRIMSVAQKIDFEKAYDKVKWSFVQQTLRMKGFPPKWCKWIASFIQGGHVGIKVNDQTGLRMLVR

SEQ ID NO: 184560 - protein, 477 aa, Oryza sativa
  unsure (1)..(477): unsure at all Xaa locations
  Clone ID: PAT_MRT4530_81541C.1.pep
ARRRESDRREAADRLREAEEAAQVAVRARQAEEAAREEARLRQAEATTTSEAARDEAAGASLGLTPSCDAQDKPGPGDIPESGTSIGGPSRAASSSRRLFPTPSVAPLSAEPLLQALAVANTTVLDGLSAQMEALQAERVELDAAWARVEEGRRSVEAMVEVGRKAHRRHVSELEARRKVLGEIAKEVEEERGAALIATTVMNEAQDTLRLQYGSWEAELGKKLDAARGVLDAAAARERRAAETEVASRRREEALEARAMALEERACAVERDLADREAAVAIREVTLAVHEAACAEEESALRLREDALTERERALEEAEAAAQRLADSLXLREAAQEEQARRNLXGALDSSAGEVEALRLAGERLSEIAGTLQRLPEELERTIKSSSRDLARGAVELVLASYQARDPDFSPWTALDEFPPGTEDGARAQVRDAADHIVHSFEGSAPRLAFALNSDEEDDDGGVGDSGDEAGDPGASE

SEQ ID NO: 184561 - protein, 102 aa, Oryza sativa
  Clone ID: PAT_MRT4530_81542C.1.pep
PSVFILLVLYIGSCRSPPTSAAPTAWLSSTARRNITRHAPVRSRRGSCSCRREPSLPSPARPTARRRCARRRPSASPSASRVVDQAGAQAAPWPAAAPNADA

SEQ ID NO: 184562 - protein, 617 aa, Oryza sativa
  Clone ID: PAT_MRT4530_81544C.1.pep
MASPQRCLSSSPVVGLRDGAALACLLHLEVDTHLLRHSSDDAKSEISSRPPRHSKSGRSEAEETATAEARRREAVRREAADRLREAEEAAQEAVRVRQAEEAAREEARLRRAGKSAREAEATRARQAACQAPDPTPPEATTTSEATLDEAAGAPLGPDPSGDALAAANTTVLDGLGAQMEVLQAERAELDAAWARVEEGRRSVEAMVEAGRKAYRRHASELEARRRELAEIAREVEEERETALIATAMLNEARDDLRLQYGSRAAELEKKLDAARGVLDAATARERRATENEAASRRREEALKASATALEERARARERDLADRETAVAIREATLAAHEAACAEEESALRLREDALTERERALEEAEAAAQRLADSLSLREAAREEQARRNLEGARAERAALDQRAAELEARAKELDARARTGGATAGDGDLAARLAAAEHTIADLQGALDSSAGEVEALRLAGEVGPGMLRDAVSRLDRAGRQAGLWGERTAKYAANQGGLAQRLSEMAGTLQRLPEELEETIKSSSRDLAQGAVELVLASYQARDPDFSPWAALDEFPPGTEDDARAQVRDAADHIVHSFEGTAPRLAFALDSDEEGGDGGVDDSDHEAGDPGASK

SEQ ID NO: 184563 - protein, 158 aa, Oryza sativa
  Clone ID: PAT_MRT4530_81545C.1.pep
LVNTGKDRAKVSLLMTWANSIGGFSHHSGGHFNEPFIAEDGVSGVLLHHKTAKDNPPVTFAIAACETQNVNVTVLPVFGLSGEGHDSAKQMWDRMKQNGHFDRENFEAGTSMPSSSGETLCAAVSASTWVEPHGRCTGVFGLAWSSPKIKFQKGCTYN

SEQ ID NO: 184564 - protein, 1041 aa, Oryza sativa
  Clone ID: PAT_MRT4530_81546C.1.pep
MARGSALLDGSVLPPSRIVSERHAGLPRRFMPESATGREIVMLGGGRPAPDYPGRSVFFLPFAMAGLVPPFSCFFMDVLEFYDLQMAHLTPNAVMTLAIFAHLCEMFIGVRPSLRLFRWFFTVQSVSPPSVVGGCYFQPRGPVLNRYIPCALRKKWDDWKSDWFYTPLANEARLRLPSQPPAQVSSWRAPVDLGDDYDAVLDRLAGLRSQGLTGAMVYGDYLRRRIAPLQRRARSAWEYTGSEDYMRTHQGARWDWAPEDFKIVVQRVLNLSSVEASLIPRGILPLCSDPDRASILTIMIGVGASEEETPKGHDGAGESRRGDQSTPGGGRASGPRVGGSGSSRPADAQGKRKLGGTPPPSPPRGGGAARASNLRPEGAAPSSQPEGERKKKRLRKMGETEPSRGNLISPPRWSFNRPPRSDVPSRSSRHPKSGQSEAEDPAAAEERRRENDRREAADRLREAEEAAREAARVRQAEETAREEAARARQAEAMASSEAAHDKAAGVSLGPTPSGDAQATASGAARDEAAGASPGPTSPGDAQDQTGPGDIPEPSASSGGPSRVAFSPRRLFSSSSVAPLSAEPLLQALAAANTAVLDGFSAQVEALRAERAELEAAWARVEEGRRSVDVMVEVGRKAHRRHVSELEARKAVLAEIAREVEEEREAALIATTAMVEAQDTLRLQHANWEAELKKKLDAAQGVLDTAAARERRATETEAASRRREEVLEARAMALEEHAGAVERGLADREAAVAIREATLAVHEAACAEEESALRLREDALAERERALEEAEAAAQRLADSLSLREAAQEEQARRNLECVRAERAALEQRAADLEAREKELAARAPIGRAAAGESDLAARLAAAEHTVADMQRALDSSAGEAEALRLAGEIGPGTLWDAVSRLDRAGRQAGLWKGQTMLHSTNLEGLAPRLTKMAWALQQLPEELEKTIKSSSRDLAQGAVELVLASYQARDPNFSPWMALDEFPPGTEDDARARVRDAADHIVNSFEGSAPRLAFAPNSDEEGDASGADDDGDEAGDPGALE

SEQ ID NO: 184565 - protein, 44 aa, Oryza sativa
  Clone ID: PAT_MRT4530_81547C.1.pep
RIKDLKFLLGEIYSKSRTIIVGLGYVKLSFDYTHPRYVSREYLI

SEQ ID NO: 184566 - protein, 313 aa, Oryza sativa
  Clone ID: PAT_MRT4530_81548C.1.pep
MQAVGASEERAPGGHDGAGGSRRGEQSTPGGGRASGPRDGGPGSGRPADARGKRKQEGTPSPSPPRGGGAARASSRRPEGAVPSSQPEGERKKKRLRKMGETEPCRGNLISPPRWSFSRPPRSEIPSRPPPRHSKSGQSEAVETATAEARRREAERREAADRLREAEEAAQEAVRVRRAEEAAREKAKLRRAEDSVREPEKARARQAACQAPDPTPPEATTTSEATHDEAAGALLGPDPSGDARDVPASGDAPESGTSIGGPCHAAPAPRRLSPMPSAAPLNAEPLLQALAAANTTVLDGLGAQMEVLQAEWT

SEQ ID NO: 184567 - protein, 1104 aa, Oryza sativa
  Clone ID: PAT_MRT4530_81549C.1.pep
MGSVSDIDDFAFPPGQAFWFGSLDFITNDFGKISLLDSDSNQSGKNQVSAPFGIPNSAEIYSKLILIESASNHSDEIPSTPTPPDQDDAAYPPILMKLPDDLATVFTTRASSPRRPRRKSASTPILPSSREVGVILQPLGTVSTDQLEGYFSSPGIDSRLTEIVEYDEFGYRYDNHDLDDFDESLEDNYTPLYFGVFMADNEMEEQRQAREAEARRVQQEAERRRLEEERQAQEQERLRREQQERERAAKEAEDRRQRALDAGRQVRDLIGQQDVEGTAVFRTPQQNAVAAITLLKEDALNQADHVVNILNQTKTMIAASVPVNSESIRTPTGSRVPHLRSHDYHQPSLSIAGAGSNRRSRGHDERSVHLPPERHRVRRVERPRSPPRRHPVDLRDTINQRRAARGYRHSPDHYDDDMDGVASFTNDLRRVDWPAGFKPTGIEKYDGTTNPESWLTVYGLAIRAAGGDSKAMANYLPVALADFARSWLHGLPRGTIGSWAELRDHFIANFQGTFERPGTQFDLYNVIQKSRESLRDYIRRFSKQRNKISDITDDVIIAAFTKGICHDELVGKFGRKPPKTVKQMFEKANEYAKAKDAIIASKQSGPTWKPKKDTPTTGGGGSNNHKDRKRKPEELVATTTHSSRQRSRVNTFDKIMNSQCPHHPNSNHAAKDCFVYKQFAEQYAKNTRKTSNGEQSTSKKKDDDDDAPTGFQDHCKELNHIFGGPLAYESKRKQKLTEREINAVQPDTPQYLRCALNILFAKTLDDMQIPRTELKPSNALFHGVIPGLSATPLGQIILPVTFGTRENFHTENVYFKVADFGTAYHAILGRPALAKFMAVPHYTYMMMKMPGPRGVISLRSDIKQAVTCDKESCEMAQTREIAIAREDIRLAATTASEGEVPTTKISKSGESEAKTKKIPLDPSDPTKTAVIGAELDYIFAWKPSDMPGIPREVIEYSLHVKEDAKPIKQRLRRFAQDRKDAIKEELAKLLAAGFIKEVLHPDWLANPVLVRKKTGQWRMCVDYTDLNKSCPKDPFELPRIDQVVDSTAGCEQLSFLDCYSGYHQIRLKESDCLKTSFITPFGAYCYITMPFGLKNVGATYQRMI

SEQ ID NO: 184568 - protein, 253 aa, Oryza sativa
  unsure (1)..(253): unsure at all Xaa locations
  Clone ID: PAT_MRT4530_8154C.1.pep
MSVALPVAARYSAHARXPAACGPAGRGPAGRLPSVVPLGTGREEGEEAALAGRRMGREEGEERAGMGGGRGGGGGEGDGSEERSDGKGGGRRVPGWEEEEEREMDLRSGGAARWGEEVRGDMGMDSGLEKTQHRHLPAVEGTAARRLHAVEAELGRSAPAREIEAVARDEEEAASPCGCAATNRNLTMARSVARAATPSAPPSSPTKTTQVCAPAVASSDASPSPKTASSSMMVSAVEDAAAPRLNVTGPELG

SEQ ID NO: 184569 - protein, 67 aa, Oryza sativa
  Clone ID: PAT_MRT4530_81550C.1.pep
VILAFLTFILKLMNLDIYIYLDSLTSGMNVENAKMTYIVKWRKYVVSLYPGLYCIYLTAVYRRGQNV

SEQ ID NO: 184570 - protein, 169 aa, Oryza sativa
  Clone ID: PAT_MRT4530_81551C.1.pep
MTNYNTTSPGGTHVVTPVANIPLPSNNLIVSDADDVVSGENGTTHEQEMENTMHGDVHGNIVHGEAALESTLQDSSTVPDQDADSSGAASAAASGAGGDSVSLGDAEANGAAASGEASSADSQPVQPDVTATAARAPRPHTRLLSGIRKEKIYIDRTVKYGCFNSTCRN

SEQ ID NO: 184571 - protein, 931 aa, Oryza sativa
  Clone ID: PAT_MRT4530_81552C.1.pep
MARGSAPLDGSVLPPSRIVSERQAGLPRRFMPASAAGREVVELGEGRPVPHYPGRSVFFLPFAMAGLVPPFSSFFMDVLEFYDLQMAHLTPNAIMTLAIFAHLCEMFIGVRPSLRLFRWFFTVQPVSPPSVVGGCYFQPRGPALSRYIPCVLRKKWDDWKSDWFYTPLADEARLQLPSQPPAQVSSWRAPVDLGDGYDAVLDRLAGLRSQGLTGAMVYGDYLRRRIAPLQRHARGAWEYTGSEDYMRTHQGVRWDWAPEDFKIVVQRVLNLSSVEASLIPQGVLPLCSDPDRANILTIMMAVGASEERAPRGHDGAGGSRRGEQSTPGGGRASGPRDRGPGGSRPADARGKRKQEGGRSTDLLAGSFRAHCGCIHSPNASFHSPVLFVFWFFFCFSEIPSRPSRHSKSGRSEAEDTATAEARRRETDRREAADRLREAEEAAQEAVRARRAEEAAREEARLRRAEESAREAEAARARQAACQAPDPTPPEATTSSEATHDEAAGAPLGPDPSGDAQDKPGPGDVPESGTSIGGPSRAASSPRRLSPMPSAAPLSAEPLLQALAAANTTVLDGLSAQMEVLQAERAELDAAWARVEEGRRPVEAMVEAGRKAHRWHTSELEAHRKELAEIAREVEEEREAALIATAVMNEAQNDLRLQYGSWAAELGKKLDAARGVLDAAAAWERRAAETEAASRRREEALEARATALEERACVKERDLADREAAVAIREATLAAHEAACAEEESALRLREDALTERERALEEAEAAAQRLADSLSLREAAQEKQTRRNLEGARAERAALDQRAAELEARERELDARARSGGAATGDGDLATRLAAAEHTIAELQGVLDSSAGEVEALRLAGEVGPGMLRDAVSRLDRAGRQAGLWGGRIAKYAANQGGLAQRLSEMAGTFQRLPEELEETIKSSSRDLARG

SEQ ID NO: 184572 - protein, 1044 aa, Oryza sativa
  unsure (1)..(1044): unsure at all Xaa locations
  Clone ID: PAT_MRT4530_81553C.1.pep
MARGSAPLDGSMLPPSRIVSERQAGLPRRFMPESATGREVVALGEGRPAPRYPGRSVFFLSFAMAGLVPPFSIFFMDILEFYDLQMAHLTPNAIMTLAIFAHLCEMFIGVRPSLWLFRWFFTVQPVSPPTVVGGCYFQPRGQVLNRYIPCVLRKKWDDWKSDWFYTPLADEARLRLPSQPPAQASSWRAAVDLGDGYDAVLNRLAGLRSQGLTGAMVFGDYLRRRIAPLQRRARAPXEYTGPEDYMRTHQGRKWDWDPEDFRMVVQRVLNLSSVEASLIPQGVLPLXCDPERAKILDIMXVVGASGERAPRGHDGAGGSRRGEQSTPGGGRASGPRDGGPGGSRPADARGKRKQEGTPPPSPPRGGGAVRASSRRPKGAAPTPQPEGERKKKWLCKMGGXSCHAGGTSSRPRGGRLADLPAARSRRAPPRHSKSGRSEAEETATAEARRREADRREAADRLREAEEAAQEAVRVRQAEEAAREEARLRRAGESVREAEAARARXAACQTPDPTPPEATTTSEATHDEAAGAPLGPDPSGDAWDGPASGDAPESGTSIGGPSRAAPTPRGLSPLPSAAPLSAEPFLQALAAANSTVLDGLSAQMEALQAERAELDAAWARVEEGRRSVEAMVEAGRKAHRRHASXLEARRRDLAEIAREVEEERETALIATAVLDEAWNDLRLQYGSRAAELEEKLDAARGVLDAAAARERRAAENEAASRQREEALEARATALEERARALDAKXRDLADREAAVATREATLAAHEAACAEEESALRFRENALTERGRALKEAEAVAQRLADSLFLREAAREEQAHRNLEGVRAERAALDQRAAELEARAKKLDARAHSGGAAAGHGDLAARLAAAEHTIAELQGALDSSAGEVEALRLASEVGPGMLRDAVSRLDRAGRQTGLWGGRHAKYAANXGGLAQRLSEMAGAVERLAEELEETIKSSSRDLARGAVELVLTSYQARDPDFSPWAALEEFPPGTKDGARAQVRDAADHIVHSFEGTAPRLVFALDSDEEGGDDGADNSDDEADDPGASE

SEQ ID NO: 184573 - protein, 110 aa, Oryza sativa
  Clone ID: PAT_MRT4530_81554C.1.pep
GRRLSLLQSPSSMSTPGVTGAVVWDSGVVLAKFLEHAVDSGLLTLRAARALELGAGCGLAGCVAALLGAHVLLTDLPDRLKLLRKNIDLNVGDDARGSARVAQLVWADDP

SEQ ID NO: 184574 - protein, 114 aa, Oryza sativa
  unsure (1)..(114): unsure at all Xaa locations
  Clone ID: PAT_MRT4530_81555C.1.pep
HAFLVLWTDTWFTPQAWGNYGGHKCAMETLSITNRTTLLDVCTDWKLYAGAQEVLQTFRRVPVXFVDITVXLAELRMDAHTSVHTXIRMGKLITPXIVRTQRRTRDWIHWWLPG

SEQ ID NO: 184575 - protein, 119 aa, Oryza sativa
  Clone ID: PAT_MRT4530_81556C.1.pep
MARPANNNYAAAVMVVALLVAAPAASAVTCGQVVSMLAPCIMYATGRVSAPTGGCCDGVRTLNSAAATTADRQTTCACLKQQTSAMGGLRPDLVAGIPSKCDVNIPYAISPSTDCSRVH

SEQ ID NO: 184576 - protein, 147 aa, Oryza sativa
  Clone ID: PAT_MRT4530_81557C.1.pep
MEQPLFELSAPKGEFYEPPPSSEPIYTTGYEIRPKLITWSRFTNLVHSGQTLSLPEYVHLQHFHTGLDKESAFYLDITAGGSFVQKTTSEGKVILDRILENNYFMMQCDEPQLEASVSKIKEPSTIESQSETSTSTNSIDEKVTEAP

SEQ ID NO: 184577 - protein, 122 aa, Oryza sativa
  Clone ID: PAT_MRT4530_81558C.1.pep
MYATGRVSAPTGGCCDGVRTLNSAAADHQTTCACIKQQTSGMGGLRPDLVAGIPSKCGVNIPYAISPSTDCSRSTAATGQQQQAATGATIVISTAEFSCPVLESEQLNTVLSSNDNEMNYKY

SEQ ID NO: 184578 - protein, 377 aa, Oryza sativa
  Clone ID: PAT_MRT4530_81559C.1.pep
MDWDLKMPVSWDLAELEHNAVPNMAAAASAAEPGIAAVAASRGAPGRPECSVDLKLGGLGEFGAADALKEPAAAAKAPVSSAAAAASVAKVPPSTSTLKRPRGGGGGGGGQCPSCAVDGCKADLSKHRDYHRRHKVCEPHSKTPVVVVSGREMRFCQQCSRFHLLGEFDEAKRSCRKRLDGHNRRRRKPQADSMSSGSFMTSQQGTRFASFTPPRPEPSWPGIIKSEETPYYSHHHHPHPVMTSRQPHFVGSPSSATTAAFSPKEGRRFPFLHEGDQISFGGGGGAAAAATLEISVCQTTVVAPPPPESSSSNKMFSSDGLTTATTTTTTAHHHHHHHQVLDSDCALSLLSSPANSSSVDVSRMVQPSPAAAAGAAP

SEQ ID NO: 184579 - protein, 51 aa, Oryza sativa
  Clone ID: PAT_MRT4530_8155C.1.pep
MAGGAAAIAAEGGRARNGYSVAPHNVTAPRQQRLGTVDPRIALTHHVFDWW

SEQ ID NO: 184580 - protein, 53 aa, Oryza sativa
  Clone ID: PAT_MRT4530_81560C.1.pep
KVRFWWWLKPNLNYNQWGPMDKLGAFGCFCVLINFRYGPRLHVFRGPVRFLGV

SEQ ID NO: 184581 - protein, 77 aa, Oryza sativa
  unsure (1)..(77): unsure at all Xaa locations
  Clone ID: PAT_MRT4530_81561C.1.pep
TPTRPPTRWDSDPCMTTDYITYMFKCDTGQSQRKYYEVQDKDSKTLICSTKEVDVLGXRNNEEIPWAAAGAEYTVES

SEQ ID NO: 184582 - protein, 47 aa, Oryza sativa
  Clone ID: PAT_MRT4530_81562C.1.pep
VPSRGVAQPLWQLSWSFLRPAHLDFTSSIHSCCASPLAQSICSPWLG

SEQ ID NO: 184583 - protein, 51 aa, Oryza sativa
  Clone ID: PAT_MRT4530_81563C.1.pep
PLSEKTGGKKNPQNGGVPQKALGPKKKGGLSPGFFFSGISFDPPVCLTPGV

SEQ ID NO: 184584 - protein, 130 aa, Oryza sativa
  unsure (1)..(130): unsure at all Xaa locations
  Clone ID: PAT_MRT4530_81564C.1.pep
MVRAAIGEIWELKLVKVPGSLCTPAREGKSPPGVKPHKKVFPLVFLSKVGYAXDLFVLPQQVEQXIFFIKNPSNKKMPIVRXGKRRIVEVDNVVDEEEYTHNIHVRPHIGLDYNPQEPVAYGHQNKSCSS

SEQ ID NO: 184585 - protein, 78 aa, Oryza sativa
  Clone ID: PAT_MRT4530_81565C.1.pep
KEKGFILFLKKPLYRELLHETHYLAVWEAMLTEDEEVAVSPCCLELALRIYLGHLHNIQGVASIFYATHWVVKGFATF

SEQ ID NO: 184586 - protein, 562 aa, Oryza sativa
  Clone ID: PAT_MRT4530_81566C.1.pep
MVKFVSLQKPAVWIPSSSIAHEKMESSRGSKAISPLSPIQPAPSFLLPPNPPYATLRSYIPNRPFLTFVPTLIASFPRRLYNLNHWVPFGVCYAMKRAGSKGVLESSFSSSKKTTRRQKKPPTSSLEELELPNSAMNKIQEVHDIARDVFFAATPGFVPSSLAEANLTKLLDTLKLEDFGLDASMPYFRADPQGHPKVTYVHFGDDSLNFSFGVFCLPQSAVIPLHDHLGMTVFSKILHGSMHIKSYDWVKTPNGAHFAKVRTNTIYDDSSKTTVLYPESGGNLHCFTAETACAVLDVMGPPYSSVEGRDCSYYGVCPSPRGVSRRITDELSDWLRKERCTFNMNAVLVKPSHSQCVFVAFGLNQKGEYSLSCPLSARPPQEHVGNLGHGFLVAGGTHARAPHRHVKDGRGRRETSLSIVALHARRARRPGEEGRWMLAGSMGKVVGLKKLAGFLRPTMPEKGEGRATDGGRGPALSWGRSRPRLLLRQIRTARCPSLPGRFHAAELALLRSRYQRPSLLTSPSSLPRQVHVADLVGPRRRPRSPSPARAPIPSVAPATPSS

SEQ ID NO: 184587 - protein, 55 aa, Oryza sativa
  Clone ID: PAT_MRT4530_81567C.1.pep
GYDVTRSALEASSPCAAAAITHPMPALLPPRIRAHARTRAPARREQSSSSAWSGG

SEQ ID NO: 184588 - protein, 23 aa, Oryza sativa
  unsure (1)..(23): unsure at all Xaa locations
  Clone ID: PAT_MRT4530_81568C.1.pep
KGLCINRSXWTGIPDHCRLRFAL

SEQ ID NO: 184589 - protein, 94 aa, Oryza sativa
  unsure (1)..(94): unsure at all Xaa locations
  Clone ID: PAT_MRT4530_81569C.1.pep
TATKAELNSTMSEVSCPSCLKMLXHDTILSRIIYNKNLSLVYHSXDEFCEVGIVLNLLINLGFLQHFFGGSQKNMSAVHFIAXNRAXGQRPELG

SEQ ID NO: 184590 - protein, 89 aa, Oryza sativa
  Clone ID: PAT_MRT4530_8156C.1.pep
LPLSFYPLSALSLYPLSLSLPDQWNRVGSGWSRRRAGRAVARAAVGGVGWQSGAGCQRGGAEGRSGATGGDGTEHRGGARQWHGAGGAA

SEQ ID NO: 184591 - protein, 83 aa, Oryza sativa
  Clone ID: PAT_MRT4530_81570C.1.pep
MAKRSGAAATRPKRHWWWVGLHLSSFSYDRRNERSGALAAWPKRCPGVHLSFDQQRVEWSGGVVAQAVGGSPPLLLLRPADGA

SEQ ID NO: 184592 - protein, 1362 aa, Oryza sativa
  Clone ID: PAT_MRT4530_81571C.1.pep
MKSNASPEPDGMNVAFFKAAWGWIKDDVMKLVEDFYNTGNLPKELNKTNIVLIPKKNRPANPADFKSISLCNVMYKIIAKSIANIIKGFLLKIDLSKAFDRLEWDFIASAMKKKGFHSNFINLVQGCISSSSFYVTFNGQSYDAFNANRGVRQGCPLSPYLFVLALNELSDQLNEDLLNNQMKGIKLSPQGPAIHSLLYADDLIITGEATEIEARKIKEIIEDFCNKSGQTPNWSKSAILFSKSTPLYIQNSIKTIFHVASVDSNTKHLGHPLFVTNRTKIFVYQFIVDKFKAKLTNLKANKLSHAGRLTLIKTVFASLPVYYMATTLLPKKIIAKLTSIIRIFWWTGVREGQDKKPLCLKSWSDICKPVQDGGLGIRDIQMANRSLILNAAWRLVSKLDEPVSQILKAGMYQWRKFEFFEEKAAGRGVPGEIASRVSCCSGGRGRVAVGCDDGTVGLLDRGFRLSYGFQAYASSVLFLQQLKQRNVLITVGDDDQPSSLSSAICLKVFDLDKVQEEGSSTTSPFCVQILRIFTKQFPQAKITSFVVLEEAPPILLIAIGLDNGSIYCIKGDIARERITRFMLQVEDGTSLPITGLGFRVEGQAHQLFAVTPSSITLFSLHDHPPRRQTLDQIGCETNAVAMSDRMDLIIGRPEAVYFYEIDGRGPCWAFDGEKKFVGWFRGYLLCIIEDQRSRKNTLNVYDLKNRLIAHSMPVGDVSHLVSEWGYIILIMSDKKILCIGEKDMESKLDMLFKKNLYTVAINLVQSQQADPASTAEVLRKYGDHLYGKQEYDEAMSQYIHTIGHLEPSYVIQKFLDAKRIYNLTNYLEKLHDRGLASKDHTTLLLNCYTKLKDVEKLNHFIKDEDGVGEIKFDVETAIRVCRAAGYHEHAMFVAKKAGRHELYLKILLEDLGRYDEALQYISSLEANQAGLTVKEYGKILVEHRPAETVEILLRLCTDGGDPMTRRGSNSMHLLMIPSPMDFVNIFVHSPKHLMEFLENYTKAVKDSPAQTEIHNTLLELYISKDLSFPSMSQENGFEEQNSKERKGKEVANGYKSGPREKGNLGKEDMNVAKDIVDRQRKGLALLKSAWTSEMDDPLYDVDLALIICNANAFKDGLLFLYEKLKLFKEVISCYKQAHDHEGLIACCKKLGDSSQGGDPSLWGDLLKYFSELGEDCSKEVKEVLTYIEKEDVLPPIVVLETLSKNPCLTLSVVKDYIARKLEQESKLIEEDRKSIDKYQDETELMKREIEDLKTNAKVFQLSKCTTCTFTLDLPAVHFMCMHSFHLRCLGDNEKECPECAPEYRSVMEAKQKLEHNARDHDLFFRQLRGSKDGFSVVADYFSKGIVTMVMVFLLAVLAIIRN

SEQ ID NO: 184593 - protein, 355 aa, Oryza sativa
  Clone ID: PAT_MRT4530_81572C.1.pep
MGGSSSTSRRRRDEYYAARPPPPPHHYYTYPPPPPPPPHHHHHPPPPPPPPHHHHQHPYRPPPPPHHATSSSSYYYHHPPPPHAYHGPWHPAPRPPHPEQPALTGPPPEFVDHQQARKVKNDVNLHKDTIRLVPDVTDPDRRLVAFTFDAVTDGSITIYYFGRVRKNCTFSSVYPELQTPTKIPFQKGLAQKFVQTSGSGVDLGFFSLDELSNPSGEVFPLVVYAEACPPPEESHQPNSTRAQITLAVIEKHHNDLRVKVVKQMLWSDGEKYELQEIYGIVNSTEADVPDADDSDMGKECVICLTEPRDTAVFPCRHLCMCSECAKTLRFQTDKCPICRQPVEKLMEIKVRSPEP

SEQ ID NO: 184594 - protein, 891 aa, Oryza sativa
  Clone ID: PAT_MRT4530_81573C.1.pep
MARGSAPLDGSVLPPSRIVSERQARLPRRFMPESATGREVVALGEGRPAPHYPGRSVFFLSFAMAGLVPPFSIFFMDILEFYDLQMAHLTPNAIMTLAIFAHLCEMFIGVRPFLRLFRWFFTVQPVSPPTVVGGCYFQPRGQGLTGAMVFGDYVRRRIAPLQRRARGAWEYTGPEDYMRTHQGRKWDWDPEDFRMVVQRVLNLSSVEASLIPQGVLPLCCDPERAKILAIMQAVGASGERAPRGHDGVGGSRRGEQSTPGGGRASGPRDGGPGGSRPADARGKRKQEGTPPPSPPRGGGASGRSEAEETATAEARRREADRREAADRLREAEEAAQEAVRVRQAEEAAREEARLRRAGESVREAEAARARQAACHTPDPTPPEAMTISEANHDEAAGAPLGPDPSGDAWDEPASGDAPESGTSIGGPSRAAPIPRRLSPLSSAAPLSAEPLLQALAAANSTVLDGLSAQMEALQEERAELDAAWARVEEGRRSVEAMDLAEIAREVEEERETALIATAVLDEARDDLRLQYGSRAAELEEKLDAAQGVLNAAAARERRAAENEAVSRQREEALEARATVLEERARALVAKERDLADREAAVATREATLAAHDATCAEEESTLRLREDALTERGRALEEAEAAAQWLADSLFLREAAREEQARRNLEGARAERAALDQRAAELEARAKELDARAHSGGAAAGHGDLAARLAAAEHTIAELQGALDSSAGEVEALRLASEVGPGMLRDAVSRLDRAGRQAGLWGGRYAKYAANQGGLAQRLSEMAGALERLPEELEETIKSSSRDLARGAVELVLASYQARDPDFSPWAALEEFPPGTEDGARAQVRDAVDHIVHSFEGTAPRLAFALDSDEEGGDDSADDSDDEAGDPGASE

SEQ ID NO: 184595 - protein, 328 aa, Oryza sativa
  unsure (1)..(328): unsure at all Xaa locations
  Clone ID: PAT_MRT4530_81574C.1.pep
MARGSALLDGSVLPPSRIVSERQAGLPRRFMPESATGREIVMLGEGRPAPDYPGRSVFFLPFAMAGLVPPFSSFFMDVLEFYDLQMAHLTPNAVMTLAIFAHLCEMFIGGWXXAXPPPKNIFLRLFRWFFTVQSVSPPSVVGGCYFLRRGPGVRWDWAPEDFKILIQRVLNLNSVEASLIPHGILPLCSDPDRVSILTIMTAVGASEEQAPKGHGGAGGSRRGDQSTPGGGRASGPRVGGSGSNRPTDARGKRKLGGTPPPSPPRGGGAARASSRRPEGAAPTSQPEGERKGKRKIRGAPGLRKMGETEPSQGNLISPPRWSFNRPPR

SEQ ID NO: 184596 - protein, 137 aa, Oryza sativa
  unsure (1)..(137): unsure at all Xaa locations
  Clone ID: PAT_MRT4530_81575C.1.pep
SFHVLLQTIQPAFPCQVNHPSGHSQHDCLQHLFSWLYCSCPDQVRLSDASAHESQFPHFSVSSQHPLPSVSRVYRVEVSMPARSAPPPESRSSSVLEMHASAYATAPVEAISSSFLRRVVGSPLTRDADAFGFDXGN

SEQ ID NO: 184597 - protein, 911 aa, Oryza sativa
  Clone ID: PAT_MRT4530_81576C.1.pep
MAGLVPPFSSFFMDVLELYDLQMAHLTPNAVMTLAIFAHLCEMFIGVRPSLRLFRWFFTVQPVSPPSVVGGCYFQPRGPVLNRYIPCVLRKKWDEWKSDWFYTPLADETRLRLPSQPPAQASSWRAPVDLGDGYDAVLDRLAGLRSQGLTGAMVFGDYLRRRIAPLQRHARGAWEYTGPEDIMRTHQGRKWDWDPEDFRIVVQRVLNLSSVEASLIPQGVLPLCCDPERANILTIMQEVGASGERAPRGHDGAGGSRRGEQSTPGGGRASGPRDGGPGGSRPTDARGKRKQEDTPSPSPPRGGGAVRASSRRLEGAVPTSQPEGERKKKRLRKMGGTEPCRGNLISPPRWSFSRPPRSEIPSRPSRHSKFSRSEAEETATAEARRREADRREAANRLREAEEAAQEVVRARQAEETAWEEARLHRAEESVRETEAARARRAGCQAPDPTPPEATTTSEATHDEAAGAPLGPDPSGDAQDEPASGDVPESGTSIGGPSSAASLPRRLFPMPSAAPLSAEPLLQALATANTTVLDGLSAQMEILQAERAELDAAWARVEEGRRSVEAMVEAGRKAHRRHASELEARRRDLAEIAREVEEERETALIATAVFNATRDDLCLQYGSRGAELEKKLDASRQREEALEARATVLEERACALDTKERELAGREAAVAIREATLAAHEAACAEEESALRLREDALTERERALEEAEAAAQRLADSLSLREAAREEQARPAEHTIADLQGALDSSAGEVEALRLAGEVGPGMLRDAVSRLDRAGRQAGLWGERTAKYAANQGGLAQRLSEMAGTLQRLPEELEETIKSSSRDLARGAVELVLASYQARDPDFSPWAALDEFPPGTEDDARAQVRDAADHIVHCFEGTAPRLAFVLDSDEEGGDGGMDDSDDEAGDPGASK

SEQ ID NO: 184598 - protein, 1001 aa, Oryza sativa
  Clone ID: PAT_MRT4530_81577C.1.pep
MARGSAPLDGSMLPPSRIVSERQAGLPRRFMPESATGREVVALGEGRPAPHYPGRSVFFLSFAMAGLVPPFSSFFMDVLELYDLQMAHLTPNAVMTLAIFAHLCEMFIGVRPSLRLFRWFFTVQPVSPPSVVGGCYFQPRGPVLNRYIPCVLRKKWDDWKSDWFYTPLADEARLRLPNQPPAQASSWRAPVDLGDGYDAVLDRLAGLRSQGLTGTMVYGDYLHRRIAPLQRRARGAWEYTGSEDYMRTHQGVKWDWVPEDFKMVIQRVLNLSSVEASLIPQGVLPLCSDPERANILTIMQAVGASGERAPRGHDGAGGSRRGEQSTPRGGRASGPRDGGPGGSRPADARGKRKQEDTPSPSPPRGGGAVRASSRRPEGAVPTSQPEEERKKKRLRKMGGTEPCRGNLISPPKIPSRPSRHSKSGRSEVEETATAEARRREADRREAADRLREAEEAAQEAVRARQAEEAAWEEARLRRAEESVRETEAARTRRAACQAPDPTPPEATTTSEATHDEAAGAPLGPDPSGDVRDEPASGDAPEFGTSIGGPSRAAPTPRRLSPLPSAAPLSAEPLLQALAAANTMVLDGLSAQMEVLQAERAEVDAAWARVEEGRRSVEAMVEAGRKAHRRHASELEARRRDLAEIAREVEEERETALIATAVFNAAQDDLCLQYGSRAAELEKKLDASRQREEALEARATVLEERARALDTKERELAGREAAVAIREATLAAHEAACAEEESALRLREDELTEWERALEEAEAAAQRREEQARLNLEGARAERAALDQRAAEFEARVKELDARARSGGAAAGDGDLAARLAAAEHTIAELQGALDSSAGEVEALRLAGEVGPGMLRDAVSRLDRAGRQAGLWGGRTAKYAANQGGLAQRLSEMAGTLQRLPEELEETIKSSSRDLAGGAVELVLASYQARDPDFSPWAALDEFPLGTEDGARAQVRDAADHIVHSFEGTAPRLAFALDSDEEGGDGGADVSDDEAGDPGASA

SEQ ID NO: 184599 - protein, 110 aa, Oryza sativa
  unsure (1)..(110): unsure at all Xaa locations
  Clone ID: PAT_MRT4530_81578C.1.pep
FFFFFYKSCTELFHFYSHIRRVTKITPHLVLITYTNTIHYLYTVKEKKKIAQHTGQHQLVXSKVYISTRYSLYTTCSTTRSNMLVSCKAVTALNGMWHASQSLMMFMENF

SEQ ID NO: 184600 - protein, 86 aa, Oryza sativa
  unsure (1)..(86): unsure at all Xaa locations
  Clone ID: PAT_MRT4530_81579C.1.pep
GEGRAEGADRWRGGGGXLLXLGSSXSPPXLXLLXXXXXPTGXXNKAIDYDNXIECXXTXKGLTGEXXEXDPAFSGSXTXTYEAXML

SEQ ID NO: 184601 - protein, 72 aa, Oryza sativa
  unsure (1)..(72): unsure at all Xaa locations
  Clone ID: PAT_MRT4530_8157C.1.pep
PPGSGIGASPFLQTTLFQGRGPGPPPPPPGGPPFSXPGXKKKKGPGPPAPPPPVWRFPPCPESGPGPSPFGF

SEQ ID NO: 184602 - protein, 1018 aa, Oryza sativa
  Clone ID: PAT_MRT4530_81580C.1.pep
MARGSAPLDGSMLPPSRIVSERQVRLPRRFMPESATGREIVTLGEGRPAPHYPGRSVFFLPFAMAGLVPPFSSFFMDVLEFYDLQMAHLTPNAVMTLAIFAHLCEMFIGVRPSLRLFRWFFTVQPVSPPSVVGGCYFQPRGPVLNRYIPCVLRKKWDDWKSDWFYTPLADEARLRLPSQPPAQASNWRAPGLTGVMVYGDYLRRRIAPLQRRARGAWEYTGSEDCMRTHRGVKWDWVPEDFKVMIQRVLNLSSVEASLIPQGVLPLCSDPDRANILTIMTAVGASEERAPKGHDGASGSRKGDQSTPRGGRASGPRDGGSGGSRPADARGKRKQEGTSSPSPPQGGGAARVSSRRLEGATPTPQPEGERKKKRLRKMGGTEPSRGNLISPPRWSFNRPPRRRESDRREAADRLREAEEAAREAARARQAEEAAREEARLRQTEATTSSEATHETDRQEATDRLREVEEAAQVAVRARQAKEAAREEARLRQDEAATTSEAARDEAAGASLGPTPSGDARDQPGPGDIPESGTSIGGPSRAASSPRRLSPTPFAAPLSAEPLLQALSVANTTVLDVLSTQMEALQAERAELDAAWARVEEGRRSVEAMVEVGRKAHRRHVSELEARRKVLGEIAKEVEEERGAALIATTVMNEAQDALRLQYGSWEAELGKKLDAARGVLDAAAVRERRAAETEAASRQREETLEARAMALEERSCVMVKDLADREAAVAIREVTLTVHEAACAEEESALRLREDALIERERALEEAEAAAQRLAESASLREAALEEQARRNLESARAERATLNQRAAELEAQARELDARARSGGAATGDSDLAARLAAAEHTIADLQGALDSSAGEVEALRLAGEIGPSMLRDAVSRLDRAGRQAGLWGGRTVKYAANQGGLAQRLSEMAGTLQRLPKELEGTIKSSSRDLARGAVELVLASYQAGDPDFSPWTALDEFPPGTEDGARAQVRDAADHIVHSFEGSAPRLAFALNSDEEGDGGGVGDSGDEAGDPGASE

SEQ ID NO: 184603 - protein, 402 aa, Oryza sativa
  Clone ID: PAT_MRT4530_81581C.1.pep
MVILTSPPLSLFFIFSLLSLSITGGGAAAAVTAYGGGARRPSAHAPGAFSEKVVPPSSVSSSDLDPLLKDLTEKKLSFRRNVVSLAAELKDVRNKLASQEQLFVRESQTRKFAETKARSMEEEISKLQKCLNDKDEQLRSSTGCTEQMHFLNNYSNYVQYFHELDDLRSKLSVTQATAEASAASAKSAQSQCLSLLKELNEKDSSLKEHERRVNKLGEQLDHLQKDLESREYSQRQLKDEVLRIETDIMDAVAKVGSNKDNELLKILSDVSPRNIDNLNKLLNAKDAEIARLRDEIRILSAHWTNKTKELESQLEKQKRTDQELKKRILKLEFCLQESRSQIRKLQRAGEKRDKQLKELKDQVGMKQPSVPYRDDKHNFWENQSFKFIASMSMLALVMLTKR

SEQ ID NO: 184604 - protein, 622 aa, Oryza sativa
  unsure (1)..(622): unsure at all Xaa locations
  Clone ID: PAT_MRT4530_81582C.1.pep
KIPSRPPRHSKSGRSEAEETATAEARRREADRREAADRLRKAEEAAQEAVRVCQAEEAAREEARLRRARESVREAEAARARQAVCQAPDPTSAEATTTSEATHDEAAGAPLGPDPSGDAWDEPASXGAPESGMSIGGPSRAAPTPRQLSLLPSAAPLSAEPLLQALAAANTTVLDGLSAQMEVLQAERAELDAAWARVEEGRRSVEAMVEAGRKAHRRHASELEARRRDLAEIAREVEEERETALIATAVLDEARDDLRLQYGSRAAELEKKLDAARGVLDAAAARERRAAENEAASRQREEALEARATALEERARALDAKERDLTNREAAVATREATLAAHEAACAEEESALRLREDELTERGRALKEAEAAAQRLADSLFLSKAAREEQALRNLEGARAERAALDQRAAELEARVKELEARAHSGGAAAGDGDLAARLAAAEHTIAELQGALDSSAGEVEALRLAGEVGPSMLRDAVSRLDCAGRQACLWGGRCAKYAANQGGLAQRLSEMAGVLKRLPEELEETIKSSSRDLARGAVELVLVSYQARDPDFSPWAALEEFPPRTEDGARAQVRDAADHIVHSFEGTAPRLAFALDSDEEGGDDGADDSDDEAGDPGASE

SEQ ID NO: 184605 - protein, 1605 aa, Oryza sativa
  unsure (1)..(1605): unsure at all Xaa locations
  Clone ID: PAT_MRT4530_81583C.1.pep
MGSVSGIDDFVFXPGQAFRFGSLDFITNDFGKISLLDSDSNQSGRGRISALFGIPNSAEIYPKVISDESVSNHSDEIQSTSTPPDQDDRSYPPILMKLPDDLAAVFITRMSSPRRPRQDPASAPIRPSSREVGIILQPLGTVSTDQLEGYFSSPGVDSQPTEIVEYDEFGYCYDDHNLDDFAESFEDNYTPLYFGVFMADNETEEQRQAREAEGRRVQQEAEQCRLEEERQAQEQEWLQREQQERERAAKEAKDRXQRALDAGRRARELIGQQDVEGTAVFRTPQQNAVAAITLLDTLLKEDTLNQADHVVNFLNQTKTMIAASVPVNSASVRTPTGSRVPHLRSQDYHQPSLSIAGAGSNRRSRGHDERSVHSPPERHRERRVERPRSPPRRRPVDLRDTINQRRAARGYAHRHSPDGYDDDVDGVAAFTNDLRRVDWPAGFKPTGIEKYDGTTNPESWLTVYGLAIRAAGGDSKAMANYLPVALADSARSWLHGLPRGMIGSWAELRDHFIANFQGTFERPGTQFDLYNVIQKSGESLRDYIRRFSEQRNKISDITDDVIIAAFTKGIRHEDLVGNFGRKPPRTVKQMFEKANEYAKAEDAIIASKQSGTTWKPKKDALITGGGGSTNHKDRKRKPEELVATTTPSSRQCSRVNTFDKIMKSQCPHHPNSNHSAKDCFVYKQFAEQYAKNARKASDRDQSTSKKKDDDDDAPTGFQDHCKELNHIFGGPLAYESRRKQKLTEREINAVQPDTPQYLRWSETAIKFDRSDHPDRVVHPGRYPLVLDPVVRNVKLRRSLIDGGSALNILFAKTLDDMQIPRTELKLSNAPFHGVIPGLSATPLGQITLPVTFGTRENFRTENVCFEVADFETAYHGILGRPALAKFMAVPHYTYMMMKMPGPRGVISLRSDIKQAITCDKESCEMAQTREIAIAREDIRLAATTASEGEVPATKVSKSGESEAKTKKIPLDPSDPTKTANNKDIFACKPSDMPGIPREVIEHSLHVKEDAKPIKQRLRRFAQDRKDAIKEELTKLLAAGFIKEVLHPDWLANLVLVRKKTGQWRMCVDYIDLNKSCPKDPFVLPRIDQVVDSTAGYELLSFLDCYSGYHQIRLKEYDCLKTSFITPFGAYCYITMPFGLKNAGATYQRMIQRCFSTQIGRNVEAYVDDVVVKTKQKDDLITDLEETFASIRAFRMKLNPEKCTFGVPSGKLLGFMVSHRGIQANPEKINAILNMKPPSSQKDVQKLTGCMAALSRFVSRLGERGMPFFKLLKKTDNFQWGPEAQKAFEDFKKLLTTPPVLASPHPQEPLLLYVSATSQVVSTVLVVESEEEDHVQKVQRPIYFVSEVLADSKTRYPQVQKLLYGVLITVRKLSHYFQGHSVTVVTSFPLGDILHNREANGRITKWALELMSLDISFKPXTSIKSQALADFVAEWTECQEDMPEEKMEYWTMHFDESKRLSGTGAGVVLISPTGERLSYVLWIHFSASHNVAEYEALLHGLRIAISLGIRRLTVRGDSQLVVNQVMKEWSCLHDNMTAYRQEVGKLEDKFDGLELTHVLRHNNEAADRLANFGSKREATPSDVFVEHLYEPTVPRKETAEAMSKHG

SEQ ID NO: 184606 - protein, 892 aa, Oryza sativa
  Clone ID: PAT_MRT4530_81584C.1.pep
MAHLTPNAVMTLAIFAHLCEMFIGVRPSLRLFWWFFTVQPVSPPSVVGGCYFQPRGPVLNRYIPCVLRKKWDDWKSDWFYTPLADEARLRLPSQPPAQASSWRTPVDLGDGYDAVLDRLAGLRSQGLTGAMVFGDYLRRRIAPLQRHARGAWEYTGPEDIMRTHQGRKWDWDPEDFRIVVQRVLNLSSVEASLIPQGVLPLCCDPERANILTIMQEVGASGERAPRGHDGAGGSRRGEQSTPGGGRASGPRDGGPGGSRPTDARGKRKQEDTPSPSPPRGGGAVRASSRRPEGAVPTSQPEGERKKKRLRKMGGTEPCRGNLISPPRWSFSRPPRSEIPSRPSRHSKSGRSEAEETATAEARRREADRREAAIRLREAEEAAQEAVRARQAEEAAWEEARLHRAEESVRETEAARARRAACQAPDPTPPEATTTSEATHDEAAGAPLGPDPSGDAQDEPASGDVPESGTSIGGPSRAASLPRRLSPMPSAAPLSAEPLLQALATANTTVLDGLSAQMEVLQAERAELDAAWARVEEGRRSVEAMVEAGRKAHRRHASELEARRRDLAEIARDVEEERETALIATAVFNAARDDLCLQYGSRGAELEKKLDASRHREEALEARATVLEERARALDTKERELAGREAAVAIREATLAAHEAACAEEESALRLREDELTERERALEEAEAAAQLREEQARLNLEGARAERAALDQRAAEFEARAKELDARARSGGAAAGDGDLAVRLAAAEHTIAKLQGALDSSAGEVEALRLAGEGGLAQRLSEMAGTLQRLPEELEETIKSSSRDLARGTVELVLASYQARDPDFSPWAALDEFPPGTEDGARAQVRDAADHIVHSFEGTAPRLAFALDSDEEGGDGGADDSDDEAGDPGASA

SEQ ID NO: 184607 - protein, 785 aa, Oryza sativa
  unsure (1)..(785): unsure at all Xaa locations
  Clone ID: PAT_MRT4530_81585C.1.pep
MAHLTPNAIMTLAIFAHLCEMFVRVRLSLRLFRWFFTVQPVSPPTVVGGCYFQPRGQASNWRVAVDLGDGYDAVLDRLAGLRSQGLTGAMVFGDYLRRRIAPLQRRARGAWEYTGPEDIMRTHQGRKWDWDPEDFRMVVQRVLNLSSVEASLIPQGVLPLCCDPERADVLTIMQERDPVAPPRHSKSGRSEAEETATAEARRREADRREAADRLREAEEAAQEAVRVRQAEEAAREEARLRRAGESVREAEAARARQAACQTSDPTPPEGTTTSEATHDEAAGARLGPDPSGDTWDEPASRDAPESGTSIGGPSRASPTPRRLSPLSSAAPLSAEPFLQALAAANSTVLDGLSAQMEALQAERAELDVAWARVEEGRRSVEAMVEAGRKAHLRHTSQLEAHHRDLAEIAREVEEERETALIATAVLDEARDDLRLQYGSRAAELEEKLDAARGVLDAAAARERRAAENEAASRQCEEALEARATALEERARALDTKERDLADREAAVATREATLVAHEAACAEEESALRLREDALTERERALEEAEAAAQRLADSLFLREAAREEQARRNLEGARAERAALDQRAAELEARAKELDARAHSGGAAAGHGDLAACLAAAEHTIAELQGALDSSAGEVEALRLAXRDRAGRQAGLWGGRHAKYAANQGGXLAQRLSEMAGALQRLPEELEETIKSSSRDLARGAVELVLASYQARDPDFSPWAALEEFPPGTEDGARARVRDAADYIVHSFEGTAPRLAFALDSDEEGGDDGADDSGDEADGPGAPE

SEQ ID NO: 184608 - protein, 81 aa, Oryza sativa
  Clone ID: PAT_MRT4530_81586C.1.pep
GHMGTPIAIGFIAGADILVVGAFCGGYMNPERSFGPVDASGDYTNIWIYWVGPLVGGGLAGLVYRYVYMCGDHTHAASGEC

SEQ ID NO: 184609 - protein, 1320 aa, Oryza sativa
  unsure (1)..(1320): unsure at all Xaa locations
  Clone ID: PAT_MRT4530_81587C.1.pep
MGSVSGIDDLVFPPGQAFRFGSLDFITNNFGKISLLDSDPNQSGKKQVSAPFGIPDSANIYSKLISIESASNHSDEIPSTPTPPDQDDGAYPPILMKLPDDLAAVFTTRASSPRRPRRKSASTPILPSSKEVGVILQPLGTISTDQLEGYFSSPGVDSRPTEIVEYGEFGYRYDNSNLDDFDESFEDNYTPLYFGIFMADNETKEQRQAREAEARHVQQEAQRRRLEEERQAQEQERLRREQQKRKRAAKEAEDRRQRALDAGRRARDLIRQQDIEGTAVFRTPQQNAVAASTLLDTLLEEDALNQADHVVNILNQTKTMIAASVPHRAARGHRHSPDRYDNDVDGVAAFTNDLRRVDWPAGFKPTGIEKYDGTTNPESWLTVYGLAIRAAGGDSKAMANYLPVALADSAWNSPRRSSRQVRAQASKTVKQMFEKANEYAKAEDAIIASKQSGPTWKPKKDAPTTGGGGSNNHKDRKRKPEELVATTTHSSRQRSRVNTFDKIMNSQCPHHPNSNHGAKNCFVYKQFAEQYAKNARKTPDGEQSTSKKKDDDDDAPTGRYPLVLDPVVRNVKLRRSLIDGGSALNIIFAKTLDDMQIPRTVLKPSNAPFHGVIPGLSATPLGQITLPVTFGTRENFRTENICFEVADFETAYHAILGRPALAKFMVVPHYTYMMMKMPGPRGVISLRSDIKQAVTCDKESCKMAQTREIAIAREDIRLAATTASEGEMLTAKISKSGESEAKTKKIPLNPSNPTKTTVIGAELDFLVRKKTGQWRMCVDHTDLNKSCPKDPFGLPRIDQIRLKESDCLKTSFITPFGAYCYITMPFRLKNAGATYQRMIQRCFSTQIGRNVEAYVDDVVVKTKKLSHYFQGHSVTVVTSFPLGDILHNREANGRIAKWALELMSLDISFKRRTSVKSQALADFVAEWTECQEDKPEEKIKYWTMHFDGSKRLSGTGVGVVLISPTGERLSYVLWIHFSASHNVAEYEALLHGLRIAIYLGIRRLIVREDSQLVVNQVMKEWSCLDDNMIAYRQEVRKLEDKFDGLELTHVLRHNNEAADRLANFGSKREAAPSDVFVEHLHEPTVPKRETAEPADTQDIAMVETDWREPLIRFLTSQELHQDKDEAERISRRSRLYIIHETELYRKSPLGILQRCVSLEEGRQLLKDMHSGICGNHAAARTIXRQGFFWPTAVSDADKIVRTCEGCQFFARQTHLPAXELQTIPLSWPFAVWGLDMVGPFKKAVGGYTHIFVAIDKFSKWIEAKPVITITADKARDFFINIVHRFGVPNRIITDNGTQFTGGVFKDFCEDFGIKICYASV

SEQ ID NO: 184610 - protein, 495 aa, Oryza sativa
  Clone ID: PAT_MRT4530_81588C.1.pep
MEGIMRVVLTCLPTPAPFSTSHGSLSSSAGGGGGSGGGGDDRISRLPGALLSNIVSRLPARDAARTAVLSTRWRRVWASTPLVLDDVDLLDIPDEDLRRGHSHRVDLAAAASRVTRVLTSHRGPYLCVHLTCCNMATHWPMLSYWLSLLAANGVQDLVFANRPYPLDLPLPVDILRIPSLRSLYLAFWTFPGIPGGARGPHVFPHLRELGLCFISIDAQDLDGLLQCSPVLETLALVSNSYSPAHIRVRSRTLRCVLFWMSLAQEIALVVAPRLDRLILWKTFMGFPGEIFCRTRVKIGYATELRVLGYLEPRMHELEIGNTTIEAGTKMSSDKTVPSVKILALKVRFGIRNEAKLLPVFLRCFPNVETLHVMSDDAHDPTGKLNLKFWHDVGPIECLHSHVNKVVFHMFRGERSELAFLKFILERAEALQKIVVVLANRDQAWVDEMRAKLRPLAMAKRASKNPTLLIVALEGGSAWSFHRASDLSVNDPFDYC

SEQ ID NO: 184611 - protein, 203 aa, Oryza sativa
  Clone ID: PAT_MRT4530_81589C.1.pep
MNDRVGSEAGKDALGSWQTGFGMNDDLAAWGSWADANAREASASLAARVRRGALRAAAAHGRLRLGGRAVVKSGTGGDVMGRSRLPGVVWRRVRRSSTLEYSRRGAASCSRSWACVGARLWRATTVDTAHGTGATVHTIERETGVLAGLAWLWAASCAGLGQKVATWPFCGCPDCVINGSNGLTLGESESSDLMDGSNRPRTG

SEQ ID NO: 184612 - protein, 232 aa, Oryza sativa
  Clone ID: PAT_MRT4530_8158C.1.pep
MDPSGAFFHAAPRSGSNVSLASLARTAGGRRMMHRVFRGVITFIFAIAGLFLGAVTGGLIGLATESGLFRGTGIGAITGALVSIEVVDSSIRVWRSRRSGISSICYVLNVIYSLLTGRLVREKVDPAVQRVVRSQMNAVDSSPFRESPDLFEIEGTNGMPRASIDKLPEVRITEEYRRNAIGDLSGCSVCLQDFQTGEKVRSLPDCWHVFHVPCIDGWLIKHGSCPLCRRKL

SEQ ID NO: 184613 - protein, 35 aa, Oryza sativa
  Clone ID: PAT_MRT4530_81590C.1.pep
LGTGYLDYGNLKVNLPPPGVAVTKRPCIAKDKSPG

SEQ ID NO: 184614 - protein, 494 aa, Oryza sativa
  Clone ID: PAT_MRT4530_81591C.1.pep
MVASALSATAAATVVVAVVAVLVAVCRGEFTVVVPDSSSSAALVNAPQTGLSDRARTDPAEQRAVQEVMAATGNGWASGIADVCRGRWHGIECVPDRGEVYHVVSLSFGALSDDTAFPACDAARATLSPAVLALPHLRSLFFYRCFTANPQPVPAFLGRLGPAFRSLVLRENGHVGAIPPELGNLTALRVLDLHGNNLTSAIPATVQSLAHLQLLDLSYNQLAGEVPPFKFQHLSILDLSHNALQGGVPASLGQCRSLLKFDLSQNRFAGTIPDALGDLSDLILLDLSHNALSGPIPAALGRLSSLRSLILGDNRMQFTTVPGDIFAGLRALTTLVLSGMGLEGSLPESIGELGHLRVLRLDNNEFTGVIPASFRRLERASELRVDGNRLVGPIPFGKQMMWRLGKKLRVGGNEGLCYDAKQQGLEGVVALAGVADCDSVRSRTTQHLGGRLRNTGGLPAAAAAAPSVGVGAGVCVGSWHVFVGVLVSLHLARL

SEQ ID NO: 184615 - protein, 137 aa, Oryza sativa
  unsure (1)..(137): unsure at all Xaa locations
  Clone ID: PAT_MRT4530_81592C.1.pep
MAEGRNNKVADGGGFGMVLLEMLTGMRALDTGRPALQHSLVEWAKPYLADRRKLAWLVDPRLEGQYPSRAAQQAAQLTLRCLSGDPRSRPSMAEVVAQRXPSAATPSPAPADLLVAQPPPAPAGLLAAPPPRSGREI

SEQ ID NO: 184616 - protein, 58 aa, Oryza sativa
  Clone ID: PAT_MRT4530_81593C.1.pep
MAPRGVAAAHGGEEVGGGRREIETLKEACGYGLAKCGQYSSYGWGYPMRRLNLPRIVF

SEQ ID NO: 184617 - protein, 55 aa, Oryza sativa
  Clone ID: PAT_MRT4530_81594C.1.pep
SFTHWFNSPLIMTYTNHTHMVSSYSRLMNDGDYHTQNVQLIADFNCKTYSSCTII

SEQ ID NO: 184618 - protein, 239 aa, Oryza sativa
  Clone ID: PAT_MRT4530_81595C.1.pep
MSGVPTVEPLVLAHVIHDVLDPFRPTMPLRITYNDRLLLAGAELKPSATVHKPRVDIGGTDLRVFYTLVLVDPDAPSPSNPSLGEYLHYLSGIHRHPEVMVVDIFWVGQSSCDATSHLTWSLTCGPVGGGDHMMVIDIPGTTGVNFIPKNNIKDAAINEPKRQDLMLYERPELRYGIHRMVFVLFRQLGRGTVFAPEMRHNFHCRSFAQQYHLDIVAATYFNCQREAGSGGRRFRSESS

SEQ ID NO: 184619 - protein, 62 aa, Oryza sativa
  unsure (1)..(62): unsure at all Xaa locations
  Clone ID: PAT_MRT4530_81596C.1.pep
HIRTVLSLAVSCSWPIDXLDVKNMSLHCTLXEIVYCIQPPSFIDSTRLLVYVDDIALTASSA

SEQ ID NO: 184620 - protein, 189 aa, Oryza sativa
  Clone ID: PAT_MRT4530_81597C.1.pep
APFMAGRVGQYILSYDNLKVLKLPYQQGGDKRQFSMYILLPEAQDGLWSLAEKLNSEPEFLEKHIPTRQVTVGQFKLPKFKISFGFEASDLLKSLGLHLPFSSEADLTEMVDSPEGKNLFVSSVFHKSFVEVNEEGTEAAAATAAVITLRSAPIAEDFVADHPFLFLIQEDMTGVVLFVGHVVNPLLAA

SEQ ID NO: 184621 - protein, 86 aa, Oryza sativa
  Clone ID: PAT_MRT4530_81598C.1.pep
MAAKGSTGAVEAPAARGSAWQRRRLRMSKASGARRLTTADTELSEQVQFVRSKSLFEMSLSNLQVVRAEFMQRRTGKEVLCFLIVV

SEQ ID NO: 184622 - protein, 158 aa, Oryza sativa
  Clone ID: PAT_MRT4530_81599C.1.pep
PPPPPSPPVQQTSSDRTPSVAGSHNVEEEEQPAAPAIPALADLFSFDIKDYFDEIEKDTTNKALAPLSDDVKKKLQDISHRLEASSLDNLVVDCGSIRTRLHEIQSQIPDELADVVTLAVYLEQHQFKLEKAKQRLADHQECKDIEATIQINRQLVHE

SEQ ID NO: 184623 - protein, 214 aa, Oryza sativa
  Clone ID: PAT_MRT4530_8159C.1.pep
MAQVQARRPRGGECQGHQVVQPDGGDGDAERRLIAPADASGQAAHCGGPVVEVDDAYDSKVKIGEALEAAARAVGDQPVRGSDAAAISSAEASAGAGVVPGGVAEQAQAAADANAGAAPPAEDTAITIGDVLAWNATAMLPTEKAVTAEDAAAAAGAEVEKDPGEGTRPYGVSAALAAAAKHNREDAECQSKRSAQPRAADECTPALAEQFDQI

SEQ ID NO: 184624 - protein, 163 aa, Oryza sativa
  unsure (1)..(163): unsure at all Xaa locations
  Clone ID: PAT_MRT4530_815C.1.pep
VAESPRNXMPLKPIRKMNPHVFIHGVVNGSYNAPFFVTRFREALFHYSAIFDMLETNIPKDNEQRLLIESALFSREAINVISCEGLERMERPETYKQWQVRNQRVGFKQLPLNQDMMKRAREKVRCYHKDFIIDEDNRWLLQGWKGRILFALSTWKPDNRSSS

SEQ ID NO: 184625 - protein, 660 aa, Oryza sativa
  Clone ID: PAT_MRT4530_81600C.1.pep
MTPTLIDITMITGLDVTSSANPMSLNTKNQFDSRTKSIGGWSGYVAAYMCKGPVTSREHVAFLLMWLEKFLFCGSSCGPTTNWQFLTEALETKRQFPLGKILLGAGGPWWLLQTWLNLIAMKAVNRPSVTEVEFPRLEPITYDDGEERTHRRCMSYGEFASTPTDAGAKLSAEWLKDWFCSFYEGFHKDARLPIGLFFADKIQCRGEISSTLMMDRLLNIPGPPLGSIENIELARFRSRNFDRWWGELKQHIFHQSASMYMTDLFPDVVPQTTESSPPHKSNSGRDIEYAPGLLPNGGGLAPLVISYHAPKTSSLLQGQMRDPADVSRKSKTKAPAIDPSALAPKKKAKKPKPKPTDDLPTLDASIEQALDEEEIEEYVDQAAAELSDTGEKTPSASPKQTPPTPAAPAHFSRKKKTVVRNKSATTTLKPAPSALADLFSFDIKDYFDETEEDTTSKALAPLSDDVNRTLQDISHRLEASSLDNLVVDCGSIRTWLHEIQSQIPDELADVVTPSVYLEQHQFKLEKAKQRLADRRERKDIEATIQINQQLVHEEKSKLDLLSEGPIKSNIDRLEARKIELIAQLEECNAELNLEQKKLADLPKVIEEQKSRLKSAIRNVPDMTKSLKIIPGTDAQDAQAIEEVEQIRQRVVLAIQQYLSQ

SEQ ID NO: 184626 - protein, 99 aa, Oryza sativa
  Clone ID: PAT_MRT4530_81601C.1.pep
NHISLIPIFTLLKPGESLKDFYKRTDMYWQMAAYEHTQHTGKELRKDGFDLAETRYKELKPILDELAVLEAEQKAEEEASASTSSKKDTRKSKQKSGMR

SEQ ID NO: 184627 - protein, 58 aa, Oryza sativa
  Clone ID: PAT_MRT4530_81602C.1.pep
NMRLIAFHNSIYTIHHFLELNAHSFTSSGCFSLVNMKYVILAHASAHASAHASAHASV

SEQ ID NO: 184628 - protein, 679 aa, Oryza sativa
  unsure (1)..(679): unsure at all Xaa locations
  Clone ID: PAT_MRT4530_81603C.1.pep
MGKKQKKPRKGKEKTERKTAKGEEKRARREARKVGEEDDIDAILRSIQKEEAKKKEVHIDENVPAPSPRSNCSLTINPLKDTELVLYGGEFYNGSKTFVYGDLYRYDVEKNEWKLVSSPNSPPPRSAHQTVAWKNNIYMFGGEFTSPNQERFHHYKDFWSLDLKTNQWEQILAKGCPSARSGHRMVLYKHKIVLFGGFYDTLREVRYYNDLHVFDLDNFKWEEIKPRPGCLWPSPRSGFQLMVYQDQIYLYGGYFKEVVSSDKSASEKGTVHADMWTLDPRTWEWNKVKKTGMPPGPRAGFSMCVHKKRAVLFGGVVDMEIEGDVIMSMFMNELYGFQLDNHRWYPLELRKDKPAKNKTKDIKRKEPSNNVEDNLGNEEDEIMEDSETTGGQSEVHGVSNHLTKSLTLNKAGSGNSSDILSDSTTQEVLPEAVKPGGRINACLAVGKDTLYLYGGMMELKDREITLDDMYSLNLSKLDEWKCIIPASESEWLEISEDEDDEDDDDDDNENDNXEWRELDXEDGEECDEQAEKIVERYTAITLIRSEGKNMRRXEKRNRKEQMRVMLGICDFLMTALPGESLKDFYKRTDMYWQMAAYEHTQHTGKVAGSMSLLYLFVLIQCQELRKDGFDLAETRYKELKPILDELAVLEAEQKAEEEASASTSSKKDTRKSKQKSGMR

SEQ ID NO: 184629 - protein, 867 aa, Oryza sativa
  unsure (1)..(867): unsure at all Xaa locations
  Clone ID: PAT_MRT4530_81604C.1.pep
MARGSVLLDGSVLPPSRIVNERHAGLPRRFMPESATGREIVMLGEGRPAPDYPGRSIFFLPFAMAGLVPPFSHFFMDVLEFYDLQMAHLTPNAVMTLAIFAHLCEMFIGVRPSLQLFRWFFTVQSVSPPSVVGGCYFQPRGPVLNRYIPCVLRKKWDDWKSDWFYTPLADEARLRLPSQPPAQVSSWRAPVDLGEEYDAVLDRLAGLRSQGLTGAMVYGDYLRRRIAPLQRRARSAWEYTGPEDYMRTHQGARWDWAPEDFKIVVQRVLNLSSAEASRLPQEILPLCSDPDRVSILTIMMGVGASEERAPKGHDGAGERRRGEQPAPGGGGGAARASSRRPEGAAPTSQPEGVRKKKRLRKTGETEPCRGNLISPPRWSFTRPPRSNVPSHSSRHPKSGQSEVEDPAAAEERRRESDRREAPNRLREAQKAAREAPPALAAANTAVLDGFSAQVEALRAERAELEAAWARVEEGRRSVDAMVEVGRKAHRRHISELEARKAALAEIAREVEEEREAALVATTAMIEAQDSLRLQHGSWEAELKKKLDAAQGVLDAAAAREQRATEAEAALRRREEALEARAMALEEHAGAVERGLTDREAAAGLREATLAAHEAACAEEESALRLREDTLAERERALEEAEATTQRLADSLSLREGAQEEQARRNLECVRAERAALEQRAADLEAREKELDARAPIGGXAAAGESDLAARLAAAEHTVAEMQRALDSSIGEAEALRLAGEMGPDMLWDSVSRMDRXRMAWVLERLPEELEKTIKSSSRDLARGAVELVLASYQARDPNFSPWMALEEFPPGTEDDARARVGDAADHIVNGFEGSAPRLAFAPSSDEEGDASGEDDGGDEAGDPGALE

SEQ ID NO: 184630 - protein, 127 aa, Oryza sativa
  Clone ID: PAT_MRT4530_81605C.1.pep
MALFVFVDELLAVRRYCRLAAPCCSLLACPCVVQELPRRSLRRRLPVALRQIRRLPIRCAILPPSFPARCLLARWLTGRRSRRSSPPRAGRGAAGHRASLRMHPRGRRALARTAACRVRRRRRLQPS

SEQ ID NO: 184631 - protein, 1062 aa, Oryza sativa
  Clone ID: PAT_MRT4530_81606C.1.pep
MARGSAPLDGSVLPPSRIVSERQAGLPRRFMPESATGREIVSLGEGCPAPRYPGRSVFFLPFAMAGLVPPFSSFFMDVLEFYDLQMAHLTPNAVMTLAIFAHLCEMFIGVRPSLRLFRWFFTVQPVSPPSVVGGCYFQPRGPVLNRYIPCVLRKKWDDWKSDWFYTPLADEARLRLPSQPPAQASNWRAPVDLGDGYDAVLDRLAGLRSQGLTGAMVFGDYLRRRIAPLQRRAWEYTGSEDCMRTHRGVKWDWVPEDFKVMIQRVLNLSSAEASLIPQGVLPLCSDPDRANILTIMQAVGASEERAPRGHDGAGGSRRGEQSTPGGGRASGPRDGGPGSGRPADTRGKRKQEGISSPSLPRGGGAARDSSRRPEGAAPTPQPEEERKKKRLRKMGGTEPSRGNLISPPRWSFNRPPRSEIPSRPSRHSKSGQSEAEDPATTEARRRESDRREAADRLREAEEAAREAARARQTEEAAREEAGLRQAEATTSSEATRETDRQEAADRLREAEEAAQGAVRARQAEEAAREEARLRQAEATTTSEATRDEAAGASLGPTPSCDAQDKPGPGDIPESGTSIGGPSRAASSSRRLFPTPSVAPLSAEPLLQALAVANTTVLDGLSAQVEALQAERAELDAAWARVEEGRRSVEAMVEVGRKAHRRHVSELEARRKVLGEIAKEVEEEREAALIATTVMNEAQDTLRLQYGSWEAELGKKLDAARGVLDAAAARERRAAETEVASRRREEALEARAMALEERACAVERDLADREAAVAIREVTLAVHEAACAEEESALHLREDALTERERALEEAEAAAQRVADSLSLREAAQGEQARRNLESARAERAALNQRAAELEAQARELDARARSGGAATGDSDLAARLAAAEHTIADLQGALDSSTGEVEALRLAGEIGPSMLRDAVSRLDRAGRQAGLWGGRTVKYAANQGGLAQRLSEMAGTLQRLPEELEGTIKSSSRDLARGAVELVLASYQARDPNFSPWTALDEFPPGTEDGARAQVRDAANHIVHSFEGSAPRLAFALNSDEEGDDGGVGDSGDEAGDPGASE

SEQ ID NO: 184632 - protein, 52 aa, Oryza sativa
  Clone ID: PAT_MRT4530_81607C.1.pep
STQAAATTQQATASTMLTSVQANADLEAQAEADMGVVRQNMAKLHDMPFTGY

SEQ ID NO: 184633 - protein, 901 aa, Oryza sativa
  unsure (1)..(901): unsure at all Xaa locations
  Clone ID: PAT_MRT4530_81608C.1.pep
MARGSAPLEGSVLPPSRIVSERQAGLPRRFMPESATGREVVALGEGRPAPHYLGRSVFFLSFAMAGLVPPFSSFFMDVLELYDLQMAHLTPNAVMTLAIFAHLCEMFIGVRPSLRLFRWFFTVQPVSPPSVVGGCYFQPRGPDDWKSDWFYTPLADEARLRLPSQPPAQASSWRAPVDLGDGYDAVLDRLAGLRSQGLTGAMVFGDYLRRRIAPLQRRARGAWEYTGSEDYMRTHQGGRWDWAPEDFKMVVQRVLNLSSVEASLIPQGVLSLCSDPERANILTIMQAVGASGERAPRGHDGAGGSRRGEQSTPGGGRASGPRDGGPGGSRPADARGKRKQEDTPSPSPPRGGGAIPSRPPRHSMSGRSEAEETATAEARRREAVRREAADRLREAEEAAQEAVRVRQAEEATREEARLHRAGKSAREAEATRARQAACQAPDPTPPEATTTSEATHDEAAGAPLGPDPSGDVRDEPASGDAPESGTSIGGPSRTAPTPRRLSPLPSAAPLNTEPLLQALAAANTTVLQAERAELDAAWARVEEGQRSVEAMVEAGRKAYRRHASELEARRRELAEIAREVEEERETALIATAVLNEARDDLRLQHGSRVAELEKKLDAARGVLDAATARERRATENEAASRRREVALEARATALEEHARARKRDLADRETAVAIREATLAAHEAACAEEESALRLREDALTERERSLEEAEAAAQRLADSLSLREAAREEQARRNLEGARAERAALDQRAAELEARAKELDARARSGGAAAGDGDLAARLTAAEHTIADLQGALDSSAGEVEALRLAGXDRAGRQAGLWGERTAKYAANQGGXLAQRLSEMAGTLQRLPEELEETIKSSSRDLARGVVELVLASYQARDPDFSPWAALDEFPPGTEDDARA

SEQ ID NO: 184634 - protein, 375 aa, Oryza sativa
  Clone ID: PAT_MRT4530_81609C.1.pep
MPASDPAPAAAAAAYDRTAELRALDATLSGVRGLVASGATHLPRIFHNVVHGDQEPPEATAPSSAATTTTTVPVIDISGSRAAVVDAVRRAAAEWGFFQVTGHGVPLAAMDAAAGAARAFHESGGGEGSDKARLYSREPGRAVKYHCNFDLYQSPVANWRDTLYLRMAPDPPPAADLPEICRDALFEYAKQVKNLGNTLFELLSEGLGLKPSYLTDIECNQGQIILCHYYPPCPQPELAIGTSRHSDSGFLTILLQDDIGGLQILHEDRWVDVTPTPGAFIVNVADLLQLISNDNYKSVEHRVVAKNTEPRVSIACFFSTHFHPISTRMYGPIKELLSDENPPLYREALVRDYTARYYSVGLDGKFKTTLSEFRL

SEQ ID NO: 184635 - protein, 66 aa, Oryza sativa
  Clone ID: PAT_MRT4530_8160C.1.pep
VDKLGGNSGKNVTAPRLPPARGAPALSVSDDQAPRPRLAEPTRGQPPKPLKSPLSTSSSPSPSQSP

SEQ ID NO: 184636 - protein, 971 aa, Oryza sativa
  Clone ID: PAT_MRT4530_81610C.1.pep
MARGSAPLEGSVLPPSRILSERQAGLPRRFMPESATGQEVVALGEGRLAPHYPGRSVFFLSFAMAGLVPPFSIFFMDILEFYDLQMAHLTPNAIITLAIFAHLCEMFIGVRPSLRLFRWFFTVQPVSPPTEVGGCYFQPRGQVLNRYIPCVLRKKWDDWKSDWFYTPLADEARLRLPSQPPAQASSWRAAVDLGDGYDAVLDRLAGLRSQGLTGAMVFGDYLRRRIAPLQRRARGAWEYTGPEDIMRTHQGRKWDPEDFRMVVQRVLNLSSVEASLIPQGVLPLCCDPERANILTIMQEVGASRERAPRGHDGEGGSRRGEQSTPGGGRASGPRDGGPGGSRPADARGKRKQEGTPPPSPPRGGGARDPVAPPPRHSKSGRSEAEETATAEARRREADRREAADRLREAEEAAQEAVRVRQAEKAAREEARLRRAGESVREAEAARARQAACQTPDPTPPEGTTTSEATHDEAAGVPLGPDPSGDTWDEPASRDAPESGTSSAAPLSVEPFLQALAAANSTVLDGLSAQMEALQAERAELDTAWARVEEGRRSVEAMVEAGRKAHHRHTSQLEARRRELVEIAREVEEERETALIATAVLDEARDDLRLQYGSRAAELEEKLDAARGVLDAAAARERRAAEKEAASRQREEALEVRATALEERARALDVKERDLADREAAVATREATLASHEAACAEEESALRLHEDALTERERALEEAEAAAQRLADSLFLREAAREEQARRKLEGARAERAALDQRAAELEARAKELDARAHSGGAAAGHGDLAARLAAAEHTIAKLQGALDSSAGEVEALRLASEVGPGMLRDAVSRLDRAGRQAGLWGGRHAKYAANQGGLAQCLSEMAGALQRLPEELEETIKSSSRDLARGAVELVLASYQARDPDFSPWAALEEFPPGTEDGARARVRDAADYIVHSFEGTAPRLAFALDSDEEGGDDGADDSGDEADGPGAPE

SEQ ID NO: 184637 - protein, 511 aa, Oryza sativa
  Clone ID: PAT_MRT4530_81611C.1.pep
MDATDPPPPPPPLTRKRGREARKSKEAAPPREPRRARSRSHVPPPPGAGDGRGGDGEEDVGFDLISRLPDAVLGDIISRLPTKDGGKTRALSKRWRPVWRTAPLNLDAGDLAPDANGAALAVLVTQILLVHAGPVRRLCIPAQQIHERPAMVEGWLGSRRFKNLEELEFTVPEDPFYGRSFLLLPPPPSTFRFSATLRVAAISQCSLPDCTATLALRFPQLRLLSLQEVIVSEHSLHSIIAGCPALEGLLLKRSFGFRCLRINSPTIRSVAFHSPCCGDHCVWKVGFHLEEVVIEDAPCLERLIHIERAMGLGVNVTVIAAPKLEACVLDDLDDGYYRLDFGKVVFKGFAVINYTTPVSSIKILALIRDNLRLDRVIELMRCFQCLEKLYITASHYGATYCWRRKHWRKLKSLDICLKTLVLDNYRGLKSQINFATFFIRNATKLENMIFTGGRSNGNAYFIARQQKLLEFEKRASKTAHFHFTTKKCYYDWVHIKDVHDLSIADPFECTC

SEQ ID NO: 184638 - protein, 967 aa, Oryza sativa
  Clone ID: PAT_MRT4530_81612C.1.pep
MARGSAPLDGSVLPPSRIVSERQAGLPRRFMPESATGREIVTLGEGRPAPCYPGRSVFFLPFAMARLVPPFSSFFMDVLEFYDLQMAHLTPNAVMTLAIFAHLCEMFIGVRPSLRLFRWFFTVQPVSPPSVVGGCYFQPRGPVLNRYIPCVLRKKWDDWKSDWFYTPLADEARLRLPSQPPTQASNWRAPVDLGDGYDAVLDRLAGLRSLGLTGAMVYGDYLRRRIAPLQRRARGAWEYTGSEDYMRTHQGVRWDWAPEDFKIVVQRVLNLSSVEASLIPQGVLPLCSDPDRASILTIMQAVGASEERAPRGHDGAGGSRRGEQSTPGGGRASGPRDGGPGSGRPADARGKRKQEGTPPPSPPRGGGAARASSRRPEGATPTSQPEGERKKKRLRKTGGTEPSRGNLISPPRWSFNRPPRSEIPSRPSRHSKSGQSEAEDPATTEARRRESDRREAADRLREAEEAAQDKPGPGDIPESGTSIGGPSRAASSPRRLFPTPSVAPLSAEPLLQALAVANTTVLDGLSAQVEALQAERAELDAAWARVEEGRRSVEAMVEVGRKAHRRHVSELEARRKVLGEIAKEVEEERGAALIATTVMNEAQDTLRLHYGSWEAELAKKLDAARGVLDAAAARERRAAETEAASRRREEALEARAMALEERAGVVERDLADREAAVVIREVTLAAHEAACAEEECTLRLREDALTERERALEEAEAAAQRLAESASLREAVLEEQARRNLEGARAEKAALNQRATELEAQAKELDARARSGGAATGESDLAARLAAAEHTIADLQGALDSSAGEVEALRLAGEVGPGMLRDAVSRLDHAGRQAGLWGGRTVKYAANQGGLAQRLSEIAGTLQRLPEELERTIKSSSRDLARGAVELVLASYQARDPDFSPWTALDEFPPGTEDGARAQVRDAADHIVHSFEGSAPRLAFALNSDEEGDDGGVGDSGDEAGDPGALE

SEQ ID NO: 184639 - protein, 1889 aa, Oryza sativa
  Clone ID: PAT_MRT4530_81613C.1.pep
MMKRLCKSLLKKRLGDLILGDLDLDQFDLQLTRGTLHLSDIALNADFVNRKLSGSAIMMKEGSIKSLLVRIPLLLNMRDCCEIVVEDLELVLAASVSSEDPSGDTECSVSGSNTDDTQKSVQAKRNESDGNQCSTSASRDVDKGVQRIANAVTCFLTNFNIKLKNSYVVFDPQNILDNKVPEFNRSLVFRIKETEFGTNLSTDGIIKLHNFVTFHEAVIEFLKMDDVDAHALLQDDLDRGPADISSGHSTTAVLTGPIGGFSGKLNLSIPWNGLNFKKLDADISLNSLELRLQLSSIQWLMDVWDSLQRRNLVHEQSYAHNTADISRSASSYVSSSSKSGSGSVIASREHLTEDTFSQLRQEKTQEPSLTMPYLIPDWIPVLIHEDHGDPDSVCDESIDQFFECFEELMNSQTNLGNSGIWDWTCSVFNAITFVSTLASGSDQIPKEPPIEKTLRASIAEISVVLLFSDEMDAGNSSVPISQFNDMRNSEMFSSCLSFAHFEQSMISPAPAASLNMHHVEAKCQNIHLSLETYPENLSLKGSIAAIKLDEYYGSKNNDSDHPNLGAAFLNNNFCREVQASLPQSVFAYQDYHEETSRRHTNNSNDLTKVELLNTFGECVFHYDVSSSGQDGNPVSSTSLSVCLAPLVCWVHFHTIYMLLNFISKIESDVLHGEDKIHRKNDEKNVNLSMKSNVSLGGSQKVQIALSPARVIFCFPSESWDLSCPSMLDKFLVIDHTPSLKSGADSSPHQNEMPNDVNAITPSTLVHLATGNFDIYLVRPVNDELNARTCSLSRQTFSSLKIFSVTGSNCHETGITMLWKKYPLKDPEMVSKTWSLPNLHEQKIAQNKNGKWVGVSSSTTSEDLEESSSSIRRELLRSTEFLLHIKLSCVSVHLSKKDCGILNHLLKNILDGLSDGATGNFENDSDNCMPIHDTASQTSVIFECSILDICTELDETVEVGPLLQTELEGSWNCLKLSISKFSLLSSSNVGGVNNANFLWVNHGEGELWGSITGTDDYEESKDVLLVVCKDSASRRGDGEGSNILSFGTAGCSVTHIMNPKFQKNYTSINVRSATAVAPGGRMDWISAICLLFSSASDGTEQPANSSTMNDSQGGEPFSSLFFLELVDVAVSYEPHFRSSALSAETPDCKYFSCLLAASLFKLHSKSASNSTATDFDIELRDLGVLICGSSSFKNVSCGYGADYLRRMGYAKIVQNTFIEAVLRIDTSFWKLELSDSQFDIGTCHDTTHGVIQLCSQLQQLYAPDMRDALDHLQSRWNSVQQANKQNMGTDVSEKSESSIDNLTDSEECKSDGLLDDIIENAFCTDQDFASYSLSGSEMDEEFGLSKAIPEANDACISLESLLVTPEASTSDDLIIESYYMPPSSSSTLYNEDQGNCAPRTVECDEGEWYNNFPTIDENHVQRNKPREEQIFQQKLKPAIFILNSDESCSLKGKVLIHDIDVKWRMYEGNDWKLAQKDTISRPCSNGRDKRSYLEFIMSALNIQFNMYPDGDIFVSKLSISAKDINICDQSTHAPWKMVLGCYNSKDYPRESCSSAFMLELESVRPEPQAPLEDYRLHLEILPLQLHLDQGQLNFLISFFQNDLCNNPNLACENENIDAQSTMYRSDTIADEALLPFFQKFDVKPLVLHINYIPRHFDPVALSKGNYAELLNIFPWKGIDLKLKQVSAMGVYGFNNICEIVAAEWLEDISKNQVHKLLKGLPPIKSLVAVSSGTKKLVSLPIKSYKKDRKLLKGMQRGAVAFIRSVSIEAVGLGVHLAAGAHDMLLKTESALTAIPPPLASREAKRTKDNVRANQPESAQEGLKKAYESLTDGFGRTASALIGNPIKVYNRGAGAGSALATAICGAPGAAVAPLSASFRAAHYTLLGIRNR

SEQ ID NO: 184640 - protein, 951 aa, Oryza sativa
  Clone ID: PAT_MRT4530_81614C.1.pep
MARGSAPLDGSVLPPSRIVSEKQAGLPRRFMPASAAGREVVELGEGRSVPHYPGRSVFFLPFAMAGLVPPFSSFFMDVLEFYDLQMAHLTPNAIMTLAIFAHLCEMFIGVRPSLRLFRWFFTVQPVSPPSVVGGCYFQPRGPALSRYIPCVLRKKWDDWKSDWFYTPSPTKRASNFRASPQRSSVEASLIPQGVLPLCSDPDRANILTIMMAVGASEERAPRGHDGAGGSRRGEQSTPGGGRASGPRDRGPGGSRPADARGKRKQEGTPSPSPPRGGGAARVSSRRPEGAAPTPQPEGERKKKRLRKMGGTESYRGNLISPPRWSFNRPPRSEIPSRPSRHSKSGQSEAEDTATAEARRRETDRREAADRLREAEEAAQEAVRARRAEEAAREEARLRRAEESAREAEAARARQAACQAPDPTPPEATTTSEATHDEAAGAPLGPDPSGDAQDKPGPGDVPESGTSIGGPSRAASSPRRLSPMPSAAPLSAEPLLQALAAANTTVLDGLSAQMEVLQAEQAELDAAWARVEEGQRSVEAMVEAGRKAHRRHTSELEARRKELAEIAREVEEEREAALIATAVMNEAQDDLRLQYGSWAAELGKKLDAARGVLDAAAARERRAAETEAASRRREEALEARVTALEERACVKERDLADREAAVAIREATLAAHEAACAEEECALRLREDALTERERALEEAEAAAQRLADSLSLREAAQEKQTRRNLEGARAERAALDQRAAELEARARELDARARCGGAATGDGDLAARLAAAEHTIAELQGALDSSAGEVEALRLAGEVGPGMLRDAVSRLDRAGRQVGLWGGRIAKYAANQGGLAQRLSEMAGTLQRLPEELEETIKSSSRDLARGAVELVLASYQARDPDFSPWAALDELPPGTEDDARAQVRDAADHIVHSFEGTAPRLAFALDSDVEGGDGGVDDSDDEAGDPGASK

SEQ ID NO: 184641 - protein, 131 aa, Oryza sativa
  unsure (1)..(131): unsure at all Xaa locations
  Clone ID: PAT_MRT4530_81615C.1.pep
YLXHPXLIHAQSILXIWRSVXLXGAVEGYRIAGGPLGEVVDPLYPXGAFDPLXASADDPEAFAELKVKEIKNGQPSPCSSMFRLLQSRPSSPGKGPLENLSRPHSADPSQTNNAWAVRHQLQSPASEVGDQ

SEQ ID NO: 184642 - protein, 162 aa, Oryza sativa
  unsure (1)..(162): unsure at all Xaa locations
  Clone ID: PAT_MRT4530_81616C.1.pep
EXSIXXLLXXSNIITTXCXXCGVCLYXXPILILIXXXLRSLFXXXXIXPXXXVVDXSXXTXRALLXXGXRRXGXXXXQMPXALPTSQMAXHRXWTMTGVGGGXNAXSICXDXPYMGXGQLVGQFXLTVGSTTTXXSPPASSTGXVXXXXVXQLCXSXXXFPV

SEQ ID NO: 184643 - protein, 1888 aa, Oryza sativa
  unsure (1)..(1888): unsure at all Xaa locations
  Clone ID: PAT_MRT4530_81617C.1.pep
MGSVSGIDDFAFPPGQAFRFGSLNFITNDFGKISLLDSDSNQSGRDQVPAPFGIPNSAEAYSKTISPELVSNHSDEIQSTPQRPDQDDGSYPSILMRLPDDLAAVFTAKASPTRRSRQAPASAPIQSRSREVGVILQPLGTVSTEELDGYLSSPGVSSRLIEVLDYDDFGYHYDYGDFDNFDDSYEDNYTPIFFGVFMADNEMEEQRRAREAEEERTRQETERRRLEEERQRQERERLQREQQDRERVAKEAEDRRQRALESGRRARELIGQQDVNGTAVFRTPQQNSVAAITLLDTLLKEDALNQADHVVNILNQTKTMIAASVPANSASTRTLTGSRVPHLRSQDYHQPSLSIAGAGSSRRSRGHDERSESWLTVYGLVVRAAGGDSKAMANYLPVALADSARSWLHGLPRGTIGSXAELRDHFIANFQGTFERPGTQFDLYNIVXKSGESLRDYIRRFFEQRNKISDITDDVIIAAFIKGIRHEDLVGKFGRKPPKTVKQMFEKANEYAKAEDAITASKQSGTTWKPKKDTPTVGGSGSNNHKDRKRKPEELVATTSPFSLQRSRVNTFDKIMNSQCPHHPNSNHVAKDCFVYKQFAEQYVKNARKPSDGDQVTSKKKDDENDAPTGFQDHRKELNHIFGGPLAYESKRKQKLTEREINAVQPNTPQYLRWSEIAIKFDRSDHPDRVVHPGRFPLVLDPMVRNVKLRRTLIDGGSALNILFAKTLDDMQIPCTELKPSNAPFHGVIPGLSATPLSQITLPVTFGTRENFRTKNVCFEVADFETAYHAILGXPALTKFMAVPHYTYMMMKMLGPRGVISLWSDIKQAVTCNKESCEMAQTREITLAREEIRLAATTESALITFLQNNKDIFAWKPSDMPGIPREVIEHSLHVKEDAKPIKQRLRRFAQDRKDAIKEELTKLLVAGFIKEVLHPDWLANLVLVRKKTGQWRMCVDYTDLNKSCPKDHFGLPRIDQIRLKKSDCLKTSFITPFGAYCYITMPFGLKNAGATYQRMIQRCFSTQIGRNVEAYVDDVVVKTKQKDDLIADLEETFESIRAFRMKLNPEKCIFGVPSGKLLGFMVSQRGIQANPEKINAILNMKPPSSQKDVQKLTGCMAALSRFVSRLGERGMPFFKLLKKTDNFQWGPEAQKAFQDFKKLLTTPPVLASPRPQEPLLLYVSGTSQVVSTVLVVEREEEGHIQKVQRPIYFVSEVLADSKTRYPQVQKLLYGVLITVRKLSHYFQSHSVTVVTSFPLGDILHNREANGRIAKWALELMPLDISFKPRTSIKSQALADFLAEWTECQEDMPEEKMEYWTMHFDGSKRLTGAGAGVVLISPTGERLSYVLWIHFSTSHNVAEYEALLHGLRIAISLGIRRLIVRGDSXLVVNQVMKEWSCQDDNMTAYRQEVRKLEDKFDGLELTHVLRHNNEAADRLANFGSKREAVPSDVFVEHLYEPTVPRKEKIEAMNTQGVSMIEADWREPLIRFLTKQELPQDKNEAEHISRRSRLXIHETELYKKSPSGILQRCVSLEEGRQLLKDIHSGICGNHTAARTIVGKAYRQGFFWPTAVSDADKIVRTCEGCQFFARQTHLPAQELQTIPLSWPFAVLGLDMVGPFKKAVRGYTHLFVAVEKFSKWIEAKPVVTITADKARDFFPNIVHLFRVPNRIITDNGTQFTGGIFKDFCEDFGIKICYASVAHPMSNGQVERANGMVLQGIKARVFDRLRPYAGKWVEQLPSVLWSLRTTPSRATGQSLFFLVYGGEAMLPSEAEFESLRFRNFREERYEEDRVDDINRLEEAREVALIQSARYLQGLRRYHNRNVRSRAFLVGDLVLRRIQTTQDRYKLSPLWEGPFIIAEVTRPGSYRLKREDGTLVNNSWNIEHLRRFYA

SEQ ID NO: 184644 - protein, 124 aa, Oryza sativa
  unsure (1)..(124): unsure at all Xaa locations
  Clone ID: PAT_MRT4530_81618C.1.pep
RVVDPALPRGAFDPLGLTEDPEAFAELKVXKEIKNAASAMFSMFXGFFRPAHRSPGQGPLENLXADHLADPVKQQTAWAVPTNFVPRQVKWGTRSLQWLIVVGWICGQRVRCLWVGEDGFSATR

SEQ ID NO: 184645 - protein, 129 aa, Oryza sativa
  unsure (1)..(129): unsure at all Xaa locations
  Clone ID: PAT_MRT4530_81619C.1.pep
PVHSPPTPVKPPPPPAPVHSSPPPLKSPPPPAPVSSPPPLIKFPPPPAPVISPPAPVKFPPPPAPVSSPPPPVKSPPPSAPVKXLPPPPMESPPPPAPVKLTAFFCKASSQPRLEVLHFTSTFTPNFFF

SEQ ID NO: 184646 - protein, 87 aa, Oryza sativa
  Clone ID: PAT_MRT4530_8161C.1.pep
FAILRIQGFYNSAASGSACCGFFGGGSPSPASIVYYLALFVPLQVCYSKVCPEDSLYYGSRCTCLWFHSLPLLTFAFEVAVPNALGG

SEQ ID NO: 184647 - protein, 1115 aa, Oryza sativa
  unsure (1)..(1115): unsure at all Xaa locations
  Clone ID: PAT_MRT4530_81620C.1.pep
MKAPAGQTSKSANVTIGNTGDGSGYDLKFTSGKIVQLKNVQHVPSIDRNLVSGSRLTRDEFKMSHYVEKILNRFGYIDSKPSPTPYDPSLLLRKNKRIARNQLEYSQIIGSLMYLASATRPDISFAVSKLSRFTSNPGDDHWRALERVMRYLKGTVELGLHYTGYPAVLEGYSDSNWISDVDEIKATSGYVFTLGGGAVSWRMKPGIYLTGTNVPSPGANTPAPARDDVLPPSRIVSERQAGLPRRFMPESATGREIVSLGEGCPAPRYPGRSVFFLPFAMAGLVPPFSSFFMDVLEFYDLQMAHLTPNAVMTLAIFAHLCEMFIGVRPSLRLFRWFFTVQPVSPPSVVGGCYFQPRGPASNWRAPVDLGDGYDAVLDRLAGLRSQGLTGAMVFGDYLRRRIAPLQRRARGAWEYTGSVEASLIPQGVLPLCSDPDRASILTIMQAVGVSEERAPRGHDGVGGSRRGXQSTPGGGRASGPRDGGPGSGRPADARGKRKQEGTPPPSPPRGGGAARASSRRPEGATPTSQPEGERKKKRLRKXEIPSRPSRHSKSGQPEAEDPATIEARRRESDRREAADRLRETEEAAREAARARQTEEAAREEAGLRQAEATTSSEATRPGDIPESGTSIGGPSRAASSSRRLFPTPSVAPLSAEPLLQALAVANTTVLDGLSAQVEALQAERAELDAAWVRVDEGRRSVEAMVEVGRKAHRQHVSELEVRRKVLGEIAKEVEEERGAALIATTVMNEAQDTLRLQYGSWEAELGKKLDAARGVLDAAAARERRAAETEVASRRREEALEARAMALEERACAVERDLADREAAVAIREVTLAVHEAACAEEESALRLREDALTERERALEEAEAAAQRLADSLSLREAAQEEQARRNLESARAERAALNQRAAELEAQARELDARARSGGAATGDSDLAARLAAAEHTIADLQGALDSSTGEVEALRLAGEIGPSMLRDAVSRLDRAGRQAGLWGGRTVKYAANQGGLAQRLSEMAGTLQRLPEELEGTIKSSSRDLARGAVELVLASYQARDPDFSPWTALDEFPPGTEDGARAQVRDAADHIVHSFEGSAPRLAFALNSDEEGDDGGVGDSGDEAGDPGASE

SEQ ID NO: 184648 - protein, 159 aa, Oryza sativa
  unsure (1)..(159): unsure at all Xaa locations
  Clone ID: PAT_MRT4530_81621C.1.pep
XXXXNCNTTHYRANWVPGPPSSFFFFFFLQKYTLPVQISPSLQYSYIHPRGPHEYVHLYGTRTYIYCTAYTHAHSPAXTRIVVNLASLAEGDASPWQHGGGGAHLPGTKLVAXAQALLLTGSAKWSAKFSKGPLPVTMXWTKKPNMENMAKRXFLISFT

SEQ ID NO: 184649 - protein, 801 aa, Oryza sativa
  Clone ID: PAT_MRT4530_81622C.1.pep
MARGSAPLDGSVLPPSRIVSERQAGLPRRFMPESATGREIVTLGEGCPAPRYPGRSVFFLPFAMAGLVPPFSSFFMDVLEFYDLQMAHLTPNAVMTLAIFAHLCEMFIGVRPSLRLFRWFFTVQPVSPPSVVGGCYFQPRGPVLNRYIPCVLRKKWDDWKSDWFYTPLADEARLRLPSQPPAQASNWQAPVDLGDGYDAVLDRLAGLRSQGLTGAMVEIPSRPSCQSKSAQSEAENAATTEARRRESDRREAADRLREAEEAARPRQAEEAAREEARLRQAEVTTSSQATRETDRQEAADRLREAEEAAQVAVRARQAEEAAREEARLRQAEATTTSEAARDEAAGASLGPTPSGDAQDKPGPGDIPESGTSIGGQSRAASSPRRLFPTPSAAPLSAEPLLQALAVANTTVLDGLSAQMEALQAERAELDAAWARVEEGRRSVEAMVEVCRKAHRRHASELEARRKVLGEIARETEVASRRREEALEARAMALEERACVVERDLADREAAVAIREVTLAAHEAACAEEESALRLREDALTERERALEEAEAAAQRLVESASLREAAQEEQARRNLESARAERAALNQRAAELEAQARELDARARSGGAATGDSDLAARLAAAEHTIADLQGALDSSTGEVEALRLAGEIGPSMLRDAVSRLDRAGRQAGLWGGRTVKYAANQGGLAQRLSEMAGTLQRLPEELEGTIKSSSRDLARGAVELVLASYQARDPVFSPWTALDEFPPGTEDGARAQVRDAADHIVHSFEGSAPRLAFALNSDEEGDDGGVGDSGDEAGDPGASE

SEQ ID NO: 184650 - protein, 192 aa, Oryza sativa
  unsure (1)..(192): unsure at all Xaa locations
  Clone ID: PAT_MRT4530_81623C.1.pep
SDYLWPPEPDPRARASSPXWVGVRWCSCGPFEGYRITGGPDSASSSTRSTPVGAFDPARASADDPRWRXAELKDARSIIERPPRPCSPCSASSVQAIVTGIGPPRDTSADHLSRPRLTTTPRAYATNFSPPASEDGGPYAYAVVNSMXWMDLVATRVRLSLGSGKMGLVRRDDDRVGVVYTKKMKKKMMFLQ

SEQ ID NO: 184651 - protein, 522 aa, Oryza sativa
  unsure (1)..(522): unsure at all Xaa locations
  Clone ID: PAT_MRT4530_81624C.1.pep
MLLRARRDGEEPELSDEQLRSNDQLQEDEMLALEAIYGDNISILSAKDGLRCFQVHVHWEIPDGTSISTELSQGDNHDQNSXFFDTFSVQHLAPISLTCLMPPSYPSHRAPYFTLSSQWLDAVKVSSLCLMLDTIWTQQLGQEVVYAWVQWLQSSALSHLGFDDGILIQQPGSMMGPVDVRAVAEIASVESVAQWLISYNEEQCHESFLSGLHDCMICFTEYGGIDFITLPCQHYFCRRCMETYSRMHVTEGTVLKLLCPNDKCGGIIPPSLLKRLLGDTDFERWERLILQKTLDSMSDLAYCPRCGAACLEDEENNAQCPKCFFSFCARCRDRRHIGEKCMTIEEKLNSLQDRTVVPFLSKDSFASKMNLSNEISSIKEVLRSSVRCPHCGTAISRVSGCNHMLCSNCRQSFCYGCGKAENHGHSRYILLRSQMSPADTRRIWQRXKNPTVLIEEVKKELEGELSRQHPCPNCRQPNPKMGNNSHMFCWACQVHYCAQCHRMVRKSSEHYGPRGCKQHSVD

SEQ ID NO: 184652 - protein, 79 aa, Oryza sativa
  Clone ID: PAT_MRT4530_81625C.1.pep
MHGGAILQLEIEGTGFLYRQVRNMVALLLQVGREALPPDIVAKIIAARDRKELAKVALSAPPHGLYLMSVNYDKEMLQP

SEQ ID NO: 184653 - protein, 93 aa, Oryza sativa
  Clone ID: PAT_MRT4530_81626C.1.pep
KKGLSYFEKYIKPTPILLPINILEDFTKPLSLSFRLFGNILADELVVVVLVSLVPLVVPIPVMFLGLFTSGIQALIFATLAAAYIGESMEGHH

SEQ ID NO: 184654 - protein, 928 aa, Oryza sativa
  unsure (1)..(928): unsure at all Xaa locations
  Clone ID: PAT_MRT4530_81627C.1.pep
MARGSAPLDGSVLPPSRIVSERQAGLPRRFMPESATGREIVSLGEGCPAPRYPGRSVFFLPFAMAGLVSPFSSFFMDVLEFYDLQMAHLTPNAVMTLAIFAHLCEMFIGVRPSLRLFRWFFTVQPVSPPSVVGGCYFQPRGPVLNRYIPCVLRKKWDDWKSDWFYTPLADEARLRLPSQPPAQASNWRAPVDLGDGYDAVLDRLAGLRSQGLTGAMVFGDYLRRRIAPLQRRARGAWEYTGSEDCMRTHRGVKWDWVPEDFKVMIQRVLNLSSAEASLIPHGVLPLCSDPDRANILSIMMAVGASEERAPKGHDGASRSRKGDQSTPGGGCASGPRDGGSGGSRPADARGKRKQEGSSHAHCGCIHSSNTSFHSPILFVFWLFFCFSEIPSRPSCQFKSGQSEAENAATMEARRRESDRREAADRLREAEEAAQVAVRARQAEEAAREEARLRQAEAATTSEAARDEAAGASLGPTPSGDAQDKPGPGDIPESGTSIGGPSRAASSPRRLSPTPSAAPLSAEPLLQALAVANTTVLDGLSAQMEALQAERVELDAAWARVEEGRRSVEAMVEVGRKAHRRHVSELEARRKMLGEIARKVEEERGAALIATTVMNEAQDDLRLQYGSWEAELGKKLDAARGVLDAAAARERRAAETEVASRRREETLEARAMALEERACVVERDLADREAAIAIREVTLAVHEAACAEEESALRLREDTLTERDARAERAALNQRAAELEAQARELDARARSGGAATGDSDLAARLAAAEHTIADLQGALDSSTGEVEALRLAGEIGPSMLCDAVSRLDRAGRQAGLWGGRTVKYAANQGGLAQRLSEMAGTLQRLPEELEGTIKSSSRDLARGAVELVLASYQARDPDFSPWTALDEFPPGTEDGXAQVRDAADHIVHSFEGSAPRLAFALNSDEEGD

SEQ ID NO: 184655 - protein, 143 aa, Oryza sativa
  unsure (1)..(143): unsure at all Xaa locations
  Clone ID: PAT_MRT4530_81628C.1.pep
AVQVVLMAPSRGPHRRRPLGEVFDXLYPGXGAFDPLGLADDPXAFAELKVXKEYLVRSCLAMFSMFGFFVAXHIVTGKGPLEXLADPLADPVYYHAWAYAPHFVPGHVICGGVAYPWLIVVGWICGPRVRCLWVGEDGFSATR

SEQ ID NO: 184656 - protein, 107 aa, Oryza sativa
  unsure (1)..(107): unsure at all Xaa locations
  Clone ID: PAT_MRT4530_81629C.1.pep
NRPNQGKPGGQGGYGCGVRGPGARGRWPSGFPTGPPAPWPVRCPGPGVRVSGWGIQDAPFAMXSMFGFFXVQPIVTGKGPFENFADHFADPVNNNAWAXATXFVPGK

SEQ ID NO: 184657 - protein, 254 aa, Oryza sativa
  Clone ID: PAT_MRT4530_8162C.1.pep
MGLRLLLLLLLLLFHLPTATFQSSKDRITTMLSLISPSYRGKGDVFKKIHVVVEDEERQIQGTQLEGVGTGRSMERTSEERRKKRTTNATQRASLENASHRVSHQLQCTPRHATITIILHTPIRRSSYHDVVRVTEVEDLLDISGVQTYVINSAKVLFLNERPQPRGAGAAAGKAAASPYNCQICARALLDPFRFCSLGCKLVDTKTGGRGATVQPGDATNDDAAAAGGSSKNGGARPQGRRRKGIPQRAPFGS

SEQ ID NO: 184658 - protein, 70 aa, Oryza sativa
  Clone ID: PAT_MRT4530_81630C.1.pep
PLGLANDPGAFPELKVKGLKGGRLAMFSMFGFFVQAMVTGKGPLESLAGPLADPVNNNAWGYATNLVPGK

SEQ ID NO: 184659 - protein, 74 aa, Oryza sativa
  unsure (1)..(74): unsure at all Xaa locations
  Clone ID: PAT_MRT4530_81631C.1.pep
EMEKMVKLIKGLKKDNEFLKSXVRXSDVALIKFIXERELNKKQVYKFQNQKKKLEFLCRSFQAKKKQNPSGGTP

SEQ ID NO: 184660 - protein, 1239 aa, Oryza sativa
  unsure (1)..(1239): unsure at all Xaa locations
  Clone ID: PAT_MRT4530_81632C.1.pep
RLPPSPLSATQPSLLRPTPPHRRLVVHIILAATVVLFFGMRSEHVERDILQIHHIICVAKHIRQYNSMFAITSMGAKINESINDGRAPYVFKISGQVCHRIGSLLPPQGHRPEYAQLYIFDTEHEISNRINVASSPRVTFHANEQIVASLIEMLNTNNPIVQLFRTAHERISDVGSADVGRDIIIQDRASRLQRINENHRKFMAMQYPLLFPYGEDGYHENLTYRTTARTQSMQRNKVTMLECYAYRLHDRPGDFNTPLRCKRLTQSYEVDSYCCVEGSRIAHYRTPAFQSKYRSSPFNSLINSVSRGITSGSSVGQRIILPASFTGGPRYLYQNYQDSIAICRKYGCPDLFLTFTSNSAWPEIREALASIPGQQPSDRPDIVNRVFKMKLNILMDDIKKHKFFGPINAVIYTIEFQKRGLPHVHIIIWLAKTEPLDSQKIDHYISAQLPDPAIDQIGFEAVSSFMVHGPCGPHNTSSICMSEGKCTKFYPKEFCEETTILENGFVIEDPNSSTTKLTAWLEANRENPSARQLTYIEFPEHWTWHNQGKYWDGRRGSQCRIGRIAYVNPSQGEAYYLRMLLHIVKGPRSFAEIRTISGHEYPTFRAACEALGLLGDDQEWSNALKDAAQWALPSQLRQLFVTMLLFCEVTNPTRLFSEHESYMSEDISYRMPRNTSQASSSTNPYVRSVLLIELDKLLRDAGYDLSHFSLPLPDDIGSVSAQNRLVLDELSYDVYNMPSTIDEAISGLNNSQKEVFNAIYNSAINNEGRTFFVYGYGGTGKTFLWTTLLNSIRSQGKIALAVASSGIASLLLPGGRTPHSRFKIPLEISQNSMCSIKKNTNLAELIQXTSLIVWDEAPVNHKYCFESLDRTLRDILSETNPNSLDKQFGGITVVLGGDFRQTLPVIQNATKQQILRSCIVNSYLWNQCILIELTENMRLTSASISAQDREELRNFSNWLLKIGNGTEPFVDVPEQLTNMFIEMPQSLLLSPDCRNLDGLISFVYNLGCQPSNLISYLCERAILAPTNEVVSEINNRMIAQLEASEMSYYSSDTIDDSSTNCTAIEALYPTEFLNTISINGLPEHVLHLKIGVPIMLLRNLDPSRGLCNGTRLIVTQLTSRVIEGEIITGKAKGTKAYIPRIVTTSTQSKWPFKLRRRQFPIRLSYAMTINKSQGQTLSRVGVYLPSPVFSHGQLYVAFSRVTSPNGLKVLIENSPASYENCTHNVVYSEVFNLINRNRN

SEQ ID NO: 184661 - protein, 64 aa, Oryza sativa
  Clone ID: PAT_MRT4530_81633C.1.pep
DPEELEELKVKEIKNGRLAMFSMLGFLVQAMVTGKGPLENLADHLADPVNNNAWEYATNLVPGK

SEQ ID NO: 184662 - protein, 568 aa, Oryza sativa
  Clone ID: PAT_MRT4530_81634C.1.pep
MQLNGPYHPNCDNFLLQCYSFVSLPLPDDIGSVSAQNRLILDELSYDVYNMPSTIDEAISGNGTEPFVDVPEQLTNMFIEMPQSLLLSPDCRNLDGLISFVYNLRCQPSNLTSYMCERAILAPTNEVVSEINNRMIAQLEASEMSYYSSDSIDDSSTNCTAIEALYPTEFLNTISINGIPEHVLHLKIGVPIMLLCNLDPSRGLCNGTRLIVTQLTSRVIEGEIITGKAKGTKAYIPRIVTTSTQSKWPFKLRRRQFPIRLSYAMTINKSQGQTLSRVGVYLPSPVFSHGQLYDAFSRVTSPNGLKVLIENSPTSYKNCTHNVVYSKQNCKVFGRLIRLWDAINMRSKSADPLISIDGILLDEHRLMLGKNDEIDNWAAVVSLLSDMESERRGRRRGNCRWGGVGRRSEGWVALRGEGGKRTSRATWQGIEGEVKRNRGVEWRKRRRRSGMWRGCGAAGMRGGVRRREMRERGGAMQERGVDACGPAEQRDAGEERRGAMRERRWGRRVAMRERGGEERCGWKEALDAYPTVGIKRVTWKHQEAENCSSGDDLYRPCSFGEHLNLVSM

SEQ ID NO: 184663 - protein, 70 aa, Oryza sativa
  unsure (1)..(70): unsure at all Xaa locations
  Clone ID: PAT_MRT4530_81635C.1.pep
TVGFADDPEAFAELKVKEIKNGRFAMFSMFGFFVQAIVTGKGPXENLADHLADPVNNNAWAYATNFVPGK

SEQ ID NO: 184664 - protein, 510 aa, Oryza sativa
  unsure (1)..(510): unsure at all Xaa locations
  Clone ID: PAT_MRT4530_81636C.1.pep
TRRERHTSNPSNNLCCKGGRIWLPPYQPPPQPLLDLLTSQNSTLSNHFFDHIRQYNSMFVITSMGAKINESINDGRAPYVFKISGQVCHRIGSLLPPQGHRPEYAQLYIFDTEHEISNRINVASSSRVTFHANEQIVASLIEMLNTNNPIVQLFRTAHERISLDASDQFCIRLFGKLDANGDIYSAPVASEVVGLIVGDVGSADVGRDIIIQDRASRLQRINENHCKFMAMQYPLLFPYGEDGYHENLTYRTTACTQSMQQNKVTMLECYAYRLHDRPGDFNTPLRCKRVTQSYEVDSYCCVEGSRIAHYCTPAFQSKYRSSPFNSLINSVSRGITSGSSVGQRIILPASFTGGPRYLYQNYQDSIAICRKYGCPDLFLTFTSNSAXPEIREALASIPGQQPSDRPDIVNRVFKMKLNILMDDIKKHNFFGPINAVIYTIEFQKRGLPHVHIIIWLAKTEPLDSKKIDHYISAQLPDPAIDQIGFEAVSSFIVHGPCGPHNTSSICMSDS

SEQ ID NO: 184665 - protein, 104 aa, Oryza sativa
  Clone ID: PAT_MRT4530_81637C.1.pep
FCFFIFWGCFFFFFFFLEKAGCLSWYNCILLKHRVVSDNKKTRAHTPQLALFPPKHTPVLQDKPILENLQGPSFIEPKGSGIYLLLGPYPKLLADFNIFFFFFK

SEQ ID NO: 184666 - protein, 56 aa, Oryza sativa
  Clone ID: PAT_MRT4530_81638C.1.pep
NPHVVYAGRLQYSDEPAKPSLAVGYACVLSSYVDLVAHALALSHAWPHAWTVRVPP

SEQ ID NO: 184667 - protein, 63 aa, Oryza sativa
  unsure (1)..(63): unsure at all Xaa locations
  Clone ID: PAT_MRT4530_81639C.1.pep
HNACQKRLRIHNTLVTPFPPQAVSLHCTFIIFWSHTAPHTPTHHTHSTHTAHHHXTSPPLWHL

SEQ ID NO: 184668 - protein, 409 aa, Oryza sativa
  Clone ID: PAT_MRT4530_8163C.1.pep
MADMSPRTDTSTDDTDDNHKLEPGQLALAAASDSDRSKDKHEDQKTLRRLAQNREAARKSRLRKKAYVQQLENSRLKLTQLEQELQRARQQGIFISSSVDQTHSMSGNGALAFDMEYARWLEEHNRQINELRSAVNAHAGDNELRGVVDKIMSHYEEIFKQKGNAAKADVFHVLSGMWKTPAERCFLWLGGFRPSELLKLLSTQLEPLTEQQLSGIANLQQSSQQAEDALSQGMEALQQSLAETLAGSLGSSGSTGNVANYMGQMAMAMGKLGTLENFLRQVTLIWLSTPQWQYIGFFTVMPAYGLTCTGDPITSIGLWCDWLGYGECAGDDWHVIDCGADCHTSELVIENLKPRCISNARRRAVLRASSSPQWARPSHEKEQQRTDCIESQKSHEYSTKLADFNEIGR

SEQ ID NO: 184669 - protein, 122 aa, Oryza sativa
  Clone ID: PAT_MRT4530_81640C.1.pep
GRRSSFCWRPRSDKSPVLVVEPTESNACNTASYDSKFSGGNTPVTLDRAGAFFFNIGVDANCRAGEKLIVMVANATGSSVSPPSSSSSPSSPSRWWWWRWRSSRAGAPGCSGHAGGDEQLAG

SEQ ID NO: 184670 - protein, 346 aa, Oryza sativa
  unsure (1)..(346): unsure at all Xaa locations
  Clone ID: PAT_MRT4530_81641C.1.pep
MVKGTSGYSYGLGLACFALVVAMAGATQLKVGGGNGWSVPAANAESYNDWAEKMRFQIGDTLVFVYPKDKDSVLVVEPADYNACNTSSFDQKFADGNTVFTLDRAGAFFFISGVDANCRAGEKLIVMVLASRNGTATATAPSPPPASSTAPPPTSPAPASPPPSSPSPPPASPPSPSSSGAAAPTTPPPASSPPSTPTPASPAPSASSPPAPPSANAPSAQGARNPSATSSPRSRSTAPAPSSSSAASTPTAAPARSSSSWSPTXTGSSASPPSSSSSPSSPSGGGGGGGAPAGQAPPGAPATPAGTNSSPANGGAAGGGAKSGAGLTVAASGLAGSLIAAIACVA

SEQ ID NO: 184671 - protein, 387 aa, Oryza sativa
  Clone ID: PAT_MRT4530_81642C.1.pep
MAAAAAAAAICGEDETAARVGCTGEWAGGIERVDLGERKEAVAAAGAGKRSVYLMDCAPVWGCASTRGRSAEMEDASAAVPRFADVPVRLLASRRDLDALGLDADALRLPAHLFGVFDGHGGAEVANYCRERIHVVLSEELKRLGKNLGEMGEVDMKEHWDDVFTKCFQRVDDEVSGRVTRVVNGGGEVRSEPVTAENVGSTAVVALVCSSHVVVANCGDSRIVLCRGKEPVALSIDHKPDRKDERARIEAQGGKVIQWNGYRVSGILAMSRSIGDRYLKPFVIPKPEVMVVPRAKDDDCLILASDGLWDVVSNEEACKVARRQILLWHKNNGAASPLSDEGEGSTDPAAQAAADYLMRLALKKGSEDNITVIVVDLKPRKKLKNIS

SEQ ID NO: 184672 - protein, 83 aa, Oryza sativa
  Clone ID: PAT_MRT4530_81643C.1.pep
WVVGLLRYKTPSMHSDTSCQAHLFSSVFSLQSIRVWHLMVRFVIYNAVIIIYQPVLLLGRPLQHNLRLFSASYSRDHSFEPRC

SEQ ID NO: 184673 - protein, 43 aa, Oryza sativa
  Clone ID: PAT_MRT4530_81644C.1.pep
KLYALTCHRASLLACMCARLFSQDREEKHIQKIYIAQFPSVTA

SEQ ID NO: 184674 - protein, 47 aa, Oryza sativa
  Clone ID: PAT_MRT4530_81645C.1.pep
AERASLSWVPTLLFLRVLSPSEAEKEDTNAEASPAQEVSSVGNGLGR

SEQ ID NO: 184675 - protein, 129 aa, Oryza sativa
  Clone ID: PAT_MRT4530_81646C.1.pep
WPLSSVETGLVFCFFFFPPSLAHSVDGLLRDIWFASGQAHFADAELHRVHPNTGVSTDMEWCKSTISPSYSWLCMNSIPQPCSRVYFIPGSVIRCESSFRGGFVLRGGYVTGCLGPPPMWHHRGGSVAV

SEQ ID NO: 184676 - protein, 498 aa, Oryza sativa
  unsure (1)..(498): unsure at all Xaa locations
  Clone ID: PAT_MRT4530_81647C.1.pep
MARGSAPLDGCVLPPSRIVSERQAGLPRRFMPESATGREVVTLGEGRPAPHYPGRSVFFLSFAMAGLVPPFSSVFMDVLELYDLQMAHLTPNAVMTLAIFVHLCEMFIGVRPSLRLFRXGGCYFQPGGRXLNRYIPCVLRKKWDDWKSDWFYTPLADEARLRLPSQPPVQASSWRAPVDLGDGYDAVLYRLASLRSQGLTGAMVYGDYLRRRIAPLQRRARGAWEYSGSEDYMRTHQGHKWDWVPEDLRMVVQRVLNLSSVEASLIPQGXVGASKERAPRGHDGAGGSRRGEQSTPGGGRASGPRDGGPGGNCPADARGKRKQEGTPSPSPPRGGGAVRASSRRPEGTAPTSQPEGXRKKKRLRKMGETEPCRGNLISPPRWSFSRPPRSEIPSRPPRHSKSGRSEVEETATAETRRREADRREAAVRLRESEEAVQEAVRARQAEEAAREEARLRRAEESVREAETAHARQAARQAPDPTPPEATTTSEATHDNAAG

SEQ ID NO: 184677 - protein, 1088 aa, Oryza sativa
  unsure (1)..(1088): unsure at all Xaa locations
  Clone ID: PAT_MRT4530_81648C.1.pep
MARGSAPLDGSVLPPSRIVSERQAGLPRRFMPESATGREVVALGEGRPAPHYPGRSVFFLSFAMAGLVPPFSTFFMDILEFYDLQMAHLTPNAIMTLAIFAHLCEMFIGVRPFLRLFWWFFTVQPVSPPTVVGGCYFQPRGQVLNRYIPCVLRKKWDDWKSDWFYTPLADEARLRLPSQPPAQASSWRAAGLTGAMVFGDFLRRRIAPLQRRARGAWEYTGPEDYMRTHQGRKWDWDPEDFRMVVQRVLNLSSVEASLIPQGVLPLCCDPERANILTIMQVVGASGERAPRGHDGAGGSRRGEQSTPGGGRASGPRDGGPGGSRPADARGKRKQEGTPPPSPPQGGVAVRASSRRPEGAVPTPQPEGERKKKRLRKMRGTEPCRGNLISPPRWSFSRPPRRSRRALPRHSKSGRSEAEETATAEARRREADRREAADRLREAEEAAQEAVRVRQAEEAAREEARLRRAGESVREAEAARARQAACQAPDPTPPEATTTSEATHDEAAGAPLGPDPSGDAWDEPASGDAPESGTSIGGPSRAAPTPRRLSSLPSAAPLSVEPLLQALAAANSTVLDGLSAQMEVLQAERAELDAAWARVEEGRRSVEAMVEAGRKAHRRHASQLEARRRDLAEIAREVEEERETALIATAVLDEARDDLRLQYGRRAAELEEKLDAARGVLDAAAAREWRAAENEAASRQREEALEARATALEERARALDAKERDLADREAAVATREATLAAHEAACAVEESALRLREDALTEWERALEEAKAAAQRLVDSLFLREAAREEQARRNLEGARAERAALDQRAAELEARAKELDXAHSGGAAAGHGDLAARLAATGHTIAELQGALDSSAGEVEALRLANXDRAGRQAGLWGGRYTKYAANQGGLAQRLSEMAGALERLPEELEETIKSSSRDLARGAVELVLASYQARDPDFSPWAALEEFPPGTEDGARAQVRDAADHIVHSFEGTAPRLAFALDSDEEGGDDGADDSDDEAGDPGASESQPQAARVGASAWGDPRVETGQAESAVTEGYDDPIPARATEGRVEHERANSSQDSSKGNDGTDTVLRKSKMLLLKYGREK

SEQ ID NO: 184678 - protein, 97 aa, Oryza sativa
  Clone ID: PAT_MRT4530_81649C.1.pep
MVPSSSGGRGKPPSPDSPSSRELTGDNDRPSCVFLAGRRPCPPHRSSTPSSSLSCDRLSSVTTSPTAAHQPAGPSLHASPSRRWGRPVELSDATALA

SEQ ID NO: 184679 - protein, 714 aa, Oryza sativa
  Clone ID: PAT_MRT4530_8164C.1.pep
PCVRPRVRGRVGEEEVLRKMRVALPDDYSEKLLSQKNGTENLELPEVKDYQPRKVPGDEVLEQEVYGIDPYTHNLLLEMMPTELDWPSSDKHTFVEELLLNTLNKQVRQFTGSGNTPMVYPLKPVIEEIQKSAEESGDRRTSKMCLGMLKAMRNHPEYNYVAYRKGLGVVCNKTGGFGVDDFVIEFFGEVYPSWRWYEKQDGIKHIQNNSDDQAPEFYNIMLERPKGDRDGYDLVFVDAMHKANYASRICHSCNPNCEAKVTAVDGHYQIGIYTVRPIAEGEEITFDYNSVTESKEEHEASVCLCGSQICRGSYLNFSGEGAFEKVLMEFHGVLDRHSLLLQACEANSVSQQDLIDLGRAGLGTCLLAGLPGWLVAYTAHLVRFIFFERQKLPHEIFKHNVDEKRQFFTDINMDSEKNDAEVQAEGVLNSRLQNLTHTLDKVRYVMRCIFGDPKNAPPPLVRLTGRSLVSAIWKGEGSLVDELLESMEPHVEEDVLTDLKAKIRAHDPSGSEDIEGEIRSSLLWLRDELRTLSCTYKCRHDAAADLIHMYAYTKCFFRVRDYKTVKSPPVLISPLDLGPKYADKLGPGFQEYCKTYPENYCLGQLIYWYSQNAEPESRLTRARKGCMSLPDVSSFYVKSVKPTQERVYGSRTVRFMLARMENQAQRPWPKDRIWVFKSDPRFFGTPMMDAVLNNSPLDKEMVHWLKTRSNVFLG

SEQ ID NO: 184680 - protein, 1007 aa, Oryza sativa
  unsure (1)..(1007): unsure at all Xaa locations
  Clone ID: PAT_MRT4530_81650C.1.pep
MARGSAPLEGSVLPPSRIVSERQAGLPRRFMPESATGREVVALGEGRPAPHYPGWSVFFLSFAMAGLVPPFSCFFMDVLELYDLQMAHLTPNAVMTLAILSHLCEMFIGVRPSLRLFRWFFTVQPVSPPSVVGGCYFQPRGPVLNRYIPCVLRKKWDDWKSDWFYTPLADEARLRLPSQPPAQVSSWRAPVDLGDGYDAILDRLAGLRSQGLTGAMVFGDYLRRRIAPLQRRARGAWEYTGSEDYMRTHQGGRWDWAPEDFKMVVQRAVGASGERAPRGHDGAGGSRRGEQSTPGGGRASGPRDGGPGGSRPADARGKRKQEDTPSPSPPRGGGAVRASSRRPEGAVPTSQPEGERKKKRLPKIGGTEPCRGNLISPPRWSFSRPPRSKIPSRPPRHSKSGRSEAEETATVEARRREAVRREAADRLREAEEAAQEAVRVRQAEEAAREEARLRRAGKSAREAEATRARQAACQAPDPTPPGATTTSEATHDEAAGALLGPNPSGDVRDEPASGDAPESGTSIGGPSRTAPTPRRLSPLPSAAPLNTEPLLQALAAVNTTVLDGLGAQMEVLQAERAELDAAWARVEEGRRSVEAMVEAGRKAYRRHASELEARRRELAEIAREVEEERETALIATAVLNKARDDLRLQYGSRVAELEKKLDAARGVLDAATAREWRATENEAASRRREEALKARATALEERARARERDLAVRETAVAIREATLAAHEAACAEEESALRLREDALTKRERALEEAEAAAQRLADSLXYREAAREEQARRNLEGARAERAALDQRAAELEARAKELDARTRSGGAAAGDGDLAARLAAAEHTIADLQGALDSSAGEVEALRLAGEVGPGMLRDAVSRLDRAGRQAGLWGERTAKYAANQGGLAQRLSEMAETLQRLPEELEETIKSSSRDLARGAVELVLASYQARDPDFSPWAALDEFPPGTEDDARAQVRDAVDHIVHSFEGTAPRLAFALDSDEEGGDGGVDDSDHEAGDPGASK

SEQ ID NO: 184681 - protein, 122 aa, Oryza sativa
  Clone ID: PAT_MRT4530_81651C.1.pep
PTPAASEALLFDTAQPPPPLPTPSPAAYPSPRRHLGRHLADALSPTALLDVPGGAAPGRRRDRPLAAALGAAGPPLGPLDDAAPPSTRPLFCTRREKRSLGDARSHTPPAPAACFSRSQRAR

SEQ ID NO: 184682 - protein, 1047 aa, Oryza sativa
  Clone ID: PAT_MRT4530_81652C.1.pep
MARGSALLDGSVLPPSRIVNERHAGLPRRFMPESATGREIVMLGEGRPAPDYPGRSIFFLPFAMAGLVPPFSHFFMDVLEFYDLQMAHLTPNAVMTLAIFAHLCEMFIGVRPSLQLFRWFFTVQSVSPPSVVGGCYFQPRGPVLNRYIPCVLRKKWDDWKSDWFYTPLANEARLRLPSQPPAQVSSWRAPVDLGEDYDAVLDRLAGLRSQGLTGAMVYGDYLRRRIAPLQRRARNAWEYTGPEDYMRTHQGARWDWAPEDFKIVVQRVLNLSSAEASRIPQEILPLCSDPDRASILTIMMGVGASEERAPKGHDGAGERRRGEQSAPGGGRASGPRAGGSGSSRPADAQGKRKLGGTPPPSPPRGGGAARASSRRPEGAAPTSQPEGERKKKRLRKTGETEPCRGNLISPPRWSFNRPPRSDVPSHSSRHPKSGQSEAEDPAAAEERRRESDRREAAARLREAEEAAREAARVRQAEEAAREEAARARQAEEAAREEAARARQAEATAAAGASLGPTPSGGPQATSSEAARDEAAGASPGPTSPGDAQDQTGPGDIPEPSASSGGPSRVAFSPRRLFSSSSVAPLSAEPLLQALAAANTAVLDGFNTQVEALRAERAELEAAWARVEEGRRSVDAMVEVGRKAHRRHVSELEARKAALAEIAREVEEERAAALISTTAMIEAQDTLRLQHASWEAELKKKLDAAQGVLDSAAARERRVTETEAAFRRREEALEARAMALEEHAGAVERGLTDRKAAAGLREATLAAHEAACAEEECALRLREDALAERERALEEAEATTKRLADSLSLREAAQEEQARRNLECVRAERAALEQRAADLEAREKELDARAPIGGAAAGESDLAARLAAAEHTVAEMQRALDSSTGEAEALRLAGEIGPDMLWDAVSRMKRAGRQAGLWRGQTTVPPTNLEGLAPHLNRMAWVLERLPEELEKTIKSSSRDLARGAVELVLASYQARDPNFSPWMALEEFPPGTEDDARARVGDAADHIVNGFEGSAPRLAFAPSSDEEGDASGEDDGGDEAGDPGAFE

SEQ ID NO: 184683 - protein, 245 aa, Oryza sativa
  unsure (1)..(245): unsure at all Xaa locations
  Clone ID: PAT_MRT4530_81653C.1.pep
MKVVRFFSKCPDCPSSVDGFAVCLPAHLPFRRCLESVCIAMLSLCWPHVWHSAPLALVDAHLSPEGRGGGSGVVAIVSCVLTVHLGPFXCTHLSTTSMEAHRGEIARWLEVLTAKGVQELVFXLDLCLPAALFGCSSLTRLHIGVWRLPDTRDILHGAAFPHLHEMVLSCIVMEYRDLAFLLDRSNALEVLAIITCQTNMAELVCVRLASCILRIFQVCLTIVNXIDVVDAPRLERLMLWMTSKH

SEQ ID NO: 184684 - protein, 1015 aa, Oryza sativa
  Clone ID: PAT_MRT4530_81654C.1.pep
MARGSAPLDGSVLPPSRIVSERQAGLPRRFMPESATGWEIVSLGKGCPAPRYPGRSVFFLPFAMAGLVPPFSSFFMDVLEFYDLQMAHLTLNAVMTLAIFAHLCEMFIGVRPPLRLFRWFFTVQPVSPPSVVGGCYFQPRGPVLNRYIPCVLRKKWDDWKSDWFYTPLADEARLRLPSQPPAQASSWRAPVDLGDGYDAVLDRLAGLRSLGLIGAMVYGDYLRRRIAPLQRRVRGAWEYTGSEDYMRTHQGVRWDWAPEDFKIVVQRVLNLSSVEASLIPQGVLPLCSDPDRASILTIMQAVGASEERAPRGHDGAGGSRRGERSTPGGGRASGPRDGGPGSGRPADARGKRKQEGTPPPSPPRGGGAARTSSRRPEGATPTSQPEGERKKKRLRKMGGTEPSRGNLISPPRWSFNRPPRSEISSRPSCHSKSGQSEAEDPATTEARRRESDRREAADRLREAEEAAQVAVRARQAEEAAREEARLRQAEAATTSEAARDEAAGASLGPIPSGDAQDKPGLGDIPESGTFIGGPSRAASSPRRLFPTPSVAPLSAEPLLQALAVANTTVLDGLSAQVETLQAERAELDAAWARVEEGRRSVEAMVEVGRKAHRRHVSKLEARRKVLGEIAKEVEEERGAALIATTVMNEAQDTLRLQYGSWEAELGKKLDTARGVLDAAAAQERRAAETEAASRRREEALEARAMALEERAGVVERDLADREAAVAIREVTLAAHEAACAEEECALRLREDALTDRERALEEAEATAQRLAESASLREAVLEEQARRNLEGARAEKAALNQRAAELEAQAKELDARARSGGAATGESDLAARLAAAEHTIADLQGALDSSAGEVEALRLAGEVGPGMLRDAVSRLDHAGRQAGLWGGRTVKYAANQGGLAQRLSEMVGTLQRLPEELERTIKSSSRDLARGAVELVLASYQARDPDFSPWTALDEFPPGTEDGARAQVRDAADHIVHSFEGSAPRLAFALNSDEEGDDGGVGDSGDEAGDPGGSE

SEQ ID NO: 184685 - protein, 60 aa, Oryza sativa
  Clone ID: PAT_MRT4530_81655C.1.pep
NSKIQFNMRCFLKICICCKVNIPFFITAHILGYIRGQNPHVGLSLKKKNSVYKKKKKKTQ

SEQ ID NO: 184686 - protein, 981 aa, Oryza sativa
  unsure (1)..(981): unsure at all Xaa locations
  Clone ID: PAT_MRT4530_81656C.1.pep
MAWGSAPLDGSVLPPSRIVSERQAGLPRRFMPESATGREIVSLGEGCPAPRYPGRSVFFLPFAMAGLVPPFSSFFMDVLEFYDLQMAHLTPNAVMTLAIFAHLCEMFIGVRPSLRLFRWFFTVQPVSPPSVVGGCYFQPRGPVLNRYIPCVLRKKWDDWKSDWFYTPLADEARLRLPSQPPAQASNWRAPVDLGDGYDAVLDRLAGLRSQGLTGAMVFGDYLRRRIAPLQRRAWGAWEYTGSEDCMRTHQGVRWDWAPEDFKIVVQRVLNLSSVEASLIPQGVLPLCSDLDRASILTIMQAVGASEERAPRGHDDAGGSRRGEQSTPGGGRASGPRDGGPGSGRPADARGKRKQEGAPPPSPPRGGGVARASSRRPEGATPTSQPEGERKKKRLRKMGGTEPSRGNLISPPRWSFNRPPRSEIPSRPSRHSKSGQSEAEDPATTEARRRESDRREAADRLREAEEAAQVAVRARQAEEAAREEARLRQAEAATTSKAARDEAAGASLGPTPSGDAQDKPGPGDIPESGTSIGGPSHAASSPRRLFPTPSVASLSAEPLLQALAVANTTVLDGLSAQVEALQAERAELDAAWARVEEGQRSVEAMVEVGRKAHRRHVSELEARRKVLGEIAKEVEEERGAALIATTVMNEAQDTLRLQYGSWEAELGKKLDAARGVLDAAAARERRAAETEVASRRREEALEARAMALEERACAVERDLADREAAVAIREXTLAVHEAAYAEEESALRLREDALTERERALEEAEAAAQRLADSLSLRKAAQEEQARRNLESACAERAALNQRAAELEAQARELDARAHSGGAAAGESDLTARLAAAEHTIADLQGALDSSAGEVEALRLAGEGGLAQRLSEMAGTLQRLPEELEGTIKSSSRDLARGAVELVLASYQVRDPDFSPWTALDEFPPGTEDGAREQVRDAADHIIHSFEGSAPRLAFALNSDEEGDDGGVGDSGDEAGDPGASE

SEQ ID NO: 184687 - protein, 81 aa, Oryza sativa
  Clone ID: PAT_MRT4530_81657C.1.pep
CPRSRCSRSRWRRPATSPASSSRTRSSWTSPRRRAPAPAPPPPPPARPSATRTPRSSRASRSSARPPCGSKANTPSPSPIW

SEQ ID NO: 184688 - protein, 925 aa, Oryza sativa
  Clone ID: PAT_MRT4530_81658C.1.pep
MARGSAPLDGSVLPPSRIVSERQAGLPRRFMPESATGREVVAQGEGRPAPHYPGRSVFFLSFAMAGLVSPFSIFFMDILEFYDLQMAHLTPNAIMTLAIFAHLCEMFIGRRARGAWEYTGPEDYMRTHQGRKWDWDPEDFRMVVQRVLNLSSVEASLIPQGVLPLCCDPERANILTIMQEVGASGERAPRGHDGAGGSRRGEQSTPGGGHASGPRDGGPGGSRPADARGKRKQEGTPPPSPPRGGGAVRASSRRPEGAVSTPQPEGERKKKRLRKMGGPSHAGGTSSRPRGGRLADLPAARSRRPPPPPPRHSKSGRSEAEETATAEARRREADRREAADRLREAEEAAQEAVRVRQAEEAAREEARLRRAGESVREAEAARARQAACQAPNPTPPEVTMTSEATHDEAAGAPLGPDPSGDAWDEPASGDAPESGRSIGGPSRVAPTPRRLSPLPSAAPLSTEPLLQALAAANSTVLDGLSAQMEALQAERAELDTAWARVEEGPRSVEAMVEAGRKAHRRHASQLEARRRDLAEIAREVEEERETALIATAVLDEARDDLRLQYGSRAAELEEKLDAARGVLDAAAARERRAAENEAASRQREEVLEARATALEERARALDAKERDLADREAAVATREATLAAQEAACAEEESALRLREDTLTERGRALEEAEAAAQRLADSLFLREAAREEQARRNLEGARAERAALDQRAAELEARAKELDARAHSSGAAAGDGDLVARLAAAEHTIAELQGALDSSAGEVEALRLASEVGPGMLRDAVSRLDRAGRQAGLWGGRYAKYAANQGGLAQRLSEMAGVLKRLPEELEETIKSSSRDLARGAVELVLASYQARDPDFSPWAALEEFPPGTEDGARAQVRDAADHIVHSFEGTAPRLAFALDSDEEGGVHGADDSDDEAGDPGASE

SEQ ID NO: 184689 - protein, 1487 aa, Oryza sativa
  unsure (1)..(1487): unsure at all Xaa locations
  Clone ID: PAT_MRT4530_81659C.1.pep
MATSAPPASTHGQRRSLSTTTSATATTTAISTTSTKTLKITTRLSTSAFSWPTTRRKNSEAERRRLEEECQAQERERLQHEQQERERAAKEAEDQQQRALYAGRRARELIGQQDIEGTAVFRTPHQYAVAAITLLDTLLKEDALNQANHVVNILNQTKTMIAASVPVNSASVRTPTGSRVPPLRSQDYQQPSLSIVGAGSSRRSRGHDERSIHSPPERHRERRAERPRSPHRRRPIDLRETINQRCAASGYVPHSPDRYDDDVDGVAAFTSDLRQLDWPAGFKPTGIEKYDSTTNSESWLTVYGLAIRAAGGDSKAMANYLLVALADYAXGTFERPGTQFDLYNIIQKSGESLRDYIPRFSEQRNKIXDITVDVIIAAFTKGIRHDDLVGKFGRKPPRTVKQMFEKANEYAKAEDAITASKQSGTTWKPKKDTPTTVGSGSTNHKDCKRKPKELVATTTPSSRQRSRVNTFDKIMNSQCPHHPNSNHAAKDCFVYKQFAEQYAKNTRKTSDGDQSTSKKKDDEDDALTGFQDHRKELNHIFGGPLAYESKRKQKLTEREINAVQPDTPQYLRWSETTIKFDRSDHLDRVVHPGRYPLITLPVTFGTRENFRTKNICFEVTDFEIAYHAILGRPTLAKFMAVPHYTYMMMMMPGPRGVISLQSDIKQAVTCDKESCEMAHTREITLAREEIRLAASTISEGEVPTTKMPKNGESDAKTKKIPLDPSDPTKTAVIGVELDCIPREVIEHSLHVKEDAKPIKQRLHRFAQDRKDAIKEELTKLLAAGYHQIRLKESDCLKTSFIMPFGAYCYITMPFGLKNAGATYQRMIQRCFSTQIGRNVEAYVDDVVVKTKQKDELITDLEQTFASIRAFRMILNLEKCIFGVPSGKLLGFMVSHRGIQANPEKINAILNMKPPSSQKDVQKLTGCMAALSRFVSRFGEPGMPFFKLLKKTDNFQWGPEAQKAFEDFKKLLTTPPVLASPHSQEPLLLYVSATSQIVSTVLVVEREEEGHVQKVQRPIYFVTEVLADSKTXTLRLSGTGAGVVLISPTGERLSYVLXIHFSASHNVAEYEVLLHGLRIAVSLGIRRLIVRGDSQLVVNQVMKEWSCLDDNMTAYRQEVRKLEDRFDGLELTHVLRHNNEAADRLANFGSKREAAPSDVFVEHFYEPTVPRKEIIEATDTQDVTMIEADWREPLIRFLTKQELPQDKDEAERISRRSRLYVIHETELYKKSPLGILQRCVSLEEGRQLLKDIHSGICGNHAAARTIVGKAYRQGFFWPTAVSDADKIVRTCEGCQLFARQTHLPAQELQTIPLSWPFAVWGLDMVSPFKKAVGGYTHLFVAVDKFSKWIEAKPVITITADKARDFFINIVHRFGVPNRIITDNGTQFTGGVFKDFCEDFGIKICYASVAHPMSNGQVKRANGMVLQGIKAXVFDRLHPYAGKWVEQLPSVLWSLCTTPSRATGQSPFFRLKREDGTPIDNSWNIEHLH

SEQ ID NO: 184690 - protein, 66 aa, Oryza sativa
  unsure (1)..(66): unsure at all Xaa locations
  Clone ID: PAT_MRT4530_8165C.1.pep
PINAVAFVADGLXYWGVSDFAFAAYSTLFAGAVSSAVLLVAAPKFGLGGIWAGLALFMSLRAIAGL

SEQ ID NO: 184691 - protein, 330 aa, Oryza sativa
  Clone ID: PAT_MRT4530_81660C.1.pep
MANSRRPAAAATAPSPSPPASDLEVGFAKLQGEDFEYYMQTYSIVLGRHSRRRNQPVGVGVGVGVGGGGGGGGDAAADDVDVDLGILGGGMNVSRRHARIFYDFPRRRFALEVLGKNGCLVEGVLHEPGGEPVKLDSQDLLQMGDAQFYFLLPTRSVFATDAARRASAAARRAVPPPPSSSSDGDDGEEEREAAVAKRPRNGDAGSLAGRKSEKGSKGYRQSDNLQLLQLEEKDVISSTATVLSDLCGPQEWVPMDRLHEVMFEKYGDLWHHNRVRKYLTSEDWPKSETDGRPWHGLSLLLRKYPEHFVINIRMSGGRSIEFVSLVSLQP

SEQ ID NO: 184692 - protein, 416 aa, Oryza sativa
  Clone ID: PAT_MRT4530_81661C.1.pep
MACCFACLGAGGGKMKKKKKSPPQIPPASERDNPPNLASSTVMKQDQDSFQLAANEDILVSNGSSENRRIAARTFTFRELAAATSNFRVDCLLGEGGFGRVYKGYLETVDQASNLYSASCYHTANFCLIKLESLQLTVVAIKQLDRNGLQGNREFLVEVLMLSMLHHPNLVNLIGYCADGDQRLLVYEYMPLGSLEDHLHDPPPGKSRLDWNTRMKIAAGAAKGLEYLHDKANPPVIYRDLKCSNILLGEGYHPKLSDFGLAKLGPIGDKSHVSTRVMGTYGYCAPEYAMTGQLTLKSDVYSFGVVLLEIITGRRAIDNTRAAGEQNLVAWARPLFKDRRKFPQMADPALHGQYPSRGLYQALAVAAMCVQEQPTMRPLIGDVVTALAYLASQTYDPEAHGVHHTSRLMSPGTQGV

SEQ ID NO: 184693 - protein, 1017 aa, Oryza sativa
  Clone ID: PAT_MRT4530_81662C.1.pep
MARGSAPLDGSVLPPSRIVSERQAGLPRRFMPESATGREVVALGEGRPAPHYPGRSVFFLPFAMAGLVPSFSSFFMDVLELYDLQMAHLTPNAVMTLAIFAHLCEMFIGVRPSLRLFRWFFTVQPVSPPSVVGGCYFQPRGPVLNRYIPCVLRKKWDDWKSDWFYTPLADEARLRLPSQPPAQASSWRAPVDLGDGYDAVLDRLAGLRSQGLTGAMVFGDYLRRRIAPLQRHARGAWEYTGPEDIMRTHQGRKWDWDPEDFRIVVQRVLNLSSVEASFISQGVLPLSCDPERANILTIMQEVGASGERAPRGHDGAGGSRRGEQSTPGGGRASGPRDGGPGGSRPTDARGKRKQEDTPSPSPPRGGGAVRASSRRPEGAVPTSRPEGKRKKKRLHKMGGTEPYRGNLISPPRWSFSRPPRSEIPSRPSRHSKSGRSEAEETATAEARRRGADRRETANRLREAEEAAQEAVRACQAEEAAWEEARLHRAEESVRETEAARARRAACQASDPTPPEATTTSEATHDEAAGAPLGPDLSGDAQDGPASGDVPESGTSIGGTSRAASLPRRLSPMPSAAPLSAEPLLQALATANTTVLDGLSAQMEVLQAERAELDAAWARVEEGRRSVEAMVEAGRKAHRRHASELEARRRDLAEIAREVEEERETALIATAVFNAARDDLCLQYGSREAELEKKLNASRQREEALEARATVLEERARALDTKERELAGREAAVAIREATLAAHEAACAEEESALRLREDALTERERALEEAEAAAQRLADSLSLRGAAREEQARRNLEGARAERAALDQRAAELEARAKELDARARSGGAAAGDGDLAARLAAAEHTIAELQGALDSSAGEVEALRLAGEVGPGMFRDAVSRLDRAGRQAGLWGGRIAKYAANQGGLAQRLSEMAGTLQRLPEELEETIKSSSRDLARGAVELVLASYQARDPDFSPWAALDEFPPGTEDDARVQVRDAADHIVHSFEGTAPRLAFALDSDEEGGDGGDEAGDPGVSE

SEQ ID NO: 184694 - protein, 72 aa, Oryza sativa
  unsure (1)..(72): unsure at all Xaa locations
  Clone ID: PAT_MRT4530_81663C.1.pep
FFFFFFFFFFFXFFFFFFFXFFEXXXXXPPXXXTXXXXXXXFFQXXATYXKXFXTHPPNXQLSQXAKXSLXP

SEQ ID NO: 184695 - protein, 136 aa, Oryza sativa
  Clone ID: PAT_MRT4530_81664C.1.pep
MAWRNSGRVKVLNRRSSRMAVMAAAVLAVCSFAAVTMAQLEMDFYSKTCPNVEEIVRREMEEILRVAPTLAGPLLRLHFHDCFVRGCDASVLIDSTAGNVAEKDAKPNLTLRGFGAVQRVKDKLNAACPATVSCAD

SEQ ID NO: 184696 - protein, 466 aa, Oryza sativa
  unsure (1)..(466): unsure at all Xaa locations
  Clone ID: PAT_MRT4530_81665C.1.pep
MARGSAPLDGSVLPPSRIVSERQAGLPRRFMPESATGREVVELGEGCLAPHYPGRSVFFLSFAMAGLVPPFSNFFMDVLEFYDLQMAHLTPNAIMTLAIFAHLCEMFIGVRPSLRLFRWFFTVQPVSPPTVVGGCYFQPRGQVLHRYIPCVLRKKWDDWKSNWFYTPLADEARLRLPSQPPAQASSWRATRRARGAWEYTGPEDFMRTHQGRKWDWVPEDFRMVVQRVLNLSSVEASLIPQGVLPLCSDPDRANILTIMQAVGASGERVPRSHDGAGGNRRGKQSTPGGGHASGPRDGGPGGSXPADARGKRKQEGTPPPSPPQGXGAVRANSKRPEGAVPTSQPEGEREKKRLRKMGGXEPCRGNLISPPRWSFSRPPRRSRRAPPPPPRHSKSGRSEAEETATAEARRREADRREAADRLREAEEAAQEAVRVRQAEEAXAREEARLRRAEEFVREAEAAHARQ

SEQ ID NO: 184697 - protein, 112 aa, Oryza sativa
  Clone ID: PAT_MRT4530_81666C.1.pep
MARVSAGKTKRRSDFGVYFSRIKNPEGTDARWTTEEDPLLLPQLRPPTPFLYFSFSVEARGYTVDDDRSSRAVAEPVHHRQDFVEPRLLLAEITPEEDDFNGDVSFFQDGSY

SEQ ID NO: 184698 - protein, 129 aa, Oryza sativa
  unsure (1)..(129): unsure at all Xaa locations
  Clone ID: PAT_MRT4530_81667C.1.pep
PMSEAVLLWERDKSLNQTRYNLSPFAISLNELTANLAKKLPPTDSRLRPDQRHLENGEYEMANAEKLRLEQLQRQARRLXEKGWQPRWFSKDDDDSYRYIGGYWEAREKGNWDGIPDIFGQRSASPGWS

SEQ ID NO: 184699 - protein, 133 aa, Oryza sativa
  Clone ID: PAT_MRT4530_81668C.1.pep
MDFSPLLSLVPRNESCYTKEYDLHVSHIFGGSTSYTSKREYKKAEHEVCSTSQTTTTKMKWSQHKIKLSEADHPKIATTPGRYPIVVEATIRNIKVARVLINGGSSINLFFASTLDAIVIPQSELTPIDQPFH

SEQ ID NO: 184700 - protein, 619 aa, Oryza sativa
  unsure (1)..(619): unsure at all Xaa locations
  Clone ID: PAT_MRT4530_81669C.1.pep
RRDPTPPRREGLDLREHLNRRRRNRRDRNENDRRRREDDGRRAFTPTLRNVRWPEKFRPGSIEKYDGSXPEEFLQVYSTVLYAASADVNALANYLPAVLKGSARSWFVHLPLNPISSWEDLWQQFVPHFQGTYKRHTMEDDLHALTQNPGESLREYIRLFNECRNTIPEIIDTSIIRAFKSGVRDRYTSQELATRRITSARXAIRDHLAPSRRSNPQSDDSRKAWCPIHKTSNHAMEDCYVTPGNSLIISEVIFWCPAMNHAIQKVKPLPTLASDSAFPEYDLHVSHIFADHPKIATTPGRYPIVVEATIRNIKVARVLINGGSSINLFFASTLDAIVIPQSELTPIDQPFHXITPESSSKPLGKNTLPVTFGHAKNFXKLLKAGFIREVLYPEWLANPVMVRKANGKWRMCVDFTDLNKACLKDQFPLPRIDQLVNSTAGCELLSFLDAYSSYHQISMAKEGEEKTVFITSLGVFCYTKMPFGLISARNTYQRGIHGALGTQLGQNVEAXVDDIVVKIKKSDSLIDDLRETFDNLRTYQMKLNPDKCTFGGPLGKHLGFLVSGRGIEANPEKIKAIENMKSPTRLKEVQRXTRCMASLSRFVARMGERGQPFFALPKC

SEQ ID NO: 184701 - protein, 305 aa, Oryza sativa
  Clone ID: PAT_MRT4530_8166C.1.pep
MAPRAKGRGLLRGELTMMELINFSDEDLHKFTKGFSEKRLLGKPGAFGQVYKGRNKGNNYANCPRKVAIKISKRKDEYVRIMWKINALSSISHANVINLVGFADTEEYYALVYERAKQDLEGFRASNKGELDAILLGVASGLEAIHSAGFVHWDIQLRNILLMKDNTVKIADFGLATRKGEKMSFFKDRRFGIFNANDKESAQEKIGVFCFGNLIRELVLLERKEWSPTKCPRILLADTCIVNNPDDRPSMATLVSKLKVPCSAMVNWLLKLEKCACIYNNIELENVDTIEEYDVVLYAQHTTRV

SEQ ID NO: 184702 - protein, 134 aa, Oryza sativa
  Clone ID: PAT_MRT4530_81670C.1.pep
MDKSETVKQMSLKPLEYSFFLPLSVQAYEEFLALENEMIQLHLQMSNGDRRSYIWNSERPLVWLWKICCVMKTKPEMLTASRNYVEHRYRLLPNDSVGLVTFFTKMLLGIFLHLMLAYMETKEWTNLPECASKL

SEQ ID NO: 184703 - protein, 57 aa, Oryza sativa
  Clone ID: PAT_MRT4530_81671C.1.pep
TSRDTQVMIMLRPHVFVLIPFSDDNLCDASGSRHVIKKDVLCETDHSVPCVHFDHPY

SEQ ID NO: 184704 - protein, 651 aa, Oryza sativa
  Clone ID: PAT_MRT4530_81672C.1.pep
MVTSALLGVYIFTAGLPSSPLTGVSTYTLAYYAAVVTRLRLHRWPASIAADWCPRLYDWLVTPPFMGVHVFTDRLAFDAADWNGSVITSPPACLRLPPTGVIAYTIGWSHHRCWASMTSPSACLRHRRLVCLRQYGWLVTPPLMGIVIITAGLTSPPPTDVSAYTVGVYIFTKRLPSPPPARLAYYAAIDGRLRLHHRLAYATADRCPRLHGWLVVPPLLGVIVFTNQSPRLSSIGVLTYTVGCVFTFMIGLLCRGCWQLRLHYRLASIAANWCYRLHGWPMPPPLLTSVIIFNCPRLYGCWLVIPSLIGIIVFVFGLPLPHRPWCLCFHDWPIMLPLKDVFLFIIIQLLPSPSGYAIANCTTRLRYWFASVAVDSCSRLHNYETLSPWWSNFIFIVFCTGKPNCCYFASFATSPTTTSRHALPRFDAVLFYYNKWFFNIQYFYSDIGRCISLRYAHACIKETTRASIYSQQFDGLLSLTSSAAPLLHRPPTSPPLLRGDYVFAIVCFCHCRLVISPSRLTYYANVVVIIIGCYTTIDWITDIVIFINILSSLFNIAYSTTTDGQLRHHSQSSLLLLIVITFGCLSHLSPIDYFAAMATQLCRCCWVLSSSLLAGLSAADWFLRRHGYVTSSPLIGVIVFTTTKIFVSFDG

SEQ ID NO: 184705 - protein, 585 aa, Oryza sativa
  unsure (1)..(585): unsure at all Xaa locations
  Clone ID: PAT_MRT4530_81673C.1.pep
MEVVFQLDVAQESRVLTNDERQLYSNLKARILGLSVLNKLKIRQRSRLTWIKEGDVNSKFFHIKATSRRRKNFIQSLKTPSGLAVSAKDKEDELFRFYSEKLGTNFQRTKNLNWTNLQLPSFNLSELEEDISEEELRGTIFGMPPEKAPGPDGFIGAFFKVAWEIIKGDLLAAVTSFMNLSTSHLEELNSAYIFLLPKKDDASGADHFRPISLVHSFTKIITKVLANRLALRLNEMISQNQNAFVRKRAIHDNFIFVQNLVQRLHRTRKQSLFIKVDIAKAFDMVCWPYLLDVLRQFGFGNRWLNWICNLFATSSSQVLLNGAPGQPIPHARGLRQGDPLSPMLFILAMEPFHWILKAAEGASILSPLESNRNRFRCSLYADDVAVFTRPDATELTTLSKLLNFFAQVLGLHTNVAKTEIFPIRCEGIDLAPLLQIFPGTIKSFPCRYLGLPLHYRKLRKIDFLPLIEKIGSRLPTWKGRFFSSSGRETLVKTVLSSMPIHHLSALQMPKWVFKRIDRFRRSFLWKGEDPDHSNPGSCLVNWQTVCRPKSLGGLGLLDLEKFSRALRLXWLWLKWKDEDKPWAGM

SEQ ID NO: 184706 - protein, 968 aa, Oryza sativa
  unsure (1)..(968): unsure at all Xaa locations
  Clone ID: PAT_MRT4530_81674C.1.pep
MAHKYFWYIMVTEFIRKRTDIPFFGGNVSPGWKAIEHGLSLLKEGIISRVGNGRLVRICWALKLKNMSKCSGSSSEISCKAWDLIWKNAAPQKVKIFARKVAVNCLATKENKFKRTLESDALCSICGTANEDTAHALCQCPQARSLWLSMYDAGTILSVPAVGRMNPNWLFDQLAMLSEDERMSYISSLFNIRQQSPAGSVKGKAVIPSTPRRCRGPDGSSSASKMRWERPQEGWMKANVDGSFDSQQLKGGIGVVIRDWEGALIQSKERAMSEQAYLVREIRDLLDGSREFVLRKIRREQNMVIHFLANKGRSATSRVATIAPEPPLPPHDAAVKEEEVNVEGEEVAILGGWEDREERIGDGSFSGDLGTAMGLGKSSSTGATLKNLQEDGALPGHGDMERENRWFYLEIKDSNPVFVVPEDQPDKIPAWTAKPPLTPSLQSFIDIIDDLRERGLSGYEVAADFVGLSSEAVERRVDQVMISGPTTASDIPVPLCEKGAAERDEAINALPLTNIIGPLADHQVATSLKEKVVKEASDAATTSAGKVPTKARKFSSRIVTIGEKEARAKAARAKSERASSASPATASTDVVPVTGSREATPSGPVSDPAVGRDLPAAVLTWEELQVEMGRLLEAGAHGIGREISEARSEAATANARAERLVRELAEAREDLTKMRELVAGNKRQRKGLEDRMSELGDNLSEIRGSLRVTYTGLYQLAEECGVKSTIPANPDEFSLTSSLAELATAMGEIPSKHAARIAEETSNDIYTGACHVLADVDDEDVQQRGQPELLAMIPVLDFEPHVSFDNVDQTLDAEAGMATATSNLEGALANQDRCIQYWKTKFEVAELERTMLALKKEQAVETVRGREVWFNSYLKSCCASMARVCRELRVVRGDPEESAAGYISWLTGACAQLDVIGKHIDEALKQECRRASRYAVGHVLACLRXTTRAXTSSFSAKVLLVLGELRRR

SEQ ID NO: 184707 - protein, 69 aa, Oryza sativa
  unsure (1)..(69): unsure at all Xaa locations
  Clone ID: PAT_MRT4530_81675C.1.pep
SYITGIEEVNIFMADVDMHFQIAKEQASIXANTWVVSETLQTKMLHDLLATIINQLLPDNXLDNLRRLA

SEQ ID NO: 184708 - protein, 42 aa, Oryza sativa
  Clone ID: PAT_MRT4530_81676C.1.pep
LYLYIASINTRVGFFKNVVRYLPFPTRRHPFILQHLQPASTA

SEQ ID NO: 184709 - protein, 284 aa, Oryza sativa
  unsure (1)..(284): unsure at all Xaa locations
  Clone ID: PAT_MRT4530_81677C.1.pep
TRERAIRHATQERLPIVVVINKVDRLITELKLPPNDAYFKLRHTLEAINDLISSCSTTVGGTQLVDPAAGNVCFASGSAGWSFTLQSFAHLYLKIHGIQFDHEKFASRLWGDLYYHPDTRTFKKKPPKEGANRSFVEFVLEPLYKIYSQVVGESKGKVEATLSELGVTLSNAAYKLNVRPLLRLACRSIFGTSTGFTDMLVKHIPSVKDAAPRKIEHIYTGPQDSTIVDAMKKCDPHAPLMVNVTKLYPKSDCSVFDAFGRVYSGTIQTGQXVRVLGRSYSSDD

SEQ ID NO: 184710 - protein, 742 aa, Oryza sativa
  Clone ID: PAT_MRT4530_81678C.1.pep
MEREVGGTDPQPLLGRMVVIEDYVLCGFLPPPSEFLLLVLNFYGLSLLHLNPNSIAFLSIFVHLCEAYIGVEPFLDLFRFYYELRWMESNRVSGCVGFRLRDGMKSRYIPFQCPSSRSKWRNRWFYLEIKDSNPVFVVPEDQPDKIPAWTAKPPLSPSLQSFIDIIDDLREQGLSGYEVAADFVGLSSEAMERRVGQVMISGPTTASDIPVPLCEKGAAERDEAINALPLTDIIGPLADHQVATSLKEKVVKEASDAATTSGGKVPTKARKFSSVLGHCRKAATPLGIILSSDRAARRVSSYSVLIVFQASDASPPPPRRQRIVTIGEKEARAKAARAKSGGASSASPATASTDVVPMTGSREATPSGPINNPAAGRGLPAAVLTWEELQVEMGRLLEAGARGIGSEISEARSEAATANARAERLLAEECGVKSTIPANPDEFLLTSSLAELATAMGKIPSKHAARIAEETSNGIYTGACHVLACVRLSRPELDLREILDQGAASDTRKEVMEEVSDLGESVLPLFEEDVDDEDVQQRGQPESLAMIPVLDFEPHVSSDNVDQTLDAKAGMATATSNLEGALANQDRRIQYWKTKFEVAELERTMLAVKKEQVVETLRGREVWFNSYLRSCCASMARVCRELRVVRDDPEESAAGYISWLNGACAQLDGIGKHIDEALKQECRRVSRYAGVHMLACLRDHRPRLDLEFLRHGFARSRRTPAEIDHLARSMSPLAEKIFQSMD

SEQ ID NO: 184711 - protein, 601 aa, Oryza sativa
  Clone ID: PAT_MRT4530_81679C.1.pep
MDLGKSSSTGATLKNLQEDGALPGHEDMEREVGGTDPQPLLGRMVAIEDYVVCGFLPPPSEFLLLCPSSRSKWQNRWFYFEIKDSNPVFVVPEDQPDKIPAWTAKPPLTPSLQSFIDIIDDLRERGLSGYEVAADFVGLSSEAVERRVGQMMISGPTTASDILVPLCEKGAAERDEAINALPLTDIIGPLADHQVATSLKEKVVKETSDAATTSEVPTKARKFSSVLGHRRKAATPSASDASPPPPRRQRIVAIGEKEARAKAARAKSGGASSASPATASTDVVLVTGSREATPSGPVSDPAAGRGLPAAVLTWEELQVEMGHLLEAGARGIGREISEARSEAATANTRAERLVRELAEAREDLTKMRELVAGNERQRKGLEDRMSKLGNNLSEIRHSLRVTYTGFHQLAEECGVKSTIPVNPDEFLLTSSLAELATAMGEIPSKHAARIAEETSNDIYTEACHVLACVRLSRPELDLREILDQGAASDTRKEVMEEVDLEGALANQDRRIQYWKTKFEVAEHERTMLAMKKEQAVETLRGREVWFNSYLKSCCASMARVCRELRVVRSDPEESTAGYISWLNGAYAQLDGIGKHIDEALK

SEQ ID NO: 184712 - protein, 771 aa, Oryza sativa
  Clone ID: PAT_MRT4530_8167C.1.pep
MSPMESRPDDLVPPAMHKPAIQCAAAEDASLLRSPTVSSEEFMQFKRKATTILEEYFSTDDVAATANELRELRVPCYHYYFVKKLVSVAMDRHDREKEMAAVLLSSLYGDVIDRPQVYKGFGKLAESCDDLSVDTPDAVDILAVFVARAIIDDILPPAFLAKQLTCLPEGCKGAEVLHRAEKSYLSVPHHGEIILQRWGGSKSITVEEAKAKIADILEEYLAAGDIGEACRCIRGLKISFFHHDIVKRALTLAMERGGGAEGHILDLLKSASDEGIINESQITKGFNRLIDSVDDLTLDVPNARRLLKSMILKASSEGWLCASSLKPLGPEPKKAVVEDDAAVRQFKAKTLSIIKEYFLTGDIIEVMSSLEAENYACSSSYNAIFVKKLITSAMDRKSREKEMASVLLSSLGMPPEDVVSGFHLLIESAEDAALDNPAIVEDLTMFFARSVVDEVIAPSNLEKMEEEAGRGKPGGSSTGLLALRNARALLGAKLSAERILRCWGGGATGKAGWELDDVKDKIGRLLQEYDCGGDIREACQCIKELGMPFFHHEVVKKALVAIMEKRGKDERLWGLLAECYGRGLITPNQMTKGFERVAGCVDDLALDVPDAGKQLCCYVERAKKGGWLDASFPNEATPVTADTAANVQTSRCAMLGLVATGITGGALAQAALTKAAKPIKLGLLPLPSSEGEVLPAAVAASGGGGEGKGGEAVAGAGCWRHAMSRGRRRGWVRRRARAAGEEPRPAAGRRGGGCRRRVRDQRRQPGGAETG

SEQ ID NO: 184713 - protein, 746 aa, Oryza sativa
  Clone ID: PAT_MRT4530_81680C.1.pep
MDLGKSSSTGATLKNLQEDGALPGREDMEREVGGTDPQPLLGRMVAIEDYVFCGFLPPSSEFLLLMLNFYGLSLLHLNPNSIPFLSIFVHLCEAEPFLDLFCFYYELRWMESNRVSGCVGFQLRDGMKSRYIPFQCPSSRSKWRNKWFYLEMKDSNPVFVVPEDQPDKIPAWTAKPPLTPSLQSFIDIIDDLRERGLSGYEVAADFVGLSSEAIERRVGQVMISGPTTASDMPVPLCEKGAAERDEAINALPLIDIIGPLADHQVATSLKEKVVKEASDAATTSGGNVSTKPRKFSSVLGHRRKAATPSASDASPPPPRRQRIVTIGEKEARAKAARAKSGGASSASPATASTDVVPATRSREAMPSGPVSDPAGGRGLPAAVLTWEELQIEIGRLLEAGARGIGREIAEARSEAVTENVRADRLVRELAKAREDLTKMRELVAGNERQRNGLEDRMSELENNLSEIQGLLRITYTGLHQLARECGIKSTIPVNPDEFSLSSSLAELATAMGEIPSKHAARIAEETSNGIYTGVCHVLACVRLSRPELDLREILDQGVASDMRKERGQPGSLAIIPVLELGPHISPDNVEQTLDAETMTASNLEDALASQDRRIQYWKTKFEVAELERTMLAVKKEQAVETLRGREVWFNSYLKSCCASMARVCRELRVVRGDPEESAAGYISWLNGACAQLDGIGKRIDEALKQECRRASRYAGGHVLACLRVTARAWTLNFTAKVLLVLGEIRR

SEQ ID NO: 184714 - protein, 595 aa, Oryza sativa
  Clone ID: PAT_MRT4530_81681C.1.pep
MPLTYNLQVEIFDVWGIDFMGPFPKSRNCEYILVAVNYVSKWVEAMPCSAADARHAKKMFTEIIFPRVKLFGHRKLRSKWEGPFDVIDTSLHGAITLRDDSGNIFKARRLFQDDGKAAPPPAEHYVGTLFTKAGDEGVQTPGGGYGKGLLRPLIASEKEGAAESRSPPPMKVKRHLTPPPIVRTPGQYQEDEVKSPEPSIHKLAAQVKKLRKENIEFRDHNAELGALCDLGASVSIMLKDVFDKLNFTVLAPTPMRLQLADSSVCYTAGIEEDVPVKIRDFFILVDFVVLDMDTGKETPLILGRPFLSTAGANFDVGTGSIRFHIDGKEVKFEFQPRTEQCSMVRIKEGNNDAQEPLLEDAGKTTHTGQEARAANSEEAALRTKANEGVEGEAKDARSITSRDGMRRRLSRLFKGSGSSSSHHDESSTRSSAVVSMEDAKAPRRLLNGTDIDHVNDRERQAYYMLSDWEYAHTREYSPELLKKIGYHLYNYRELTIPLQTIEESRAGGAYRETRNMARNERKSSSSSTPVQMYEAGWEPTADAPGWTQAPRHSIGTGEIQYNLTEHIAQMQEWQQATDAQFANINNMMHQQGDDL

SEQ ID NO: 184715 - protein, 80 aa, Oryza sativa
  Clone ID: PAT_MRT4530_81682C.1.pep
PEKVPSASPVEKKEREHRRRTGLIGRASVHVQHLGWQGQLPLQAIICLKSTSVFVCVCVTDRLSLASLLRYTLPIAIASP

SEQ ID NO: 184716 - protein, 710 aa, Oryza sativa
  Clone ID: PAT_MRT4530_81683C.1.pep
MTQAHSKSCFHQFWDGLQIKRSSDSFTVELLPSLGATINHSNKLQKFIISPYDPRYRSWELFLIVLVVYSAWICPFELAFLRDLPSKLLLVENIVDIFFAIDIVLTFFVAYVDSKTHLLVDDRKRIAMRNPTFGIEKGPNDSALTLANYDHLQHHFNQSSFYLHTRGMTLLSRLEKDIRFNYFWTRCSKLISVTLFAVHCAGCFNYMIADRYPNPEKTWIGAVMSTFRSESLWTRYITALYWSITTLTTTGYGDLHAENPTEMLFDIVYMMFNLGLTAYLIGNMTNLVVHGTSRTRKFRDSIQAASEFAARNQLPENIKQQVLSHFCLQFKTEGLNQQVMLDCLPKGIRSSIAYSLFFPIIRQAYLFNGVSGNFIAELVMEVQAEYFPPKEDIILQNEGEADVYIVVSGAVNIITTIHGNEQVYEKIAEGEMFGEVGSLCNIPQPFTCRTAELSQLLRISKTRLREIIEENREDSNILMNNLVQKLKLRESLPDMNQPDRRFLSKYELFHVPREAWLLKKSQLHYTEHTSRDSSNNTPVFGGDRYSRQLLGEATRSSASENENSSMTDKEENHDEVHTNCEIKKRTEEHCIQINSEDSSSTYSQRTMNATVQTGSPHKTEENITRRIPDEYYIKEANKRVTIHKYRHNSTVSAAQNGKLIKLPTSLEELFKIGSQKFQGFHPRKVVSRDYAEIDDVSVIRDGDHLFLLEM

SEQ ID NO: 184717 - protein, 63 aa, Oryza sativa
  Clone ID: PAT_MRT4530_81684C.1.pep
QESNAFGHQARGVVKTGRQCQKDGPPAQGSEAPFRDRKKVITGQYGFNHGIAQDHGLLEDGSP

SEQ ID NO: 184718 - protein, 595 aa, Oryza sativa
  unsure (1)..(595): unsure at all Xaa locations
  Clone ID: PAT_MRT4530_81685C.1.pep
MDLGKSSSTGATLKNLQEDGALPGRGDMEREAGGTDPRPLLGRMVAIKDYVLCDFLSPPSEFLLLVLNFYGLSLLHLNSNSIAFLSIFVHLCEAYIGVELFLDLFRFYYELRWMESNRVSGCVGFRLRDGMKSRYIPFQCPSRSKWRNRWFYLEIKDSNPVFVVPENQPDKIPTWTAKPPLTPSLQSFIDIIDDLRERGLSGYEVAADFIGLSSKAVERRVGQVMISGPTTASDIPVPLCEKGAAERDEAINALPLTDIIGPLADHQVATSLKEKVVKEASDAATTSAAILTWEELQVEMGRLLEAGARGIGREISEARSEAATANAHPWLVAGHLHWPPSARRGVRRQVHDPGESRRVFADFLSCGTGDSDWGNPLQACGQDREGDVEWHLHWGVSRPRVCKXSRPELDLREILDQGAASDTHLEGALANQDRRIQYWKTKFEVAELERTMLAVKKEQVVEMLRGREVWFNSYLRSCCASMARVCRELRVVRGDPEESAAGYISWLNGACAQLDGIGKHIDEALKQECRRASRYAGGHMLACLRDHRPRQDLEFLRHGFARSRRTPAEIDHLARSMSPLAEKIFQSMDWRWPSW

SEQ ID NO: 184719 - protein, 932 aa, Oryza sativa
  unsure (1)..(932): unsure at all Xaa locations
  Clone ID: PAT_MRT4530_81686C.1.pep
MAKGGRAFIQSNSDKYRSPNHSLPSXEGNDVGILYSPTVGANLVSESFAFAYLSDKVVTPTTKFFKHPNGNIIEGFGIVQDVPVCFEDREAILDFHVFEIQYFDILVGLPIEQLLINTPRLGNLKITRGENEFSIPFSQARITLTDTLLEIESAEEVTAVPPHESPEALLEDEVPDFIKEEADPGETLDLPIMEPPPRPPLELKPLPPGLRYAFQHNDKEAPVIISDKLSEDETQRLLTVLEKHHSVLGYSLQDLRGINLALCTHHIPIDPESTPSRMSFGLCSAPASFQRCMMSIFSDMIEDIMEVFMDDFSVYGKTFGHCLQNLDKVLQRCQEKDLVLNWEKYKKHHAICYASKTLTGAQLNNATTEKELLAVVLAIDKFRSYLVGAKEQPINDFLRDDMLMTVSDSNPWYANIVNYIVSKYIPPGENQRKLKYESRRDIWDEPYLYRVCSDGLLRRCVPTEGLKIIERCHASPYGGHYGAFRTQAKIWQSGFFWPTMYEDSREFVRRCTSCQRQGGITARDAMPLTYNLQVEIFDVWGIDFMGPFPKSRGCEYILVAVDYVSKWVEAMPCSAADTSGQAETSNKQIKNILQKTVNKMGTGWKDRLPDALWAYWTAYKTPIGMYPYQIVYGKPCRLPIELEHRAYWAIRNWNMDFEGAGEWRKMQIAELEEWREKAYHNAKIYKERTKRWHDKRIKIKKFKPRDKVLMFKSRVKLFGHGKLRSKWEGPFDVIDTSSHGAITLHNESGNIFKARCLFQDDGKAAPPPAERYVGTLFTKAGDEVLHKYTTPTVTPSTPKGERFRIQGVRTPGDGYGKGLLRPLTALEKEGAEESRSPPPMKVKCYLTPPPIVRAPGQFQEDEVKSPEPSIHKLAAQVKKLRKENIELRDHNAELGVELAELRNSFDTLSRGLCAKIKRAFIDMGKENKYYAN

SEQ ID NO: 184720 - protein, 67 aa, Oryza sativa
  Clone ID: PAT_MRT4530_81687C.1.pep
PFAAPTLRVSSVYLSMSPRSRLPDDGLLMSPHQSCICTHWMRPLAHLFTVLAADFSLDNDVVVSLLI

SEQ ID NO: 184721 - protein, 605 aa, Oryza sativa
  Clone ID: PAT_MRT4530_81688C.1.pep
MDLGKSASTSATLKNLQEDGALPGRGSMEREAGGTNPQPILGHMVAIEDYVLCGFLPPPSEFLLLVLKFYGLSLLHLNPNSIAFLSIFVHLCEAYIGCPFSRSKWRNRWFYLEIKDSNPVFVVPEDQPDKIPAWTAKPPLTPSLQSFIDIIDDLQERGLSGYEVVADFVGLSSEVVERRVGQVMISGPTTASDIPVPLCEKGATERDEAINALPLTDIIGPLANHQVATSLKEKVVKEASDAATTSGGNVPTKPRKFSSILGHRRKAATPSASDASPPPPRRQRIVMIGEKEARAKAARAKSGGASSTSPAAASTDVVPAAGSREATPSGPVSDPAGGRGLPAAVLTWEELQVEMGRLLEAGARGIDREIAEARSEAATVNARADRLVRKLAEAHEDLTKMRELVAGNERQRKGLEDRMSELGNNLSKIRGSLRFCMLISEAFVHCRDADDEDVQQRGQPESLAIIPVLELEPHISPDNVDQTLGAEAGIATTTSNLEDALESQDRRIQYWKTKFEVAELERTMLAVKKEQAVETLRGREVWFNSYLKSCCTSMARVCRELRVVRGDPEESAAGYISWLNGACAQLDGIGKRIDEALKHECRRAS

SEQ ID NO: 184722 - protein, 515 aa, Oryza sativa
  unsure (1)..(515): unsure at all Xaa locations
  Clone ID: PAT_MRT4530_81689C.1.pep
MAKGGRAFIRSNSDKYGSPNHSMPSXEGNDVGILYSPSVGANLVSESFALAYLSDKAVSPTNKFFKHPNGNIIEGFGIVQDVPVCFEDMEAILDFHVFEIQDFDILIGLPIEQLLINTPRLGSLKITLGENEFSIPFSRARITLTDSLPEIESAEEVTAVPPHESPEALLEDEVPDFIKEEADPGPCLIISDKLSEDETQRLLTVLEKHRSVLGYSLQDLRGINPALCTHRIPIDPESTPSREPQRWLNNAMREVVKKEVLKLLHAGIIYPVPYSEWPLAAVPGSPENLEPVDELPGSTKPGVRPNPSRPRSAPCSAARSLSPRHVTRTKIRGDSPAQRLTMGELGLLKACRLFQDDGKAAPPPTECYVGTLFTKAVDEVLTRGAIPHSGSANSRGRYGKGLLRPLMASEKEGAAESRSHPPMKVKRHLTPPPIVRAPGQFQENEVKSPEPSIHKLAAQVKKLRKENIELRDRNAELGVELAEIRNNFDTLSHGLCAKIKRAFIDMGKKNIYYAN

SEQ ID NO: 184723 - protein, 38 aa, Oryza sativa
  Clone ID: PAT_MRT4530_8168C.1.pep
PQRGFNFIRQTFMGQQNVKLGCKRFRPILLEALENLNP

SEQ ID NO: 184724 - protein, 610 aa, Oryza sativa
  Clone ID: PAT_MRT4530_81690C.1.pep
MPARSAGGGAPASLWSPAAAIGTAEWRPREGRERGKRGGGPRLTPRRRRRRRRRQKRRDAVARLGSTGSAALRRSATETEGWTRVVLGRDMISGPTTASYIPVPLCEKGAAERDEAINALPLTDIIRPLADHQVVTSLKEKVVKEAYDTATTSGGKVPTKARKFSSVLGHRRKAATPSASDTSPPPPRQQRIVTIGENRDGRLLGAGTRGIGHEISEARSEAATANVRAERLVRELAEAREDLTKMRELVAGNDRQRKGLEDRMSELGNNLSEIRGSLWVTYTGHHQLAEECGVKSTIPANPDEFSLTSSLVELVMAMGKIPSKHAARIAEETSNGIYTGACHVLACVRLSHPELDLREILDQGAASDTRKEVMEEVGDLGESVLPLFEEDVDDEDVQQRGQPESLAMIPVLDFEPHVSSDNVDQTLDAEAGMATATSNLEGALANQDRRIQYWKMKFEVAELERTMLAVKKEQVVETLRGREVWFNSYLRSCYASMVRVCRELRVVHCDPEESAAGYISWLNGACAQLDGISKHIDEALKQECCRASRYAGGHVLACLRDHRPRLDLEFLRHGFARSRRTPAEIDHLARSMSPLAEKIFQSMDWRWPSW

SEQ ID NO: 184725 - protein, 284 aa, Oryza sativa
  unsure (1)..(284): unsure at all Xaa locations
  Clone ID: PAT_MRT4530_81691C.1.pep
CSTPGLSFLATKNCAVNGKDRSTSSTPLRTGQSHSATTQELVGLGREVEACQIHQGKSLIPFIRSSSNSTYNLTGEPTPTNQLIPLCRAPLQIWSPTAXLPGSAEPGPLGPVRPPARRLFQDDGKAVPPPAERYVGTLFTKAGDEVLHKYVIPTATPSTPMEERFRIQGVRTPGGGYGKVRAPDQYQEDEVKLPEPSIHKLAAQVKKLRKENIELRDRNAELGRDRASGSAEPKLAPIPPNFHRYAPIYPYQAPHISLRIGMNYGTFFLGTSKGLSVGGFVGGC

SEQ ID NO: 184726 - protein, 70 aa, Oryza sativa
  unsure (1)..(70): unsure at all Xaa locations
  Clone ID: PAT_MRT4530_81692C.1.pep
PTRPLDRFFPRFPYYTNGSPRLAGRRRWSSGGCGRRRRGVPDGAARRHAGGACGGGXQPEXXDAERPAEP

SEQ ID NO: 184727 - protein, 414 aa, Oryza sativa
  unsure (1)..(414): unsure at all Xaa locations
  Clone ID: PAT_MRT4530_81693C.1.pep
MAESSAIWYLTHNHFSDYMSRNMAENAKRLIGRRFTDASVQSDIKLWPFKVIAGPGDKSTIVVQYKGEEKQVAAEQIDDETISPSVCYADPYDGGLCASYADAKRLIGQRFTDASVQSDIMLWPFKVIAGPGDKSMIVVQYKGEEKQFAAEEISSMVLIKMREIAEAYLGTTIKKAVVTVPAYFNYSQRQATKDARVIAGLNVMRIINEPTAAAIAYGLDKKASSVGEKNVLIFDLGGGTFDEFKRKSKNDITGNPRPVGRLRTACEWAKRTLSPPLPRPPTIEIDSLYEGIDFYSNITCARFEELTMDLFRKCMRXIPRWTKSSVHDVXLVGGSTRIPRVQQLLQDFFNGKELCKNINPDEAVAYGAAVQAPIXGLETARGVMTXRSRPVFSTYSDNRPGVLIQVYEGDGRGP

SEQ ID NO: 184728 - protein, 713 aa, Oryza sativa
  unsure (1)..(713): unsure at all Xaa locations
  Clone ID: PAT_MRT4530_81694C.1.pep
MATFPSGDDNQSDGGIFSSRLLKSILIIPIKQQFIYLGFLGCDMTPTNKFFKHPNGNIIEGFRIVQDVPVCFEDREAILNFHVFEIQDFDIFIGLPIEQLLINTPRLDSLKITLGENEFSIPFSRARIALTDPLPEIESAEEVTAVPPHESPEALLEDEVPDFIKEEADQEPPPRPPLELKPLPPGLRYVFLHNDKEAPVIINDKLSEDETQRLLIVLEKHRSVLGYSLQDLRGINPALCTHRIHIDHESTPSRELQRQLNNAMREVVKKEVLKVLHAGIIYPVPYSEWGGMTVIANARNELNPQRTITGWRMCIDYRKLNKATKXDHFPLPFIDEMLERLANHSFFCFLDGYSGYHQIPIHPEDQKFRQSLTTMPRKGCGAXWEKCHFMDTPAFYDFSTIARPLTNLLAKDAPFEFYGACLKSFEILKKALVSALMIQPPDWTLPFEITCDASDFVVGAVLSQTKDKKHQAICYASKTLTGAQLNYATTEKELLVVVFAINKFRSYLVGAKVIIYTDNAALKYLLTKKDAKPRLLRWILLLQEFDLEIKDKKGVENSVTDHLSRLQITDMQEQPINDFLRDDMLMTVRDSNPWXKIWKSGLFWPTMYEDSKEFVRRCTSCQRQGXITARDAMPLTYNLXFMGPFPKSRNCEYILVAVDYVSKWVEAMPCSATDARHAKKMFTEIFPRFGTPRIVISDEGSHFIDKTFRDLLR

SEQ ID NO: 184729 - protein, 208 aa, Oryza sativa
  unsure (1)..(208): unsure at all Xaa locations
  Clone ID: PAT_MRT4530_81695C.1.pep
EPTAAAIAYGLDKKASSVGEKNVLIFDLGGGTFDVSLLTIEEGXKATAGDTHLGGEDFDNRMVKHFVQEFKRKSKKDITGNPRPVGRLRTACEWAKRTLSPPLPRPPTIEIDSLYEGIDFYSNITCARFEELTMDLFRKCMRXIPRWTKSSVHDVXLVGGSTRIPRVQQLLQDFFNGKELCKNINPDEAVAYGAAVQAPILVWRRPEE

SEQ ID NO: 184730 - protein, 687 aa, Oryza sativa
  Clone ID: PAT_MRT4530_81696C.1.pep
MDLGKSSSTGATLKNLQEDGALPGREDMEREVGGTDPQPLLGRMVAIEDYVFCGFLPPSSEFLLLMLNFYGLSLLHLNPNSIPFLSIFVHLCEAEPFLDLFCFYYELRWMESNRVSGCVGFQLRDGMKSRYIPFQCPSSRSKWRNKWFYLEMKDSNPVFVVPEDQPDKIPAWTAKPPLTPSLQSFIDIIDDLRERGLSGYEVAADFVGLSSEAIERRVGQVMISGPTTASDMPVPLCEKGAAERDEAINALPLIDIIGPLADHQVATSLKEKVVKEASDAATTSGGNVSTKPRKFSSVLGHRRKAATPSEARAKAARAKSGGASSASPATASTDVVPATRSREAMPSGPVSDPAGGRGLPAAVLTWEELQIEIGRLLEAGARGIGREIAEARSEAVTENVRADRLVRELAKAREDLTKMRELVAGNERQRNGLEDRMSELENNLSEIQGLLRITYTGLHQLARECGIKSTIPVNPDEFSLSSSLAELATAMGEIPSKHAARIAEETSNGIYTGVCHVLACVRLSRPELDLREILDQGVASDMHLEDALASQDRRIQYWKTKFEVAELERTMLAVKKEQAVETLRGREVWFNSYLKSCCASMARVCRELRVVRGDPEESAAGYISWLNGACAQLDGIGKRIDEALKQECRRASRYAGGHVLACLRVTARAWTLNFTAKVLLVLGEIRR

SEQ ID NO: 184731 - protein, 1045 aa, Oryza sativa
  Clone ID: PAT_MRT4530_81697C.1.pep
MEQPRFEMSAPRGEFYEPPPSSKPIYTTGYEIRPELIITRITAFRVEILSFKQIKNESIGATWSRFTNLVQSGPTLSLPEYVLLQYFHTGLDKESAFYLDITVGGSFMHKTPSEGRTILDRILENTSFMTQPNEPQPKASLSKIVEPLTIEPLTEPSTSASSIDEKVPEQPFVENEEIQVPDCATIMFRDGFDKDYGNTLNYFSKRKPPVPLSPPNPMELGFLRETVRELTSIMSDEWLREIVQDVLVYFEEREAILDFHVFEIQDFDILIRLPIEQLLINTPHLGSLKITLGENEFSIPFSRARITLTDPLPEIELVEEVTAVPPHESPEALLEDEVPDFIKEEADPGETLDLPIMEPPPQPPLELKPLPLGLRYAFLHNDREAPVIISDKLSKDETQRLPTVLEKHRSVLGYSLQDLRGINLALCTHRIPIDPKSTPSREPQRRLNNEMQEVVKKEVLKLLHAGINLSRTIYWQIIRFSVSLMGITGIIKFLSIWRTRLPPPVNIKGICSFLGHAGFYRRFIKDFSTIARPLTNLLAKDAPFEFNDACLRSFKILKKALVSAPIIQPPDWTLPFEIMCDASDFAVGAVLGQTKDKKHHAICYASKTLTGAQLNYATTEKELLTVVFAIDKFRSYLVGAKVIIYTDHAALKYLLTKKDAKPRLLRWILLLQEFDIEIKDKKGVENYVADHLSRLHITNMQEQPINDLLRDDMLMTCIPPGENQRKLKYESHRHIWDEPYLYRVCSDGLLRRCVPTDEGLKIIERCHASPYGGHYGAFRTQAKIWQSGFFWPTMYEDSKEFIRRCTSCQRQGGITARDAMPLTYNLQVEIFDVWGIDFMGPFPKSRNCEYILVAVDYVSKWVEAMPCSAADARHAKKMFTETIFPRFGTRRMVISDRGFHFIDKTFRDLLREMEAKHNVATPYHPQTSGQAETSNKQIKNILQKTVNKMGTEWKDRLQDALWAYRTAYKTPIGMSPYQIVYGKSCRLPVELEHRAYWAIRNSNMDFEGAGEWRKMQIAELEEWREMAYHNAKIYKERTKRWHDMS

SEQ ID NO: 184732 - protein, 264 aa, Oryza sativa
  unsure (1)..(264): unsure at all Xaa locations
  Clone ID: PAT_MRT4530_81698C.1.pep
MEQSLFELSAPQGEFYEPTPSSEPIYTTGYEIRPELITGGIVSKIEEPLTIEPLAEPSTYASSIDEKVPEQPSVENEEIQTPDCAAILLRDCFDEDYGNTLNYFSKRKPPIPLSPPDPMELGLLRETVRELTSIMSDEWLREAELSSELSGKAVTLTNKFFKHPNGNIIEGFGIVQDVPICFEDREAILDFHIFEIQDFDILIXDPLLEIKSAEEVTAVPPHESPEALLEDEVPRLHQGRSRXPVRLSTWCLIGKSAISWSVKG

SEQ ID NO: 184733 - protein, 112 aa, Oryza sativa
  Clone ID: PAT_MRT4530_81699C.1.pep
SSEVIRINTAPRIIPCHLEGNDVGILAVPPHESPEALLEDEVPDFIKEEADPGETLDLVLNWEKCYFMVREGIVLGHRVSERGIEVDRAKIDVIDQLPPPVNIKGIHSFLGH

SEQ ID NO: 184734 - protein, 126 aa, Oryza sativa
  Clone ID: PAT_MRT4530_8169C.1.pep
MAPAARADKPARGWLAVTVEVDESSAVYYPHGWLGNWFGCDVLYQTPLESVSEAHGHMEGLGNFLTHELIGVRHLLLPRGGGGLYVSSTVIGKAPSGQGSYDTAAGLNLIFLYPKAWWSTVADGWP

SEQ ID NO: 184735 - protein, 452 aa, Oryza sativa
  Clone ID: PAT_MRT4530_816C.1.pep
MTRRADDLLVAGTLVISIVFFRCAAAVAATEYVRPPPGRVIFTEHTKPASHPQQVHVSLVGANHMRVSWITEDKHVKSVVEYGKVSGNYTASATGEHTSYRYFLYSSGKIHHVKIGPLDPGTVYYYRCGMAGDEFGLRTPPAALPVELAVAGDLGQTEWTASTLSHVGRSDYDVLLVPGDLSYADAQQPLWDSFGRFVQKYASRRPWMVTEGNHEVEAAMALPGWPRPFTAYAARWRMPYEESGSGTSLYYSFDAAGGAVHVVMLGSYADFNSSSEQYRWLARDLAAVDRGATPWVVVLLHAPWYNTNAAHEGEGEAMRKAMERLLYEARVDIVFAGHVHAYERFTRVYNNEANPCGPVHITIGDGGNREGLAFDFRKNHKLAPLSLMREASFGHGRLSVVNATAARWTWHRNDDADSTVRDEIWLESLAANGACQQSSSAAAAADSQNDEL

SEQ ID NO: 184736 - protein, 1131 aa, Oryza sativa
  Clone ID: PAT_MRT4530_81700C.1.pep
MEQPLFELSAPRGEFYEPPPSSEPIYTTGYEIRPELISMESAFYLDITAGRSFMHKTPSEGRTILDRILENTSFVTQSNEPKPKASVSKIEEPLTIEPLAEPSTYASSIDEKVPEQPSIENEEIQTPDRAAILFRDGFDGDYGNTLNFFSKRKPLIPLPPTDPMEVRFLRETIRELTSIMRDEWLREAELSSEVIRINTAPRIIPCHLEGNDVGILYSPTVEDNLVSESFAFAYLSDKAVTPTNKFFKHPNGNIEGFESVQDVPACFDDREAIFDFHVFEIQDFDILNGLPIEQLLINTPRLGSLKITLGENEFSIPFLWVTAVPPHESPEALLEDEVPDFIKEEADPGETLDLPIMEPPSRPPLQLKPLLLGLRYAFLHNDRVAPVIISDKLSEDETQRLLAMLEKHHSVLGYSLQDLRGINPALCTHRISIGPESTPSREAQRRLNNAMKLNKATKKDHFPLPFIDEILERLANHSFFCFLDGYSGYHQIPIHPEDQRIVLGHRVSERGIEVDRAKIDVIDQLPPPVNIKGIHSFLGHAGFYRRFIKDFSTIARLLTNLLAKDAPFEFDDACLKSFEILKKALISAPIIQPPDWTLPFEIMYDASDFAVGAVLGQTKDKKHHAICYASKTLTGAQLNYATTEKELLAVVFAIDKFRSYLVGAKVIIYTDHAALKYLLTKKDAKLRLLRWILLLQEFDLEIKDKKGVENSVADHLSGLQITDMQEQPINDFLRDDMLMTIHDSNPWYANIVNYMVSKYIPPGENQRKLKYESRRHIWDEPYLYRVCSDGLLQRYFMGSFPKSRNCEYILVAVDYVSKWVEAMPCSAADARHARKMFIEIIFPRFGTPRMVISDGGSHFIDKTFRDLLQEMGAKHNVATPYHPQTSGQAEKSNKQIKNILQKTIVYGKSCRLHVELEHRAYWAIRNWNMDFEGAGEWRKMQIAELEEWREKAYNNEKIYKERTKRWHDKRVKIKKFKPGDKVLMFNSRVKLFSHGKLHSKWEGPFDVIDTSSHGAITLRDDSCNIFKPLTASGKEGAAESRSPPPMKVKRHLTPPPIVRAPDQFQEDEVKLLEPSIHKLAAQVKKLRKENIELRDRHAVLGVELAEIRNNFDTLSRGLFAKIKRAFKEMGK

SEQ ID NO: 184737 - protein, 101 aa, Oryza sativa
  Clone ID: PAT_MRT4530_81701C.1.pep
IRGIGGVGKRAPPVDDSRSSAYHGPSPRRHGMSAPRGAHVAPTGHRRGGHVGGSMDGPDVPWGGSDGQSGRGPARRPGRARGGTAVTRRARRPLAVVRDAT

SEQ ID NO: 184738 - protein, 2008 aa, Oryza sativa
  unsure (1)..(2008): unsure at all Xaa locations
  Clone ID: PAT_MRT4530_81702C.1.pep
MGFISGIDDFVFPPGQAFRFGSLDFITNDFGKISLLDSDSNQSGRGQISAPFGIPNSAMVYPKINSTELASNHLDEIQSTSTRPDQDDWAYPPILMKLPDDLATVFTTRVSSPHRPRRDPASAPVRPSSREVGVILQPLGTVSTEQLDGYLSSPGVDSRPTEIVEYDNFGYRYDNRNLDDFDKGFEDNYTPLYFGIFMADNETGEQRKAREAEELRVQQEAERRRLEEERQAQERERRQREQQERERAAKEAEDRRQRALDAGRRARELIVQQDVEGTAVFRTPQXNAVAAITLLDTLLKEDALNQANHVVNILTLTKTMIVASVPVNSASVRTPTGSRVPHLRSQDYHQPSLXSIAGAGSNRRSRGHDGRSVHSPPERHREHRVERPRSPPRRRPVDLRDTINQCHAARGYVPHHSPDHDDDVDGVAVXPRVDWPAGFKPTGIEKYDGTTNPESWLTVYGLAIHVAGGDNKAMANYLPVALPNSARSWLHGLPRGTIGSWAELRDHFIANFQGTFERPDTHFDLYNVIQKSGESLRDYIRCFSEQRNKISDITDDVIIAAFTKGIRHEDLVGKFGRKPPKTVKQMFEKANEYAKAEDAIIASKQSGTTXKPKKDTPTTEGSGSANHKDRKRKPEELVTTTXHPSXQRSRVNTFDKIMNSQCPHHPNSNHVAKDCFIYKQFAEQYAKNARKASDGDQSTSKKKDDDDDAPTGFQDHHKELNHIFGGPLAYESKSKQKLTEXEINAAQPDTPQFLWWSETTMKFDRSDHPDRVVYPGRYPLVLDLVVRNVKLRRSLIDGGSALNILFTKTLDDMQIPRTELKPSNAPFHGVIPGLSATPLGQITLPVTFGTRENFRTENVCFKVADFKTAYHAILRRPALAKFMAVPHYTYMMMKMPGPRGVISLRSDIKQAVTCDKESCEMAXTREITIAREEIRLAASTASEGEVPATKMPKSGKSDAKTKKIPLDPSDPTKTANNKDIFAXKQSDMPSIPREVIEHSLHVKEDAKPIKQRLRRFAQDRKDAIKEELTKLLAAGFIKEVLHPDWLANPVLVRKKTGQWRMCVDYTDLNKSCPKDPFGLPRIDQVVDSTADCELLSFLDCYSGYHQIRLKESDCLKTSFITPFGAYCYITMPFGLKNAGATYQCMIQRCFSTQMSRNVEAYVDDVVVKTKQKDDLITYLEETFASIRAFRMKLNPEKCIFRVPSRKLLGFMVSHRGIQANPGKINAILNMKPPSSQKDVQKLTGCMAALNWFVSRLGERGMPFFKLLKKTDNFQWGPEAQKAFEDFKQLLTTPPVLASPHPXPLLLYVSATSQVVSTVLVVEREEEGHVQKVQRLIYFVSEVLANSKTRYPQVQKLLYGVLITIKKLSHYFQGHSVTVVTSFPLGDIRHNREANGRIAKWALXLMSLDISFKPRTSIKSQALADFIDEWTECQEDMPEKKMEYWTMHFNGSKRLSNTGAGVVLISPTGERLSYVFWIHFSVSHNVXLRIVISLGIRRLIVHGDSQLVVNQVMKEWSCLDYNMTAYRQEVRKLEDKFDGLELTHVLRHNNEAANRLANFGSKREAAPSDVFVEHLYEPTVPRKETIEATDTQDVSMIEADWREPLIRFLTKQKLSQDKDEAERISRYSRLYVIHETGLYKKSPSGILQRCVSLEEGRQLLKDIHSGICGNHATARTIVGKAYRQGFFWPTAVADADKIVRTCEGCQFFAXQTHLPAQELQAIPLSSPFAVXGLDMVGPFKKAVGGYTHLFVAVDKFSKWIEAKPVITIMADKARDFFINIVHRFGVPNRIITVNDTQFTGGVFKDFCEDFGIKICYASVAHPMSNGQVERANVMVLQGIKARVFDRLHPYAGKWVEQLPSVLWSLCTTPSRATGQSTFFLVYGAEAMLPNEVEFESLRFRNFNEERYGDNXVDDLNRLEEAREAALIQSARYLQGLRRYHNRNVQSRAFLVGDLVLRKTTRDRHKLSPLWEGPFIISEVTRPGSYRLKREDGTTIDNSWNIEHLRQFYA

SEQ ID NO: 184739 - protein, 258 aa, Oryza sativa
  Clone ID: PAT_MRT4530_81703C.1.pep
MEPSISRRRRIDIALVSLLLLAAAAAAVDAATITMVNRCSYTVWPGALPGGGARLDPGQSWSISVAAGTPAARIWPRTGCSFDGAGRGRCATGDCAGALSCAVSGEPPTTLAEYTLGRPGAGGDDFLDLSLIDGFNVPVSFQPANGGGARCSKGRGPSCAVDITARCLPELRVPGGCASACGKFGGDTYCCRGRFEHVCPPTSYSMFFKGLCPDAYSYAKDDQTSTFTCPAGTNYRVDFCPPTSGVTAGDEDDEIASA

SEQ ID NO: 184740 - protein, 1269 aa, Oryza sativa
  Clone ID: PAT_MRT4530_81704C.1.pep
MARGSALLDGSVLPPSRIVSERQAGLPRRFMPESATGREIVMLGEARPAPDYPGRSIFFLPFAMAGLVPPFSSFFMDVLEFYDLQMAHLTPNAVMTLAIFAHLCEMFIGVRPSLRLFRWFFTVQSVSPPSVVGGCYFLPRGPVLNRYIPCVLRKKWDDWKSDWFYTPLADEAHLRLPSQPPVQASSWRAPAEAQSGGPGRPPPPLSGSPTGGAHLSGPSPSSRRSRRAAAPATVAAPTSPPSPALVDHARACAASPAPTSLSLPLAPAPEMAGIRKSDPASLSSPTPHVGRRFPPLPATLAAVLRRRRRSIRVAEIHPVHPSSVEVRRRSPHPLAHGRRTQARVGVMELGRPGCPVDRLPDSPRHERGAARCLLGTGANPKKFWFVNFWARHLGDGYDAVLDRLAGLRSQGLTGAMVYGDYLRRRIAPLQRRARAAWEYIGPEDYMRTHQGVRWDWAPEDFKILIQRVLNLNSVEASLIPHGILPLCSDPDRVSILTIMTAVGASEEQAPKGHGGAGGSRRGDQSTPGGGRASGPRVGGSGSNRPTDARGKRKLGGIPPPSPPRGGGAARASSRRPEGAAPTSQPEGERKKKRLRKMGETEPSQGNLISPPRWSFNRPPRSDVPSRPSRHPKSGQSEAEDPAAAEERRRESDRREAADRLREAEEAAREAARVRQAEDTAREEAARARQAEEAAREEAARACQAEEATREETARARQAEAMASSEAVYDKTAGASLGPTPSGDAQATTSGAACDRAAGASPGPAPSGDAQDQTGPGDIPELSASSGGPSRVAFSPRRLFSSSSATPLSAEPLLQALAAANTAVLDGFSAQVEALRAERAELEAAWARVEEGRRSVDAMVEVGRKAHRRHISELEARKAALAEIAREVEEEREAALVATTAMIEAQDSLRLQHGSWEAELKKKLDAAQGVLDAAAAREQRATEAEAASRRREEALEARAMALEDHAGAVETSLADREAAAAIREATLAAHEAACAEEESALRLREDALAERERALEESEAATQRLADSLSLREAAQEEQARRNLECIRAERAALEQQAANLETREKELDARKRSGGAATGESDLVARLAAAEHNVADMQRALDSSTGEAEALRLSGEIGPGMLWDAVSRLDRAGREAGLWKGQTISRSTNLEGLAPHLRRMAWAVQQLPEELEKTIKSSSRDLAQGAVELVLASYQARDPGFSPWMALEEFPPGTEDDARARVRDAANHIVQSFEGSAPRLAFAPSSDEEGDASGEDDGGDEASDPGALE

SEQ ID NO: 184741 - protein, 169 aa, Oryza sativa
  Clone ID: PAT_MRT4530_81705C.1.pep
MAAARFPLLVLCLLPIIVCSVVDAELTHLHFYFHEVDAGTPNATVVNVASLHRNSSTFGDVNVLDNALREGPDPASRLIGRAHGLAVHASLDETGGLTAINFVFSDYGAYSGSTLATQGHFITTGPSERSIVGGTGKLRFARGYMTSKLLSSTDTAIVVVFDMYFTLDH

SEQ ID NO: 184742 - protein, 1082 aa, Oryza sativa
  Clone ID: PAT_MRT4530_81706C.1.pep
MARGSALLDGSVLPPSRIVSERQAGLPRRFMPESATGREIVTLGEGRPAPDYPGRSVFFLPFAMAGLVPPFSSFFMDVLEFYDLQMAHLTPNAVMTLAIFAHLCEMFIGVRPSLRLFRWFFTVQSVSPPSVVGGCYFQPRGPVLNRYIPCALRKKWDDWKSDWFYTPLADEARLRLPSQPPAQASSWRAPVDLGDCYDAVLDRLAGLRSQGLTGAMVYGDYLRRRIAPLQRHARGAWEYTGSEDFTRTHQGVRWDWAPEDFKILVQRVLNLNSVEASLIPQGILPLCSDPDRASILTIMMAVGASEERAPKGHNGAGGSRRGEQSTPGGGRASGSRDRGPGSSRPADARGKRKQGGTPPPSPPRGGGAVRASSRRPEGAAPTSQPEGERKKKGLRKMGETEPSRGNLISPPKWSFNRPPRSEIPSHPSRHSKSGQSEAEDPAAAEACRRESDRREAADRLREAEEAAQEAARARQAEETAREEAARARQAEEAAREEAARARQAEEAVREEAARARQAEEAAREKAGFRQDEAMATSEAARDEAAGASLGPTPSGDAQATTSGAAGDEAAGASLGPTPSGDAQDQPGPGDIPESGTSIGGPSRVASSPRRLFPTPSIAPLNAEPLLQALAAANTTVLDGLSAQVEALQAERAELDAAWARVEEGRRSVEAMVEVGRKAHRRHVSELETRKKVLAEIAKEVEEEREAALIATTMMNEAQDTLRLQYGSWEAELGKKLDAAQGVLDAAAAREQRAAETEAASRRREEALEARAMALEERACVVERDLADREAAVTIREATLAAHEAACAEEEFALRLREDALTERERALEGAEAAAQQLADSLSLREAAQEEQARRNLEGARAERAALNQRAAELEARAKELDARARSGGAAAGESDLAARLAAAERTIADLQGALDSSAGEVEALRLAGEVGPGMLWDAVSRLDCAGRQVGLWRGRTVKYAANQGGLAQRLSKMAGALQRLPEELEKTIKSSTRDLAQGAVELVLVSYQARDPNFSPWMALDEFPPGTEDNARAQVRDAADHIVDSFEGSAPRLAFAPNSDEEGNAGGADDSDHGAGDPGASD

SEQ ID NO: 184743 - protein, 1044 aa, Oryza sativa
  Clone ID: PAT_MRT4530_81707C.1.pep
MARGSAPLDGSVLPPSRIVSERQAGLPRRFMPESAAGREVVALGEGRPAPHYPGRSVFFLSFAMAGLVPPFSAFFMDILEFYDLQMAHLTPNAIMTLAIFAHLCEMFIGVRPSLRLFRWFFTVQPVSPPTVVGGCYFQPRGQVLNRYIPCVLRKKWDDWKSDWFYTPLADEARLRLPSQPPTQASSWRATVDLGDGYDTVLDRLAGLRSQGLTGAMVFGDYLRRRIAPLQRRSRGAWEYTGPEDYMRTHQGRKWDWVPEDFKMVVQRVLNLSSVEASLIPQGVLPLCCDPERANILTIMQAVGASGERAPRGHDGAGGSRRGEPSTPGGGRVSGPRDGGPGGSRPADARGKRKQEGTPPPSPPRGGGAVRASSRRPEGAVPTLQPEGERKKKRLRKMGGTEPCRGNLISPPRWSFSRPPRSEIPSPPPPRHSKSGRSEAEETATAEARRQEADRREAADRLREAEKAAQEAVRVRQAEEAAREEARLRRAGESVREAEAARACQAACQAPDPTPPEATTTSEATHDEVAGAPLGPDPSGDAWDEPASGDAPESGTSIGGPSRAAPTPRRLSPLPSAAPVSAEPLLQALAAANSTVLDGLSAQMEVLQVERAELDAAWARVEEGRRSVEAMVEAGRKAHRRHASELEARRRDLAEIAREVEEERETALIATAVLDEARDDLRLQYGSRAAELEKKLDAAQGVLDAAAARERRAAENEAASRQREEALEARATALEERARALDAKERDLADGEAAVATREATLAAHEAACAEEESALRLREDELTERGRALEEAEATAQRLADSLFLREAAREEQARRNLEGARAERAALDQRAAELEARAKELDARAHSGGAAAGDGDLAARLTAAEHTIAGLHGALDSSAGEVEALRLASEVGPGMLRDAVSRLDRAGRQAGLWGGRTAKYAANQGGLAQRLSEMAGTLQRLPEELEETIKSSSRDLARGAVELVLASYQARDPDFSPWAALDEFPPGTEDGARAQVRDAADHIVHSFEGTAPRLAFALDSDEEGGDDGADDSDDEAGDPGASE

SEQ ID NO: 184744 - protein, 1323 aa, Oryza sativa
  Clone ID: PAT_MRT4530_81708C.1.pep
MSFVSGINDFVFPPGQAFRFGSLDFNTNDFGKISLLDSDSNQSGRDQIFAPFGIPNSAEVYPKIISTELASNHSDKIQSTSTRPDQDDGAYPPILIKLPDDLADVFTTRASSPRRPRRDQASAPARPSSREVGVIFQPLGTVSTEQLDGYLSSPGVDLRPTEIVEYDNFGYRYDYHNLDDFDEGFEDNYTPLYFGIFMADNETEEQRKAREAEELRVQQEAEQRRLEEEHQAQERERLQREQQERERAAKEAEDRRQRALDAERRARELIGQQDVEGTAVFRTPQQNAVAAITPLNTLLKENTLNQANHVINIMNQTKTMIAASVLRCATRGYAPHHSPDRYDDDMDGVAAFTSDLRRVDWPAGFKPTGIEKYDGTTNPKSWLTVYGLAIRAAGGDSKAMANYLPMALADSARSWLHGLPRGTTGSWAELRDHFIANFQGTFERPGTHFDLYNVIQKSGESLRDYIRHFSEQRNKISDITDDVTIAAFTKGIRHEDLVGKFGRKPPKTVNQMFEKANEGSGSTNHKDRKRKPEELVATTTPSSRQRSRVNTFDKIMNSQCPHHPNSNHAAKDCFVYKQFAEQYAKNAHKTSDGDQSTSKKKDDEDDAPTGFQDHCKELNHIFGGPLAYESKRKQKLTEREINAWSETTIKFDRSDHPDRVVHPGWYPLVLDPMVCNVKFRRSLIDGGSALNILFAKTLDDMQIPRTELKPSNAPFHGVIPGLSATPLGQITLPVTFGTQENFRTENVCFEVADFETAYHAILGRPTLTKFMAVPHYTYMMMKMPGPRGVISLRSDIKQAVTCDKESCEMAQTREITLSREEIQLVASTASEGEDRKDAIKEKLTKLLAAGFIKEVLHPDWLANPVLVRKKTGQWRVCVDYTDLNKSCPKDPFGLPRIDQIGHNIEAYVDDVVVKTKQNNNFIMDLEETFASIRVFRMKLNPEKCIFGVPSGKLLGFIVSHRGIQANSEKINAILNMKPPSSQKDVQKLTGCMAALSRKLSHYFQGHSVMVVTSFPLGDILHNREANGRIAKWALELMSLNISFKPRTSIKSQALADFVAEWTECQENTPAEKMEYWTMHFDGSKRLSGTGAGVVLISPTGERLSYVLWIHFSASHNVAEYEALLHRLRIAISLGIRRLIVRGDSQLVVNQVMKEWSCLDDNMTAYRQEVRKLEDKFDGLELTHVLRHNNEATDRLANFGSKREAAPSDVFVEHLYEPSVPRKETIEATDTQDISMIEVDWREPLIRFLTKQELPQDKDEAERISRCSRLYVIHETELYKKSPSGILQRCVSLEEGRQLIKDIHSGICGNHATARTIVGKAYRQ

SEQ ID NO: 184745 - protein, 359 aa, Oryza sativa
  Clone ID: PAT_MRT4530_81709C.1.pep
MVETSTSLVKLEQDGSLFLPPGFRFHPTDAEVILSYLLQKFLNPSFTSLPIGEVDLNKCEPWDLPSKAKMGEKEWYFFSHKDMKYPTGMRTNRATKEGYWKATGKDREIFNLQPTSYGGSSNNKNNKQLVGMKKTLVFYMGRAPKGTKTNWVMHEFRLHANLHNDNPNLRLNLKDEWVVCKVFHKKGDDREAINKQQAQAAAVDQYSAGTPNNGSSVEAGDDDDDLFQLDSIIDPSIYFSNSSAANILSAPPNMSNSVVAANYGASTTTTGTASAGSFQQQPNYCSLINKSISSSNVSSWNNMPPPPPVAEGGVHGIGSSYSLQHQAAMVKALRDVIRLPNPLGMPQYKLDDAYLWDSS

SEQ ID NO: 184746 - protein, 209 aa, Oryza sativa
  unsure (1)..(209): unsure at all Xaa locations
  Clone ID: PAT_MRT4530_8170C.1.pep
MAKLPLAPSSSHGSPIHDRFPRVPPLAESSSSSSRRWRLRDLVGVGVGGCKGASNRSSRRPRARPPPARAPRRHGRRRRARTPPATRSAPPRPRPSRASRAAASSAXPRRRGCRRRRPRVRPPSSSQASRTAASCPXPRRRGRRHRRPHARPPPSPASRAAASCLAIAGLARGRRRRRPRAQPPPLRAPRRRGLLLPRRRQPCAAAAPS

SEQ ID NO: 184747 - protein, 1017 aa, Oryza sativa
  Clone ID: PAT_MRT4530_81710C.1.pep
MAGLVPPFSSFFMDVLEFYDLQMAHLTPNAVMTLAIFAHLCEMFIGVRPSLRLFRWFFTVQSVSPPSVVGGCYFQPRGPVSNRYIPCALRKKWDDWKSDWFYTPLANEARLRLPSQPPAQASSWRASVDLGDGYDAVLDRLAGLRSQGLTGAMVYGDYLRRRIAPLQRRARGAWEYSGSEDYMRTHQGARWDWAPEDFKIVVQRVLNLSSVEASLIPQGILPLCSDPDRASIVTIMMGVGASEEEAPQGHDGAGGSRRGEQSTPGGGRASGPRVGGSGSSRPADARGKRKLGGTPPPSPPRGGGAARASGRRPEGAAPTSQPEGERKKKRLRKMGETEPSRGNLISPPRWSFNRPPRSDILSRSSCHPKSGQSEAEDPAAAEARRRESDRREAADRLREAEEAAREAARARQAEDTAREEAARARQAEEAAKEEAARARQAEAMATSEAALDKAADASLGPTPSGDALATASEAARDEAAGASPGPTPSGNAQATASEAARDESVGASPGPTSPGDAQDQTGPGDIPEPSASPGGPSRVAFSPRRLFSSSSVAPLSAEPLLQALAAANTAVLDGFSAQVEALQAERAELEAAWARVEEGRRSVDVMVEVGRKAHRRHVSELEARKKALAEIAREVEEEREAALIATTVMIEAQDTLRLQHGSWEAELKKKLDAAQGVLDTAAARERLATEIEAASRRREEALEARAMALEEHAGAVERGLADREAAAAIREATLAAHEAACAEEESALRLREDALTERERALEEAEAAAQRLADSLSLREAALAEQARRNLECVRAERAALEQRAADLEAREKELDARARISGAAAGESDLAARLAAAEHTVADMQRALDSSTGETEALRLAGEIGPGMLWDAASRLDRAGRQAGLWKGQTMKYSTNLGGLAQHLSKMAGALQQLPEELEKTIKSSSRDLAQGAVELVLASYQARDPNFSPWMALDEFSPGTEDDARARVRDAADHIVHSFEGSAPRLAFAPNSDEEGDASGADDRDDEAGDPGASG

SEQ ID NO: 184748 - protein, 396 aa, Oryza sativa
  Clone ID: PAT_MRT4530_81711C.1.pep
MVESTTSLVKLEQDGGLFLPPGFRFHPTDAEVILSYLLQKLLNPSFTSLPIGEVDLNKCEPWDLPSKAKMGEKEWYFFSHKDMKYPTGMRTNRATKEGYWKATGKDREIFRQPAAVNTSSYGGSSNKKKQLVGMKKTLVFYMGRAPKGTKTNWVMHEFRLHANLHNHHPNLRLNPKDEWVVCKVFHKKQGDEAINNQQQQPQYAAVDQYSAETPNSGSSVVQAGDIDGGDDFFQLDDIIDPSIYFVSNSSNILSAPPNNNNAVYSVSASTTTTNTTAVSFQQQPNYYSLINKSSSSSSSNYSAPLQQHVSSWNITPGAGGAHGIGSSYYNLQQQQAAMVKALENVIAVPNFGTLLPSSNKLKGLSKSAMAGLTQQNPLGVPQYKIENYGDHYISRQ

SEQ ID NO: 184749 - protein, 1071 aa, Oryza sativa
  Clone ID: PAT_MRT4530_81712C.1.pep
MARGSALLDGSVLPPSRITSEKQAGLPRRFMPESATGREIVMLGEGRPAPDYPGRSVFFLPFAMAGLVPPFSSFFMDVLEFYDLQMAHLTPNAVMTLAIFAHLCEMFIGVRPSLRLFRWFFTVQSVSPPSVVGGCYFLPRGPVLNRYIPCVLRKKWDDWKSDWFYTPLADEARLRLPSQPPAQASSWRAPVDLGDGYDAVLDRLAGLRSQGLTGAMVYGDYLRRRIAPLQRRARGAWEYTGSEDYIRTHQGVRWDWAPEDFKILVQRVLNLNSVEASLIPHGILPLCSDPDRASILTIMAAVGASEEQAPKGHDGAGGSRKGDQSTPGGGRASGPRVGGSGSNRPTDARGKRKLGGTPPPSPPRGGGAVRASSRRPEGAAPTSQPEGERKKKRLRKMGETEPSRGNLISPPKWSFNRPPRRDIPSRSSHHPKSGQSEAEDPAAAEARRRESDRREAADRLREAEEAAREAARARQAEDTAREEAARARQAEDTAREEAARARQAEEAAREEAAWVRQAEATATSEAVRDEAAGASLGPTPSGDAQDETGPGVARDDAAGASLGPTPSGDAQDQTGPGVARDEAGASIGGPSRAASSSRQLFPTPSVAPLSAEPLLQALAAANTAVLDGLNAQVEALQAERAELDAAWARVEEGRHSVEAMVEAGRKAHRRHVSDLEARKTALAEIAREVEEERGAALIATTVMNEAQDTLRLQHGNWEAELKKKLDAAQGVLDAAAAREQRATEAEAALRRREEALEARAMALEERACVAKKDLADHEAAVASRETTLAAHESACAEEESALRLREDALSERERALEEAEAEAQRLADSLSLREAALTEQARRNLESVRTERAALDQRAADLEAREKELDARARIGGAAAGESDLAARLADAEHTVADMQRALDSSAGEAEALRLAGEIGPGMLWDAVSRLDRAGRQAGLWKGQTIKPAANLGGLAQRLSKMAGALQQLPEELEKTIKSSSRDLAQGAVELVLASYQARDPNFSLWMALDEFPPGTEDSARAQVRDAADHIVHSFEGSAPRLAFAPNSDEEGDASGADDVEDEAGDPGASD

SEQ ID NO: 184750 - protein, 120 aa, Oryza sativa
  Clone ID: PAT_MRT4530_81713C.1.pep
AKAVVRDEPGSYGREQRRAATPLRPSPPLPCHGAAGGLDRGGRWQQATAPSRQEGRGRTRAVPFPPPDPAGGEAAAARRRPSGGGALPSVGSSGRGAGGGPAYLRRRHPPLRSSCVGIFG

SEQ ID NO: 184751 - protein, 1011 aa, Oryza sativa
  Clone ID: PAT_MRT4530_81714C.1.pep
MARGSAPLDGSVLPPSRIVSERQAGLPRRFMPESATGREVVALGEGRPAPHYPGRSVFFLSFAMAGLVPPFSSFFMDVLELYDLQMAHLTPNAVMTLAIFAHLCEMFIGVRPSLRLFRWFFTVQPVSPPSVVGGCYFQPRGPVLNRYIPCVLRKKWDDWKSDWFYTPLADEVRLRLPSQPQAQASSWRAPVDLGDGYDAVLDRLAGLRSQGLTGAMVYGDYLRRRIAPLQRRARGAWEYTGSEDYMRTHQGVKWDWVPEDFKMVIQRVLNLSSVEASLIPQGVLPLCSDPERANILTIMQAVGASGERAPRGHDGAGRSRRGEQSTPGGGRASGPRDGGPGGSRPADARGKRKQEDTPSPSPPRGGGAVRASSRRPEGAVPTSQPEGERKKKRVRKIGGTEPSRGNLISPPRWSFIRPPRSEIPSRPSRHSKSGRSEAEETAIAEARRREADRREAADRLREAEEAAQEAVRARQAEEAAWEEARLRRAEESVRETEAARARRAACQAPDPTPPEATTTSEATHDEAAGAPLGPDPSGDVRDEPASGDAPEFGTSIGGLSRAAPTPRRLSPLPSAAPLSAEPLLQALAAANTTVLDGLSAQMEVLQAERAEVDAAWARVEEGRRSVEAMVEAGRKAHRRHASELEARRRDLAEIARGVEEERETALIATAVFNAARDDLCLQYGSRAAELEKKLDASRQREEALEAHATVLEERAHALDTKERELAGREAAVAIREATLAAHEAACAEEESALCLREDELTERERALEEAEAAAQRREEQARLNVEDARAERAALDQRAAEFETRAKELDARARSGRAAAGDGDLAARLAAAEHTIAELQGALDSSAGEVEALRLAGEVGPGMLRDAVSRLDRAGRQAGLWGERTAKYVANQGGLAQCLSEMAGTLQRLPEELEEAIKSSSRDLARGAAELVLASYQARDPDFSPWAALEEFPPRTEDGARARVRDAADHIVHSFEGTAPRLAFALDSDEEGGDDGADDSDDEADGPGASE

SEQ ID NO: 184752 - protein, 36 aa, Oryza sativa
  Clone ID: PAT_MRT4530_81715C.1.pep
VFNRSYTFSTPVLAAVRSAHTVAIALTSIGGDHLSL

SEQ ID NO: 184753 - protein, 1043 aa, Oryza sativa
  Clone ID: PAT_MRT4530_81716C.1.pep
MARGSALLDGSVLPPSRIVNERHAGLPRRFMPESATGREIVMLGEGRPAPDYPGRSIFFLPFAMAGLVPPFSHFFMDVLEFYDLQMAHLTPNAVMTLAIFAHLCEMFIGVRPSLQLFRWFFTVQSVSPPSVVGGCYFQPRGPVLNRYIPCVLRKKWDDWKSDWFYTPLADEVRLRLPSQPPAQVSSWRAPVDLGEEYDAVLDRLAGLRSQGLTGAMVYGDYLRRRIAPLQRRARSAWEYTGPEDYMRTHQGARWDWAPEDFKIVVQRVLNLSSAEASRLPLEILPLCIDPDRVSILTIMLGVGASEERAPKGHDGAGERRRGDQPAPGGGRASGPRVGGSGSSRPADAQGKRKLGSTPPPSPPRGGGAARASSRRPEGAAPTSQPEGVRKKKRLRKMGETEPARGNLISPPRWSFNRPPRSDVPSHSSRHPKSGQSEAEDPAAAEERRRESDRREAAARLREAEEAAREAARVRQAEEAAREEAARARQAEEAAREEAARARQAEATASLGATPSGGPQATSSEAARDEAAGASPGPTSPGDAQDQSGPGDIPEPSASSGGPSRVAFSPRRLFSSSSVAPVSAEPIMQALAAANTAVLDGFSAQVEALRAERAELEAAWARVEEGRRSVDAMVEVGRKAHRRHISELEARKAALAEIAREVEEEREAALVATTAMVEAQDTLRLQHASWEAELKSKLDAAQGVLDSAAARERRATEAEAASRRREEALEARAMALEEHAGAVERGLTDREAATALREATLAAHEAACAEEESALRLREDALAERERVLEEAEATTQRLADSLSLREAAQEEQARRNLECVRAERAALEQRAANLEAREKELAVRARIGGAASGESDLAARLAAAEHTVADMQRALDSSIGEAEALRLAGEMGPDMLWDSVSRMDRAGRQAGLWKGQTRTRPSNLEGLAPHLNRMAWVLERLPEELEKTIKASSRDLARGAVELVLASYQARDPNFSPWMALEEFPPGTEDDARARVGDAADHIVNGFEGSAPRLAFAPSSDEEGDASGEDDGGDEASDPGAFE

SEQ ID NO: 184754 - protein, 1974 aa, Oryza sativa
  unsure (1)..(1974): unsure at all Xaa locations
  Clone ID: PAT_MRT4530_81717C.1.pep
MGFVSGIDDFIFPPGQAFRFGSLDFITNDFGKISLLNSDSNQSGRGQISAPFGIPNSPEIYPKIISTELTSNHLDEIQSTSKXPDQDNGAYPPILMKLPDDLAAVFTTRASSPRRPRRDPASAPVRPSSREVGVILQPLGTVSTKQLDGYLSSPGVDSRPTEIVEYDDFGYRYDYRNLNDFDEGFEDNYTPLYFGIFMADNEMEEXRKARETEELRVQQEAERHRLEEERQAQERERLQREQQERERAAKEAEDRRQRALDAGRRARELIGQQDVEGTAVFRTPQQNAVAAITLLDTLLKEDTLNQANHVVNILNQTKTMIAASVPVNSASVCTLTGSRVPHLRSQDYHQPSLSVAGTGSSRRSRGHDERSVHSPPERHREHRVERRRYPPRRRPVDLHDTINQRRAAQGYXHHSPNRYDDDVDGVGAFTSDLCRVDWPAGFKPTRIEKYDGTTNPESWLTVYGLAIRAAGGDNKAMANYLPVALADSAQSWLHGLPRGTIGSWAELRDHFIANFQGTFERPGTHFDLYNVIQKSGESLRDYIRRFSEQRNKISDITDDVIIAAFTKGIRHEDLVSKFGRKPPKTVKQMFEKANEYAKAEDAIIASKQSGTTWKSKKDTPTTGGSGSANHKDRKRKPEELVATTTLSSRQRSRVNTFDKIINSQCPHHPNSNHAAKDCFVYKQFAEQYTKNARKASDGDQSMSKKKDDDDDVPTGFQDHRKELNHIFGRPLAYESKRKQKLTEREINTVQPDTPQYLRWSETTIKFDHSDHPDRVVHPGRYPLVLDPVVRNVELCRSLIDGGSALNILFAKTLDDMQIPRTELMPSNAPFHGVIPGLSATPLGQITLLVTFGTRENFHTENVCFEVADFETAYHAILGRPALAKFIAVPRYTYMMMKLPGPRGVISLRSDIKQAVTCDKESCEMAQTREITLAREEIRLAASTASALITFLQNNKDIFAWKPSDMPGIPREVIEHFLHVKEDAKPIKQQLRRFAQDRKDAIKEELAKLLAAGFIKEVLHPDWLANPVLVQKKTGQWRMCVDYTDLNKSCPKDPFGLPRIDXIRLKESNCLKTSFITPFGAYCYITMPFGLKNAGATYQRMIQRCFSTQIGRNVEAYVDDVVVKTKQKDDLIMDLEETFPSIRAFRMKLNPEKCIFGVLSWKLLGFMVSHRGIQANLEKITAILNMKLPSSQKDVQKLTGCMAVLSRFVSRLGEPGMPFSKLLKKTDNFQWGPKAQKAFEDFKKLLTTPPVLASPHPQEPLLLYVSATLQVVSTVLIVEREEEGHVQKVQRPIYFVCEVLADSKTRYPQVQKLLYDVLIIVRKLSHYFQGHSATVVTSFPLGDILHNREANGRIAKWALELMSLDISFKPRTSIKSQALADFVAEWTECQEDMPKEKIEYWTMHFDGSKRLLGTGAGVVLISLNGERLSYVLWIYFFASHNMAEYEALLHGLRIAISLGIRRLIVRGDSQLVVNQVMKEWSCLDDNMTAYRQEVRKLEDKFDGLELIHVLRHNNEADDRLANFGSKXETAPSDVFVEHLYEPTVPRKXTIKAMDTQDVSMIEADWREPLIRFLTKQELPQDKDEAERISRRSRLYVIHETELYKKSPSGILQRCMSLEEGRQLLKDIHSGICGNHAAARTIVGKAYRXGFFXPTAVSDVDKIVRTCEDCQFFARQTHLPAQELQTIPLSWPFAVWGLDMVGPFKKAVGGYTHLFVAVDKFSKWIEAKPVITITADKARDFFINIVHRFGVPNRIITDNGTQFTGGVFKDLCEDFGIKIYYASVAHPMSNGQVERANGMVLQGIKARVFDRLHPYAGKWVEQLPSVLWSLRTTPSRATGQSPFFLVYGAEAILPSEVEFESLRFCNFSEERYGEDRVDDLNRLEEAREAALIQSAQYLQGMRRYHNRNVQSRAFLVGDLVLRKIQTTRDRHKLSPLXEGPFIISEVTRPGSYRLKREDGTHIDNSWNIEHLRHFYA

SEQ ID NO: 184755 - protein, 145 aa, Oryza sativa
  Clone ID: PAT_MRT4530_81718C.1.pep
MESGSGLQKSKYLRNQSCRSIRSREENDEDSRYCLSRCRSHRTDADVRAVVRPCHHVPFGLSAHSGARPCRCVSTRTPEPPGSPFLPGDGAAPRDAGIFRFVYAIWTGASSTAKHSALYYRVIDIQYLSKWTEEISGARNSFGNL

SEQ ID NO: 184756 - protein, 100 aa, Oryza sativa
  unsure (1)..(100): unsure at all Xaa locations
  Clone ID: PAT_MRT4530_81719C.1.pep
YLRQGIPLRVGVLEXVNERLELRYFAHHLHFEMLRLPGAVSTQRPVPPLPVQPEPLPDHAIALLGLQLNPXRXSDGXGXGGCRWLLGVDAXGVVRSDDNR

SEQ ID NO: 184757 - protein, 74 aa, Oryza sativa
  unsure (1)..(74): unsure at all Xaa locations
  Clone ID: PAT_MRT4530_8171C.1.pep
PHXXQXAPXPSSVVVTXLLRSXXLGWPTXSXXSXPAVXLXRXFMXGRXSXXFSTXXXFFXXXSNPXSHXXLXSL

SEQ ID NO: 184758 - protein, 104 aa, Oryza sativa
  unsure (1)..(104): unsure at all Xaa locations
  Clone ID: PAT_MRT4530_81720C.1.pep
VSPLPPPYLPSLSFSPLLPIRPTXGGRRERAGGIGAHQNRTGGSGRRLGRRRLGGGDGEGNGGGDSRQWEGEGNGGGDSRQWEGERNGGSPHCRSSSSSLRLPA

SEQ ID NO: 184759 - protein, 127 aa, Oryza sativa
  unsure (1)..(127): unsure at all Xaa locations
  Clone ID: PAT_MRT4530_81721C.1.pep
MLHTVAATIAVFPSLFAAVPVVVTVEEVRSLLLRIFGALRIGXALTVGRRAWFCSNSSGSDSDATMVEAKAEGAVAAEGEADGKVFFLLSCPSPFTSKTVCCSWCPPSSFARRARTISCLGYTRKGI

SEQ ID NO: 184760 - protein, 273 aa, Oryza sativa
  Clone ID: PAT_MRT4530_81722C.1.pep
MASSPSPSPGTATPATAAAAPSTATPTPATQPNATPADPSITPPAASPPLPSAATPPPQPDSPPPSPPPAPPVAVPPPATVPPPPVPVASPPPTPSATLPPPSPPASVPVPPTPATTPPKPSPVQQPPVAASPPPSSPADLPPPNPPARSDTPPVVQSPPPPHRRSPRTPWAPPMAPSPSGSPTKPSPASPSPIAGDPIIPTPNNPSSPLATPSAPGSGTPVVTPSAPVSGPPSPGTAPATAADRSNKSLSPNTQDGSVSSSDGGMSSSAKAG

SEQ ID NO: 184761 - protein, 59 aa, Oryza sativa
  Clone ID: PAT_MRT4530_81723C.1.pep
MEGGGGGGVACQNLLGEGEPMLRLRGGADCGQETAEMGAQTCDRRRSVGTVGWSTGGGG

SEQ ID NO: 184762 - protein, 870 aa, Oryza sativa
  Clone ID: PAT_MRT4530_81724C.1.pep
TTAIVGATTGVMKPLLSKLTKLLGEEYAKLKGVRKQIKFLIDELSTMSAALEMLADSDQQLNPEMRDWRDKLRELAYDLEDCIDDFMSRVDHDGEKMGFRKFFRKLKKLKARHEIANEIEELKIRAIEASERHKRYNFDQLAHNSSTFGIDPRLSAFYEEVDKLVGIDGPKKRIIELLAMEMKGSLKVVSIVGCGGLGKTTLTNQVYDTIRSQFSCAAFVSVSQRPDIKKILNDIAEGVGISSRTPVGNDEKKLINILREHLKNKRYLVVIDDLWDAKAWKTIELALLNSNCGSRVITTTRSVAVASCCSSQDGYIYEMKPLSFDDSKWLFLKRAFGYEKSHYPHLEDVLDKILGKCGGLPLAIITISSLLSYQHAIDEWHRVLNDIGYGLARDPYAETMSNILSLSFFNLPHHLKTCFMYLSVFPEDYNIDKRRLVSKWIAEGFIQDEQGRSAYRTGELYFNELINRSLIEPVDVKYGQAKACRVHDIILDYIKCKATEENFVTSLGSTVPGCTTEYKVRRLSVINSNEEDVNIPTSLDLSQVRSLTIFGNRMQTSVFDFKFLRVLDLVYRDRMGDLFANIEKLFHLKYMCISSYGVDYLPEKIGELKYLETLDIRQTNVEILPSTITNLQRLARLFINQDTRFSDETTIGQLKSLEELKEFVVSQSEQVTALQEVSKLTKLRTLKLTLQSPLSLDDYHSCVGTLLQSLCNLYDLCIMDQSYENYCLTLDSWHIASPCSLRKLVIKLVLTKVPNWMGVLGNIGVLVLGILCIAPDDIEILGAIPSLLFLELQTYGGTNGRIIIHGNNRFISLKYFSLVIHACGTALEFEAGSMPKVEHLKLQFHLHELECLNGSSDSGIQHLSALGKVE

SEQ ID NO: 184763 - protein, 751 aa, Oryza sativa
  Clone ID: PAT_MRT4530_81725C.1.pep
MTEMEDSLRSCTEQLLRVREEKERLIIEAADKISLEQKKVWSLQQKLEDANKRFAKVTTENYNLRNIVNSKDKVITELSESAALLNQKLIDATARLEFTHKQCGSLQYEVRILQKELEIRNKEREFDLKSIDAAQKHQQESTKKITALETECQRLRTMVQKRLPGPAALAKMKDEVERRGSNCVENRRRKPRSSAQSSPQVVTPRHPVSEGYLVKMQELDDENRHLRQLLAKKENDLQFVQLQYADEASKLSVVQGQLKELVGSHELDDDNRPEPWANSSLVSKGEHFRVGKQHASHSRGRRIAGSDMQLLVDISEIEKLEMISRPSSAPHQCVPDASDTESKTALTETVCQDRILEDGLSDKYPEWIQDVLELIIKKHQVLKISVDIIIDEIRSALRTEISDKGNDAANVTYDQAVIDSMVATLVERVSCMIERSSGNNVLSSQSFLHEKSELTCHLEHLICVCSDVLDGKANLRKFIEEVCLTLEWTVNQYIYCVDALETVDCITNDFDGNVSLRSLNMQEKQQMQSTNPKVAVGVQQEVQKEPFLIPGDPVENHSQVQFVTCKLDKELLAVRQDHGDNCQEKQSVHYKEESATADGSMQLLPEEEGKQLTNSAISAAADKLAECQETITSLSKKLQALKCPANADAVDKRKSDNLHLLVANQNFSSPPSIEAACKKENDERVTTEKNLLQEQDVGTGHKVDNNGSTQIAPRPVIPKSPLTTVSVDMKKRKKKKQGGSLLSRLIFGKKA

SEQ ID NO: 184764 - protein, 92 aa, Oryza sativa
  Clone ID: PAT_MRT4530_81726C.1.pep
EVNVQSGLPATRSTERLELLDDNEHILKVKFIGGDHMLKVIDGQLGTLVVESFVVDIPDGNTKDDICYFIENVLRCNLMTLADVSEERLANP

SEQ ID NO: 184765 - protein, 512 aa, Oryza sativa
  Clone ID: PAT_MRT4530_81727C.1.pep
MVALADSAAARKLLLHGAATDAAAVGMSFGLDGLWQLIAGLFSGLVHLLLLPFQAIAHGFQALGHAIQALFAGLGTVAHLLVQAAVAGIGHGFDGMWHAIQGFFASIVAALAGAAHGLVLPFEAFWRWLQTAAGGTGSGFQGLWQNVLAFFATLAGAAHDLVHPFEAFWKWLRTAAADAAADISFRLDGLWPLVKRLYASLLATLASAAHGLVPLLESLWRGLRAAAAAALPYVLVIAAVLCVVALVWLAWPFLFPAAAVIGLALVGVAGCCAFLLLAAAVLIGRALVYAVCFGVVLLFVAAKVVGKVLDRVLPACARCCYDDRVTTTATTMSAPDAAGMDISRAAYESLPELYAQILRSAGPVVAAAVFCSHPVAWACAAPVAALFLFRALDKRLPPSEPCVLPAAAYPDTVTDVSDSRSIGQHVSEDDDMSDSCSIVDPYHGEHPCLLTSFSAKERMGASIGGGRRATGSGGGRRHARRGGEEGMRARWRGGPHGAGWHGGGWPTWRGGG

SEQ ID NO: 184766 - protein, 206 aa, Oryza sativa
  Clone ID: PAT_MRT4530_81728C.1.pep
MNGAGGAGGAAAGKLPMVSHRRVQCRLADKRCELREEEMEYIRQFHRHEPSSNQCTSFVAKHIKAPLQTVWSLVRRFDQPQLFKPFVRKCVMRENIIVTGCVREVNVQSGLPATRSTERLELLDDNEHILKVKFIGGDHMLKNYSSILTIHSEVIDGQLGTLVVESFVVDIPDGNTKDDICYFIENVLRCNLMTLADVSEERLANP

SEQ ID NO: 184767 - protein, 172 aa, Oryza sativa
  Clone ID: PAT_MRT4530_81729C.1.pep
LAIRRKKQGGSKAHKPLQVKTERGHLKKGLAHIHTEDIKKQNRQIGGPGGPPGNRGRRPGGEQVSLKGGGIKAGGKKGKRGPGGKMVTRQKSKKKKRREEKGESPGGPKGGPTQNKGGGPNGRFSRGKTGGASGKKKPATPGGGGVGFWAPRGFFFLTGERGKSGWPSPPGP

SEQ ID NO: 184768 - protein, 86 aa, Oryza sativa
  Clone ID: PAT_MRT4530_8172C.1.pep
MYPPDPSKSGESSAAAPEPVTGIPVGMFYPAPPMERVVSCRMAPAAGGAWTTALCDCADDCNTCKLDRETCRASCINESANARGEA

SEQ ID NO: 184769 - protein, 56 aa, Oryza sativa
  Clone ID: PAT_MRT4530_81730C.1.pep
MAGSYPWDHNGWWTEPSFFDMNTEVEDEASEDPYAYYQEGDEDDGAQSQPRHTITN

SEQ ID NO: 184770 - protein, 754 aa, Oryza sativa
  Clone ID: PAT_MRT4530_81731C.1.pep
MTMTGGHHHDAHHEDFQLKDTNPLLGEQWPKGAAGPARPAVGGGIAGWLGLEKPSSTYDLVEQMFFLYVRVVKAKDLPPNPITGSPMDPYVEVKLGNYKGTTKHYDRRANPEWDQVFAFSKSRVQSNVLEVYLKDKEMLGRDDYVGRVVFDLAEVPTRVPPDSPLAPQWYRLEERRADEAFPEAWHFDAATVRCEGVASVRSKAYVSPKLWYLRVNVIEAHDVHPQARGRAPEVFVKAQVGNQILKTSVVAAPTLNPRWNEDLVFVVAEPFEEQLLLTVEDRVTPRKDDLLGRAALPLALFEKRLDHRPFVQSRWFDLEKFGIGGAIEGETRRELRFASRVHVRACLEGAYHVMDESTMYISDTRPTARQLWKPPVGVLEVGILGAAGLQPMKNRDGRGTTDAYCVAKYGQKWVRTRTMLGTFSPTWNEQYTWEIRIRLSTLETDRVYTHAYPLIVLQPSGVKKMGELRLAVRFTCLSLMNMVHLYTQPLLPRMHYLHPFTVTQLDALRYQAMGIVAARLGRAEPPLRREVVEYMLDVESHMWSMRRSKANFFRAVSLFSGAAAAARWFADVCHWKNVATTALVHVLLLILVWYPELILPTVFLYMFMIGLWNYRGRARHPPHMDTKMSWAEAVHPDELDEEFDTFPTSRQQDVVYMRYDRLRSVAGRIQTVVGDMATQGERLQSLLGWRDPRATCLFVVFCLVAAVVLYVTPFRVVALVAGLYLLRHPRFRSRLPAVPSNFFRRLPSRADSML

SEQ ID NO: 184771 - protein, 136 aa, Oryza sativa
  Clone ID: PAT_MRT4530_81732C.1.pep
SLAHHLSLHPGSPPLLFRVDESNSRNHTYFLLSKVLAFPSRVASTRARPRSGLTLPRVRSREGAWAGPIPRCLMTYTTNHNYFTYSSKTYSPPTKIIIHAPTIPFLKKRIITTFTWSERDAVQKAGKKRLPTSAPR

SEQ ID NO: 184772 - protein, 824 aa, Oryza sativa
  Clone ID: PAT_MRT4530_81733C.1.pep
MTMTGGHHHDAHHEDFQLKDTNPLLGEQWPKGAAGPARPAVGGGIAGWLGLEKPSSTYDLVEQMFFLYVRVVKAKDLPPNPITGSPMDPYVEVKLGNYKGTTKHYDRRANPEWDQVFAFSKSRVQSNVLEVYLKDKEMLGRDDYVGRVVFDLAEVPTRVPPDSPLAPQWYRLEERRVGGGGDGGGLKVRGELMLAVWIGTQADEAFPEAWHSDAATVRGEGVASVRSKAYVSPKLWYLRVNVIEAQDVQPQARGRAPEVFVKAQVGNQILKTSVVAAPTLNPRWNEDLVFVVAEPFEEQLLLTVEDRVTPRKDDLLGRAALPLALFEKRLDHRPFVQSRWFDLEKFGIGGAIEGETRRELRFASRVHVRACLEGAYHVMDESTMYISDTRPTARQLWKPPVGVLEVGILGAAGLQPMKNRDGRGTTDAYCVAKYGQKWVRTRTMLGTFSPTWNEQYTWEVFDPCTVITIGVFDNNHLGNGNGNGNNAGGGGGGSPPARDARVGKIRIRLSTLETDRVYTHAYPLIVLQPSGVKKMGELRLAVRFTCLSLMNMVHLYTQPLLPRMHYLHPFTVTQLDALRYQAMGIVAARLGRAEPPLRREVVEYMLDVESHMWSMRRSKANFFRAVSLFSGAAAAARWFADVCHWKNVATTALVHVLLLILVWYPELILPTVFLYMFMIGLWNYRRRPRHPPHMDTKMSWAEAVHPDELDEEFDTFPTSRQQDVVYMRYDRLRSVAGRIQTVVGDMATQGERLQSLLGWRDPRATCLFVVFCLVAAVVLYVTPFRVVALVAGLYLLRHPRFRSRLPAVPSNFFRRLPSRADSML

SEQ ID NO: 184773 - protein, 474 aa, Oryza sativa
  Clone ID: PAT_MRT4530_81734C.1.pep
MAMVEKTVLLYPCPAVGHLNPMVQLAEALVRRGVSVTLAVADPPDKGAVLAGAIARIAAVCPSIGVRLLPIPSCEGKTYSHPVMWIVDALRLANPVLRELLRSFPAAVDALVVDMFCIDALDVAAELAVPAYMFYPSAASDLAIYLQVPHVARSAPSSFKDMADTVLSFSGVPTIRALDMPDTMQDRESDVGTTRIHHCSRMAEARGILVNSFDWLETRALKAIRGGLCLPSGRSVPAIYCVGPLVDGGKLKENDARHECLEWLDRQPKQSVVFLCFGSRGTFSVSQLSEMARGIENSGHRFLWAVRSNLGEVDLEALFPEGFLERTQGRGFVVKNWAPQSAVLQHGAVGAFVTHCGWNSSLEAIMSGVPMICWPLYAEQRLNKAHLVEEMKLGVLVEGYDGELVKADELETKVRLVMESEEGKRLRERSAMAKEMAADAVKDGGSSDMAFAEFLNNLGTNNVKSGPRDTPVHD

SEQ ID NO: 184774 - protein, 938 aa, Oryza sativa
  unsure (1)..(938): unsure at all Xaa locations
  Clone ID: PAT_MRT4530_81735C.1.pep
LEKLIGLIFHKKRKKXSEEMVFSCHTAQXENNDVWVINSGCTNHMAADPNLFREMDSSYHAKIHMGNGSIVQSEGXDFSCKILDRKNNHLVAKINMEKNRNFLLRMNHPTQMALKSEVDISNLWHKRMGHLNYKALKLLRAKGMVQGLPFITLKSNPCEGCVFGKQIQASFPRSGAWRASAPLELVRTYIVGKVPTISEGGNWYFITFIDDYXRMIWVYFLKEKSAALXIFKKFKAMVENXSNRKIKVLRNDQGGEYISKEFEKYCENVGIRRXLTTGYSAQQNGVAKRKNRTINGMANSMLQDKAMPKSFWAEAVNTAVYILNSSPTKAVPNRSSFEAXYGKKPIIGHMRVFGCICYAQVLAQKKVKSDNKSDWSIFVGYADGIKRYRLYNLEKKNIIISRDVIFDESAIWNWKSPEASGTPLLPTTTITLGQPHMYGNHEVEDQTPSQDASSPRSRSSFSSDSSPSSEEQISTPELAPRCVRSMVKLLXSTSQQRGTKQYEFSNYSVVESLXFKKQKKHKNWVKAMEDEIRMIEKNNTXELVDRSKDGEVIGVEMXFIRQLNPDGSIQKYKARLVAKGFMQKPDIDYYEKYAPVARLETIRTIITLAAQNKWKIYQLVVKSAFLNGYLDEEIYVKQLEGFLVQGGENKVFXLKKTLYRLKQTPRAWYSQIDKYFIQKGFAKSISEDCLTLSLYVDDXYTSNSEKMMQYFKKDMMNTYEMSDMGLLHYFLGMEVHHSTEGIFISQRKYAENILKKIKMDNCKSVTTPXLPNEKQKARDGADKADPTIYRSLVGSLLYLTATRPDIMLLXFAASLLSRYMFSPSQLNFTTAKRVLRYIKGTTGYVIWYKPVKNXKLIGYTDSDWAGCLDDMKSTSGYAFSLSSAEAEYVATSKAVSQAVWLRRIMEDIDERLTQIYCDEWCGGWRWRVIINRVKAVIN

SEQ ID NO: 184775 - protein, 61 aa, Oryza sativa
  Clone ID: PAT_MRT4530_81736C.1.pep
NKLLPKFFLIPISPKIILSLTVFFKLFFCLHNLLPQRFQINLPHAYSPKFFFLTFNLFYSV

SEQ ID NO: 184776 - protein, 1003 aa, Oryza sativa
  Clone ID: PAT_MRT4530_81737C.1.pep
MARGSAPLDGSVLPPSRIVSERQAGLPRRFMPESATGREVVTLGEGRPAPHYPGRSVFFLSFAMAGLVPPFSIFFMDILEFYDLQMAHLTPNAIMTLAIFAHLCEMFIGVSPSLRLFRWFFTVQPVSPPTVVGGCYFQPRGQVLNRYIPCVLRKKWDDWKSDWFYTPLVDEARLRLPSQPPAQASSWQAAVDLGDGYDAVLDRLVGLRSQGLTGAMVFGDYLRRRIAPLQRRARGAWEYTGPEDYMRTHQGRKWDWDPEDFRMVVQRVLNLSSVEASLIPQGVLPLCCDPERANILTIMQEVGASGERAPRGHVGAGGSRRGEQSTPGGGRASGPRDGDPGGSRPADARGKRKQEGTPPPSPPRGGGAVRASSRRPEGAVPTPQPEGERKKKRLRKMGGTEPCRVNLISPPRWSFSRPPRSEIPSHPPPPRHSMSGRSEAEETATAEARRREADRREAADRLREAEEAAQEAVRVRQAEEAAREEARLRRAGESVREAEAARARQAACQAPDPTPPEATMTSEATHDEAADAPLGPDPSGDAWDEPASGDAPGSGTSIGGPSRAAPTPRRLSPLPSAAPLSAEPLLQALAAANTTVLDGLSAQMEVLQAERAELDAAWARVEEGRRSVEAMVEAGRKAHRRHASELEARRRDLAEIAREVEEERETALIATAVLDEVRNDLRLQYGSQAAELEKKLDTARGVLDAAAARERRAAEIEAASRQREEALEARATALEERARALDAKEKDLADREAAVATREATLAAHEAACAEEESALRLREDALTERERALEEAEAAAQRLADSLFLREAAREEQARHNLEGAPAEHTIAGLQGALDSFAGEVKALRLASEVGPGMLRDAVSRLDRAGRQAGLWGGRTAKYAANQGGLAQRLSEMAGTLQRLPEELEETIKSSSRDLARGAVELVLASYQARDPDFSPWAALDEFPPGTEDGARAQVRDAADHIVHSFEGTAPRLAFALDSDEEGGDDGADDSDDEAGDPGASE

SEQ ID NO: 184777 - protein, 904 aa, Oryza sativa
  Clone ID: PAT_MRT4530_81738C.1.pep
MARGSAPLDGSVLPPSRIVSERQAGLPRRFMPESATSREVVALGEGHPAPHYPGRSVFFLSFAMAGLVPPFSSFFMDVLELYDLQMAHLTPNAVMTLAIFAHLCEMFIGVRPSLRLFRWFFTVQPVSPPSVVGGCYFQPQGPVLNRYIPCVLRKKWDDWKSDWFYTPLADEARLRLPSQPPAQASSWRAPVDLGDGYDAVLDRLAGLRFQGLTGAMVYGDYLRRRIAPLQRRARGAWEYTGSKDYTRTHQGVKWDWVPEDFKMVIQRVLNLSSVEASLIPQGVLPLCSDPERANILTIMQAVGALGERAPRGHDGAGGSHRGEQSTPGGGRASGPRDGGPGGSRPADARGKRKQEDTPSPSPPRGGGAAEEAAWEEAKLCRAEESVRETEAARARRAACQAPDPTPSEATTTSEATHDEAAGAPLGPDPSGDVRDEPASGDAPEFGTSIGGPSRAAPTPRRVSPLPSAAPLSAEPLLQALAAANTTVLDGLSAQMEVLQAERAKVDAAWARVEEGRRSVEAMVEAGRKAHRRHASELEARRRDLAEIAREVEEERETALIATAVFNAARDDLCLQYGSRAAELEKKLDASRQLEEALEARATVLEERARALDTKERELAGREAAVAIREATLAAHEAACAEEESALRLREDELTERERALEEAEAAAQRREEQAHLNLEGARAERAALDQRAAEFEARAKELDARARSDGAAAGDGDLAARLAAAEHTIAELQGTLDSSAGEVEALRLAGEVGPDMLRDAVSRLDRAGRQAGLWGGRTAKYAANQEGLAQRLSEMAGTLQRLPEELEETIKSSSRDLARGAVELVLASYQARDPDFSSWAALDEFPPGTEDGARAQVRDSADHIVHSFEGTAPRLAFALDSDEEGGNGGADDSDDEAGDLGASA

SEQ ID NO: 184778 - protein, 1057 aa, Oryza sativa
  unsure (1)..(1057): unsure at all Xaa locations
  Clone ID: PAT_MRT4530_81739C.1.pep
MARGSAPLDGSVLPPSRIVNERQAGLPRRFMPESATGREIVSLGEGCPAPRYPGRSVFFLPFAMAGLVPPFSSFFMDVLEFYDLQMAHLTPNAVMTLAIFAHLCEMFIGVRPSLRLFRWFFTVQPVSPPSVVGGCYFQPRGPVLNRYIPCVLRKKWDDWKSDWFYTPLADEARLRLPSQPPAQASNWRVPVDLGDGYDAVLDRLAGLRSQGLTGAMVFGDYLRRRIAPLQRRARGAWEYTGSEDCMRTHQGVRWDWAPEDFKIVVQRVLNLSSVEASLIPQGVLPLCSDPDRASILTIMQTVGASEERAPRGHDGAGGSRXGGGEQSTPGGGRASGPRVGGPGSGRPADARGKRKQEGTPPPSPPRGGGAARASSRRPEGATPTSQPEGERKKKRPRKMGGTEPSRGNLISPPRXPSRPSRHSKSGQSEAEDPATTEARRRESDRREAVDRLREAEEAAREAARARQTKEAVREEAGPRQAEATTSSEATRETDRQEAADRLREAEEAAQVAVRARQAEEAAREEARLRQAEATTTSETARDEAASASLGPTPSCDAQDKPGPGDIPEPGTSIGGPSRAASSSRRLFPTPSVAPLSAEPLLQALAVANTTVLDGLSAQVEALQAKRVELDAAWARVEEGRRSVEAMVEVGRKAHRRHVSELEARRKVLGEIAKEVEEERGAALIATTVMNEAQDTLRLQYGSWEAELGKKLDAARGVLDAAAARERRAAETEVVSRRREEALEARAMALEERACAMERDLADREAAVAIREVTLAVHEAACAEEESALRLREDALTERERALEEAEAAAQRLADSLSLREAAQEEEARRNLEGARAERAALNQRAAEFEAREKELDARARSGGAAAGESDLTTRLAAAEHTIADLQGALDSSAGEVEALRLAGEVGPGMLRDAVSRLDRAGRQVGLWGGRTAKYAANQGGLAQRLSEIAGTLQRLPEELERTIKSSSRDLARGAVELVLASYQARDPDFSPWTALDEFPPGTEDGARAQVRDTADHIVHSFEGSAPRLAFALNSDEEDDDGRVGDSGDEAGDPGASE

SEQ ID NO: 184779 - protein, 146 aa, Oryza sativa
  Clone ID: PAT_MRT4530_8173C.1.pep
HSSSSSPSSSCWCSSRGHLRPPPAPSSASPPPDGSAAAPTVVRRPTRRRRHPPRPPAEAASTPPPPPAPRLVRRPRGATEGRGSGGSSSTSARGSGSRSPPSPRHCRWPSSARVWRCSLASSGGASPATARMRRRRRPPLPRHRRR

SEQ ID NO: 184780 - protein, 119 aa, Oryza sativa
  Clone ID: PAT_MRT4530_81740C.1.pep
SPVPERLERAREVPTPPRLRRHGRRFFLHCRRGDRARPHEPHLLLVVLLRCSNTSTRPPAAASPTAKAAAAALLSRLAPAASSPAAGRLAHRRGEEKRRGEDRRGEEREREEEEGREMT

SEQ ID NO: 184781 - protein, 1297 aa, Oryza sativa
  unsure (1)..(1297): unsure at all Xaa locations
  Clone ID: PAT_MRT4530_81741C.1.pep
MARGSAPLDGSVLPPSRIVSERQAGLPRRFMPESATGREIVWLGEGCPAPRYPGRSVFFLPFAMAGLVPPFSSFFMDVLEFYDLQMAHLTPNAVMTLAIFAHLCEMFIGASNWRAPVDLGDGYDAVLDRLAGLRSQGLTGAMVFGDYLRRRIAPLQRRARGAWEYTGSEDCMRTHQGVRWDWAPEDFKIVVQRVLNLSSVEASLIPQGVLPLCSDPDRASILTIMQAVGASEERAPRGHDGAGGSRRGEQSTPGGGXRASGPRDGGPGSGRPADARGKRKQEGTPPPSPPRGGGAARASSRRPEGATPTSQPEGERKKKRLRKMGGTEPSRGNLISPPSEIPSRSSRHSKSGQSEAEDPATTEARRRESDRREAADRLREAGEAAQVAVRARQAEEAAREEARLRQAEAATTSEAARDEAAGASLGPTPSGDAQDKPGPGDIPESGTSIGGPSRAASSPRRLFPTPSVAPLSAEPLLQALAVANTTVLDGLSAQVEALQAERAELDAAWARVEEGRSSVEAMVEVGRKAHRRHVSELEARRKVLGEIAKEVEEERGAALIATTMMNEAQDTLRLQYGSWEAELGKKLDAARGVLDAAAARERRAAETEVASRRREEALEARAMALEERACAVERDLADREAAVAIREVTLAVHEAACAEEESALRLREDALTERERALEEAEAAAQWLADSLSLREAAQEEQARRNLESARAERAALNQRAAELEAQARELDARARSGGAAAGESDLTARLAAAEHTIADLQGALDSSAGEVEALRLAGEVGPGMLRDAVSRLDRAGRQAGLWGGRTAKYAANQGGLAQRLSEIAGTLQRLPEELERTIKSSSRDLARGAVELVLASYQARDPDFSPWTALDEFPPGTEDGARAQVRDAADHIVHSFEGSAPRLAFALNSDEEDDDGGVGPVVPPVSSSSYLSPADPNRHSRPRRRKIRRPPAPELASNDVGTIPSTRRALPRSPRAEPKHRRSPANSSSAAPPLPSTPHCAVALPGTAVAVRTPSTAPLRQSTAATPLPPCIPSHLHHTPPPAVCHRRLSRRRVAPSSPLASQRRAAPRSPLFIAGNPPERGISRSPVSPTIPLLSGVVFSPLRSPISLPNRSNNFPRSCRPSAAAPPWSGVVGPPFPSPPVSAAAILSAAGRLPMVVPSPALLGEDPLHLLSLSPLFVASRACRRAGGRRRRPSGRAPSLPAGRPVSWLPLARGRPILLRGDLGRPRGLPVPPASVPLWRHVGATSASRPSWPPRVCHVVRPRTSACVDSVHGAPATRESPSGGARLPAPPLPVG

SEQ ID NO: 184782 - protein, 425 aa, Oryza sativa
  unsure (1)..(425): unsure at all Xaa locations
  Clone ID: PAT_MRT4530_81742C.1.pep
ACLRRRRLVSPPTRLAXMPPSLGVYDFTXRLASVAADWCHRLHGWPVMPPSLGVYXLHRXACLRSRRLVSPPARLAYCAAVVGRLRPHRPACLRRRRLVSSPIRLVXTPPFMGIHVFTDRLAFVTADWCLRLHGWPXLCRCCWASTTSPXGLPPSPLTGVPACMAGXIMPPLLGVYVFTDRXASSAADWCFRLHGWPXLCRRCWASTSSPTGRLIRRRLVFPPARLAYYADVVGCLRFHRPAASSTADCCFRLHGWPVMTPTDAIFFTAGYPLRLVYTATTTDGHHCLPSPTGYAAANWCFYLHNCASSLPVCFCCHRLVFTLSRQGNFVIMVERLHLYYLRHRQTLLLLLRKFCYFTSHDVYKSFDISACVTKYDAVLFYYNKWCSNLXYFFSDICNMHLHXDCNGYSTTRSYSSRLYVQLFPN

SEQ ID NO: 184783 - protein, 59 aa, Oryza sativa
  Clone ID: PAT_MRT4530_81743C.1.pep
MTDAGEGTDGEEPESEERAAARDRSDDESSAAPRLASPPPELGNRDRSPGSDADLPGRP

SEQ ID NO: 184784 - protein, 81 aa, Oryza sativa
  unsure (1)..(81): unsure at all Xaa locations
  Clone ID: PAT_MRT4530_81744C.1.pep
VMRMGAKSGRGHVDRGPLRDGACATGHRLKGASGGGRSXAAXXXXXRHHHHHPSCSSSSRRTFQKLPCRGAQEEQSREGER

SEQ ID NO: 184785 - protein, 139 aa, Oryza sativa
  Clone ID: PAT_MRT4530_81745C.1.pep
MWLSSLALPPRLASLRSSQGASGCHVTPLGPSRCLALRPSPNCHVAGGASGEETQAEPPSMRAAPQLSLTAFNTLRADVRCRPTDPRQSGGRAPTSVSVSGGVEAGLSPVSSGGWRWVPLKDRLLLSFRAKARIVARSR

SEQ ID NO: 184786 - protein, 1591 aa, Oryza sativa
  Clone ID: PAT_MRT4530_81746C.1.pep
MGSVSGIDNFVFPPGQAFRFGSLNFITNDFGKISLLDSDPNQSGKNQVSAPFGIPNSAKIYSKLISLESASNHLDEIPSTPTPPDQDDGAYPPIMMKLPDDLAAVFTTRASSPRRPRRKLASTPIMPSSREVGIILQPLGTISTDQLEGYLSSPGIDSRPTEIVEYDEFGYRYDSCDLDDFDESFEDNYTPLYFGVFMADNETEEQCQARETEARRQDVEGTAVFRTPQQNAVAAITLLDTLLKEDALNQADHVVNILNQTKTMIAASVPVNFGSIRTPTGSRAPHLRSHDYHQPSLSIAGIGSNRRSRGHDERSVHSPPERHRERRVERPCSPPCQCPVDLRDKINQRRAARGHRHSPDRYDDDMDGVAAFTNDLRRVDWPAGFKPTGIEKYDGTTNLESWLTVYGLAIRAAGGDSKTMANYLPVALADSARSWLHGLPRGMIGSWTELHDHFIANFQVTFERPGTQFDLYNVIHKFGESLRDYIRRFSEQRNKISNITDDVIIAAFTKGIRHEDLVGKFGRKPPKTVKQMFEKTNEYAKAEDAIIASKQSGPTWKPKKDAPTTGGGGSNNHKDRKQQYAKNARKTPDGEQSTSKKKDDDDDAPTDFQDHRKELNHIFGGPLAYESKRKQNLTEREINAVQPDMPQYLRWSEITIKFDHSDHPDRVVHPGRYPLVLDPVVRNVKLRRSLIDGGSALNILFAKTLDDMQIPRTELKPSNAPFHGVIPGLSATPLGQITLPVTFGTRENFRTENICFEVADFETAYHAILGRPALAKFMAVPHYTYMMMKMPGPRGVISLRSDIKQAVTCDKESCEMAQTREIAIAREDIRLAATTTSEGEESALITFLQNNKDIFAWKPSDMPGIPREVIEHSLHVKEDAKPIKQRLRRFAQDRKDVIKEELTKLLAVGFIKEVLHPDWLANPVLVRKKTGQWCMCFDYTDLNKSCPKDPFGLPRIDQVVDSTAGCELLSFLDCYSGYHQIRLKESDCLKTSFITPFGAYCYITMPIGLKNAGATYQRMIQRCFSTQIGRNVEAYVDDVVVKTKQKDDLITDLEETFASIRAFRMKLNPKKCTFGVPSGNLLGFMVSHRGIQANPEKVNAILNMKPPSSQKDIQKLTGCMAALSRFVSRLGERGMPFFKLLKKTDNFQWGPEAQKAFEDFKKLLTTLPVLASPHPQEPLLLYVSATSQVVSVVLVVEREEEGHVQKVQRPIYFVSEVLADSKTRYPQVQKLLYEEGRQLLKDIHSGICGNHAAARTIVGKAYQQGFFWPTAVSDANKIVRTCEGCQFFTRQTHLPAQELQTIPLSWPFAVWGLDMVGPFKKAVGGYAHLFVAIDKFSKWIEAKPVITITTDKARDFFINIVHRFGVPNRIITDNGTQFTGGVFKDFCEDFGIKICYASVAHIMSNGQVERANGMVLQGIKARVFDRLNPYAGKWVEQLPSVLWSLRTTPSRATGQSPFFLVYGAEAMLPSEVEFESLRFRNFREERYGEDRVDDLHRLEEAGEAALIQSARYLQGLRRYHNRNVRMRAFLLCDLVLRKIQTTRDRHKLSPLWEGPFIISEVTRPGSYRLKCEDGTPIDNSWNIEHLHRFYA

SEQ ID NO: 184787 - protein, 596 aa, Oryza sativa
  unsure (1)..(596): unsure at all Xaa locations
  Clone ID: PAT_MRT4530_81747C.1.pep
SLVFPLAWPAYHAAVVGRLHPHRTAASSTADWCFRLHSRPIMPPLLGVSVFTDRPPSPPPXGVLACTTGLLCRRCWASTSSSIGRLVCRRLVSSPARPAYYAAVGGRLRLHRPAAFAAADWCPRLHDRPIMPSLLGVYVFTDRPPRLPPTGVSACTAGLLCRRCWASTSXPTGRLVCRRLVSPPARLAYYAAVVARLRLHRPAASSAADWCFRLHGWPIMPPLLAVYVFTDRPPRLRPTGVFACMAGLLCRRCXASTSSPTGRLVRRRLMFLPARLAYYAAIVGHLRLHRPAASSAADWCLRLHGWPIMPLLLGVYVFTDRPLXSAADWCLRLHGWPIMPPLLGVYVFTDRPPRPPPTGVSAYTAGLLCRRCWASTSSPTGRLXPPPTGVTTCTAGLXMTPTDAIFFTAGYIAVTANRRQHLQHKLPTSADRLVSSLPWLHDSLLVMPLPTGAFIFTTARLHYRFASVATDSCSLHHGNATLSSWXSDFIFIIFGTGKLYCCYFASFATAPTTTSLXTSTSRDAATGAMPCYFTTTSGSPIFRISTWTSSTHIFNQAMTTRXQEVTVLDSMFSCFPTNQRVGGYTNTRLSKFDKLK

SEQ ID NO: 184788 - protein, 1787 aa, Oryza sativa
  Clone ID: PAT_MRT4530_81748C.1.pep
MGSVSVTNDFAFPPGQAFRFGSLNFITKNFGKISLLDSDSNQSGRDQVPMPFGIPNSAKAYAKIISPESASNHSDEIQSIFPRPDQDDGSYPSILMKLPDDLAAVFTVKTSPTRRSRRAPALAPIRSRSREVGVILQPLGTVSTEELDGYLSSPGVSSRPTEILDYDDFGYHYDHGDLDNFDDSYEDNYTPLFFGEAEDRRQHALESGRRARELIGQQDVDGTAVFRTPQQNAVAAITLLDTLLKEDALNQADHVVNILNQTKTMIAASVPANSASTRTLTGSRVPHLRSQDYHQPSLSIAGVESSRRSRGHDERSVRSPPERYRERRVERPHSPHRRRPIDLRDTINQRCAARGHHSPDRYDDDVDGVAAFTSDLCRVDWPAGFKPTGIEKYDGTTNPESWLTVYGLAIRAAGGDSKAMANYLLVALADSARSWLHGLPRGTIGSWAELRDHFIANFQGTFERPGTHFDLYNIVQKSGESLRDYIRRFSEQRNKISDITDDVIIAAFTKGIRHEDLVGKFGRKPPKTVTQMFEKANEYAKAEDAITASKQSGTTWKPKKDTPTAGGSGSNNHKDRKRKPEELVATTSPSSRQRSRVNTFDKIMNSQCPHHPNSNHVAKDCFVYKQFAEQYVKNARKPSDGDQGTSKKKDDEDDAPPGFQDHRKELNHIFGGPLAYESKRKQKLTEREINAVQPNTPQYLRWSEIAIKFDRSDHPDRVVRYPLVLDPVVRNVKLRRTFIDGGNALNILFAKTLDDMQIPRTELKPSNAPFHGVIPGLSATPLGQITLPVTFGTRENFRTENVCFEVADFETAYHAILGRPALAKFMAVPHYTYMTMKMPGPRGVISLRSDIKQALTCDKESCEMAQTHETTLAREEIRLTATTASEGEVPATKLTKTEESDAKTKKIPLDPSDLDKTANNKDIFAWKPSDMHGIPREVIEHSLHVKEDAKPIKQRLRRFAQDRKDAIKEELTKLLAAGFIKEVLHPDWLANPVLVRKKTGQWRMCVDYTDLNKSCPKDPFGLPRIDQVVDSTAGCELLSFLDCYSGYHQIRLKESDCLKTSFITPFGAYCYITMPFGLKNAGATYQRMIQRCFSTQIGRNVEAYVDDVVVKTKQKDDLIADLEETFTSIHAFKMKLNPEKCIFGVPSGRLLGFMVSQRGIQANPEKINAILNMKPPSSRKDVQKLTGCMAALSRFVSRLGEQGMPFFKLLKKTNNFQWGPEAQKAFEDFKKLLTTPPVLASPHPQEPLLLYVSATSQVVSTVLVVEREEEGHIQKVQRPIYFVSEVLAHSKTRYPQVQKLLYGVLITVRKLSHYFQSHPVTVVTSFPLRDILYNREANGWIAKWALELMSSDISFKPRTSIKSQALADFLAEWTECQEDMPEEKMEYWTMHFDGSKRLTGTGAGVVLISPTGERLGYVLWIPFSASHDVAEYEALLHGLRIAISLGIRRLIVLGDSQLVVNQVMKEWSCLDDNMTAYRQEVRKLENKFDGLELTHVLRHNNEAADRLANFGSKREAAPSDVFVEHLYEPTVPRKETVKAMDIQGVSMIEADWREPFTKFLSKQELPQDKNEAERISRRNRLYIIHETELYKKSPSGILQRCVSLEEGRQLLKDIHSGICGNHAAARTIVGKAYRQGFFWPTAVSDADKIVRTCEGCQFFARQTHLPAQELQTIPLSWPFAVWGLDMVGPFKRAVGGYTHLFVAIDKFSKWIEAKPVITITADKARDFFINIVHRFGVPNRIITDNGTQFTGGAFKDFCEDFGIKICYASVAHPMSNGQVERANGMIL

SEQ ID NO: 184789 - protein, 101 aa, Oryza sativa
  Clone ID: PAT_MRT4530_81749C.1.pep
YNCPSFYIRFNWHKLCPPTNLFYLSALPLFSFCRHYPFSLLDPFFPSLSHLVWLIIPSLFLLFNLASLPGYSPHFSLLSPPFIGHPPFPFLSFLFLQVFSL

SEQ ID NO: 184790 - protein, 167 aa, Oryza sativa
  Clone ID: PAT_MRT4530_8174C.1.pep
MAREKSKKEEEGSSATRNPAAELTEDLIVDILSRLPVKSVCRCKCVSRRWRGLISDPDHRKKLPQTLAGFFYSSENESSFPDEETFPIVICETLVALGRLSLKQSNNNAFSEGTEEHLAAVRHLLRKEKVVNLSSVRMNISLQLDMVIWLLAELKDVEAGRLCSTSW

SEQ ID NO: 184791 - protein, 1100 aa, Oryza sativa
  unsure (1)..(1100): unsure at all Xaa locations
  Clone ID: PAT_MRT4530_81750C.1.pep
MVTRLRHTRSLSNISSSGVMARGSAPLDGSVLPPSRIVSERQAGLLRRFMPESATGREIVSLGEGCPAPRYPGRSVFFLPFAMAGLVPPFSSFFVDVLEFYDLQMAHLTPNAVMTLAIFAHLCEMFIGVRPSLRLFRWFFTVQPVSPPSVVGGCYFQPRGPVLNRYIPCVLRKKWDDWKSDWFYTPLADESRLRLPSQPPAQASNWRAPVDLGDGYDAVLDRLAGLRSQGLTGAMVFGDYLRRRIAPLQRRARGAWEYTGSEDCMRTHQGVRWDWAPEDFKIVVQRVLNLSSVEASLVPQGVLPLCSDPDRASILTIMQAVGASEERAPRGHDGAVGSRRGERSTPGGGRASGPRDGGPGSGHPADARGKRKQEGTPPSSPPRGGGAARASSRRPEGATPTSQPEGERKKKRPRKMRGTEPSRGNLISPPRWSFNRPPRSEIPSRPSRHSKSGQSESEDPASTEARRRESDRREAADRLREAEEAAREAALARQTEEAVREEAGLRQAEATTSSEATRETDRQEAADRLREAEEAVQVAVQARLAEEAAREEVRLHQAEAATTSEAACDEAAGASLGPNSSGDAQDKLGPGDIPESGTSIGGPSRAASSPRRLFPTPSAAPLSAEPLLRALAVANTTVLDGLSAQVEALQAERAELDAAWVRVEEGRRSVEAMVEVGRKAHRRHVSELEARRKVLEEIAKEVEEERGAALIATTVMNEAQDSLRLQYGSWEAELEKKLDAAQGVLDAAAARERRAAETEVASRRRDEALEARAMALEERACAVERDLADREAAVAIREVTLAVHEAACAEEESALRLREDALTERERALEEAEAAAQRLADSLSLREASQEEQARRNLEDARAERTALNQRAAELEAREKELDARARIGGAAAGESDLTARLATAEHTIADLQGALDSSAGEVEALRLAGEVGPGMLRDAVSRLDRAGRQVGLWGGQTAKYAATQGGLAQRLSEIAGTLQRLPEELERTIKSSSRDLARGAVELVLASYQARDPDFSPWTALDEFPPGTEDGARAQVRDAADHIVHSFEGSAPRLAFALNSDGEDDXGGVGNSGDEAGDPGCLCRGSLVSWLEQGLVPRS

SEQ ID NO: 184792 - protein, 196 aa, Oryza sativa
  unsure (1)..(196): unsure at all Xaa locations
  Clone ID: PAT_MRT4530_81751C.1.pep
LRETPPRRLQEFQFVRHDDHDSVAWLXFNDPAPPGGTDHQLHXQTAPMQVGNGAAAAXQQRQAFDAYASTTPGHGLTFDXVPHHHEASRPAVLEAXLGLGGAGXGGRNPATSXSTIMSFCGSTFTDXVSSIPKDHAARASXPTRLSAXGDPAMDREAKVIRYKEKRNRIREPDPYPRPSYPRSPLEIQLLRASLNS

SEQ ID NO: 184793 - protein, 87 aa, Oryza sativa
  Clone ID: PAT_MRT4530_81752C.1.pep
MAAARLSSLAGSKLDVSTSLVATCCHHPAPSQLFPFQSRSRPVRQRLQGARPSSGSRLERQDLDFLSTWERARYELDEEAATATSLA

SEQ ID NO: 184794 - protein, 114 aa, Oryza sativa
  Clone ID: PAT_MRT4530_81753C.1.pep
ATTHQSCQPPFIHSDRYHVTPNGVHPTHNPLGKQQLAVAQGPMLPPCQWPSASPIFIHLLLPEIPAPHITLWLQCSCIIVGATWVPTRWALQGHLCPCVAAHATHCWLKRSAHV

SEQ ID NO: 184795 - protein, 353 aa, Oryza sativa
  unsure (1)..(353): unsure at all Xaa locations
  Clone ID: PAT_MRT4530_81754C.1.pep
GNGGAGGVGGGXGGRGRGWGERENNKRRERRRRAIAAKIFAGLRAHGGYKLPKHCDNNEVLKALCNEAGWVVEPDGTTYRKGYKPPERMEVIXGAPSSPKPPCSSYQPSPRSXSTDASPTSSSFPSGASSPFLPHPNNMANGVDGXPILPWLKTLSNSPSSKKHPQLPPLLIHGGSISAPVTPPLSSPTAXRTPRMKTDWDESNVQPTWTGSNSPCVVNSTPPSPGRTMLPDPAWLAGIQISSTSPSSPTFSLVSSNPFSVFKDAILVGNNSSRMCTPGQSGTCSPAIPGMAPHPDIHMMDAVSDEFAFGSSTNGGHQAAGLVRAWEGERIHEDSGSDDLELTLGSSRTRAAA

SEQ ID NO: 184796 - protein, 1080 aa, Oryza sativa
  Clone ID: PAT_MRT4530_81755C.1.pep
MARGSAPLEGSVLPPSRIVSERQAGLPRRFMPESATGREVVALGEGRPAPHYPGRSVFFLSFAMAGLVPPFSIFFMDILEFYDLQMAHLTPNAIMTLAIFAHLCEMFVGVRPSLRLFQWFFTVQPVSPLTVVGGCYFQPRGQVLNRYIPCVLRKKWDDWKSDWFYTPLAYEARLRLPSQPPAQASSWRATVDLGDGYDAVLDRLAGLRSQGLTGAMVFGDYLHRRIAPLQRRARGAWEYTGPEDIMRTHQGRKWDWDPEDFRMVVQRVLNLSSVEASLIPQGVLPLCCDPERANILTIMQEVGASGERAPRGHDGAGGSRRGEQPTPAGGRASGPRDGGPGGSRPADARGKRKQEGTPPPSPPRGGGAVRASSRRPEGAAPTPQPEGERKRKRLRKMGGIAPCRGNLISPPRWSFSRPPRRFVPAPIAAIFILPSPKASFHSPVSFCLLVFLPPQRDPVAPPPPPRPSKSGRSEAEETATAEARRREADRREAADRLREAEEAAQEAARVRQAEETAREEARLRRAGESVREAEAARARQAACQTSDPTPPEGTTTSEATHDEAAGARLGPDPSGDTWDEPASRDAPESGTSIGGPSRAAPTPRRLSPLSSAAPLSAEPFLQALAAANNTVLDGLSAQMEALQAERAELDTAWARVEEGRRSVEAMVEAGRKAHRRHTSQLEAHRRELAEIAREVEEERETALIATAVLDEARDDLRLQYGSRAAELEEKLDAARGVLDAAAARERRAAEKEAASRQREEALDVRATALEERARALHAKERDLADREAAVATREATLAVHEAACAEEESALRFREDALTERERALEEAEAAAQRLADSLFLREAAREEQARRDLEGARAERATLDQRAAELEARAKELDARAHSGGAAAGHDDLAAHLAAAEHTIAELQGALDSSAGEVEALRLASEVGPGMLRDAVSCLDRAGRQAGLWGGRHAKYAANQGGLAQRLSEMTGALERLPEELEETIKSSSRDLARGAVELVLASYQARDPDFSPWAALEEFPPGTEDGARAKVRDATDHIVHSFEGTAPRLAFALDFDEEGSDDGADDSDDEADVPGASE

SEQ ID NO: 184797 - protein, 311 aa, Oryza sativa
  Clone ID: PAT_MRT4530_81756C.1.pep
MSAASGAACGVCGGGVGECGCLLHQRRGGGGGGGGGGVRCGIAADLNRGFPAIFQGVGVEETAVEGDGGAQPAAGLQEFQFFGHDDHDSVAWLFNDPAPPGGTDHQLHRQTAPMAVGNGAAAAQQRQAFDAYAQYQPGHGLTFDVPLTRGEAAAAVLEASLGLGGAGAGGRNPATSSSTIFQVFNGVSTVNYLQMSFCGSTFTDAVSSIPKDHAAAAAVVANGGLSGGGGDPAMDREAKVMRYKEKRKRRRYEKQIRYASRKAYAEMRPRVKGRFAKVPDGELDGATPPPPSSAAGGGYEPGRLDLGWFRS

SEQ ID NO: 184798 - protein, 1103 aa, Oryza sativa
  unsure (1)..(1103): unsure at all Xaa locations
  Clone ID: PAT_MRT4530_81757C.1.pep
MARGSAPLDGSVLPPSRIVSERQAGLPRRFMPESATGREIVSLGEGCPAPHYPGRSVFFLPFAMAWLVPPFSFFFMDVLEFYDLQMAHLTPNAVMTLAIFAHLCEMFIGVQPVSPPSVVGGCYFQLRGPVLNRYIPCVLRKKWDDWKSDWFYTPLADEARLRLPSQPLAQAYSWRVPVDLGDGYDAVLDRLAGLRSQGLTGAMEYTGSEDCMRTHQGVRWDWAPEDFKIVVQRVLNLSSMETSLIPQGVLPLCSDPDRASILTIMQAVGASEERAPRGHDGAGGSRRGEQSTPGGGRASGPRDGGPGSGRPADTRGKRKQEGTPPPSPPRGGGAARASSRRPEVATPTSQPEGERKKKRLRKMGGTEPSRGNLISPPRWSFNRPPRSEIPSRPSRHSKSGQSKAEDPATTEARRRESDRREAADRLREAEEAAQQLVDKAIRLEDKKNRMDNRKRKIIVFQEAQDSSQRQRIKPLQIGESFSAGQEQSQQLGMNGEINSETNASNEDNDEQATQSVSFQQDQSREDNSNGREQRVCFNCYKPGHFVRECPKPKHQQPQVNNIVVTGANAVPVASSRVASSSVTAQLPVSKQHEFPGVTATTSEAARDEAAGASLGPTPSGDAQDKPGPGDIPESGTSIGGPSRAASSPRRLFPTPSVAPLSAEPLLQALAVANTTVLDGLSAQVEALQAERAELDAAWARVEEGRRSVEAMVEVGRKAHRRHVSKLEARRKVLGEIAKEVEEERGAALIATTVMNEAQDTLRLQYGSWEAELGKKLDAARGVLDAAATRERRAAETEVASRRREEALEARAMALEERACAVERDLADREAAVAIREATLTAHEAACAKEESALCLREDALTERERALEEAEAVAQRLADSLSLREAAQEEQARRNLESARAERAALNQRAAELEAQARELDARARSGGAATGDSDLAARLAAAEHTIADLQGALDSSTGEVEALCLAGEIGPSMLRDAVSRLDRAGRQAGLWGGRTVKYAANQGGLAQRLSEMAGTLQRLPEELEGTIKASSRDLARGAVELVLASYQARDPDFSPWTALDEFPPGTEDXRAQVRDAADHIVHSFEDSAPRLVFALNSDEEDD

SEQ ID NO: 184799 - protein, 1043 aa, Oryza sativa
  Clone ID: PAT_MRT4530_81758C.1.pep
MARGSAPLDGSVLPPSRIVSERQAGLPRRFMPESATGREVVALGEGRPVPHYPGRSVFFLSFAMAGLVPPFSIFFMDILEFYDLQMAHLTPNAIMTLAIFAHLCEMFIGVRPSLRLFRWFFTVQPVSPPTVVGGCYFQPRGQVLNRYIPCVLRKKWDDWKSDWFYTPLADEARLRLPSQPPAQASSWRAAVDLGDGYDAVLDRLAGLRSQGLTGAMVFGDYLRRRIAPLQRRARGAWEYTGPEDYMRTHQGRKWDWDPEDFRMVVQRVLNLSSVEASLIPQGVLPLCCDPERAKILTIMQVVGASGERAPRGHDGAGGSRRGEQSTPGGGRASGPRDGGPGGNRPADAWGKRKQEGTPPPSPPRGGGAVRASSRRLEGAVPTPQPEGERKKKRPRKMGGIVPCRGNLISPPRWSFSRPPRSEIPSRPPRHSKSGRAEAEETATAEARRREANRREAADRLREAEEAAQEAVRVRQAEEAAREEARLRRAGESVREAEAARARQAACQTPDPTPPEATTTSEATHDEAAGAPLGPDPSGDAWDEPASGDAPESGTSIGGPSRAAPTPRRLSPLSSAAPLSVEPLLQALAAANSTVLDGLSAQMEALQAERAELDAAWARVEEGRRSVEAMVEAGRRAHRRHASQLEARRRDLAEIAREVEEEQETALIATAVLDEARDDLRLQYGSRAAELEEKLDAAQGVLDAAVARERRAAENEAASRQREEALEARATALEERARALDAKERDLADREAAVATWEATLAAHEAACAEEESALRLREDALTERGQALEEAEAAAQRLADSLFLREAAREEQARRNLEGTRAERAVLDQRAAELEARAKELDARAHSSGAAAGHGDLAARLAAAEHTIAELQGALDSSAGEVEALRLASEVGPGMLRDAVSRLECAGRQAGLWGGRYTKYAANQGGLAQRLSEMAGALERLPEELEETIRSSSRDLARGAVELVLASYQARDPDFSPWAALEEFPPGTEDGARAQVRDAADHIVHSFEGTAPRLAFALDSDEEGGDDGADDSDDEAGDPGASE

SEQ ID NO: 184800 - protein, 53 aa, Oryza sativa
  Clone ID: PAT_MRT4530_81759C.1.pep
GIIPYIWSNSSVPSRQSLLKFNVLVSDYFVSDIHIHCLSCSSLLMEQILTCSY

SEQ ID NO: 184801 - protein, 112 aa, Oryza sativa
  Clone ID: PAT_MRT4530_8175C.1.pep
CPRKVEPILVLASHKVQFFPSQAPHTQVLVGLYIMFIIHMYNLATRLNLFQHIQLPKTRSKALTWHNCSFATMPCHKTLIQTPSHRCSTKCSVMYQVPSGSTWNANTIALYK

SEQ ID NO: 184802 - protein, 49 aa, Oryza sativa
  Clone ID: PAT_MRT4530_81760C.1.pep
SGCSFCFRRKRGIFICLRGLWLFSGKIVLLLLAWAFHVNSGVFKRFLCL

SEQ ID NO: 184803 - protein, 75 aa, Oryza sativa
  Clone ID: PAT_MRT4530_81761C.1.pep
FLRTVGDLNHLISATMSGVTCCLRFPGQLNSDLRKLAVNLIPFPRLHFFMVGFAPLTSRGSQQYRALTVPELTQQ

SEQ ID NO: 184804 - protein, 944 aa, Oryza sativa
  Clone ID: PAT_MRT4530_81762C.1.pep
MALNMKTLTQALAKASAVIEKTVTTTVQEVTGPRPLQDFELLEQAGSGGPGLAWRIYTARPREGAPSAPYPVVSVWVLDKRALAEARARAGLTKAAEDAFLDLARADAARLVRLRHPGVLHVVQALDETKAAMAMATEPVFASVANALGCLDNVGKVPKELKGMEMGLLEVKHGLLQVSETLDFLHNNAHLAHRAISPETVFITLNGSWKLGGFGFALSVDQATGSLTSTQQFHYSDYDVEDTALPLQPSLNYTAPELVRSGDSKVGSACDIFSFGCLAYHLVARRPLLDCHNNVKMYMNSLTYLTSEAFSNIPADLVVDLQRMLSVDVASRPSAMAFTGSSFFRNDTRLRALRFLDHLLERDNMQKTEFLKALSDMWKDFDSRVLRYKVLPPLCAELRNMVMQPMILPMVLTIAESQDKGDFELSTLPALVPVFTSASGETLLLLVKHADLIIHKATQEHLISHVLPMLVRAYDDTDPRLQEEVLRRTVPLSRQLDVKLLKQSVLPRVHGLALKTTVAAVRVNALRCLGDLVPSLDKEGILEILQTLRRCTAVDHTAPTLMCTLGVANAIFKQCGVEFAAEYVIPLVFPLLTAHQLNVQQFAKYILFVKDITSKIEEKRGVTVTDNGNTEVKVSPSLANGIHSEPLSRGVGQTEQIQTAKGAAWDEDWGPTKKASTPSQSSDSNARMKQPSDPFDFSTQTKQPSALPFDFSTQQPKPSSAIPQVTPATISPAPSLPSLQSLAPSSGPQTSGSCVPVDIEWPPRKNTSSDFNAPLSVSEQSKSGGLSSDGLADIDPFADWPPKASSGASISAVGHLSSTSQSISGLSTGNIGFSGNSGSLGQMKTNQMSWSAKPNTTNLMAVNSTGNYLNQGNSALGFGNPIGGRSTGSLSSSTTQGPPRLAPPPSASVGRGRGRNQGQSALSRASRTPHSNVSSEQPPILDLL

SEQ ID NO: 184805 - protein, 54 aa, Oryza sativa
  Clone ID: PAT_MRT4530_81763C.1.pep
KTEIEKKIFFFQPVDYLCKTLPILAKHFNSNFFSPSLKPFLSEPPLSWPNCLLK

SEQ ID NO: 184806 - protein, 95 aa, Oryza sativa
  Clone ID: PAT_MRT4530_81764C.1.pep
GVLVPLASPSVFHLIGVDFFPEVPPSCFLEPHLTPEEFWIFDLKPLGSFVSRALTPLILKLFGSPSGSCVPFFCLTRAFCPVFWGSWVHFSRYTW

SEQ ID NO: 184807 - protein, 258 aa, Oryza sativa
  Clone ID: PAT_MRT4530_81765C.1.pep
ASLSLLLCLAAAAGAAAAAVPPRLQCFEHPPDMKAGGGEAGVVVHDLAGYEAYVTGAAHSGRAIVLASDVYGFQAPLLRQIADKVGDAGYYVVVPDLFHGDPATTTVNFTEWLESHSPVKEAEKAKSIFAFLRNEGKSLVGVGGYCWGGKFAVEVAKTNEVGSVVISHPYAVTADDMKEVKLAIEILGGQNDTVTPPKIVYQYVHALRQRNDIDFYAKIFPGVSHGFAGRYNTSDPFALETGKQALALMLDWFQKHLK

SEQ ID NO: 184808 - protein, 149 aa, Oryza sativa
  Clone ID: PAT_MRT4530_81766C.1.pep
MRMRMRILSCGCGCGCGEWASGGATASRPSATATQRRPAAPPWLLAPPPLLLGCSTGWWRRCHSSSPPRLLGAATTPSTVAHQHVSSAGPPVHRHIPVTSPAAIPVGCRQQPSPSWRRHSPATTVVSRAVSSSCFQFEVSNLGFTDLEM

SEQ ID NO: 184809 - protein, 548 aa, Oryza sativa
  unsure (1)..(548): unsure at all Xaa locations
  Clone ID: PAT_MRT4530_81767C.1.pep
MAPSSLLLCWSILCLAVAGGGGGGAATSADSLRLPCLDNPPELTADGDGEAGVVIDDLAGFPAYVTGDVHSGRAIILASDIYGFEAPLLRDNADKVGEAGYYVVVPDFFHGQPYNGDPSINVTKWITLHSPGYGLVKAAEDAKSIFAALKREGKSVIGIGGYCWGVSAQVQLAAKFAVEVAKTNEVEAIVISHPSEVIADDMKGVKCPIEILGGQNDPITPPSLVDQFVNVLRQTTEVDYFARIFPGVSHGFACRYNASNQFAVNTAEQALALMLDCMQINHMATASLSLLILCLAALAAAAGAAAAAAPPRLQCFEHPPDMKAAGGGEAGVVVHDLAGYEAYVTGAAHSDRAVVLASDVYGFQAPLLRGREGCLEMATLRVTTAAFPGASAARPXAGPTEWLESHSPVKEAEKAKSIFAFLRNEGKSLVGVGGYCWGGKFAVEVAKTNEVEAVVISHPYAVTADDMKEVKWPIEILGGQNDTVTPPRLVYQYVHALRQRNDIDFYAKIFPGVSHGFAGRYNTSDPFALETGKQALALMLDWFQKHLK

SEQ ID NO: 184810 - protein, 340 aa, Oryza sativa
  Clone ID: PAT_MRT4530_81768C.1.pep
MALEAQPSPSPSPRRSPEAAAGGAGAAGDPPVTPMHSAAGDEWAAEEKRPPTPPQSSSASPPHSAAIVVSSQTHAAAAKYVPPSAAGHVGGGDGRSWYSWNGGRTAKPYRPPPPPRKKPQFQPPPQPPRAWDPSPPPPPPAPAAPVLVPPPAPAPRPAPAPAPRVPARAVEHDHRVVPDILLRKRRTAVLQRTALVARVAAALLCLAALAVLAADSRKGFALDSYSNYSQLRYSEAVNVIGFVYSVLQFFVLADLMRRNKHLNPRRKGDYFDFFMDQVLAYLLISSSSSATARVGDWIDNWGSDPFPKMANSSIAISFMAFLVFAISALISAYNLFRRDI

SEQ ID NO: 184811 - protein, 312 aa, Oryza sativa
  Clone ID: PAT_MRT4530_81769C.1.pep
MESSGEFGEKGKKREGTRARAGERGKRVRETRRTTGAANVARRGRDVGAAAVSAVVATWGGGGGLRDSQGEDEDLSILGREAQRMSRIEGIGEAMPGAAMCMSRIAAARANGGADLAVFEQFERLVRPPFSIPPLVDGSRRLSATGSSSGRSKSSGGGELGRQRHATVKEKLNSVANFLEEMNSVVSLVKKQRINDPSMMNWSLQLKDAIDKVEFTRTARTTRIAKESPCALLRLFFSEGATPVAAWRRGRGRWAAAAEWMRRRYAATGSGARWDGGDDRKGRREGNPNPRFGRGGERRKGSVLTGEKVAAG

SEQ ID NO: 184812 - protein, 54 aa, Oryza sativa
  unsure (1)..(54): unsure at all Xaa locations
  Clone ID: PAT_MRT4530_8176C.1.pep
SSRSTNTXCTLLATLYGVHVHGEXGGPLPCMHGMXYTITGYQPIVYEGYIXGKI

SEQ ID NO: 184813 - protein, 50 aa, Oryza sativa
  Clone ID: PAT_MRT4530_81770C.1.pep
KPELASQMARMYVITCRVASHLYKSKLERREKKNHGKSASTQNNPRFYTR

SEQ ID NO: 184814 - protein, 147 aa, Oryza sativa
  unsure (1)..(147): unsure at all Xaa locations
  Clone ID: PAT_MRT4530_81771C.1.pep
MARERRRRTERRRRHRRLLPSPRSSSRVXERERGGGENGRGEERRVEDKGEQLVGGGAXSGSSSGAASRRQRQRHRTSAEGRRWQLVGGGPPATGGAAAASPSLAAAPGERGGATIAARRWRGDDDEAGAYRGARWQHWAGASRSGT

SEQ ID NO: 184815 - protein, 1795 aa, Oryza sativa
  unsure (1)..(1795): unsure at all Xaa locations
  Clone ID: PAT_MRT4530_81772C.1.pep
MGFVSGIDDFVFPPGQAFRFGSLDFITNDLGKIFLLDSNSNQSGRGQISAPFGIPNSAEIYPKTISTELASNHSDEIQSTTTRPDQDDGAYPPILMKLPDDLXSSSPQGRLLPIAPPASTHGIRRSLSTTTSATSTTTATSTTSTKTLKITTRLSTSASSWPTTRRKNSVKPEKPKNSACDRKPNDADWKRSAKHKNENGCSVSNRSTNGLQRRLKTSDSAPWMPGDEHENLSGSKTSRERRFFAPLXQNAVAAITLLDTLLKEDALNQANHVVNILNQTKTMIAASVPINSASVHTPTGSRVPPLQSQDYHQPSLSVVGAGSSRRRRDHDERSVHLPPDRRRERRAERPRSPHRRHPIDLRETINQRRAARGYIPHHSPYRYDDDVDGVAAFTSDLHRVDWPAGFKPTRIEKYDGTTNPESWLTVYGLAIRAAGGDNKAMANYLPVALADSARSWLLGLPRGTIGSWAELRDHFIANFQGTFERPGTQFDLYNISNITDDVIIAAFTKGIRHELLVGKFGRKPPRTVKQMFEKANEYAKAEDAITASKQSGTTWKPKKDMPTXGGSGSTNHKDRNLQNNTLRTHARPLMEIKARQRXKDDEDDAPTSFEDHRKELNHIFGGPLAYESKRKQKLTEREINAVQPDTPQYLRWSETTIKFDRWDHPDRVVHPGRYPLVLDPVVRNVKLCRSLIDDGNALNILFAKTLDDMQIPRTELKPSNAPFHGVIPGLSATPLGQITLPVTFGTRENFRTENVCFEVADFETAYHAILGRPALAMFMAVPHYTYMMMKMPGPRGVISLRSDIKQAVTCDKESCEMAQTREITLAREEIRLAASTATEGEVSATKMSKSGEGDAKTKKIPLDPSDPTKTAVIGAELDYIFAWKPSDMPGIPREVIEHSLHVKEDAKPIKQRLRRFAQDRKDSIKEELTKLLAAGFIKEVLHPDWLANPVLVRKKTGQWRMCVDYTDLNKSCPKDPFGLPRIDQVVDSIVGCELLSFLDCYSGYHQIRLKESDCLKTSFITPFGAYCYITMPFGLKNRCFSTLIGRNVEAYIDDVVVKTKQKDDLIAYLEETFASICAFRMKLNPEKCIFGVPSGKLLGFMVSHRGIQANPEKINAILNMKPPSSQKDVQKLTGCMAALSRKLSHYFQGHSVTVVTSFPLRDILHNREANGWIAKWALELMSLDLSFKPRTSIKSQALADXSSPSGPSARKTRLQRRWSIGLCXFDGSKRLSSTGAGVVLISPTGERLSYVLWIHFSASHNVAEYEALLHGLRIAISLGIRLLIVHGDSQLVVNQVMKEWSCLDDNMTAYWQEVRKLEDKFDDLELTHVLRHNNEAANRLANFDSKREATPFDVFVEHLYELIVPRKEMVEATYTQDISMIEVDWREPLIRFLTKQELPQDKDEAERISRCSRLYVIHETELYKKSPSGILQRCVSLEEGRQLIKDIHSGICGNHATARTIVGKAYRQGFFWPTAVSDADKIVRTCEGCQFFAXQTHLPAQELQTIPLSWPFAVWGLDMVGPFKKVVGGYTHLFVAVDKFSKWIEAKPVITITTDKARDFFINIVHQFGVPNRIITDNDTQFTGGVFKDFCEDFGIKIXYASVAHPMSNGQVERANGMVLQGIKARVFDRLHPYAGKWVEQLSFVLWSLRTTLSRATGQSPLFLVYGAEAMLPSEVEFESLRFRNFSEERYGEYRVDDLNRLEEAHEAALIQSARYLQGMRRYYNRNVRSRAFLVXDLVLRKIQTTQDRHKLSPLWEGPFIIFEVTRPSSYRLKREDGTHIDNSWNIEHLRRFYA

SEQ ID NO: 184816 - protein, 107 aa, Oryza sativa
  Clone ID: PAT_MRT4530_81773C.1.pep
MSVFVAPTLGFARSALACIGILPLVSGGVFLDNSNQALEGEWNVLKNGVYHVLAYLKLTHLEINIDKMLEDVGTLGDSADADIIESRSPPVEGVSCEFAKGLRGNRW

SEQ ID NO: 184817 - protein, 968 aa, Oryza sativa
  Clone ID: PAT_MRT4530_81774C.1.pep
MARGSALLDGSVLPPSRIVSERQAGLSRRFMPESATGREIVTLGEGRPAPDYPGRSVFFLPFAMAGLVPPFSSFFMDVLEFYDLQMAHLTPNAVMTLAIFAHLCEMFIGVRPSLRLFRWFFTVQSVSPPSVVGGCYFQPRGPVLNRYIPCALRKKWDDWKSDCWRAPVDLGDGYDAVLDRLAGLRSQGLTGAMVYGDYLRRRIAPLQRRARGAWEYTGSEDFTRTHQGVRWDWAPEDFKILVQRVLNLNSVEAALIPQGILPLCSDPDRASILTIMMAVGASEERAPKGHDGAGGSRRGEQSTPRGGRASGSRDRGPGSSRPADARVKRKQGGTPPPSPPRGGGAARASNRRPEGAAPTSQPEGERKKKRPRKMGETEPSRGNLISPPKWSFNRPPHSEIPSRPSRHSKSGQSEAEDPAAAEALRRESDRREAADRLREAEEAAQEAARARQAEETAREEAGFRQDEAMATSEAARDEAAGASLGPTPSGDTQATTSGAAGDEAAGASLGPTPSGDAQDQPGPGDIPESGTSIGGPSRVASSPRRLFPTPSIALLNAEPLLQALAAANTTVLDGLSAQVEVLQAERAELDAAWARVEEGRRSVEAMVEVGRKAHRRHVSELETRKKVLAEIAKEVEEERGAALIATTVMNEAQDTLRLQYGSWEAELGKKLDAAQGVLDAAAAREQRAAETEAASRRREEALEARAMALEERACVVERDLADREAAVTIREATLVAHEAACAEEEFTLRLREDALTERERALEGAEAAAQQLAVNLSLREAAQEEQARRNLEGARAERAVLNQRAAELEARAKELDARARSGGAATGESDLAARLTAAERTIADLQGALDSSAGEVEALRLAGEVGPGMLWDAISRLDCAGRQVGLWRGRTVKYAANQGGLAQRLSKMAGALQRLPEELEKTIKSSSRDLAQGAVELVLASYQARDPNFSPWMALDEFPPGTEDRARA

SEQ ID NO: 184818 - protein, 54 aa, Oryza sativa
  Clone ID: PAT_MRT4530_81775C.1.pep
MVPLYLRCSDVSCTIDPSLSMLIGSYMVKVLTWSPNKWGNSQRVIGFSTLVAYQ

SEQ ID NO: 184819 - protein, 1347 aa, Oryza sativa
  unsure (1)..(1347): unsure at all Xaa locations
  Clone ID: PAT_MRT4530_81776C.1.pep
MAFRFGSLNFSTNDFGKISLLDSDSNQSGRGQIFAPFGIPNSAEVYPKVISAELASNHSNEIQFTPTRPDQDDGAYPPILMKLPDDLAAVFTTRASSPRRPRRDPASAPVRPSSREVGDILQPLGTVSTDQLDGYLSSPGVDSRPTEIVEYDDFGYRYNNRNLDDFDEGFEDNYTPLYFGVFMADNETEEQHKAREAEELCVQQEAERRRLEEERQAQEREWLQPITLLDTLLKEDILNQANHVVNILNQTKTMIAASVPRRVARGYAPHHSPDHYDDDVNGVAAFTSDLRRVDWPAGFKPTGIEKYDSTTNPESWLTVYGLAIHAAGGDSKAMANYLLVALADSARSWLHGLPCGTIGSWAELRDHFIANFQGTFECPGTQFDLYNVIQKSGESLRDYIRRFSEQRNKISDITDDIIIAAFTKGIRHEDLVGKFGRKPPKMVKQIFEKTNDRAPLGKPKKDTATTGGSGSTNHKDRKRKPEELVATTTPSSRQRSRVNTFDKIMNSQCPHHPNSNHAAKDCFIYKQFAEQYAKNARKASDGDQSTSKKKDDDDDVPTGFQDHRKEINDIFGGPLAYESKRKQKLTEWEINALQPDTPQYLRWSETTIKFDRSDHPDRVVHPGRYPLVLDPMVRNVKLRRSLIDGGSALNILFAKTLDDMQIPRTELKLSNAPFHGVILGLSATPLGQITLPVTFGTRENFRTENVCFEVADFETACHAILGRPALAKFMAVPHYTYMMMKMPGPRGVISLRSDIKQAITCDKESCEMAQTREITLAQEEIRLAASTASEGEVPVTKMPKSGESDAKTKKIPLDPSDPTKTAVIGAELDCIPREVIEHSLHVKEDAKPIKQQLHRFAQDRKDAIKEELTKLLAAGFIKEVLHPDWLANPVLVRKKTGQWRMCVDYTDLNKSSPKDPFGLPRIDQTSFITPFGAYCYITMPFGLKNAGATYQRMIQRCFSTQIGRNDEAYVDDVIVKTKQKDDLIADLEETFASIRAFRMKLNPKKCIFGVPSGKLLGFMVSHRGIQANPEKINAILNMKPPSSQKDVQKLTGCMAALSKFVSRLDERGMPFFKLLKKTXQFQWGLEAHKAFEDLKKLFTTPPVLASPHPQEPLLLYMSATSQVVSTVLVXEREEEGHVQKVQRPIYFVSEXAISLGIRRLIVRGDSQLVVDQVMKEWSCLDDNMTAYRQEVRKLEDKFDRLELTHVLRHNNEAADRLANFGSKREVAPSDVFVEHLYEPTVPRKETIEATDTQDXVNFSPDKLIYQLRSCKPSCCLGRLRFGGLTWSAHSKXAVGGYTHLFVAVDKFSKWIEAKPVITIMADKARDFFINIVHRFGVPNRIITDNGT

SEQ ID NO: 184820 - protein, 566 aa, Oryza sativa
  Clone ID: PAT_MRT4530_81777C.1.pep
MGSVSDIDDFVFPPRQAFRFGSLDFITNDFGKISLLDSYSNHSGRDRISAPFGIPNSAEVYPKVISAELASNHSDEMQSTPTRPDQDDGAYPPILMKLPDDLAAVFTTRASSPRYLSSPGIDSRPTEVVEYDEFGYRYDNRSLDDFDESFEDNYTPLYFGVFMVDNETKEQRQAREAEGRRVQQEAERRRLEAERQAQERERLQREQQERERAAKEAEDRRQRALEAGRRARELIGQQDVEGTAVFRTPQQNAVAAITLLDTLLKEDALNQADHVVNILNQTKTMIAASVPVNSASVRTSTGSRVPHLRSQDYHQPSLSIAGAGSNRRSRGYDERSVHSPPERHRERGVERPRSPPRRRPVDLRDTINQCRAARGYPHHHSPDRYDDDVDGVATFTSDLRRVDWPAGFKPTGIEKYHGTTNPESWLTVYAVAVAREDHRRARQVVAVLVRPFAVTGDRRSFVAVVKPKSFAASSSSPSPSVDLPPSFWSPVSSPCRPLRLGALRLRPRAAVHRRACAVRAVFSAEPPPLSVTSPLTSSGSSAVSRCGSDRSRPFVLDWFDLGRPFV

SEQ ID NO: 184821 - protein, 1068 aa, Oryza sativa
  Clone ID: PAT_MRT4530_81778C.1.pep
MARGSALLDGSVLPPSRIVSERQAGLPRRFMPESATGREIVTLGEGRPAPDYPGRSVFFLPFAMAGLVLPFSSFFMDVLEFYDLQMAHLTPNAVMTLAIFAHLCEMFIGVRPSLRLFRWFFTVQSVSPPSVVGGCYFQPRGPALNRYIPCALRKKWDDWKSDWFYTPLADEARLRLPSQPPAQASSWRAPVDLGDGYDAVLDRLAGLRSQGLTGTMVYGDYLRRRIAPLQRRARGAWEYTGSEDFMRTHQGVRWDWAPEDFKILVQRVLNLNSVEAALIPQGILPLCSDPDRASILTIMMAVGASEERAPKGHDGAGGSRRGEQSTPRGGRASGSRGRGPGSSRPTDARGKRKQGGTPPPSPPRGGGAARASSKRPEGAAPASQPEGERKKKRPRKMEETEPSRGNLISPPKWSFNRPPRSEIPSRPSRHSKSGQSEAEDPAAAEARRREADRREAADRLREAEEAAQEAARARQAKEIAREGAARARQAEETAREEAARAHQAEEAAREEAGFRQDETMATSEAARDEAAGASLGPTPSGDAQATTPGAAGDEAAGASLGPTPSGDAQDQTGPGDIPESGTSIGGPSRVASSPRRLFPTPSAALLSAEPLLQALAAANTTVLDGLSAQVEALQAERAELDAAWARVEEGRRSVEAMVEVGRKAHRRHVSELETRKKVLAEIAKEVEEERGAALIATTVMNEAQDTLRLQYGSWEAELRKKLDAAQGVLDAAAAREQRAAETEATSRRREEALEGRAMALEERACVVERDLADREAAVTIREATLAAHEAACAEEELALRLREDALTERERALEGAEAAAQQLADSLSLREAAQEEQARRNLEGARAERAALNQRAAELEARAKELDARARSGGAAAGESDLAARLADAEHTIAVLQGALDSSAGEVEALRLAGEVGPGMLWDAVSRLDRAGRQVGLWRGRTVKYADNQGGLAQHLSKMAGALQRLPEELEKTIKSSSRDLAQGAVELVLASYQARDPNFSPWMALDEFPPGTEDRVRAQVRDAADYIVDSFEGSAPRLAFAPNSDDEGNAGGVDDSDVEAGDPGASG

SEQ ID NO: 184822 - protein, 258 aa, Oryza sativa
  Clone ID: PAT_MRT4530_81779C.1.pep
MDLVRALAAIPARHPLPPSSLTKARRHGPQPSTTVLAPVPGGMLDRRRLLLIPAISISIGSFDKGAAKAEFADMPALRGKDYGKTKMKYPDYTETESGLQYKDLRVGDGPSPKKGETVVCYHLLIYANPDIDLDCVSALKVDWDGYTIGYYGRIFEARNKTKGGSFEGGDKDFFKFKIGSGQVIPAFEEAISDMAPGGVRRIIVPPDLGYPDNDYNKLGPKPTTFSGQRALDFVLRNQGLIDKTLLFDIELLKIIPSQ

SEQ ID NO: 184823 - protein, 180 aa, Oryza sativa
  Clone ID: PAT_MRT4530_8177C.1.pep
MDDKMAYADLGTSHHHPKKALSMGAIRRHGRLTCCQFQPTVVQPHLASNAQVGSATTKLEKHKLRHKASVSSLPMHPHKSCAIAATESSSEEAGDTGSGDPGLPADGSGWLVRTFVAIFLSNGVDNVIWFVFMLLIPDLANVAKEKEITKLVAIKGSSATMDEVGCTDRLGDYYEVDPYL

SEQ ID NO: 184824 - protein, 1140 aa, Oryza sativa
  Clone ID: PAT_MRT4530_81780C.1.pep
MARGSALLDGSVLPPSRIVNERHAGLPRRFMPESATGREIVMLGEGRPAPDYPGRSIFFLPFAMAGLVPPFSHFFMDVLEFYDLQMAHLTPNAVMTLAIFAHLCEMFIGVRPSLQLFRWFFTVQSVSPPSAVGGCYFQPRGPVLNRYIPCVLRKKWDDWKSDRFYTPLADEARLRLPSQPPAQVSSWRAPVDLGEDYDAVLDRLAGLRSQGLTGAMVYGDYLRRRIAPLQRRARSAWEYTGPEDYMRTHQGARWDWAPEDFKIVVQRVLNLSSAEASRLPQEILPLCSDPDRVSILTIMMGVGASEERAPKGHDGAGERRRGEQPAPGGGRASGPRVGGSGSSRPAVAQGKRKLGGTPPPSPPRGGGAVRASSRRPEGAAPTSQPEGVRKKKRLRKTGETEPCRGNLISPPRWSFNRPPRSDVPSHSSRHPKSGQSEAEDPAAAEERRRESDRREAAARLREAEEAAREAARVRQAEEAAREEAARARQAEEAAREEATRARQAEATAAAGASLGPTPSGGPQATSSEAARDEAAGASPGPTSPGDAHDQTGPGDIPEPSASSGGPSRVAFSPRRLFSSSSVAPLSAEPLLQALAAANTAVLDGFNTQVEALRAERAELEAAWARVEEGRRSVDAMVEVGRKAHRRHISELEARKAALAEIAREVEEEREAALVATTAMIEAQDSLRLQHGSWEAELKNKLDAAQGVLDSAAARERRATEAEAASRRREEALEARAMALEEHAGTVEKGFTDREAATALRETTLAAHEAACAEEESALRLREDALAERERALEEAEATTQRLANSLSLREEVQKSLQNEKNDMFEMSLPSLANEEKADAATLSEESSQGKLNGAERNEGEYSQGIRLICTGKINNPRRVFINSPKDRANNNLECREELRVHHEAAQEEQARRNLECVRAERAALEQRAANLEAREKELAARARIGGAAAGESDLAARLAAAEHTVADMQRALDSSIGEAEALRLAGEMGPDMLWDSVSRMDRAGRQAGLWKGQTRTRPSNLEGLAPHLNRMAWVLERLPEELEKTIKSSSRDLAQGAVELVLASYQARDPDFSPWMALEEFPPGTEDDARARVRDAADHIVDGFEGSAPLLAFAPSSDEESDASDEDDGGDEAGDPGALE

SEQ ID NO: 184825 - protein, 854 aa, Oryza sativa
  Clone ID: PAT_MRT4530_81781C.1.pep
MGSVSGIDDFAFPPGQAFRFDSLNFITNNLSKISLLDSDSNQSGRDHVPAPFGIPNSAEAYSKIISLGSASNHSDEIQSTPPRPDQDDGSRPTEILDCDDFGYHYDHGDFDDSYEDKYTPLFFGVFMADNETEEQRRAKEVEEERTRQETERRRLEEERQRQERERLQREQQDRERVAKEAEDRRQRALESRRRARDLIGQQDVDETTVFRTPQQNAVAAITLLDTLLKEDALNQADHVVNILNQTKTMIAASVPANSASTRTPTGSRVPHLRSQDYHQPSLSITGAGSSRKSKGHDERSVRLPPEQHRERRVERPHFPHRRRPIDLRDTINQRRAARGHHSPDRYDDDMDGVAAFTNDLRRVNWPADFKPTGIEKYDGTTNPESWLTVYGLAIRAAGGDSKAMANYLPVALADSARSWLHGLPRGTIGSWVELRDHFIANFQGTFERPGTHFDLYNIIQKSGESLRDYIRRFSEQRNKISDITDDIIIAAFTKGIRHDDLVGKFGRKPPKTVKQMFEKTNEYAKAEDAITASKQSGTTWKPRKDTPTAGGSGSNNRKDRKRKPEELVATTSPSSRQRPRVNTFDKIMNSQCPHHPNSNHVAKDYFVYKQFAKQYVKNARKPSDGDQGTSKKKDDEDDAPTGFQDHRKELNHIFGGPLAYESKRKQKLTEQEINAVQPNTPQYLRWSEIAIKFDRSDHPDRVVHPGRYPLILDPVVRNVKLRRTLIDGGSALNILFAKTLDDMQIPRTELKPSNAPFHGVIPGLSATPLGQITLPSTRLLLRSPAFSVDAHFNLHLMASDFLAVLALQPGMNLTGTDIPTPGVSTPAPARDESREALIIPTGRGETCDRPPVAT

SEQ ID NO: 184826 - protein, 109 aa, Oryza sativa
  unsure (1)..(109): unsure at all Xaa locations
  Clone ID: PAT_MRT4530_81782C.1.pep
YTLHIGMVYPRAYGYFLRTLRKSFTESMDGKNPTRTRLGRXCIVQGLISPSSTWRPPGLQYKRDPXGEDLRHRISEPTQPTQPMKPEPARSXSHRDLVEPTRLRSRRIR

SEQ ID NO: 184827 - protein, 57 aa, Oryza sativa
  Clone ID: PAT_MRT4530_81783C.1.pep
IFPILLVVDCKMLQFLVLNLFHAEMVVTTPPRVYHLFIPSGWCERRWMWSIAYHSFS

SEQ ID NO: 184828 - protein, 1065 aa, Oryza sativa
  Clone ID: PAT_MRT4530_81784C.1.pep
MARGSALLDGSVLPPSRIVSERQAGLPRRFMPESATGREIVTLGEGRPAPHYPGRSVFFLPFAMAGLVPPFSSFFMDVQEFYDLQVAHLTPNAVMTLAIFAHLCEMFIGVRPSLRLFRWFFTVQSVSPPSVVGGCYFQPRGPVLNRYIPCVLRKKWDDWKSDWFYTPLADEARLRLPSQPPAQASSWRAPVDLGDGYDAVLDRLAGLRSQGLTGAMVYGDYLRRRIAPLQRRARGAWEYTGSEDYMRTHQGVRWDWAPEDFKIVVQRVLNLSSVEASLIPQGVLPLCSDPDRASILTIMQAVGASEERAPRSHDGAGGSRRGEQSTPGGGRASGPRDGGPGSSRPADARGKRKQEGTPPPSPPRGGGAARASSRRPEGATPTSQPEGERKKKRLRKMGGTEPSRGNLISPPRWSFNRPPRSEIPSRPSRHSKSGQSEAEDPAAAEARRRESDRREAADRLREAEEAAREAARARQAEEAAREEAGLRQAEATTSSEATRETDRQEAADRLREAEEAAQVAVRARQAEEAAREEAKLRQAEATTTSEAARDEAAGASLGPTPSCDAQDKPGPGDIPESGTSIGGPSRAASSPRRLFPTPSVAPLSAEPLLQALAVANTTVLDGLSAQVEALQAERAELDAAWARVEEGRRSVEAMVEVGRKAHRRHVSELEARRKVLGEIAKEVEEERGAALIATTVMNEAQDTLCLQYGSWEAELGKKLDAARGVLDAAAARERRAAETEVASRRREEALEARAMALEERACAVERDLADRKAAVAIREATLAAHEAACAEEESALRLREDALTERERALGEAEAAAQRLADSLSLREAAREEQARRNLEGARAERAALNQRAAELEAQTRELDARARSGGAAAGESDLAARLAAAEHTIADLQGALDSSAGEVEALRLAGEVGPGMLRDAVSRLDRAGRQAGLWGKRTAKYAANQGGLAQRLSEMAGTLQRLPEELERTIKSSSRDLARGAVELVLASYQARDPDFSPWTALDEFPPGTEDGARAQVRDAADHIVHSFEGSAPRLAFALNSDEEDDDSGVGGSGDEAGDPGALD

SEQ ID NO: 184829 - protein, 425 aa, Oryza sativa
  unsure (1)..(425): unsure at all Xaa locations
  Clone ID: PAT_MRT4530_81785C.1.pep
MEGMEEANREAVQSCHRVLTLLSSPHSQLVPNKDLAAATGEAVAKFCSVASRLNNGNGLQGHARVRKIKKPLPIFDSNLFLESPALAVAMAAKTPNSSPITSLQLFPRYHQMEGSSSKDPVRIPAQFPKRLLLDNPAVDSDGPSRGPPLQLIQPVSVAPPAGTPHPALPSAHLHFIQQHQSYQRFQLMQQMKMQSEMIKRSGLGEQGGSNGGGKGVNLKFDSSNCTGXSSSRSFLSSLSMEGSIASLDGSRSSRPFQLVSGSQTSSTPELGLMQRRRCTGREDGSGRCTTGSRCHCAKKRKLRIRRSIKVPAISNKVADIPADEFSWRKYGQKPIKGSPHPRGYYKCSSVRGCPARKHVERSGLQGECGKATDKRSDRQPFVSVLLCPKSKPCKSEMACFLVATSPLGKLELMPDTQGPTAPSTP

SEQ ID NO: 184830 - protein, 1047 aa, Oryza sativa
  Clone ID: PAT_MRT4530_81786C.1.pep
MARGSALLDGSVLPPSRIVNERHAGLPRRFMPESATGREIVMLGEGRPAPDYPGRSIFFLPFAMAGLVPPFSHFFMDVLEFYDLQMAHLTPNAVMTLAIFAHLCEMFIGVRPSLQLFRWFFTVQSVSPPSVVGGCYFQPRGPVLNRYIPCVLRKKWDDWKSDWFYTPLANEARLRLPSQPPAQVSSWRATVDLGEDYDAVLDRLAGLRSQGLTGAMVYGDYLRRRIAPLQRRARSAWEYTGPEDYMRTHQGARWDWAPEDFKIVVQRVLNLSSAEASRIPQEILPLCSDPDRASILTIMMGVGASEERAPKGHDGAGERRRGEQSAPGGGRASGPRVGGSGSSRPADAQGKRKLGGTPPPSPPRGGGAARASSRRPEGAAPTSQPEGERKKKRLRKTGETEPCRGNLISPPRWSFNRPPRSDVPSHSSRHSKSGQSEAEDPAAAEERRRESDRREAADRLREAEEAAREAARVRQAEEAAREEAARARQAEEAAREEAARARQAEATAAAGASLGPTPSGGPQATSSEAARDEAAGASPGPTSPGDAQDQTGPGDIPEPSASSGGPSRVAFSPRRLFSSSSVAPLSAEPLLQALAAANTAVLDGFNAQVEALRAERAELEAAWARVEEGRRSVDAMVEVGRKAHRRHVSELEARKAALAEIAREVEEERAAALIATTAMIEAQDTLRLQHASWEAELKKKLDAAQGVLDSAAARERRVTETEAASRRREEALEARAMALEEHAGAVERGLTDREAAAVLREATLAAHEAACAEEECTLRLREDALAERERALEEAEATTKRLADSLSLREAAQEEQALRNLECVRAERAALEQRAADLEAREKELDARARVGGAAAGESDLAARLAAAEHTVADMQRALDSSIGEAEALRLAGEMGPDMLWDSVSRMDRAGRQAGLWKGQTRMRPANLEGLAPHLNRMAWVLEQLPEELEKTIKSSLRDLARGAVELVLASYQARDPNFSPWMALEEFPPGTEDDARARVRDAADHIVNGFEGSAPRLAFAPSSDEEGDASGEDDGGDEAGDPGASE

SEQ ID NO: 184831 - protein, 139 aa, Oryza sativa
  unsure (1)..(139): unsure at all Xaa locations
  Clone ID: PAT_MRT4530_81787C.1.pep
GRASLSLSIGHIHPQIRTSPCPPPPTPNNGRIRHSGRRIRFFAVPVLNRKEFRGISPHRRARASRTSTASSRRTPPRKHWICIEDKFRAAGDYVSQKSSSVFGKKKVEPMVKDAAAPGKGGXLKMESSNAQPQDSAYSV

SEQ ID NO: 184832 - protein, 970 aa, Oryza sativa
  Clone ID: PAT_MRT4530_81788C.1.pep
MARGSALLDGSVLPPSRIVSERHAGLPRRFMPESATGREIVMLGEGRPAPDYPGRSIFFLPFAMAGLVPPFSSFFMDVLEFYDLQMAHLTPNAVMTLAIFAHLCEMFIGVSSWRAPVDLGEDYDAVLDRLAGLRSQGLTGAMVYGDYLRRRIAPLQRRARSAWEYTGPEDYMRTHQGARWDWAPEDFKIVVQRVLNLSSVEASRIPQEILPLCSDPDRASILTIMMGVGASEERAPKGHDGAGERRRGEQSAPGGGRASGPRFGGSGSSRPADAQGKRKLGGTPPPSPPRGGGAARASSRRPEGAAPTSQPEGERKKKRLRKTGETEPCRGNLISPPRWSFNRPPRSDVPSHSSRHPKSGQSEAEDPAAAEERRRESDRREAADRLREAEEAAREAARIRQAEEAAREEAARAEEAAKEEAARARQAEATAAAGASTGPTPSGNPQATASGEARDEAAGTSPGPTSPGDAQDQTGPGDIPEPSTSSGGPSRIAFSPRRLFSSSSVAPLSAEPILQALAAANTAVLDGFSAQVEALRAERAELEAAWARVEEGRRSVDAMVEVGRKAHRRHVSELEARKAALTEIAREVEEERAAALIATTTMIEAQDALRLQNASREAELKEKLDAAQGVLDSAAARERRVTETEAASRRREESLEARAMALEEHAGAVEKGLTDREAAAALREATLAAHEAACAEEECALRLREDTLAERERALEEAEATTKRLADSLSLREAAQEEQARRNLECVRAERAALEQRAADLEAREKELDARAHTGGAAAGESDLAARLAAAEHTVADMQRALDSSTGEAEALRLAGEIGPGMLWDAVSRLKRAGRQAGLWKGQTTVPPTNLEGLAPHLNRMAWVLEQLPEELEKTIKSSSRDLARGAVELVLASYQARDPNFSPWMALEEFPPGTEDDARARVGDAADHIVNGFEGSAPRLAFAPDSDEEGNASSASDGGNEAGDLGASE

SEQ ID NO: 184833 - protein, 192 aa, Oryza sativa
  Clone ID: PAT_MRT4530_81789C.1.pep
KDVLTLNNSLLTVANMDGETPLLTAVTNGHMSLASILLECCCTLGFSEAILQQDRNGCNALHHAIHCGHKDLALELILKEPALSKAVNKYSESPMFIAVMRDFTDVSEKLLGIPGSSHVGTYGHNALHATVRNGNAVMAKKILEGRPWLGKERTRERKTPILMTVIWDKIDVLRVLLEHDVLLGYECYEVVI

SEQ ID NO: 184834 - protein, 92 aa, Oryza sativa
  Clone ID: PAT_MRT4530_8178C.1.pep
MQSDAGDGDELNYLVLVLVWSGSRTPVCSNSVHVVEDAAACGHGAIHRRFGRDAGTIHRGFGHDARCGGYRQSGDDGVVVHRPIVLIVGTNP

SEQ ID NO: 184835 - protein, 81 aa, Oryza sativa
  Clone ID: PAT_MRT4530_81790C.1.pep
LLAVAHHRRHVGSYPEAMSLLGFDIVEKGEDDGSGRSTVLAAVQIRQLSEGSMLRRRRKRPGDWPLLLSRGPPHVAPLPQV

SEQ ID NO: 184836 - protein, 139 aa, Oryza sativa
  unsure (1)..(139): unsure at all Xaa locations
  Clone ID: PAT_MRT4530_81791C.1.pep
MAEQANQPTVLEKFGGQFHLGYSFPEGVRARNIXHMTDXYDRRFTTRSYLTHGLVNGGMNAPMMTSSTILANAPAEKGGKNFMMDLLMGGVSDAAAKTAAAPIERVKLLIQNQDEEIKAXRSQEPYNGIGTLLSGRELS

SEQ ID NO: 184837 - protein, 229 aa, Oryza sativa
  Clone ID: PAT_MRT4530_81792C.1.pep
MDGGDGAEGEKTDDDAGVTGGKRRRGWSGRVWWRLVNHHGVAATLVTFVDIKRPCRTLCCGVLVVSSCVATAMLLAVSLDDHLTDAAMETVYTPSCTFVCCSGAIVCAHLRRRPFPLLLPRDVAHHRRHVGSYPEAMSLLGFDIVEKGEDDGSGRSTCSPCAAYVSRCGLERTVLAAVQIRQLSEGSMLRRRRKRPGDWPLLLSRGPPHVAPLPQVTVRRYLFSRRPPA

SEQ ID NO: 184838 - protein, 98 aa, Oryza sativa
  Clone ID: PAT_MRT4530_81793C.1.pep
CPFRSAMIWPNSFCALYFWLRALCSVHDERGSMGGGRGEAAIIINVLLVLASAHLLWVYYSSSGEMMDMDYGVLVRQRRGEGEGQHCNRIFACFGFVC

SEQ ID NO: 184839 - protein, 152 aa, Oryza sativa
  Clone ID: PAT_MRT4530_81794C.1.pep
MSGRLYQLCVDANRVNEHTKAWEICLTLVKVLKLMRCGRASQFDPAPDKISRSGDSKQRRWDGASGAMAVEQAAMSAMERAVWPWTEGSTSSGGGEAVESSCCSGRSSNNTSRSIDGGGSGSSSAWCGHYWRTGLYPDGKNHISPSSNSNRD

SEQ ID NO: 184840 - protein, 59 aa, Oryza sativa
  unsure (1)..(59): unsure at all Xaa locations
  Clone ID: PAT_MRT4530_81795C.1.pep
ELYGFSLSDQCASCSHGEAAFFQVRIVDQSQTXSTARGKEGMTLIFVCCNPSCNHRWRE

SEQ ID NO: 184841 - protein, 54 aa, Oryza sativa
  unsure (1)..(54): unsure at all Xaa locations
  Clone ID: PAT_MRT4530_81796C.1.pep
LLHVTNQIAYGYAGSSYEPNLSAISAVSYSQSCRSHLRAKPFLXXVQFITDVGT

SEQ ID NO: 184842 - protein, 43 aa, Oryza sativa
  Clone ID: PAT_MRT4530_81797C.1.pep
ARNHTSYIERVPDKEGQIEFYMETTSTSQIVSILVPLVLLGQG

SEQ ID NO: 184843 - protein, 54 aa, Oryza sativa
  Clone ID: PAT_MRT4530_81798C.1.pep
FEESSCPNNTRGCLNQKLRGNCLNELLLTSVPWVYRPRGSLLCYIALIASRNLN

SEQ ID NO: 184844 - protein, 144 aa, Oryza sativa
  Clone ID: PAT_MRT4530_81799C.1.pep
MRDAWGCRQWAPAIFDALRQGGITTAQRTCMGTGTGKEEMRLGSGSGTAAAEAAASTDRTRTSFVDSLRKNSTTPAARNPDGRDEVLGPHHPAGRGNAAVFRAWSRNGTASLLCALGRSSRHSASRRRQPDLLLSRLAPPASPS

SEQ ID NO: 184845 - protein, 41 aa, Oryza sativa
  Clone ID: PAT_MRT4530_8179C.1.pep
RDFGRVISLLCSLSSVLSDPVVAPHNGVLIHFYCGIRPPPL

SEQ ID NO: 184846 - protein, 465 aa, Oryza sativa
  Clone ID: PAT_MRT4530_817C.1.pep
MDASKKSVMTKEEQQLSPAASPAAAVMTAEADAINEEQDKAAAATTADHTAPPPPPPAAAAVADHAGEMDMASGSGVAHLAPPAVAPAPRSSLAMAVSGLADHVLERMVKVLMRKCHPPQALYPLIGKSPLRPPWWPTGREQWWPELGAGAVVPPYRPAPLLSKAEKEVAVVAMVKNLVPDFERLFMAVRMAPSVTSRITDAEARAWDDGVAGERETYMARHPHRTTPTRAWKLMDSLKPEAVRMKLKAPKPKPQVTIKVEDAAPFLTVSAAADPAAVEAAMGAIEAMRNSSKDPDAPYYPMPSPLHGHNEVGPNDYPENPAIWKEFNRKEGQLDLLRVGKKNDRMAISDRVDGGASGSGPRKGYLVMKTYKKAQEYYRELRNKGAMASGAGVKIEDDSETESDNEDEKANEKAKAKAKARAVYQQNKGVKTEDQSETESDNEDEQAKVMAKAKARVIPRPNKGI

SEQ ID NO: 184847 - protein, 174 aa, Oryza sativa
  unsure (1)..(174): unsure at all Xaa locations
  Clone ID: PAT_MRT4530_81800C.1.pep
QCFRNLEKLELGCCDVLLFWPLREFHSLESLKELIVKSCNNLKVKPVDGEPXQGQLLPHLTSLQIEDCQDLTELFNLPLSLKSIDIDGCPKLKSVWDEQEDTELGTNTQDPSPSARVHSLPCLETFYINDFDNLPRFRDLPSSLQSLALFNCPKVQFLSXKLDALTCLAISGCE

SEQ ID NO: 184848 - protein, 33 aa, Oryza sativa
  Clone ID: PAT_MRT4530_81801C.1.pep
MVTGKLLSVVAVPVRLSSSLWSPNAKYTKTKKS

SEQ ID NO: 184849 - protein, 397 aa, Oryza sativa
  Clone ID: PAT_MRT4530_81802C.1.pep
MASSSSHRWRKGFYPRKDGFSNNGNTTNHIFGVELDTIVSSKFLDPNDNHVSIDINSLKSIAVHTTGYYDDKTGAFHDLSLISGKAMQGVWTGRRPTDGEAGGARRERRRSGCRRRLALWRLLRPRAQRREAVPFRDQARNTAALPRPLDVDAGVEAVPELLRAHRRGPRRRRGERGYAGWWGPSTSSRPSGLRAAGVVEFLRRLSTKEVRVRSSLAALGGTGIRVVGGAPNYDLPALAHGGTAATAAWIQAYPMMLFRFVIVGNEVAGADTQLLVPAMENVHAALAVAGLGHIKVTTSISQATIGIHIPPSASEFTDEAKSSFLSYVIPFLEWTHAPLLANLYPYFIYSYNPGGMDISFALFTASERAAAGGGGIYRFLSGLDCELTNLTLLRHAL

SEQ ID NO: 184850 - protein, 115 aa, Oryza sativa
  unsure (1)..(115): unsure at all Xaa locations
  Clone ID: PAT_MRT4530_81803C.1.pep
TVNCEKKPYEVFLHLPISLESMIVHSIPQNQKHQLDPPSNCSLQISFSSIATRTLSALMIHMRLKPVEDFPILEAGKLMVRICKIQLLRDMPLQPEFLRQDLGLLRXLFHGVLLP

SEQ ID NO: 184851 - protein, 524 aa, Oryza sativa
  Clone ID: PAT_MRT4530_81804C.1.pep
MADLGEERADLDSYLSSLRPSRTSTGILLPSRAAASVVAAAASPPPSGFERRRVAAQRGESWTRVTQLNKLEDLNESSTSLGTGMIQANKLEDLNGRFASLGTGMTQRAAVQRRCLAKDGRVSAVVRILGGGFGVGCPAAAMCRGSAARRPATRGQRQGRMRIRGYGGSGEEGWGSRDVGAESEEKAMPTFPFPTAQMNAEEEMESETGTAAVGVCWGMSGDNLPPASKVTEMLRENGFTVVRLYAPDSAALAALGGTGIRVVVGAPNYDLPALAHGGTAAAAAWIRENIQAYPTVLFRFVVVGNEVAGADTQLLVPAMENVHAALAAAGLGHIKVTTSISQATIGVHIPPSAGEFTDEAKPFMSYVIPFLERTHAPLLANLYPYFIYSYNPGGMDISFALFTASGAVVQDGEYGYQNQFDATVDALYTAVAKLGGENVRVVVSETGWPTAGGVGASVENAMTFNQNLVRHVRNGTPRHPGKKTETYVFAMFNENLKEAGVEQNWGLFYPSTDRVYPISFHARI

SEQ ID NO: 184852 - protein, 109 aa, Oryza sativa
  Clone ID: PAT_MRT4530_81805C.1.pep
PRVRPRVRPRVRDTDSLLFHHWPRARDRREERREEEEMGGVEQEQLLSLGVLIDIVDEQWMRDTLPADDVPVPPAMAVKTEEAEDPAPANQESQPAQGDVWRDFTLENL

SEQ ID NO: 184853 - protein, 57 aa, Oryza sativa
  unsure (1)..(57): unsure at all Xaa locations
  Clone ID: PAT_MRT4530_81806C.1.pep
FFFFCPQANQSGVSKQIISFFELLPSSLCLTPKILQNYYLQKLITTHIRTXKIQFLL

SEQ ID NO: 184854 - protein, 117 aa, Oryza sativa
  unsure (1)..(117): unsure at all Xaa locations
  Clone ID: PAT_MRT4530_81807C.1.pep
WTPKGVLKLAFHAXRFCXGLRXXSKAXDRRQAHMCXXNEXCEEEAYXKLVIALCSEHKIPLIKVPDGKQLGEWAGLCVLDREGNARKVVNCSCVVVKDWGEESQERSVILNYFQTEQ

SEQ ID NO: 184855 - protein, 44 aa, Oryza sativa
  Clone ID: PAT_MRT4530_81808C.1.pep
MTDDEFFSCSGGVAEDERPDATASGDDPATPGSTHLTAMPPLFN

SEQ ID NO: 184856 - protein, 464 aa, Oryza sativa
  Clone ID: PAT_MRT4530_81809C.1.pep
MADPVKLIGAFGSPFVHRVEAALQLKGVAYELIHEDLENKSNLLLASNPVHKKVPVLLDGGRAICESLVIVEYVDDAFDGPPILPADPYDRATARFWAQFIDHKANLFMLLHHCVHCTLPLLLALWLDGEEQKGFLKETKENLSLLEAQLEGKRFFAGDAVGYLDVAAGGMAHWIGVLEEVTGVSVIGSEDDDEYPSLQRWIKEYANIDAVKLSLPDREELVAFYTRNKDKYKMMFRAMVHHAFGSPFGHRAEAALRLKGVQYELLLEDLRSKSDLLLAHNPVHKLVPVLLHSDGRSVAESLVVVQYVDDAFHGPPLLPADPYARAQARFWAQFIDDKFSRPFWLSFWMEDGEKKEAFVREAKENLRPLEAQLDGGNKRFFGGDAIGLVDIAASGLAHWVGVFEEVTGVSLVSEREFPALCRWSQRYVNDGAVRQCLPSRDELVALFTANKEAYTLLAKAKLQK

SEQ ID NO: 184857 - protein, 71 aa, Oryza sativa
  Clone ID: PAT_MRT4530_8180C.1.pep
DGLIIEAVDHFLFTPVAKRNTRIPRPPNKRPPGWNNTPRSDYSTRPRSRKPTALELKPHPWPCKHPQKRSD

SEQ ID NO: 184858 - protein, 66 aa, Oryza sativa
  Clone ID: PAT_MRT4530_81810C.1.pep
KYSYLEYSISKLALISWIDRCEIWMSYFASRRTQLLQGNMLCISYTYNPPAEMSLKRKISNFVSRG

SEQ ID NO: 184859 - protein, 973 aa, Oryza sativa
  Clone ID: PAT_MRT4530_81811C.1.pep
MARGSALLDGSVLPPSRIVSERQAGLPRRFMPESATGREIVTLGEGRPAPDYPERSVFFLPFAMAGLVPPFSSFFMDVLEFYDLQMAHLTPNAVMTLAIFAHLCEMFIGVRPSLRLFRWFFTVQSVSPPSVVGGCYFQPRGPWDDWKSDWFYTPLADEARLRLPSQPPAQAFSWRAPVDLGDGYDAVLDRLAGLRSQGLTGAMVYGDYLHRQIAPLQRRARGAWEYTGSEDYMRTHQGHKWDWVPEDLRMVVQRVLNLSSVEASLIPQGVLPLCSDPDRANILTIMQEVGASGERAPRGHDGAGGSRRGEQSTPGGGRASGPRDGGPGGIRPADARGKRKLEDTPSPSPPRGGGALFFCLSEIPSRPSRHSKFGRSEVEESTTAEARRREADRREAADRLRESEETAQEAVRARQAEEAAREEARLRRAEESVREAETAHARQAARQAPDPTPSEVTTTSEATHDEAAGAPLGPDPSGGARDVPVSGDAPKSGTSIGGPSRAAPAPRRLSPVPSAAPLSAEPLLQALATAISTVLDGLSAQMEVLQAERVELDAAWARVEEGRRSVEAMVEAGRKAHRRHSSKLEARRRELAEIAREVEEEREAALIATAVLDEVRDDLCLQYRSRAAELEKKLDAAQGVLDAAAARERRAAERKAASQRREEALEARATVLEERARAKERDLADREATLAAHEAACAEEESAIRLREDALTERERALEEAEAAAQRLADSLSLREAAREEQARRNLEGARAERAALDQRAAELEARAKKLDARARSGGAAAGDGDLAARLAAAEHTIDELQGALDSSTGEIEALRLAGEIGPGMLRDAVLRLDRAGRQAGLWGGRTAKYAANQGGLAQRLSEMAGTLQRLPEELEETIKSSSRDLARGAVELVLASYMARDPDFSPWAALDEFPPGTEDDARARVRDAADHIVHSFEGTAPRLAFALDSDEEGGDGGADDSGDETVDPGASE

SEQ ID NO: 184860 - protein, 831 aa, Oryza sativa
  unsure (1)..(831): unsure at all Xaa locations
  Clone ID: PAT_MRT4530_81812C.1.pep
MARGSAPLDGSVLPPSRIVSERQAGLPRRFMPESATGREVVALGEGRLAPDYPGRSVFFLSFAMAGLVPPFSNFFMDVLEFYDLQMAHLTPNAIMTLAIFAHLCEMFIGVRPSLRLFRWFFTVQPVSPPTVVGGCYFQPRGQVLHRYIPCVLRKKWDDWKSDWFYTPXLADEVRLRLPSQPPAQASSWRETVDLGDGYDAVLDRLAGLRSQGLTGAMVFGDYLRRRIAPLQRRARGAWEYTGPEDYMRTHQGRKWDWVPEDFRMVVQRVLNLSSVEASLIPQGVLPLCSDPDRANILIIMQAVGASGERAPRGHDGAGGSRRRKQSTPGGGHASGPRDGGPGGSRPADARGKRKQEGTPXPSPPRGGGAVRASSRXRRAEEAAREEARLRRAGESVREEEAARARQAACQAPDPTPPEATTTSEATHDEAADAPLWPDPSGDAWDEPASGDAPGSGTSIGGPSCAAPTPRRLSPLPSAAPLSAEPLLQALAAANTTVLDGLSAQMEVLQAERAELDAAWARVEEGRCSVEAMVEAGRKAHRRHASELEARRRDLAEIAREVEEERETALIATAVLDEVRDDLRLQYRSRAAELEKKLYAARGVLDAAAARERRAAEIEAASRQREEALEARATALEERARALDTKEKDLAGREAAVATREATLAAHEAACAEEESALRLREDVLTERGRALEEAEAAAQRLADSLFLREAAREEQARHNLEGAHAERAALDQRAAELEARAKELDARAHSGGAAAGDGDLAARLAAAEHTIAELQGALDSSAGEVEALRLANEVGPGMLRDAVSRLDCAGRQAGLWGGRYAKYAANQGGLA

SEQ ID NO: 184861 - protein, 2018 aa, Oryza sativa
  unsure (1)..(2018): unsure at all Xaa locations
  Clone ID: PAT_MRT4530_81813C.1.pep
MGSVSGIDDFAFPPGQAFRFGSLNFITNDFGKISLLDSDSNQSGRDXVPVPFGIPNSAEAYSKIISSESASNHSEEIQSTPPRPDQEDGFYPSILMRLPDDLAAVFTAKTSPTRRSRQAPASAPIQSRSREVGVILQPLGTVSTEELDGYLSSPGVSSXPTEILDCDDFGYHHDHDDFDDSYEDNYTPLFFGVFMANNETEGQRRAREVEEERTRQETERRRLEEERQREERERLQREQQDRERVAKEAEDRRQRALESGRRARDLIGQQDVDGTTVFRTPQQNAVATITLLDTLLKEDALNQADHVVNILNQTKTMIAASVPANSASARTPTGSRVPHLRSHDYHQPSLSIIGTGSSRRSRGHDERSVHSPPERHRERRVERPRSPPHQRPVDLRNTINQRRAARGHRHSPNRYDDDMDEVAAFTNDLRRVDWPAGFKLTRIEKYDGTTNPESWLTVYGLAIRAAGGDSKAMANYLPVALADSARSWFHGLPRGTIGSWAKLRDHFIANFQGTFERPGTQFDLYNVVQKSGESLXDYIRRFSEQRNKISDITDDVIIAAFTKGIRHDDLVGKFGRKPPKTVKQMFEKANEYAKAEDAIMASKQSGTTWKPKKDMPTAGGSGSNNRKDRKRKPEELVATTSPSSXQRPRVNTFDKIMNFQCPHHPNSNHVAKDCFVYKQFAEQYVKNARKPSDGEQGTSKKKDDEDDALTSFQDHRKELNHIFGGSLAYESKRKQKLTEREINAVQPNTPQYLRWSEIAIKFDHSDHPDRVVHPGRYPLVLDPVVRNVKLRRTLIDGGSALNILFAKTLDDMQIPRTELKPSNAPFHGVIPGLSATPLGQITLPVTFGTRENFCTENICFEVADFETAYHAILGRPALAKFMAVPHYTYLMMKMPGPRGVISLRSDIKQAVTCDKESCEMAQIREITLAREEIRLDATTASEGEVPATKLTKTEESDAKTKKIPLDPSDPDKTANNKDIFAWKPFDMPGIPREVIEHSLHVKEDAKPIKQRLRRFAQDRKDAIKEELTKLLAVGFIKEVLHPDWLANPVLVRKKTGQWRMCVDYTDLNKSCPKDPFGLPRIDQVVDSTAGCELLSFLDCYSGYHQIRLKESDCLKTSFITPFGAYCYITMPFGLKNAGATYQRMIQRCFSTQIGRNVEAYVDDVVVKTKQKDDLIADLGETFASIHAFRMKLNPEKCIFRVPSGKLLGCMVSQRGIQANPEKINAILNMKPPSSQKDVQKLTGCMAALSRFVSRLGERGMPFFKLLKKTDNFQWGPEAQKTFEDFKKLLTTPLVLASPHPQEPLLLYVSATSQVVSTVLVVEREEEGHIQKVQRPIYFVSEVLANSKTRYPQVQKLLYGVLITVRKLSHYFQSHSVTVVTSLPLGDILHNHEANGXIAKWALELMSLDISFKPRTSIKSQALADFLAEWTECQQDMPEEKMEYWTMHFDGSKRLTGTGAGVVLISPTGERLSYVLWIHFSASHNVAEYEALLHGLRIAISLGIRRLIVRGDSQLVVNQVMKEWSCLDDNMTAYRQEVRKLEDKFDGLELTHVLRHNNEAADRLANCASTRPMGPSDRATTASFLAVAELHGLTGRIPPVRLAEHRVGGFRPQRLVLVGGSINTPPPAARGLSWHPIQLHTLLAPLSHSLKLCVHPSSVLEGCLAKSQVHLLXHCRASVALDHLHTGSLLVTLAGCRLLDGLWRSCPVTXSEKIVEEARHRFVNGLEFTTFGVKEELPRVIEAWXSSPWAGSRLAHPLTKGACGGFMXLSGGVGLASTGSRKPASFRTSVKNLLSHCLXIVAFTFVQFTFLETHLRSYHPRIAKHRHRSVIYSSRDIFEPLSPXRFAKHNLVAXLDLIRCYLVLNRLXPPSSRHLDPTTTPSRATGQSPFFLVYGAEAMLPSEVEFESLRFRNFNEERYEEGRVDDINQLEEAREAVLIQSTRYLQGLRRYHNRNVRSRAFLVDDMVLRKIQTTQDRHKLSPLWEGLFIIAEVTRPGSYRLKREDGTLINNSWNIKHLR

SEQ ID NO: 184862 - protein, 74 aa, Oryza sativa
  Clone ID: PAT_MRT4530_81814C.1.pep
MTVKTTEHYVLQVRLVYIDGPGAGYIESDTAGNRIDSDTDAVRLEKEFRVDGQQITTPLYESKKMSGEREGAGG

SEQ ID NO: 184863 - protein, 1043 aa, Oryza sativa
  unsure (1)..(1043): unsure at all Xaa locations
  Clone ID: PAT_MRT4530_81815C.1.pep
MARGSALLDGSVLPPSRIVSERQAGLPRRFMPESATGREIVTLGEGRPAPDYPGRSVFFLPFAMAGLVPPFSSFFMDVLEFYDLQMAYLTPNAVMTLAIFAHLCEMFIGVRPSLRLFRWFFTVQSVSPPSVVGGCYFQPRGPVANRYIPCTLRKKWDDWKSDWFYTPLADEARLRLPSQPPVQASSWRAPVDLGDGYDAVLDRLAGLRSQGLTGAMVYGDYLRRRIAPLQRRARGAWEYTGSEDFMRTHNGVRWDGAPEDFKILVQRVLNLNSVEAALIPQGILPLCSDPDRASILTIMMAVGASEERAPKGHDGAGGSRRGEQSTPRGGHASGSRDSGPGSSRPANARGKRKQGGTPPPSPPRGDGAARANSRRPEGAAPASQPEGERKKKRPRKMGETEPSRGNLISPPKWSFNRPPRSEIPSRPSRHSKSGQPEAEDPAAAEARRRESDRREAADRLRVAEEAVQEAARARQAEETAREGAARACQAEEAAWEEAARAHQAEEAAREEAVRAHKAEEAAREEAGFRQDEAMATSEAARDEAAGASLGPTPSGNAQAQPGPEDIPASGTSIGGPSRVASSPRRLFPTPSAALLSAEPLLQALAAANTTVLDGLSAQVEALQAERAELDAAWARVEEGRRSVEAMVEVGRKAHRRHVSELETRKKVLAEIAKEERGAALIATTVMNEAQDTLRLQYGSWEAELGKKLDAAQGVLDAAAAREQRAAETEAASRWREEALEARAMALEERVCVVERDLADREAAVTIREATLAAHEAACAEEELALRLREDALTERERALEGAEAAAQQLADSLSLREAAQEEQARRNLEGARAERAALNQRAAELEAREKELDARARSGGAAAGESDLAARLAAAEHTIADLQGALDSSAGEVEALRLAGEVGPGMLWDAVSRLDCAGRQVGLWRGRIVKYAANQGGLAQRLSKMAGALQRLPEELEKTIKSSSRDLAQGAVELVLASYQARDPNFSPWMALEEFPPGTEDRARAXVRDAADHIVDSFEGSAPRLAFGPNSDEEGNAGGADNS

SEQ ID NO: 184864 - protein, 2016 aa, Oryza sativa
  unsure (1)..(2016): unsure at all Xaa locations
  Clone ID: PAT_MRT4530_81816C.1.pep
MGSVSGIDDFAFPPGQAFRFSSLNFITNDFGKISLLDSDSNQSGRDQAPAPFGIPNSAKAYSKIISPESASNHSDEIQSTPPRLDQDDGSYLSILMRLPDDLAAVFTAKTSPTRRSRRAPTSAPIQSRTREIGVILQPLGTVSTEELDGYLSSPGVSSRPTEILDCDDFGYHYDHGDFNDSYEDNYTPLFFGVFMADNETEEQRRARETEEERTQQETERRRLEEERQRQERERLQREQQDRERVAKEAEDRRQRALESGRRARDLIGQQDVDGTAVFRTPQQNAVAAITLLDTLLKEDALNQADHVVIILNQTKTMIAASVPANSVSARTPTGSRVPHLRSQDYHQPSLSITGAGSSRRSRGHDERSVRSPPEQYMEHRVERPHSPHRRRPVDLRDTINQRRTARGYHSPDRYDDDMDRVAAFTNDLRRVNWPTGFKPTGIEKYDGTTNPESWLTVYGLAIRAAGGDRKVMANYLPVALADSARSWLHGLPRGTIGSWAELRDHFIANFQGTFERPGTHFDLYNIIQKSGETLRDYIRRFSEQRNKISDITDDVIIAAFTKSIRHEDLVGKFGRKPPKMIKQMFEKANEYAKAEDAITASKQSGTIWKPRKDTPTAXGSGSNNHKDRKRKPEELVATTSPSSRQRPRVNTFDKIMNSQCPHHPNSNHVAKDCFVYKQFAEQYVKNARKPSDGDQGTSKKKDDEDDAPTGFQDHRKELNHIFGGPLAYESKRKQKLTEREINTVQPNTPQYLRWSEIAIKFDRSDHPDRVVHPGRYPLVLDPVVRNVKLRRTLIDGGSALNILFAKTLDDMQIPRTELKPSNAPLHGVIPGLSATPLGQITLPVTFGTRENFRTENVCFEVADFETAYHAILGRPALAKFMAVQHYTYMMMKMPGPRGVISLQSDIKQAVTCDKESCEMAQTREITLAREEIKLATTTADEXEVHATKLSKTEEGDDKTKKIPLDPSDPTKTANNKDIFAWKPSDMPGIPREVIEHSLHVKEDAKPIKQRLRRFAQDRKDAIKEELTKLLAAGFIKEVLYPDWLANPVLVRKKTGQWRMCVDYTDLNKSCPKDPFGLPRIDQVVDSTAGCELLSFLDCYSGYHQIRLKESDCLKTSFITPFGAYCYITMPFGLKNAGATYQRMIQRCFSTQIGRNVEAYVDDVVVKTKQKDDLIADLEETFASIRAFKMKLNPEKCIFGVPSGKLLRFIVSQRGIQANPGKINAILNMKPPSSQKDVQKLIGCMAALSRFVSXLGERGIPFFKLLKKTDNFQWGPEAQKAFEDFKKLLTTPPVLASPHPQEPLLLYVSATSQVVSTVLVVEREEEGHIQKVQRPIYFVSEVLADSKTRYPQVQKLLYGVLITVRKLSHYFQSHSVTVVTSFPLGDILHNREANGRIAKWALELMSLDISFKPRTSIKSQALADFLAEWTECQEDMPEEKMEYWTMHFDGSKRLTGTGAGVVLISPTGERLSYVLWIHFSASQNVAEYEALLHGLRIAISLGIRRLIVRGDTQLVVNQVMKEWTCLDDNMTAYRQEVRKLEDKFDGLELTHVLRHNNEAANRLANFGSKREAAPSNVFVEHLYEPTVPRKETIEAMDTQAVSMIEADWREPLIRFLTKQELPQDKNEAEQISRRSRLYVVHENELYKXPSGILQRCVSLEEGRQLLKDIHSGICGNHAVAXTIVGKAYRQGFFWPIAVSDADKIVRTCEGCQFFARQTHLPAQELQTIPLSWPFAVWGLDMVGPFKKAVGGYTHLFVAVDKFSKWIEAKPIVTITADKARDFFINIVHRFGVPNRIITDNDTQFTGGVFKGFXEDFGIKICYASVAHPMSNGQVERANGMVLQGIKARVFDRLRPYAGKWVDQLLSVLWSLHTTPSQATGQSPFFLVYGAEAMLPSEVEFESLRFHNFREERYEEDRVDDINRLEEAREAALIQSARYLQGLRRYHNRNVRSRAFLVGDLVLRRVQATQDRHKLSPLWEGLFIIAEVTWPGSYRLKREDGTLVNNSWNIEHLRRFYA

SEQ ID NO: 184865 - protein, 405 aa, Oryza sativa
  Clone ID: PAT_MRT4530_81817C.1.pep
MAPVPATAAAAAPAAVVSTHEIRRAQRADGPATVLAIGTANPETCVPQDEYADFYFRVTKSEHLPELKNKLRRICNKSGIEKRFMFVNDDVMEAHPEFADRHLTSLDARVEIVSKVVPELAAAASAKAIAEWGRPATDITHLIFSTYSGVKAPGGDRLLASLLGLRPTVSRTVLSLHGCYGGGRALQLAKELAENNRGARVLVACAESTLIAFYGPEVGCNDTIIGQALFGDGSGAVIVGADPVGAVERPLFEMAFASQATVPDSEGAITMQHKKGGMDYHIGGGVPEMLAGSIERCLADAFGAIGVAARWRDLFWAVHPGGRRILDLIEEALGLDNGAMAASRQVLREYGNMSGTTVIFVLNELRRRFVADGAEGADWGALMAFGPGVTVETILLRVGSGLKGN

SEQ ID NO: 184866 - protein, 1913 aa, Oryza sativa
  unsure (1)..(1913): unsure at all Xaa locations
  Clone ID: PAT_MRT4530_81818C.1.pep
MASLSSLLLGCFLLAAAIFLHRNGASTTTTHLHFYMHDAYTGPAPTAMRVVSGRSLLDDGGDAVPRQFGDIVALNNALTEGPSAGSTRVGTAQGFAVRVSEGGMCGDYGYPYLHDSCNLVGYTAFRFGSLNFITNDFGKISLLDSDSNQSGRDQVPVPFGIPNSAEAYSKIISPESASNHSDEIQSTLPRPDQDDGSYPSILMKLPDDLXAVFTVKTSPTRRSRRAPASAPIRSRSREEQRXAREADQDRARQEAERRRLEEERQRQERERLQREQQDRERIAKEAEDRXQRALESGRRARELIGQQDVDGTAVFRTXPQQNAVAAITLLDTLLKEDALNQADHVVNILNQTKTMIAASVPANSASTRTPTGSRVPHQPSLSIAGAESSRRSRGHDERDLRRVDWPAGFKPTGIEKYDGTTNPESWLTVYGLAIRAAGGDSKAMANYLPVALADSARSWLHGLPCGTIASWAELLDHFIANFQGTFERPGTHFDLYNIVQKSGESLRDYIRRFFEQRNKISDITDDVIIAAFTKGIRHEDLVGKFGRKPPKTVKQMFEKANEYAKAEDAITASKQSGTTWKPKKDMPTAGGSGSNNHKDRKRKPEELVATTSPSSRQRSRINTFDKIMNFQCPHHPNSNHVAKDCFVYKQFAEQYVKNACKPSDGDQGTSKKKDDEDDAMTGFQDHRKELNHIFGGPLAYESKRKQKLTEREINAVQPNTPQYLRWSEIAIKFNRSDHPDRVVHSGRYPLVLDPVVRNVKLRRTLIDGGSALNILFAKTLDDMQIPCTELKPSNAPFHGVIPGLSATPLGQITVPVTLGTRENFRTENVCFEIADFETAYYAILGRPALAKFMAVPHYTYMMMKMPGPRGVISLRSVIKQAVTCDKESCEMAQTHETTLAREEIRLAATTASEGEAPATKLTKTEESDAKTKKIPLDPSDPDKTAEGWIKEELTKLLAAGFIKEVLHLDWLANPVLVRKKTGQWRMCVDYTNLNKSCPKDPFRLPRIDQVVDSTAGCELLSFLDCYSGYHQIRLKESDCLKTSFITPFGAYCYITMPFRLKNAGATNQRMIQRCFSTQIGRNIEAYVDDVVVKTKQKDDLIADLEETFTSIRAFKMKLNPEKCIFGVPSGKLLGFMVSQRGIQANPEKINAILNMKPPSSQKDVQKLTGCMAALSQFVSRLGERGMPFFKLLKKIDNFQWGPEAQKAFEDFKKLLTTLPVLASPHPQEPLLLYVSATSQVVSTVLVVEREEEGHIQKVQRPIYFVSEVLADSKTRYSQVQKLLYGVLITVRKLSHYFQSHSVTVVTSFPLGDILHNREVNGRIAKWALELMSLDISFKPRTSIKSQALADFLTEWTECQKDMPEEKMEYWTMHSDGSKRLTGTRAGVVLISPTRERLSYVLWIHFSASHNVAEYEALLHGLRIAISLGIRRLIVRGDSQLVVNQVMKEWSCLDDNMTTYRQEVRKLENKFDGLELTHVLRHNNEASDKLANFGSKREAAPSDVFVEHLYEPTVPRKETVEAMDTQGVSMIKADWREHFIKFLSKQELPQDKNEAERISRRSRLYIIHETELYKKSPSGILQHYVSLEEGRQLLKDIHSGICGNHAAARTIVGKAYRQAQELQTIPLSWPFVVWGLDMVSPFKRAVGGYTHLFMAIDKFSKWIEAKQVIMITADKARDFFINIVHRFGVPNRIITDNGTQFTGGAFKDFCEDFGIKICYASVAQPMSTGQVERANDMILQGIKARVFDRLCPYAGKWVDQLPSILWSLRTTPNRATGQSPFFLVYGAEAMLPSEVEFESLRFRKFNEEGYEEGQVDDINRLEEARETALIQSTRYLQGLRRYHNRNIRSRAFLVDDLVLRKIQTTQDRHKISPLWEGPFIIAEVTRPGSYRLKHEDGTLINNSWNIEHLRRFYA

SEQ ID NO: 184867 - protein, 1015 aa, Oryza sativa
  unsure (1)..(1015): unsure at all Xaa locations
  Clone ID: PAT_MRT4530_81819C.1.pep
MARGSAPLDGSVLPPSRIVSERQAGLPRRFMPESATGREVVALGEGRPAPHYPGRSVFFLSFAMAGLVPPFSIFFMDILEFYDLQMAHLTPNAIMTLAIFAHLCEMFIEVRPSLRLFRWFFTVQPASPPTVVGGCYFQPRGQVLNRYIPCVLRKKWDDWKSDWFYTPLADEARLRLPSQPPSQASSWRAAVDLGDGYDAVLDRLAGLRSQGLTGAMVFGDYLRRRIAPLQRRTRGAWEYTGPEDYVRTHQGRKWDWDPEDFRMVVQRVLNLSSVEASLIPQGVLPLCCDPERASILATMQVVGASGERAPRGHDGAGGSRRGEQSTPGGGRASGPRDGGPGGSRPADARGKRKQEXPEGERKKKRPRKMGGXEPCRGNLISPPRWSFSRPPRSEIPSRPPRHSKSGRSEAEETATAEARRREADRREAADRLREAEEAAQEAVRVRQAEEAAREEARLRRAGESVREAEAARARQAACQAPDPTPPEATTTSEATHDEAAGALLGPDPSGDAWDEPASGDAPESGTSIGGPSRAAPTPRRLSPMPSAAPLSAEPLLQALAAANRTVLDGLSAQMEALQAERAELDAAWARVEEGRRSVEAMVEAGRKAHRRHASQLEARRRDLAEIAREVEEERETALIATAVLDEARDDLRLQYGSRAAELEEKLDAVRGVLDAAVARERRAAENEAAFRQREEALEARATALEEHARALDTKERDLADREAAVATREATLAAHEAACAEEESTLRLREDALTERGRALEEAEAAAQRLADSLSLREAAREEQARRNLEGARAERAALDQRAAELEARAKELDARAHSGGAAAGHGDLAARLAAAEHTIAELQGALDSSAGEVEALRLASEVGPGMLRDAVSRLDRAGRQEGLWGGRHAKYAANQGGLAQRLSEMTGALERLPEELEETIKSSSRDLARGAVELVLASYQARDPDFSPWAALEEFPPETEDGARAQVRDAADHIVHSFEGTAPRLAFALDSDEEGGDDGADDSDDEAGDPGASE

SEQ ID NO: 184868 - protein, 89 aa, Oryza sativa
  Clone ID: PAT_MRT4530_8181C.1.pep
GRSYTVTIGGYHGAMAIVGGQARQTGSSRFLHGELLQPMASEFSGWWRGRDGSVGKAAPARWGIGAAAVVGEVDGALASVCGGAPAGRQ

SEQ ID NO: 184869 - protein, 987 aa, Oryza sativa
  Clone ID: PAT_MRT4530_81820C.1.pep
MARGSAPLEGSVLPPSRIVSERQAGLPRRFMPESATGREVVALGEGRPAPHYPGRSVFFLSFAMAGLVPPFSSFFMDVLELYDLQMAHLTPNAVMTLAIFAHLCEMFIGVCPSLRLFRWFFTVQLVSPPSVVGGCYFQPRGLVLNRYIPCVLRKKWDDWKSDWFYTPLADEARLRLPSQPPAQASSWRAPVDLGDGYDAVLDRLAGLRSQGLTGVMVFGDYLRRRIAPLQRRAWGAWEYTGSEDYMRTHQGGRWDWAPEDFKMVVQRVLNFSSVEASLIPQGVLPLCSDPERANILTIMQAVGASGERAPRGHDDAGGSRRGEQSTPGGGRASGPRDGGPGGSRPADARGKRKQEDTPSPSPPRGGGARDSVAPPRHSKSGRSEAEETATAEARRREAVRREAADRLREAEEAAQEAVRVRQAEEAAREKARLRRAGKSAREAEATRARQAACQAPDPTPPEATTTSEATHDEAAGAPLGPDPSGDVRDEPASGDAPESGTSIGGPSRTAPTPRRLSPLPSAAPLNTEPLLQALAAANTTVLDGLGAQMEVLQAGRAELDASWARVEEGRRSVEAMVEAGRKAYRRHASELEARRRELAEIAREVEEERETALIATAVLNEARDDLRLQYGSRVAELEKKLDAARGVLDAATARERRATENEAASRRREVALEARATALEERARARERDLADRETAVAIREATLAAHEAACAEEESALRLREDALTERERALEEAEAAAQRLADSLSLREAAREEQARRNLEGARAERAALDQWAAELEARAKELDARAHSGGAATGDGDLAARLAAAEHTIADLQGALDSSAGEVEALRLAGEVGLGMLRDAVSRLDRAGRQAGLWGERTAKYAANQGGLVQRLSEMAGTLQRLPEELEETIKSSSRDLARGAVELVLASYQARDPDFSPWAALDEFPPGTEDDACAQVRDATDHIVHSFEGTAPRLAFALDSDEEGGDGGVDDSDHEAGDPGASK

SEQ ID NO: 184870 - protein, 167 aa, Oryza sativa
  unsure (1)..(167): unsure at all Xaa locations
  Clone ID: PAT_MRT4530_81821C.1.pep
MSQVGSAPAFRTGSPKKHELKSKQKLEKKLSFYTKVKDAVTSVNATKTICKKSKQRSRQKKLKAYDLSMLSEFLPETDASNLHTEAKLNCKSKQALVQRXPTQLNVVLANPQFQLVQFAGIHQHLLSTQPTSGRKESNSAKQGKDPKAKKRKNKKKNASSASEAMDT

SEQ ID NO: 184871 - protein, 1047 aa, Oryza sativa
  Clone ID: PAT_MRT4530_81822C.1.pep
MARGSALLDGSVLPPSRIVNERHAGLPRRFMPESATGREIVMLGEGRPAPDYPRRSIFFLPFAMAGLVPPFSHFFMDVLEFYDLQMAHLTPNAVMTLAIFAHLCEMFIGVRPSLQLFRWFFTVQSVSPPSVVGGCYFQPRGPVLNRYLPCVLRKKWDDWKSDWFYTPLADEARLRLPSQPPAQVSSWRAPVDLGEEYDAVLDRLAGLRSQGLTGAMVFGDYLRRRIAPLQRRARSAWEYTGPEDYMRTHQGARWDWAPEDFKIVVQRVLNLSSAEASRLPQEILPLCIDPDRVSILTIMLGVGASEERAPKGHDGAGERRRREQPAPGGGRASGPRVGGSGSSRPADAQGKRKLGGTPPPSPPRGGGAARASSRRPEGAAPTSQPEGVRKKKRLRKTGETEPCRGNLISPPRWSFNRPPRSDVPSHSSRHPKSGQSEAEDPAAAEERRRESDRREAAARLREAEEAAREAARVRQAEEAAREEAARARQAEEAAREEAARARQAEASAAAGASLGPTPSGGPQATSSEAARDEAAGASPGPTSPGDAQDQTGPGDIPEPSASSGGPSRVAFSPRRLFSSSSVAPLSAEPLLQALAAANTAVLDGFNTQVEALRAERAELEAAWARVEEGRRSVDAMVEVGRKAHRRHISELEARKAALAEIAREVEEEREAALVATTAMIEAQDSLRLQHGSWEAELKNKLDAAQGVLDSAAARERRATEAEAASRRREEALEARAMALEEHAGTVEKGFTDREAATALRETTLAAHEAACAEEESALRLREDALAERERALEEAEATTQRLANSLSLREAAQEEQARRNLECVRAERAALEQRAANLEAREKELAARARIGGAAAGESDLAARLAAAEHTVADMQRALDSSIGEAEALRLVGEMGPDMLWDSVSRMDRAGRQAGLWKGQTRTRPCNLEGLAPHLNRMAWVLERLPEELEKTIKSSSRDLARGAVELVLASYQARDPDFSPWMALEEFPPGTEDDARARVGDAADHIVNGFEGSAPRLAFVSSSDEEGDASGEDDGGDEAGYPGASE

SEQ ID NO: 184872 - protein, 197 aa, Oryza sativa
  Clone ID: PAT_MRT4530_81823C.1.pep
MSQVGSAPAFRTGSPKKHELKSKQKLEKKLSFYTKVKDAVTSLNATKTICKLVFTVIVLLHEWRGRITQPMLRYFKDKFQIKSKQRSRQKKLKAYDLSMLSEFLPETDASNLHTEAKLNCKSKQALVQREAAQLNAVLTNPQFQLDPFAAIHQHLLSTQPPSARKESNSAKQGKDPKDKKRKNKKKNASSASEAMDI

SEQ ID NO: 184873 - protein, 286 aa, Oryza sativa
  unsure (1)..(286): unsure at all Xaa locations
  Clone ID: PAT_MRT4530_81824C.1.pep
VTSPTAAARRRRRLERRTLAGERRREDANGGHQDEAGGTANSPATKTTAEGQRTATATRRKRRSSSAXRRRRSSDDLRRRRRGRRGRRRLGEHDGGLPERRRRLKRRRRTAGAAAATAKLGHTALGLFRRREAKAKVATGRGDTGDPFKGARRRRRRPMAAATAKESSAWRXETDPKRTRFHELPKRFSQRFQRRKGRGDPGDCFPSINSAGEGKERPDXWKGNGGGAKLGFRAAAAEGRRRXLTGGPHLSAGGRARARWRTGPAGPKREKRGFGPTFGPKPKETF

SEQ ID NO: 184874 - protein, 137 aa, Oryza sativa
  Clone ID: PAT_MRT4530_81825C.1.pep
MRARDLLRSPLRWPSHDSGWRREEETLAAGRRLPPHLRSALSPLEVRPPPPPSHAASPLRSLPGGYESIPARGDQVGTRKQWQMVLGLQWQVFSNKIMVIWTKVGEINTLSVSMAANAGNRICAKNRNQAAGIKLHP

SEQ ID NO: 184875 - protein, 50 aa, Oryza sativa
  Clone ID: PAT_MRT4530_81826C.1.pep
SPQQREGGSVDGIVQAVSPITKPLGEGAGTVVGERPVGEASDYALDCATH

SEQ ID NO: 184876 - protein, 84 aa, Oryza sativa
  unsure (1)..(84): unsure at all Xaa locations
  Clone ID: PAT_MRT4530_81827C.1.pep
MPRAPPRHCHAAAASPRRRSASAGQKRARGQRDAAKKLEGRHIITEVDEDGRPSASVEAAKNYVRHSGXVVRDNVPFPRVQRTK

SEQ ID NO: 184877 - protein, 33 aa, Oryza sativa
  Clone ID: PAT_MRT4530_81828C.1.pep
MTPLDQAKNGRDVQVVEAQQMSPPDLEEVRRMP

SEQ ID NO: 184878 - protein, 140 aa, Oryza sativa
  unsure (1)..(140): unsure at all Xaa locations
  Clone ID: PAT_MRT4530_81829C.1.pep
PRVRTSHGLHILAASLCKIPKSSSSRRRRRAVFLPPCRSAVFLLRCSAGAVFLPRRPAVTAAPSXPPATPDRHRRRRLLRIDSFGPSPPDLGDCGGYEAWRHHRYPDLPLCPLTQVLKLIRESSSLIPFLIPKSSPGSPP

SEQ ID NO: 184879 - protein, 499 aa, Oryza sativa
  Clone ID: PAT_MRT4530_8182C.1.pep
MARFVVAGPSEYLAITGWGIDDVKLAKKAWVFAGQKCSRFDISPVNYEFNVEAMSSEKLAFNLPAVFTIGPKITPAPAPEVDGASNQRRVLMPESEEKLLLYAKLIAPHDHASNHVKQLVKGVIEGETRVLAASMTMEEIFQGTKKFKQEVFDQVQLDLNKFGLYIYNANVKQLVDEPGHEYFSYLGKKTQQEAANKAKVDVAEERMKGEVGAKEREGLTRQNAAKVDAETKVVSVRQQGIGLREEAKVKAEVQVYENEREAEIAAAQAGLAMKKAGWEKQSKVAQVEAVKAVAIREAELQMEVERKNALRLTEKLKAEQLSKATVQYETQVQESNAALYNRQKAADATLYEQVKSAEARKAQADAMFFEQKLAEDARLYAKQKEAEALAMVGKAKVEYVTSMLQALGGDYGALRDYLMIDGGMYQEMARVNASAVSGMQPKISIWSGADGAAGEAGAGAMQQVAGVYKMLPPLLSTVHEQTGMQPPAWMGSLPKDGAN

SEQ ID NO: 184880 - protein, 222 aa, Oryza sativa
  unsure (1)..(222): unsure at all Xaa locations
  Clone ID: PAT_MRT4530_81830C.1.pep
HEASPSLSLFRRLRLAPSPPPGHAAASAFRSRRRCRRRRIGXPRTPPPTLXPPPLTPSPPCPSPTATAPRRRPRLRLAPPPSSSPPPPCADVSASMSRRRRRHLRLRVAPPSSSSPPPPSHPLRPRRRLHLRCAPVRSPPSPHCRIWRGVVKSVSPDHGRGGLGWSRSTLATKVQRLDGAVRAAVAILLLIPRSQGFGKHRRCRVRMSSWSPSTTPSSPLST

SEQ ID NO: 184881 - protein, 388 aa, Oryza sativa
  Clone ID: PAT_MRT4530_81831C.1.pep
MYGVGGGGGGFNAPYTASARRRNHEDDDDEEEEESGEGRVLEAWERAYADDRSWEALQEDESGLLRPIDTKTLVHAQYRRRLLLRSAASAAARIQKGLIRYLYIVIDLSRVVNKILFGTAPDLRSMAASEMDYRPSRMAVVAKYAEVFIREFFDQNPLSHVGIVTMKDGISHRLTEIGGSPESQIKALMGKLECSGEPSLQNALELVHGYLDQVPSYGHKEVLFLYSALNTCDPGDIMETIAKCKKSKIRCSVIGLAAEIFICKYLCEETGGSYTVALDESHFKELLLEHAPPPPAIAEYAAANLIKMGFPQRGAEDLISICSCHKKIKSGAEGYICPRCKVNIVNLASMFAVQKQSFITPDMSIYPPWSPCKIAQVTLLPLLRYLHP

SEQ ID NO: 184882 - protein, 350 aa, Oryza sativa
  Clone ID: PAT_MRT4530_81832C.1.pep
MAAPREPEVIRDKAAMRAWSRRRRAEGKTVAVVPTMGYLHQGHLSLISAAAAAASADPVAIVVTIYVNPSQFAPSEDLATYPSDFAGDLRKLASTGVVDAVFNPPDLYVRGAGRRGAGSGGAISCLEEAAGDGHETWVRVERLEKGLCGASRPVFFRGVATIVSKLFNIIEPDVPVFGKKDYQQWRVILPYWSGLDFGIEIMGSRNCARTDGLAMNSRSLDREPLIANKSKSKIVQPLTETGGQVDYVEIVEQESLVPVEQIDGPVVICVAAWFGKVRLIDNIEIDYAILRFWGDSLAVCCDLGIAFEIPFVSRDDSRHVVRCNNPREKICRSTLTEGKFISTNCRGLML

SEQ ID NO: 184883 - protein, 210 aa, Oryza sativa
  Clone ID: PAT_MRT4530_81833C.1.pep
ETFAKCKKSKIRCSVIGLAAEIFICKYLCEETGGSYTVALDESHFKELLLEHAPPPPAIAEYAAANLIFMGFPQRGAEDLISICSCHKKIKSGAEGYICPRCKVNVCELPTECRTCGLTLVSSPHLARSYHHLFPVQPFDEVSSVHPNRLGQKGGQKCYGCQQSFINPDSQSSLHVRCPKCNQHFCLDCDIYIHESLHNCPGCESQRSSS

SEQ ID NO: 184884 - protein, 313 aa, Oryza sativa
  Clone ID: PAT_MRT4530_81834C.1.pep
MAAPREPEVIRDKAAMRAWSRRRRAEGKTVAVVPTMGYLHQGHLSLISAAAAAASADPVAIVVTIYVNPSQFAPSEDLATYPSDFAGDLRKLASTGVVDAVFNPPDLYVRGAGRRGAASGGAISCLEEAAGDGHETWVRVERLEKGMCGASRPVFFRGVATIVSKLFNIIEPDVAVFGKKDYQQWRVICRMVRDLDFAIEIIGSEIVREADGLAMSSRNVHLSREEREKALSISRSLVDARTGALKGNTDCKQIKNKIVQTLTETGGQVDYVEIVEQESLVPVEQIDGPVVICVAAWFGKVRLIDNIEIDTRS

SEQ ID NO: 184885 - protein, 105 aa, Oryza sativa
  unsure (1)..(105): unsure at all Xaa locations
  Clone ID: PAT_MRT4530_81835C.1.pep
XSQLGKAKIFQGSKLNWKELMEPKEALNFPDSRTAHIYGVVPAERDTYQPHIESSEWYSGRWSCKGGDWKRIADFSQDKPSQEEACSSMKAILFVKCQKGIILTI

SEQ ID NO: 184886 - protein, 97 aa, Oryza sativa
  Clone ID: PAT_MRT4530_81836C.1.pep
MAGEGAALDKNGPAPTLLRVHPAPARIGEWDEISHHPRPLRGPAIRPGSRTPGASDSRKESRTKWEPVARRRASERREEPTAGRMGETAWSIASENL

SEQ ID NO: 184887 - protein, 73 aa, Oryza sativa
  Clone ID: PAT_MRT4530_81837C.1.pep
SRALVVLCRDVDVEDVQQRGQPESSPILPDLASEGHAWLDNMDEILSARTGTTTTSLGWWSLHPFSLLQLDQP

SEQ ID NO: 184888 - protein, 304 aa, Oryza sativa
  Clone ID: PAT_MRT4530_81838C.1.pep
MANKYVFYTHKKIQRSKDECRDISTKDLFCLKYLCKSFCLDEARNWGGTAGYVDQYWCKGQRCFFSNSNNLLFFSGTSDNPNTEDRQIRVPGWGGDGRRSEKKGEVTGIRGIVMGGSRPAVGGRIGKRRGASGGIRAAGMEEGVGTRQGVARDEEAGGGRGILPPTAQGGRRGGGELARGPLLAPLIPFGQPARPCGGVWGKGVGGGGLAGVDQALIPQLLIVSHWRAFTLTGSFVDIRSAVSAFPYGGASPAICEHFSTKDLFCIKYLCRGFCHDEAVNLRGKHARVMRAWCHGRRCNCNVCH

SEQ ID NO: 184889 - protein, 66 aa, Oryza sativa
  Clone ID: PAT_MRT4530_81839C.1.pep
MAVMEGPRCCPVVALYLGHGARMPGRREGSGAWRAGQRGSGAARGEAAPTLAPWSIVRTGTMLREE

SEQ ID NO: 184890 - protein, 415 aa, Oryza sativa
  Clone ID: PAT_MRT4530_8183C.1.pep
MQGGSSGIVYGMGEGRARCIADVRAAAGSTTFLAGTLSLKEENEVHLIRFSPAESELVCDGLFYHPNEIWDLKSCPFDHRVFSTVYTSGEGYGASVWKIPELHGQSNSPPLEQLFTLDEHTGKIRCVLWWPLGKHDKLISIDDRNIFLWNIDASNKSAKVMQKGSADMLPNLRGGSWDPHDHNSIAAITDSSLHCWDLRSMKKSNAIEHAHFRDVDYNPKKQHLITTAEDEFGIRLWDLRMLKYPLKNLPGHSHWTWAVRHNPEHDQLILSAGTDSTVNLWFAKVGTDDSGPESPPGSPTREEEPLLNSYTDYEDSIYGCFRISQALLAEKMKLHVLSVVRAHNSTSLLDFLLAILYTVLWPAVIAKFSLVQLPNTAPRVILECHISEKGWCQLLRYVVKYNRSEFCRTVEIDKI

SEQ ID NO: 184891 - protein, 497 aa, Oryza sativa
  Clone ID: PAT_MRT4530_81840C.1.pep
MVSRRFKPVEECSSDGRSEQTVAADFDGTLVRSRSAFPYYLLVALEAGSVLRAVVLLLSVPFVYVTYIFFSESLAISTLVYISVAGLKVRNIEMVARSVLPKFYAEDVHPESWRVFNSFGKRYIITASPRIMVEHFAKTFLGADKVVGTELEVGKNGKATGFMVKPGVLVGDHKRQAVVKELRDAVPDVGLGDRETDFDFMSICKEAYLVTSRKYSAVPKNQLLSPLILHDGRLVQRPTPLVALVTFLWMPFGFVLALLRVYVNLPLPERIVFYTYKLMGIRLIVKGNPPPPPKKGHPGVLFVCNHRTVLDPVEVAVALRRKVSCVTYSISKFSELISPIKAVALSREREKDAENIRRLLEEGDLVICPEGTTCREPFLLRFSALFAELTDRIVPVAINTKESMFHGSTVRGFKLMDPYFFFMNPRPTYEITFLNQLPKELTCSGGKSPIEVANYIQKTLSGQLGFECTAITRKEKYSILAGTDGRVPSKNKEKEKN

SEQ ID NO: 184892 - protein, 96 aa, Oryza sativa
  Clone ID: PAT_MRT4530_81841C.1.pep
ISTSEEPGHEVLPALMVRTSRAFTIVHLFEGADQKIQQVYVPVANASRDLHQRLVLYKRRRENICLPQAVVEAELFGQASASAGNMPRKSQQGETV

SEQ ID NO: 184893 - protein, 1249 aa, Oryza sativa
  unsure (1)..(1249): unsure at all Xaa locations
  Clone ID: PAT_MRT4530_81842C.1.pep
MARGSALLDGSVLPPSRIVSERQAGLPRRFMPESATGREIVTLGEGRPAPCYPGRSVFFLPFAMAGLVPPFSSFFMDVLEFYDLQMAHLTPNAVMTLAIFAHLCEMFIGVRPSLRLFRWFFTVQPVSPPSVVGGCYFQPRGPVLNRYIPCVLRKKWDDWKSDWFYTPLADEARLRLPSQPPAQASGWRAPVDLGDGYDAVLDRLAGLRSQGLTGAMVYGDYLRRRIAPLQRRARGAWEYTGSEDYMRTHQGVRWDWAPEDFKIVVQRVLNLSSVEASLIPQGVLPLCSDPDRASILTIMQAVGASEERAPRGHDGAGGSRRGEQSTPGGGRASGPRDGGPGSSRPADARGKRKQEGTPPPSPPRGGGAARASSRRPEGATPTSQPEGERKKKRLRKMGGTEPSRGNLISPPRWSFNRPPRSEIPSRPSRHSKSGQSEAEDPATAEDRRRESDRREAADRLREAEEAAREAARARQAEEAAREEAGLRQAEATTSSETTRETDRQEAADRLREAEEAAQVAVRARQAEEAAREEARLRQAEATTTSEAARDEAAGASLGPTPSCDAQAKPGPGDIPESGTSIGGPSRAASSPRRFSPTPSVAPLNAEPLLQALAVANTTVLDGLSAQMEALQAERAELDAAWARVEEGRRSVEAMVEVGRKAHRRHASELEARRKVLGEVAKEVEEERGAALIATTVMNEAQDTLRLQYGSWEAELGKKLDAARGVLDAAVDRDXRAAETAVAXSRRREEALEARAMALEERACVVERDLADREAAVSIREATLAAHEAVCAEEESALRLREDALTERERALEEAEAAAQRLADSLSLREAAREEQARRNLEGASAERAALNQRAXRLEAQAKELDARARSGGAAAGESDLATRLAAAEHTIADQQGALDSSAGEVEALRLAGEAGLWGGRTAKYAANQGGLAQRLSEMAGTLQRLPEELERTIKSSSRDLARGAVELVLASYQARDPDFSPWTALDEFPPGTEDGARAQVRDAADHIVHSFEGSAPRLAFALNSDEEDDDGGVGGSGDEAGDPAPPFRFRRSPLALAVGIVLAPCSSLSAVAAELRSVAVVAPLFLPARRPLRRLRRIVADPVRRSASPVDCRSTVVIVIPSRAAVFLRSGRRSRRRRCPGVSRRPPFAFPLPSSLSGAAPPRRWSPAVTIGARARRSRRPCRRGRPRARPRGCQVGPAVSRPRPRVRLTRGTHGADRRQPRAPGPPWTERLTRGPHFPWTRSARPPLG

SEQ ID NO: 184894 - protein, 46 aa, Oryza sativa
  Clone ID: PAT_MRT4530_81843C.1.pep
MATKVVEKGRRAPTPDEDPRAGDPGCAEDGVAMMMIRVRRAGKKPG

SEQ ID NO: 184895 - protein, 866 aa, Oryza sativa
  Clone ID: PAT_MRT4530_81844C.1.pep
MAHLTPNAIMTLAIFVHLCEMFIGVRPFLRLFRWFFTVQPVSPPTAVGGCYFQPRGQVLNRYIPCVLRKKWDDWKSDWFYTPLADEARLRLLSQPPAQDFSWRAAVDLGDGYDAVLDRLAGLRSQGLTGAMVFGDYLRRRIAPLQRRAWGAWEYTGPEDYMRTHQGRKWDWDPEDFRMVVQRVLNLSSVEASLIPQGVLPLCCDPERAKILAIMQVVGASRERAPRGHDGAGGSRRGEQSTPGGGRASGPCDGGRGGSRPADARGKRKQEGTPPPSPPRGGGAVHASSRRPEGAVPTPQPQGERKKKRLRKMEGIVPCRGNLISPPRWSFSRPPRSEIPSRPPPRHSKSGRSEAEETATAEARRREADRREAADRLREAEEAAQEAVRATMTSKATHDEAAGAPLGPDPSGDAWDEPASGDAPESGTSIGGPSRAAPTPRGLSPLPSAAPLSAEPLLQALAAANSTVLDGLSAQMEALQAERAELDAAWARVEEGRRSVEAMVEAGRKAHCRHVSQLEARRRDLAEIAREVEEERETALIATAVLDEARDDLRLQYGSRAAELEEKLDAAAARERRAAENEAASRQREEALEARATALEERARALDAKERDLADREVAVATREATLAAHEAACAEEESALRLREDALTERGRALEEAEAAAQRLADSLFLREAAREEQARRNMESARAERAALDQRAAELEARAKELDARAHSGGAVAGHGDLAARLAAAEHTIAELQGALDSSAGEVEALRLASEVGPGMLRDAVSRLDRAGRQAGLWGGRYAKYAANQGGLAQRLSEMAGALERLPEELEETMRTTATTRPTTRARRRLVPRSQPQTARVGASAWGDPRVETGQAGSAVTEGYG

SEQ ID NO: 184896 - protein, 64 aa, Oryza sativa
  Clone ID: PAT_MRT4530_81845C.1.pep
MRELSCFGNSSVGIAAARCAGATGLAVAFDDALLPSSRRAYHVLHKKRGSRSLATAADTAVGVH

SEQ ID NO: 184897 - protein, 1036 aa, Oryza sativa
  Clone ID: PAT_MRT4530_81846C.1.pep
MARGSALLDGSVLPPSRIVSERQAGLPRRFMPESATGREIVTLGEGRPAPCYPGRSVFFLPFAMAGLVPPFSSFFMDVLEFYDLQMAHLTPNAVMTLAIFAHLCEMFIGVRPSLRLFRWFFTVQSVSPPSVVGGCYFQPRGPVLNRYIPCVLRKKWDDWKSNWFYTPLADEARLRLPSQPPAQASSWRTPVDLGDGYDAVLDRLAGLRSQGLIGAMVYGDYLRRRIAPLQRRARGAWEYTGSEDYMRTHQRVRWDWAPEDFKIVVQRVLNLSSVEASLIPQGVLPLCSDPDRASILTIMQAVGASEERAPRGHDGAGGSRRGEQSTPGGGRASGPRDGGPGSSRPADARGKRKQEGTPPPSPPRGGGAARASSRRPEGAVPTSQPEGERKKKRLRKMGGTEPSRGNLISPPRWSFNRPPRSEIPSRPSRHSKSGQSEAEDPATAEARRRESDRREAADRLREAEEAAREAARARQTEEAAREEAGLRQAEATTSSEATRETDRQEAADRLREAEEATQVAVRARQAEETAREEARLRQAEAMTTSEAARDEAAGASLGPTPSCDAQDKPGPGDIPESGTSIGGPSRAASSPRRLFPTSSVAPLSAEPLLQALAVANTTVLDGLSAQVEALQAERAELDAAWARVEEGRRSVEAMVEVGRKAHRRHASELEARRKVLGEIAKEEAELGKKLDAARGVLDAAAARERRAAETEVASRRREEALEARAMALEERACVVERDLADREAAVAIREATLAAHEAACAEEESGLRLREDALTERERALEEAEAAAQRLADSLSLREAAREEQARRNLEGARAERAALNQRAAELEAREKGLDARVRSGGAAAGESDLTARLAAAEHTIADLQGALDSSAGEVEALRLAGEVGPGMLRDAVSRLDRAGRQAGLWGGRTAKYAANQGGLAQRLLEIAGTLQRLPEELERTIKSSSRDLARGAVELVLASYQARDPDFSPWTALDEFPPGTEDGARAQVRDAADHIVHSFEGSAPRLAFALNSDEEDDDGGVGDSGDDAGDPGASE

SEQ ID NO: 184898 - protein, 995 aa, Oryza sativa
  unsure (1)..(995): unsure at all Xaa locations
  Clone ID: PAT_MRT4530_81847C.1.pep
MARGSAPLDGSVLPPSRIVSERQAGLPRRFMPESATGREVVALGEGRPTPHYLGRSVFFLSFAMAGLVPPFSSFFMDILEFYDLQMAHLTPNAVMTLAIFAHLCEMFIGVRPSLWLFRWFFTVQPVSPPSVVGGCYFQPRGQVLHRYIPCVLRKKWDDWKSDWFYTPLADEARLRLPSQPPAQASSWRATVDLGNGYDAVLDRLAGLRSQGLTGXMVFGDYLRRRIAPLQRRARGAWEYTGPEDSMRTHQGRTWDWDPEDFRMVVQRVLNLSSVEASLIPQGVLPLCCDPERANILTIMLAVGASGERALRGHDGAGGSRRGEQSTPGGGRASGPRDGGPGGSCPADARGKRKQECTPSPSPPXGGGAVRASSRRPEGAVPTSQPEGERKKKRLRKMGGTEPCRGNLISPPRWSFSRPPRSEIPSRPLRHSQSGRSEAEETATAEARRREADRREAADRLREAEEAAQEAVQVRQAEEAAREEARLRRAEESVREAEAAHARQAACQAPDPTPPEATTTSEATHDEAAGAPLGPDPSGDAQDEPASGDAPESGTSIGGPSRAAPSPRRPSPLPSATPPSAEPLLQALAAANTTVLDGLSAQMEVLQAERAELDAAWARVEEGRRSVEAMVEAGRKAHRRHASELEARRRDLAEIAREVEERETALIVTAVLNEARDDLRLQYGSRAAELEKKLDAARGVLDAAATRERRAAEIEAASRQREEALEARATVLEERARAKERDLADREATVAIREATLAAHEAACAEEESALRLREDALTERERALEEAEAAAQRLADGLSLREAAWEEQARRNLEAAEHTIADLQGALDSSAGEVEALRLAGEVGPGMLRDAVSRLDCAGRQAGLWGGRTAKYAANQGGLAQRLSEIAGTLQRLPEELERTIKSSSRDLARGVVELVLASYQARDPDFSPWTALDEFPPGTEDGARAQVRDAADHIVHSFEGSAPRLAFALNSDEEDDDGGVGDSGDEAGGPGALE

SEQ ID NO: 184899 - protein, 466 aa, Oryza sativa
  Clone ID: PAT_MRT4530_81848C.1.pep
MGEAGRGSGGRGEKLTVLVVLPGSWRSKEVVAYSSSVSILEFSGDGSTCYSLLLAYAVRLMFTGRILNARLPVAPAASPRRPHRRPGLTSKPGKPPSPPSMASAAATSSSASLRLLTKPPKPLLSKPHLLTLCAPVSFQRLVARSSASPTPSPSAAAAAAAASGSGVDPAQLPPALRDIVALFQSVPDPRTRYKQLLAYAARLPPMDPALKTDANRVRGCVSQVWVHAAPEEGGAPGRVSFQADSDAQLTKGLAALLVLGLSGAPARDVAMVPVEFIELLGIRQSLSPSRNSGLLNMLSLMKRKALEVATGEVTTEEIGSQEVVQEVAERPAAKEKEPEFAAFGAREEEGSEVHSPQEEQLEEMPADVMEGNGGLGGGRQERIKESLERGLSPVQLQIEDISHLHKGHAGVSGSNGETHFNVRVVSEAFQGKSLLKRHRAVYDLLQDELKNGLHALSIDAKTPSEV

SEQ ID NO: 184900 - protein, 131 aa, Oryza sativa
  Clone ID: PAT_MRT4530_81849C.1.pep
GMSLAFRTDIISNFYSHHQPATSHMVWHISFSFHFHFRLISYHLRLWPHFKQAFRPPFHQHGLGQPPGSLGRGSAMRPHTPSPRGTCFAASDSLIPHLAALRASLPFCASRHPQLVGRQQEHSIVHTSFFP

SEQ ID NO: 184901 - protein, 154 aa, Oryza sativa
  Clone ID: PAT_MRT4530_8184C.1.pep
LRSMKKSNAIEHAHFRDVDYNPKKQHLITTAEDEFGIRLWDLRMLKYPLKNLPGHSHWTWAVRHNPEHDQLILSAGTDSTVNLWFAKVGTDDSGPESPPGSPTREEEPLLNSYTDYEDSIYGIAWSSHDPSLFASLSYDGRVVLESVKPYLQRK

SEQ ID NO: 184902 - protein, 588 aa, Oryza sativa
  Clone ID: PAT_MRT4530_81850C.1.pep
MDRTSPALIWHFGTHMVDDLLPVLCCVVIRGATAIGYLSVGPSLIQLQAELAEIFRDVRCETKGQDQNSEADSTDLPCQCRSTVGALAAAWKTSDKNLRSCAILLASLADSFLADLDELSDNEAYPEEENAEAVGTEEIGDDDMPDLESLNYDDLDSVSKLQKTQRYNDIMQKVENALQKGTDFSNQRSILEEDPEYQLIVDCNALSVDIENEIIIIHNFIRDKYRLKFPELESLVHHPIDYARVVQKIGNEMDLTLVDLEGLLPSAIIMVISVTASTTSGKPLSEENLVKTIEACERALTLDAAKKKVLEFVESRMGYIAPNLSAIVGSAVASKLMGTAGGLGALAKMPACNVQLLGAKRKNLAGFSTATSQFRVGYLEQTDVFQSTPPALRTRACRLIAAKSTLAARIDSIRGDPTGKAGRNLLEEIRKKIEKWQEPPPAKLPKPLPVPDFEPKKKRGGRRLRKMKERYAQTDMMKLANRMQFGVPEESSLGDGLGEGYGMLGQAGSGKLRVSTAPSKLSAKITKKFKEKSYGSSGATSGLTSSLAFTPVQGIELSNPQAHGNLLGSGTQSTYFSETGTFSKIKRT

SEQ ID NO: 184903 - protein, 1061 aa, Oryza sativa
  unsure (1)..(1061): unsure at all Xaa locations
  Clone ID: PAT_MRT4530_81851C.1.pep
MARGSAPLDGSVLPPSRIVSERQAGLPRRFMPESATGREVVALGEGRPAPHYPGRSVFFLSFAMAGLVPPFSIFFMDILEFYDLQMAHLTPNAIMTLAIFAHLCEMFIEVRPSLRLFRWFFTVQPASPPTVVGGCYFQPRGQVLNRYIPCVLRKKWDDWKSDWFYTPLADEARLRLPSQPPSQASSWRAAVDLGDGYDAVLDRLAGLRSQGLTGAMVFGDYLRRRIAPLQRRTRGAWEYTGPEDYVRTHQGRKWDWDPEDFRMVVQRVLNLSSVEASLIPQGVLPLCCDPERASILATMQVVGASGERAPRGHDGAGGSRRGEQSTPGGGRASGPRDGGPGGSRPADARGKRKQEGTPPPSPPRGGGVVRASSRRPEGAVPTPQPEGERKKKRXARWGGPSHAGGTSFRPRGGRLADLPAGSSPRPLRPYSLSHFPRRVFTHPFLFVFWFFFCLSEIPSRPPRHSKSGRSEAEETATAEARRREADRREAADRLREAEEAAQEAVRVRQAEEAAREEARLRRAGESVREAEAARARQAACQAPDPTPPEATTTSEATHDEAAGALLGPDPSGDAWDEPASGDAPESGTSIGGPSRAAPTPRRLSPMPSAAPLSAEPLLQALAAANRTVLDGLSAQMEALQAERAELDAAWARVEEGRRSVEAMVEAGRKAHRRHASQLEARRRDLAEIAREVEEERETALIATAVLDEARDDLRLQYGSRAAELEEKLDAARGVLDAAAARERRAAENEAASRQREEALEARATALEERARALDAKERDLADREAAVATREATLAAHEAACAKEGSALRLREDALTERGRALEEAEAAAQRLADSLFLREAAREEQARRNLEGARAERALLDERAAELEARAKELDARVHSGGAAAGHGDLAARLAAAEHTIAEMQGVLDSSAGEVEALRLASEVGPGMLRDAVSRLDRAGRQAGLWGGRYAKYAANQGGLAQRLSEMAGALKRLPEELEETIKSSSRDLTRGGGGAPLEEFPPGTEDGARAQVWDAANHIVHSFEGTAPRLAFALDSDEEGGDDAADDSDDEAGDPGASE

SEQ ID NO: 184904 - protein, 88 aa, Oryza sativa
  Clone ID: PAT_MRT4530_81852C.1.pep
PVTTRPTRKLHRDLLTPSHTQPSTELNSSHTFEIEGERVTEKNGSFFPLRPANMANLQKVGLRHKRTRYLQKACTSCLREFLAKGPPR

SEQ ID NO: 184905 - protein, 1025 aa, Oryza sativa
  unsure (1)..(1025): unsure at all Xaa locations
  Clone ID: PAT_MRT4530_81853C.1.pep
MARGSAPLDGSVLPPSRIVSERQAELPRRFMPESATGREIVSLGEGCPAPRYPGRSVFFLPFAMAGLVPPFSSFFMDVLEFYDLQMAHLTPNAVMTLAIFAHLCEMFIGVRPSLRLFRWFFTVQPVSPPSVVGGCYFQPRGPVLNHYIPCVLRKKWDDWKSDWFYTPLADEARLRLPSQPPAQASNWRAPVDLGDGYDAVLDRLAGLRSQGLTGAMVFGDYLRRRIAPLQRRARGAWEYTGSEDCMRTHQGVRWDWAPEDFKIVVQRVLNLSSVEASLISQGVLPLCSDPDRASILTIMQAVRASEERAPRGHDGAGGSRRGERSTPGGGRASGPRDGGPGSGRPADARGKRKQEGTPPPSPPRGGGAARASSRRPEGATPTSQPEGXRKKKRPRKMGGTEPSRGNLISPPRWSFNRPPRSEIPSRPSRHSKSGQSEAEDPATTKARRRESDRREAADRLRXAEEAAQVAVRARQAEEAAREEARLRQAEATTSSEATRETDRQEAADRLREAEEAAQVAVRARQAEEAAREEARLRQAEATTTSEAARDEAAGASLGPTHSCDAQDKPGXLAVANTTVLDGLSAQMEALQAERVELDAAWARVKEGRRSVEAMVEVGRKAHRRHVSELEARRKVLGEIAKEVEEERGAALIATTVMNEAQDTLRLQYGSWEAELGKKLDAARGVLDAATARERRAAETEAASRRREEALEARAMALEERAGVVERDLVDREAAVAIREATLAAHEAACAEEESALRLREDALTERERALEEAEAAAQRLADSLSLREAVREEQARRNLEGARAERAALNQRAAELEAREKELDARARSGGAAAGESDLTARLAAAEHTIADLQGALDSSAGEVEALRLAGEVGPGMLRDAVSRLVRAGRQAGLWGGRTVKYAANQGGLAQRFSEMAGTLQRLPEELEGTIKSSSRDLARGAVELVLASYQARDPDFSPWTALDEFPPGTEDGARAQVRDAADHIVHSFEGSAPRLAFALNSDEEGDDGGVGDSGDEAGDPGASE

SEQ ID NO: 184906 - protein, 1015 aa, Oryza sativa
  Clone ID: PAT_MRT4530_81854C.1.pep
MARGSAPLDGSVLPPSRIVSERQAGLPRRFMPESATGREIVSLGEGCPAPRYSGRSVFFLPFAMAGLVPPFSSFFMDVLEFYNLQMAHLTPNAVMTLAIFAHLCEMFIGVRPSLRLFRWFFTAQPVSPPSVVGGCYFQPRGPVLNRYIPCVLRKKWDDWKSDWFYTPLADEARLRLPSQPPAQASNWRAPVDLGDGYDAVLDRLAGLRSQGLTGAMVFGDYLRRRIAPLQRRARGAWEYTGSEDCMRTHQGVRWDWAPEDFKIVVQRVLNLSSVEASLIPQGVLPLCSDPDRASILTIMQAVGASEERAPRGHDGAGGSRRGEQSTPGGGRASGPRDGGPGSGRPADARGKRKQEGTPPPSPPRGGGAARASSRRPEGATPTSQPEGERKKKWPRKMGGTEPSRGNLISPPRWSFNRPPRSEIPSRPSRHSKSGQSEAEDPATAEARRRESDQREAADHLREAEEAAREAARARQTEEAAREEARLRQAEAMTTSEAARDEAAGASLGPTPSCDAQDKPGPGDIPESGTSIGGPSRAASSSRRLFPTPSAGPLSAEPLLQALAVANTTVLDGLSAQMEALQAERVELDAAWARVEEGRRSVEAMVEVGRKAHRRHVSELEARRKVLGEIAKEVEEERGAALIATTVMNEAQDTLRLQYGSWEAELGKKLDAARGVLDAAAARERRAAETEVASRRREEALEARAMALEECACAVERDLADREAAVAIREVTLAVHEAACAEEESALRLREDALTERERALEEAEAAAQRLADSLSLREAAQEEQARCNLEGARAERAALNQRAAELEAREKELDARARSGGAAAGESDLTARLAAAEHTIADLQGALDSSAGEVEALRLAGEVGPGMLRDAVSRLDRAGRQAGLWSGRTAKYAANQGGLAQRLSEIAGTLQRLPEELERTIKSSSRDLARGAVELVLASYQARDPDFSPWTALDEFPPGTEDGARAQVRDAADHIVHSFEGSAPRLAFALNSDEEDDDVGVGDSGDEAGDPGASE

SEQ ID NO: 184907 - protein, 374 aa, Oryza sativa
  Clone ID: PAT_MRT4530_81855C.1.pep
MRAVEGCSSGLQPSAGARAAARVELRRLVARAPGGESSGGGGRGAERVLCFAVLLPLTLRLETGPHNAATHAHSQNRGVAEQGRPPGRRRCGRGVRRDTAAGIGIPSSSRNVMAVDDPLESEEMSAMLCSMAIMSKNGNLYSLVLWLVTNIKEIKDSGCIGLVHEIGVLSSDRNVVQCSCPAKLLQKLSLSTIGERCLIDAALLLFEMASNNVKEKLRKLLMLSLGKLARISILTESSKEIESADRATEKLEMFKSQLKQKDVCLAENGNGGSLNTILLEKRSRWSITKSWTPCAIGMVPCSFSSTAVLPTLDVIDHELKDDTLEQHVNFELDDHTERAGYHSHPEKQLDVECIPAISEREISDMSEVTFPLKV

SEQ ID NO: 184908 - protein, 555 aa, Oryza sativa
  unsure (1)..(555): unsure at all Xaa locations
  Clone ID: PAT_MRT4530_81856C.1.pep
LLAVVFVIDKFRSYLVGAKVIVYTNHAALKYPLTKKYAKPRLIRWILQLQEFNIEIKDKKGXVENFVADHLSRMQITNMQELPINDYLRDDMLLKLXVTDSDPWYVTIINFMVAGHVTLGENKKRLIYESRWNLWDAPYLYRVCSDGVLRRCVPADEGMKIIEKCHAAPYGDHYGAFRTHAKIWQSGFFXTTMYDDPKKFVRRCTRCQKHRGITTLDAMPLTYNLQVELFDVWGIDLMEPFPKSYEYXMVAADYVSMVISDGGSHFIDKTFRSFLQELEAQHNIATPYHPQTSGQIETCNKQIKNILXKTVNKMGKAWKNKLPDALWAYRTAYKAPIIMSPYQLVYGKTCHLLVELEHRAHWAIRTWNMDLKGAGQLRKMXLSKLEEWRDKSYHNAKIYKDKTKRWHDRQSKHKVFKAEDKVQLFNSRVKLFGHGKLRSKWMGPYTVVDTSSHGAITQRDNKGNTFKVRRCGRQCSRGAPPRWIPGTAGGADHHTTGLLQEEARRRADHPPPPRPPPRHPPPRLRPPRHPPRRPCRRPRPRPPRRRPPLPWSRLP

SEQ ID NO: 184909 - protein, 956 aa, Oryza sativa
  Clone ID: PAT_MRT4530_81857C.1.pep
MARGSAPLDGSVLPPSRIVSERQAGLPRRFMPESAAGREVVALGEGRPAPHYPGRSVFFLSFAMAGLVPPFSSFFMDVLELYDLQMAHLTPNVVMTLAIFAHLCEMFIGVRPSLRLFRWFFTVQPVSPPSVVGGCYFQPRGPVLNRYIPCVLRKKWDDWKSDCYDAVLDRLAGLRSQGLTGAMVYGDYLHRRVAPLQRRARGAWEYTGSEDYMRTHQGGRWDWAPEDFKMVVQRVLNLSSVEASLIPQGVLPLCSDPDCANILTIMQAVGASEERAPRGHDGAGGSRRGEQSTPGGGRASGPHDGGLGCSRPADARGKRKQEGTPSPSPPRGGGAARASSRRPEGAVPTSQPEGERKKKRLRKMRETEPCRGNLISPQGGRLADLLAGSSPRPLRPYSFSHLPRQAEETAREEAKLRRAEESVREAEVARARQAACQAPDPTPPEATMTSEATHDEVAGAPLGPDPSGDVWDVPASGDAPGSGTSIGGPSRAAPIPRRLSPLPSAALLKAEPLLQALAVANTTVLDGLGAQMEVLQAERTELDAAWVRVEEGRRSVEAMVEAGRKAHRRHASELEARRRELAEIAREVEEERETALIATAMLNEARDDLRLQYGSRAAELEKKLDAARGVLDAAAARERRAAENEAASRRREEALEARAKALEERARARERDLADREAACAEEESTLRLREDALTERERALEEAEAAVQRLADSLSLREAAREEQARRNLEDARAERAALDQRAAELKARVKELDARARSDRAAAGDGDLAARLAAAEHTIADLQGALDSSAGEVEALRLAGEVGPGMLRDAVSRLDRAGWQAGLWGGRTAKYTANQGGLAQRLSEMAGTLQRLPEELEETIKSSSRDLARGAVELVLASYQARDPDFSPWAALDEFPPGTEDDARAQVRDAADHIVHSFEGTAPRLAFALDSDEEGGDGGAGDSGDEAGDPGVSE

SEQ ID NO: 184910 - protein, 1805 aa, Oryza sativa
  unsure (1)..(1805): unsure at all Xaa locations
  Clone ID: PAT_MRT4530_81858C.1.pep
MAPRRPNPTSAKGPDPGRVDDDSTAFLGVSLVDDIKLAKLVSSGALFEGQAFAPGKTVVPKPVDNRTVVFAVFFEAGLRFPCNVLLPEILRLFQVELPQLSPSALVRIAIFDWACRTSGFEPNAELFGAIFFATMNSKTVITLAGTKKNVFESVNFNVRPEWSDLCPVNAAMSKWDRHWMARWFYHTIPFEAGSELAKALRCRHRAIAPNRRPNIAVDGAMEARFVLLRKVCSRLSCRDLVEEFCMLRIFPLSQSWQVAVEQGEEVDGLPNLILPEGANTSRSTFTVLTLDQAEAEARRMIGDVSVVEYSQLLTRQAAGRANWVYNGELPPRANPQKADDEAGPSQKRMRGQVKLAPKKRRVPPSSDSDADDEDDAEEHDGEEEREEEEEVEAVADKATGEAVEDRADTPGYTPTPGPGHNETGVESNSSPLRRKDLEGAKALVAFSSGAAAKGGPVKKVARKKGLVDVARVFSDDESSDGACTPGPGHNETGVESNSSPLRRKDLEGAKALVAFSSGAAAKGGPVKKVARKKGLVDVARVFSDDESSDGAPTSPAGRSLDLLAAPIPPLGAAGVDGSTAAGASASAERIVTAAAKVFGSPPHQPVASPLMEAKGKRAVAETSASEYSLWVPRFAPGDFETRADLLHFVEGVSNLVLPASAPSLFTELNEFDEGCSAIKSLAVRILAAHCSTERTVRARLDGFKSRLRAKDDELGRKNLETEALANSLKEANQADHVVNILNQTKTMIAASVPANSASTRTPTDYHQPSLSIAGAESSRRSRGHDEQSVRSPPERYRESRVERPHAPHRRRPIALRDTINQRRAARGHHSPDRYDDDVDGVAAFTSDLRRVDWPSGFKPTGIEKYDGTANPESWLTVYGLAIRAAGGDSKAMANYLPLRDHFIANFQGTFERPGTHFDLYNIVQKSREFLRDYIRRFSEQRNKISDITDDVITAAFTKGILHEDLVGKFGHKPPKTVKQMFEKANEYAKAEDAITASKQSGTTWKPKKDTPTAGGSGSNNHKDRKRKPEELVATTSPSSRQHSRVNTFDKIMNSQCPHHPNSNHVAKDCFVYKQFAEQYVKNAHHRKELNHIFGGPLAYESKRKQKLTEREINAVQPNTPQYLRWSEIAXKFDRSDHPDRVVHPGEVIEHSLHVKEDTKPIKQRLRRFAQNRKDAIKEELTKLLAAGFIKEVLRPDWLANPVLVRKKMEQWRMCVDYTDLNKSCPKDPFGLPRIDQIGRNVEAYVDDVVVKTKQKDDLIADLEETFISIRAFKMKLNPEKCIFGVPSGKLLEFMVSQRGIQANPEKINAILNMKPPSSQKDVQKLTSCMAALSRFVSRLGERGMPFFKLLKKTDNFQWGPEAQKAFEDFKKLLTTPPVLASPHPQEPLLLYVSATSQVVLADSKTRYPQVQKLLYGVLITVRKLSHYFQSHPVTVVTSFPLGDILHNHEANGRIAKWALELMSLDISFKPRTSIKSQALADFLAEWTECQEDMPEEKMEYWTMHFDGSKRLTGTGAGVVLISPTGERLSYVLWIHFSASHNVAEYEALLHGLRIAISLGIHRLIIRGDSQLVVNQVMKEWSCLDDNMTAYRQEVRKLENKFDGLELTHVLRHNNEAADRLANFGSKREAAPSDVFVEHLYEPTMPRKETVEAMDIQGVSMIEADWREPFIKFLSKQELPQDKNEAERISRRSRLYIIHEIELYKKSPSGILQRCVSLEEGRQLLKDIHSGICGNHATARTIVGKAYRQAQELQTIPLSRPAVWGLDMVSPFKRAVGGYTHLFVAINKFSKWIEAKPVITITADKA

SEQ ID NO: 184911 - protein, 1043 aa, Oryza sativa
  Clone ID: PAT_MRT4530_81859C.1.pep
MAWGSALLDGSVLPPSRIVNERHAGLPRRFMPESATGREIVMLGEGRPASDYPGRSIFFLPFAMAGLVPPFSHFFMDVLEFYDLQMAHLTPNAAMTLAIFAHLCEMFIGVRPSLQLFRWFFTVQSVSPPSVVGGCYFQPRGPVLNRYIPCVLRKKWDDWKSDWFYTPLADEARLRLPSQPPAQVSSWRAPVDLGEEYDTVLDRLAGLRSQGLTGAMVYGDYLRRRIAPLQRRARSAWEYTGPEDYMRTHQGTRWDWAPEDFKIVVQRVLNLSSAEASRLPQEILPLCIDPDRVSILSIMLGVGASEERAPKSHDGAGESRRGKRSAPGGGRASGPRVGGSGTSRPADAPGKRKLGGTPPPSPPRGGGAVRTSGRRPEGAAPTSQPEGERKKKRLRKMGETEPARGNLISPPRWSFNRPPRSDVPSHSSRHPKSGQSEAEDPAAAEERRRESDRREAAARLREAEEAAREAARVRQAEEAAREEAARARQAAEAAREEAARARQAEATASLGPTPSGGPRATSSEAARDEAAGASPGPTSPGDAQDRTGPGDIPELSVSSGGPNRVAFSPRRLFSSSSVAPVSAEPIMQALAAANTAVLDGFNTQVEALRAERAELEAAWARVEEGRRSVDAMVKVGRKAHRRHISELEARKAALAEIAREVKEEREAALVATTAMVEAQDALRLQHASWEAELKSKLDAAQGVLDSAAARERRATEAEAASRRREEALEARAMALEEHAGAVERGLMDREATTALREATLAAHEAACAEEESALRLREDALAERERALEEAEATTRRLADSLSLREAAQEEQARRNLESVRAERAALEQRAANLEAREKELAAGARIGGAAAGESDLAARLAAAEHTVADMQRALDSSTGEAEALRLAGEIGPGMLWDAVSRMKRAGRQAGLWGGQTTVPPTNLEGLAPHLNRMAWVLERLPEELEKTIKASSRDLARGAVELVLASYQARDPNFSPWMALEEFPPGTEDEARARVGDAADHIVNGFEGSAPRLAFAPSSDEEGDTSSEDGGGDEAGDPGAYE

SEQ ID NO: 184912 - protein, 211 aa, Oryza sativa
  unsure (1)..(211): unsure at all Xaa locations
  Clone ID: PAT_MRT4530_8185C.1.pep
MRRRRTAPRRALDSTXGRTQLGAAGWRREMAEAARGRGLAPSGGDDGEQDGEDAPVEGGGGVTAAPLPLLHHNPASLIRGGAPARPPPWALLVRAASPCAKLAAHPSAELVARGRGWGEDVIAGGGRGGKEGGLGWGKNMTSGPEGIFDLLHCLSLLLNQKLIFYWLRCPLANNHILRVSFPKSDFVQCPTAKTTKSRCPVAKFAYFFLSM

SEQ ID NO: 184913 - protein, 50 aa, Oryza sativa
  Clone ID: PAT_MRT4530_81860C.1.pep
MHGQQLASQTTIGSSQTAGGPVRPALALAALDRQAKAHIPAHQPPGHYLS

SEQ ID NO: 184914 - protein, 190 aa, Oryza sativa
  Clone ID: PAT_MRT4530_81861C.1.pep
MGMTRSLARWFFALRWWRAAACARDRRGGELVGDGDVLRRERRFYQRAFTLRIRLGLDQYSIGDFDLEYHTDFNFTFAPIYTLILHDLPFHSHNKNIMPLIPFSVPPHMEQPEAPLTAEEREKKIREQIEYYFSENNLCSDVYLKGWMNQQGWVPLTLVAGFPRVQALTTDYETVQRSVLSSTEVELQQC

SEQ ID NO: 184915 - protein, 131 aa, Oryza sativa
  unsure (1)..(131): unsure at all Xaa locations
  Clone ID: PAT_MRT4530_81862C.1.pep
MVIGWSTVAALPGGGSGHEPTHAAGAGPGMLTAAVSGDVFTSPPVDSILAAIRAVTGPMGCLLIVKNYTGDRLNFGLAAEQAKXEGYKMEMVIVGDDCALXXTSRNSLVEEGLAGTILVHKGCWGCFKMLG

SEQ ID NO: 184916 - protein, 546 aa, Oryza sativa
  Clone ID: PAT_MRT4530_81863C.1.pep
MASSSSAVPSAPALSQPVTEKLSRSNFSLWRAQVLATLRGAQMAGFLDGTKEKPSPTMIVKKDEKDVTVVNPAHAEWVAQEQQVLSYLLLSLSREVLSQVVAVSTAAGVWEAIEGMFMSQSRARAINTRMALATTQKGNLSVINYVNKMRGLADEMTAAGKKLDDEDLVSYILAGHDFDYDPVVSAVAARVEPISVSELITQLISFEQRLELRQGMAQANAAMRGRGNGGQRGRGRGNANPGGRGPAQGGRGGFGGNQERPKCQLCGKLGHTVIKCFKRFDTSFTGEEKAANVATTSYGIDTNWYVDTGATDHVTGELDMLTVRDKYTGNEQVHAVNGAGRVYISQDVTFDETVFPFKELHPNAGARLQAEILLLPENLHQIDPSSCDNPQQDYSLERPFMGALPAGGSTGTGALSGADSPASVPLDRGHGGALETPPHEDVGSSPSSVDTASPAPCLKDGVYANWMCRMLSFMEFWRKRSTCGNHQVSRKLLDIRFISTSDQLADGFTKALPVRQLAVTTTCNRHAWGLFPAILTQNRGAERHPR

SEQ ID NO: 184917 - protein, 675 aa, Oryza sativa
  Clone ID: PAT_MRT4530_81864C.1.pep
MIIPIVLQLLIILGNGMAMVAAQPWHTCGASNYTADSMYRLNLDGMSASLFPEGAGGSGGGIFVRGSSGADPDKVYAVALCRGDVDDAPACSSCFDAAFRRAMQLCPRSKDATIYYDECLLRFSDTDILNMDSVRRLNTSEIVHGALVLMNLTSEPMLPGRSTATANFTGFLKTMLTDVVGQVLSTRRHYAAIRMEMDDGSSSSTTAVPREFYCLAQCAPDLIEDICYSCLTNFSDRPVASFPGRQGWRVLGLWCNLRDTIASVQDGIVILSQPHALTDKNGHNQVSFHGGVVAETAYFVSTIKNEQKFSQVATPILDQVLKFYRLKRLEPLPRYDTKKFYTGAPTWSSGSSASNAIVPSPAPQPASLPPPTPKHKSKMNTQEDEALIWGLEGRSSEFTVYDFSHVLEATDETRRALVDWNKRLAIINGIAQGLLYLHKHSRLRIIHRDLKAGNILLDHEMNPKISDFGLAKIFSTNDTEGNTKRIVGTYGYMAPEYASEGLFSIKSDVFSFGVLILETVSGKRTSSFHRHGDFINLLGHAWQMWKDETWLQLVDTSLVIESHTPEMARCINIALLCVQENAADRPTMSEVVAMLTSESMTLPEPKYPAFYHMRVTKEEPSTVIMEIMQDNLVGMIPNKEGVTMVNMLDLHEVVNMKQVVSLGSVIILDDLGGIT

SEQ ID NO: 184918 - protein, 71 aa, Oryza sativa
  Clone ID: PAT_MRT4530_81865C.1.pep
GCPFVGDMSIESPTRIMICPRPPPYSERNSYNHKLRLILLLESERKVSATFIFLVPIVAADPTICSALEIA

SEQ ID NO: 184919 - protein, 170 aa, Oryza sativa
  unsure (1)..(170): unsure at all Xaa locations
  Clone ID: PAT_MRT4530_81866C.1.pep
MCATAAIASRHRSCQLPRPPSPSPTAAAAVAAPPPHRRRRRRTAAANCRRPPSRSGREARIWGTPPPPPPRSTAPSPPQAHTGPPPPSSCPRPVPSPLPSPSPPPPGAARPXPSPSPSPPPWPPSSPPPVAAPPDPAGAAWIWRSPPSRLAAPRSLNLYRCIIPVPKLAN

SEQ ID NO: 184920 - protein, 88 aa, Oryza sativa
  Clone ID: PAT_MRT4530_81867C.1.pep
ESSGKVFPRGACFNLEEASLINPLQGGILKNFPTGCCWKKNFPTFWGELFKLAPPKVFPGIFGGLTPRFKTPLKNFFGGPPPFLVGKI

SEQ ID NO: 184921 - protein, 86 aa, Oryza sativa
  Clone ID: PAT_MRT4530_81868C.1.pep
MGDGGNGDETDIVHELNLKYQKLQQENEVEKKKNQRGQDVRLASDVNALGLHELEAFDSNLNVIDALSIQMMWLRMPSKQLSPRLR

SEQ ID NO: 184922 - protein, 78 aa, Oryza sativa
  unsure (1)..(78): unsure at all Xaa locations
  Clone ID: PAT_MRT4530_81869C.1.pep
XEKXGKXHXIXASFRXLFPTVKXSYQXIISXQGPWXKTXFIILGKSSCPCGHVYXRNNRPANSTRMIFIGQCIEIIKT

SEQ ID NO: 184923 - protein, 180 aa, Oryza sativa
  unsure (1)..(180): unsure at all Xaa locations
  Clone ID: PAT_MRT4530_8186C.1.pep
TPFAGLSPSSDSPPLPPRPPAHPTTAPTPPLPPPRPPPTRPTXSPSTALAAPGLSPPKPAAGGARRPRAPEAGPSHAPKGRAPPVPPCRQGPRRPCAPQLTGDRARASPPGFGSPRRRESHHGARDGDGRPQIRRIRRQPRRRLANKRPDSIGIAGSGSYDITDHARERCSDGEGNMDPR

SEQ ID NO: 184924 - protein, 136 aa, Oryza sativa
  Clone ID: PAT_MRT4530_81870C.1.pep
RFVVGFVAIHQIDLYDVLVTGVIPRSKKSISSDRRQQARVVASSRRFKAGSSVDSEQPASTYQSTGVIHTSGLRRSIYQRTPTSGEKKVRKRKPPFLPCSWEHKFTFQIAMFTKPSLPGGFDKLYQQIQDFIPKAS

SEQ ID NO: 184925 - protein, 128 aa, Oryza sativa
  unsure (1)..(128): unsure at all Xaa locations
  Clone ID: PAT_MRT4530_81871C.1.pep
LYVAGCYSYCQSITATSNGAPCTGMGCCETPFIPDLKDFAAILVMNQSAVWEFNPCFYAMLVEAGWYSFRQQDLVGHLRFVNGRANRGVPVIHDWAIRNGXLCKCSEGYEGNPYLPKGCQGNIHINFL

SEQ ID NO: 184926 - protein, 58 aa, Oryza sativa
  Clone ID: PAT_MRT4530_81872C.1.pep
ARVQTETIAEAQRIILHEPPDMDDPATRLHVVYCRHMRQKFGDHLKLSEHGGISGSMG

SEQ ID NO: 184927 - protein, 213 aa, Oryza sativa
  Clone ID: PAT_MRT4530_81873C.1.pep
MPHGEEEGEEDAGCSSTRTRREGGLGSTDGRAPASASSEMAAVGGGRVVKEEQRHRSSCSDRGGATPQSSSSRPLSDAALRRTAAALHPQPPPRQIPSRLDAAVLPPSLRGPPPPPLVEPRQRPLLDAPLRPTHRRYLHPQLVSPSSLRELAPARIPSLGGPPPPSMSRRSSRYLHPQPASPSSLREPAPARIPSLRGPPPLPLRASLPKHTG

SEQ ID NO: 184928 - protein, 563 aa, Oryza sativa
  Clone ID: PAT_MRT4530_81874C.1.pep
MKPGIYLTGTDVSSPGAGTPSPVRDERQEALIQMTGRGEDSSSAGVMARGSAPLDGSVLPPSRIVSERQAGLPRRFMPASAAGWEVVELGEGRPSPHYPGRSVFFLPFAMAGLVPPFSSVFMDVLEFYDLQMAHLTPNAVMTLVIFAHLCEMFIGVRPSLRLFQWFFTVQPVSPPSVVGGCYFQPRGPALSRYIPCVLRKKWDYWKSDWFYTPLADEARLQLPSQPPAQVSSWRAPVDLGDGYDAVLDRLAGLRSQGLTGAMVYGDYLRRRIAPLQQRARGAWEYTGSEDYMRTHQGVRWDWAPEDFKIVVQRVLNLSSVEASLIPQGVLPLCSDPDRANILTIMMAVGASEERAPRGHDGAGGSRRGEQSTPGGGRASGPRDRGPEGSRPADARGKRKQEGTPSPSPPRGGGAARVSSRRPEGAAPTPQPEGERKKKRLRKVGGTEPFRGNLISPQGGRLTDLLAARSRRAPPAIPSPAGLRPRIRRPRRPGGGKLIAEKPRIAFGKPRRLPRRPSGLAGLRRPLGRRPDSAGPRSPPGRRKRRDSFFFFRGLRAPFLYRLT

SEQ ID NO: 184929 - protein, 390 aa, Oryza sativa
  unsure (1)..(390): unsure at all Xaa locations
  Clone ID: PAT_MRT4530_81875C.1.pep
MATACPPLSLQPAYLSGRSARAXARRPPSAAAPSERLWRRRRRXDGGGAAAGERDQGEEXVERPPVWLMRQAGRYMKSYQLLCERHPSFRERSENVDLVVEISLQPWKVFKPDGVILFSDILTPLPGMNIPFDIVKGKGPVIFDPLRTAAAVNEVREFVPEEWVPYVGQALNILREEVNNEAAVLGFVGAPFTLASYCVEGGSSKNFSKIKKMAFSEPEILHNLLQKFTTSMANYIKYQADNGAQAVQIFDSWATELSPVDFEEFSLPYLKQIVDSVKETHPELPLILYASGSGGLLERLPLTGVDVVSLDWTVDMAEGRKRLGSNIAVQGNVDPGVLFGSKEFISKRIFDTVQKAGNSGHVLNLGHGIKVGTPEENVAHFFEVAKGIRY

SEQ ID NO: 184930 - protein, 482 aa, Oryza sativa
  Clone ID: PAT_MRT4530_81876C.1.pep
MEAPGSGSVPTAKRRRLVPRPPPVPLEVAGARGPYMPPLCIKSKNPSAKCYGDRFIPDRSAMDMDMAYFLLTEPKKEKENTDMLSPAEEAYKRLLAEKLLNNRSRILAFRNKPPEPEGIVQQLLYETLTSSQTKPARKCRHIPQSSERTLDAPGIVDDFYLNILDWGCKNVMSIALGNTLYLWNSADGSIMDLVTIDEDDGPITSVSWSCDGQWIAVGLNSSDIQLWDTSSNRMLRTLHGVHQSRVGSLAWNKNILTTGGMDGNIVNNDVRMRSHVVHIYRGHEDEVCGLRWSGSGQQLASGGNDNLVHIWDVSMASSNLSLGHNRWLHRFGDHLAAVKALAWCPFQSNLLASGGGGDDRCIRFWNTHTGLCLNSVDTGSQNSLALWKYPSMVKLAELEDHTARVLCLAQSPDGFTVASVAADETLRLWKIFETSEDAKPVFKTFVLVFQDNVRVGPWGTDCSYFQDLIALVVTMVTGSQKL

SEQ ID NO: 184931 - protein, 990 aa, Oryza sativa
  unsure (1)..(990): unsure at all Xaa locations
  Clone ID: PAT_MRT4530_81877C.1.pep
MARGSAPLDGSMLPPSRIVSERQAGLPRRFMPESATGREIVSLGEGCPAPRYPGRSVFFLPFAMAGLVPPFSSFFIDVLEFYDLQMAHLTPNAVMTLAIFAHLCEMFIGVRPSLRLFRWFFTVQPVSPPSVVGGCYFQPRGPVLNRYIPCVLRKKWDDWKSDWFYTPLADEARLRLPSQPPAQASNWRAPVDLGDGYDAVLDCLAGLRSQGLTGAMVFGDYLRRRIAPLQRRARGAWEYTGSEDCMRTHXGVKWDWVPEDFKXDPDRANILSIMMAVGASEERAPKGHVGASGSRKGDQSTPGGGCASGPRDGGSGCSRPADARGKRKQEGTSSPSPPRGGGAARVSSRRPEGAAPTPQPEGERKKKRLRKMGGTEPSRGNLISPPRWSFNRPPRSEIPSRPSCQFKSGQSEAENAATTEARRRESDRREAADRLREAEEAAQVAVRARQAEEAAREEARLRQAEAATTSEAARDEAAGASLGPTPSGDAQDKPGPGDIPESGTSIGGPSRAASSPRRLSPTPSAAPLSAEPLLQALAVANTTVLDGLSAQMEALQAERVELDAAWARVEEGRRSVEAMVEVGRKAHRRHVSELEARRKMLGEIAREVEEERGAALIATTMMNEAQDDLRLQYGSWEAELGKKLNAARGVLDAAAARERRAAETEVASRRREETLEARAMALEERACVVERDLADREAAVAIREVTLAVHEAACAEEESALRLREDTLTERERALEEAEAAAQRLAESASLREAAQEEQARRNLESARAERAALNQRAAELEAQARELDARARSGGAATGDSDLAARLAAAEHTIADLQGALDSSTGEVEALRLAGEIGPSMLRDAVSRLDRAERQAGLWGGRTVKYAANQGGLAQRLSEMAGTLQRLPEELEGTIKSSSRDLARGAVELVLASYQARDPDFSPWTALDEFPPGTEDGARAQVRDAADHIVHSFKGSAPRLAFALNSDEEGDDGGVGDSGDEAGDPGASE

SEQ ID NO: 184932 - protein, 333 aa, Oryza sativa
  unsure (1)..(333): unsure at all Xaa locations
  Clone ID: PAT_MRT4530_81878C.1.pep
MATACPPLSLQPAYLPGRSARAXARCPPSAAAPSERLWRKRRRXDGGGAAAGERDRRXRKVERPPVWLMRQAGRXYQLLCERHPSFCERSELVDLVVEISLQPWKVFTPDGAILFSDILTPLPRMNIPFDIVKGKGSVIFDPLRTAAAVNEVREFVPEEWVPYVGQALNILREEINNEATVLSFVGAPFTLASYCVEGGSSKNFSKIKKMALSEPEIVDSVKETHPELPLILYASGSGGLLERLPLTGVDVVSLGTVDMAEGRKRLGSRPGVQGNVDPGVLFGSKEFISKRIFHTVQKAGNSGHVLNLGHGIKVGTPEENVAHFFEVAKGIRY

SEQ ID NO: 184933 - protein, 1044 aa, Oryza sativa
  Clone ID: PAT_MRT4530_81879C.1.pep
MARGSALLDGSVLPPSRIVSERHAGLPRRFMPESATGREIVMLGEGRPAPDYPGRSIFFLPFAMAGLVPPFSSFFMDVLEFYDLQMAHLTPNAVMTLAIFAHLCEMFIGVRPSLQLFRWFFTVQSVSPPSVVGGCYFQPRGPVLNRYIPCVLRKKWDDWKSDWFYTPLTNEARLRLPSQPPAQVSSWRAPVDLGEDYDAVLDRLAGLRSQGLTGAMVYGDYLRRRIAPLQRRARSAWEYSGPEDYMRTHQGARWDWAPEDFKIVVQRVLNLSSVEASRIPQEILPLCSDPDRASILTIMMGVGASEERAPKGHDGAGERRRGEQSAPGGGRASGPRVGGSGSSRPADAQGKRKLGGTPPPSPPRGGGAVRASSRRPEGAAPTSQPEGERKKKRLRKTGETEPCRGNLISPPRWSFNRPPRSDVPSHSSRHPKSGQSEAEDPAAAEERRRESDRREAADRLREAEEAAREAARIRQAEEAAREEAARAEEAAKEEAARARQAEATAAAGAPTGPTPSGNPQATASGEARDEAAGTSPGPTSPGDAQDQTGPGDIPEPSTSSGGPSRIAFSPRRLFSSSSVAPLSAEPILQALAAANTAVLDGFSAQVEALRAERAELEAAWARVEEGRRSVDAMVEVGRKAHRRHVSELEARKAALTEIAREVEEERAAALIATTTMIEAQDALRLQNASREAELKEKLDAAQGVLDSAAARERRVTETEAASRRREESLEARAMALEEHAGAVEKGLTDREAAAALREATLAAHEAACAEEECALRLCEDALAEWERALEEAEATTKRLADSLSLREAAQEEQARRNLECVRAERAALEQRAADLEAREKELYTRAHIGGAAAGESDLAARLAAAEHTVADMQRALDSSTGEAEALRLAGEIGPDMLWDSVSRMDRAGRQAGLWKGQTRMRPTNLEGLAPHLNRMAWVLERLPEELEKTIKSSSRDLARGAVELVLASYQARDPNFSPWMALEEFPPGTEDDARARVRDAADHIVNGFEGSAPRLAFAPNSDEEGNTSSADDGGDEAVDSGASE

SEQ ID NO: 184934 - protein, 550 aa, Oryza sativa
  Clone ID: PAT_MRT4530_8187C.1.pep
MAKQQPVLIRLLQCRNMAEHYHELEKDLKLHDVLLLLQILPAVRQDLGWIRLYINNAADQDNTQLLHQQWNAQLAINPPAKDLQHILFLTYLPRGPGNQQKVLRETFNNHKWELKEKIKSNNTSHVDICKLLYAKKNKSQKDDVDATFKLNMIELSLSEDPNSLPCIALCLVYQSNKSPMLYLIQSLVHRLQIQVRPSAQIEQKKIVKNSTLIINWHTLSDADNGKYSEDEDDYKRSHKYLMKGKYKVVDEHSYNNIQSAITLRDTIVRRLDTWLQQHQDIASTIEALLPFQNDLDDFILEKMNDMLSVVHRMLVKRKGTLKGSQVFEENKRACLRQEPAIESSQIKDFSNLDIFTTTKHQILNTSQVSQNEAVITQQSQSAVPVDMKQYDFYARNQQQFPVNLPDFRPEALNALYVLQTGEVITIHGQSQRYPQASSIPINEAQQGEALQCLEQAWLEEVIKFPEFKELLKSFSKYDDQENDFPSEMRINELPSSPSVMAAYNSQDEILDPEVPPLLGSFAVKLTETEPLDSYNDLKGHFEDIENWEAS

SEQ ID NO: 184935 - protein, 462 aa, Oryza sativa
  Clone ID: PAT_MRT4530_81880C.1.pep
MDGQCNHKDNFSRSELTDLQLQLDEMHEENDKLMGLYEKAMQERDEFKRKFFEGSNSLTTVDTQYEDVEMRDATDDEDLEVKHVHDSAISTFKEILRLVRVKLKNVHDKLVTTQDAVEYFKLLEMASTKAEELSASIQHHCLELKHDQEDMNALKAELSQSQESKEALESKYFSPVASCWNLDLKTKALVGSKFDVSLELLNQKKEQLSHLQTLKKEFSVASTKARESETALRSKIDGLKVKLRSFEAQRKEAERVLFAIDNIDTSTPTLSKPVNFGKASELLRSEEERTKLLSELKKSREQLIMVQKEIKSMNRHDDIDCKIASLESEVENCCLTLLEADVEKFVRDNTLTEIWKEEQKDMDCLLVDYQECVFKVNLKEEKIRACEESLQHQTRSLDDMNSKLNQAMRDLGEHLRDRTPCDLDASMLHVSDKVKGDLDAMALHVAEAVQLLLVQGENQTNP

SEQ ID NO: 184936 - protein, 1444 aa, Oryza sativa
  Clone ID: PAT_MRT4530_81881C.1.pep
MAWLTGGGDLLSARSGRRGGSGGGGALPYARSGGGKKLVDSSITEHFNVKLYACPNLAFSLDFITNDFGKISLLDSDSNQSGRGQVSIPFGIPNSAEIYSKIISTKSAPNHSDEIQSTPTQPDQDDGAYPLILMKLPDDLAVVFTTRASAPRRPRRDPASAPIQPSSREVGVILQPLGTVSTEELDGYLSSPGVDSRPTEIVEYDDFGYHYDYRNLDNFDEGNEDNYTPLFFGVFMADNETEEQRQAREAEEQRERERAAKEAEDRRQRALEAGQRARELIGQQDVEGTAVFRTPQQNAVAAITLLDTLLKEVALNQANHLVNILNQTKTMIAASVPVNSASVRTPTGSRVPPLRSQDYHQPSLSVVGAGSSRRSKDHNERPIADRRVIWQAGSKTEIKKYDGTTNPESWLTIYSLAIRAAGGDSKAMANYLPVALADSARSWLHGLPRGTIRTWAELRDHFIANFQGTFECPGTQFDLYNVVQKTIKQMFEKANEYAKAEDAITASKQSGTTWKPNKDTPTTGGSGSTNHKDRKCKPEELVATTTPSSRQRSRVNTFDKIMNSQCPHHPNSNHAAKDCFVYKQFAEQNTKNARKASDGDQSMSKKKDDDDDAPIGFRDRRKELNHIFGGPLAYESKRKQKLTEREINAVQPDTPQYLRWSETTIKFYRSDHPDRVVHPGRYPLVLDPVVRNVKLRRSLIDGGSALNILFAKTLDDMQIPRTELKPSNAPFHGVIPGLSATPLGQITLRVTFGTRENFRTENVCFKVADFDTAYHDILGRPALAKFMAVPHYTYIMIKIPGPRGVISLQSNIKQADRKDTIKEELPKLLAAGFIKEVLHPDWLANSILVQKKTGQWRMCVDYTNFSKSCPKDPFGLPRIDQVVDSIAGCELLSFLDCYSGYHQIRLKESDCLKTLFITPFGAYCYITMPFGLKNAGATYQRMIQRCFSTQIGRNVEAYLDDVVVKTKQKDDLITDLEETFASIRAFRMKLNPEKCIFGVPLGKLLGFMVSHRGIQANPQKINAILNMEPPSSQKDVQKLIGCMAALSRFVSRLGEQGMPFFKLLKKTDSFQWGPEAQKAFEDFKKLLTTPPVLASPHPQEPLLLYVSVTSQVVLADSKTRYPQIQKLLYGVLITIRKLSHYFQGHSVTVVTSFPLGDILHNREANGRIAKWALELMSLDISFKPQTSTKSQALADFVAEWTECQEVMKQWSCLDDNMTAYRQEVRKLEDKFVGLELTHVLRHNNEAADRLANFGSKREAAPSDVFVEHLYEPTVPRKETIEATDAQDVGMIEADWREPLIRFLTKQEFPEDKDEAERISRRSRLYIIHETEPYKKSPSGILQRCVSLEEGRQLLKDIDSGICGNHAAARTIVGNAYRQGCQFFARQTHLPAQELQTIPLSWLFAVWGLDMVDPFKMAVGGYTHLFVAIDKFSKWIEAKPVITNM

SEQ ID NO: 184937 - protein, 979 aa, Oryza sativa
  Clone ID: PAT_MRT4530_81882C.1.pep
MARGSAPLDGSVLLPSRIVSERQAGLPRRFMPESATGREVVALGEGRPAPHYPGRSVFFLSFAMAGLVPPFSSFFMDVLELYDLQMAHLTPNAVMTLAIFAHLCEMFIGVRPSLWLFRWFFTVQPVSPPSVVGGCYFQPRGPVLNRYIPCVLRKKWDHWKSDWFYTPLADEARLRLPSQPPAQASSWRAPVDLGDGYDAVLDRLAGLRSQGLTGAMVFGDYLRRRIAPLQRHARGAWEYTGPEDIMRTHQGRKWDWDPEDFRIVVQRVLNLSSVEASLIPQGVLPLCCDPERANILTIMQEVGASGERAPRGHDGAGGSRRGEQSTPGGGRASGPRDGGPGGSRPTDARGKRKQEDTPSPSPPRGGGAVRASSRRPKGAVPTSQPEGERKKKRLRKMGGTEPCRGNLISPPRWSFSRPPRSEIPSRPSRHSKSGRSEAEETATAEARRREADRREAANRLREAEEAAQEAVRARQAEEAAWEEARLHRAEESVRETEAARARRAACQAPDPTPPEATTTSEATHDEVAGAPLGPDPSGDAQDEPASGDVPESGTSIGGPSRAASLPRRLSPMPSAAPLSAEPLLQALATANTTVLDGLSAQMEVLQAERAELDAAWARVEEGRRSVEAMVEAGRKAHRRHASELEARRRDLAEIAREVEEERETALIATAVFNAARDDLCLQYGSRGAELEKKLDASRQREEALEARATVLEERARALDTKERELAGREAAVAIREATLAAHEAACAEEESALRLHEDELTERERALEEAEAAAQLREEQARLNLEGARAERAALDQRAAEFEARAKELDTRARSGGAAAGDGDLAARLAAAEHTIAELQGALDSSAGEVEALRLAGEVGPGMLRDAVSRLDRAGRQASLWGGRTAKYAANQGGLAQRLSEMAGTLQRLPEELEETIKSSSRDLARGAVELVRDAADHIVHSFEGTAPRLAFALDSDEEGGDGGADDSDDEAGDPGASA

SEQ ID NO: 184938 - protein, 1060 aa, Oryza sativa
  Clone ID: PAT_MRT4530_81883C.1.pep
MARGSALLDGSVLPPSRIVSEKQAGLPRRFMPESATGRDIVTLGEGRPAPDYPGRSVFFLPFAMAGLVPPFSSFFMDVLEFYDLQMAHLTPNAVMTLGIFAHLCEMFIGVCPSLRLFRWFFTVQSVSPPSVVGGCYFLPRGPVLNRYIPCVLRKKWDDWKSDWFYTPLADEARLRLPSQPPAQASSWRAPVDLGDGYDAVLDRLAGLRSQGLTGAMVYGDYLRRRIAPLQRRARGAWEYTGSEDYMRTHQGVRWDWAPEDFKILVQRVLNLNSVEASLIPHGILPLCSDPDRASILTIMTAVGASEEQAPKGHDGAGGSRRGDQSTPGGGRASGPRVGGSGSSRPTDARGKRKLGGTPPPSPPRGGGAVRASSRRPEGAAPTSQPEGERKKKRLRKMGETEPSRGNLISPPRWSFNRPPRSDIASRSSHHPKSGQSEAEDPAAAEARRRESDRREAADRLREAEEAAREAARARQAEDTAREEAARARQAEDTAREEAAWARQAEDTAREEATRARQGEEAAREEAARVRQAEAMAASEAVRDEAAGASLGSTPSGDAQDQTGPGAARDEAAGASIGGPSRAASSPRQPFPTPSVAPLSAEPLLQALAAANTAVLDGLNAQVEALQAERAELDAAWARVEEGRHSVEAMVEAGRKAHRRHVSDLEARKTALAEIAREVEEERGAALIATTVMNEAQDSLRLQHGNWEAELKKKLDAAQGVLDAAAAREQRATETEAALRRREEALEARAMALEERACVAEKDLADHEAAVASRETTLAAHESACAEEESALRLREDALTERERALEKAEAEAQRLADSLSLREAALTEQARRNLESVRAERAALEQRAADLEAREKELDARARIGGAAAGESDLAARLADAEHTVADMQRALDSSAGEAEALRLAGEIGPGMLWDAVSRLDRAGRQAGLWKGQTIKPAANLGGLAQRLSKMAGALQQLPEELEKTIKSSSRDLAQGAVELVLASYQARDPNFSPWMALDEFPPGTEDSARAQVRDAADHIVHSFEGSAPRLAFAPNSDEEGDASGADDVEDEAGDPGASD

SEQ ID NO: 184939 - protein, 585 aa, Oryza sativa
  Clone ID: PAT_MRT4530_81884C.1.pep
MSEQPLPQPRSSMREALEKEDKEKAAAAKEKAAVPKNGGNGGGGKNGGGNGGGNGGAGAQPGEETTREIQVVREAYRREPAAPAYVMPEEPPAMVELVGWYLYGFCSYFITHLLLPVLFPAIITQVAFPASDFTPDTKYIVKGATCSIHEMSMYQRLTKHSIAIDGSRLSPLGWSGLSWAIGILIAAPILTQAAHHLDRGQYQSLILIAATSFGSFFCLLTGFFKTVWVFLFYILFIGASIIVAEAVHTRNLGLMIRGLAAHDSGKHLVLRRRAAASQLTLYCTAIGGIGAALMAAFMYHMLRRTDQLTGLWVVSIFSGLIWFIGICHGLFTNRPSSSSPTTAFEPNFFTKLSYSMTLVRYPQAIGSLVAVFLSSFATMCIFTSGTLYAIGGVCIKPVLVLVLWILYFLFPLISLPLLHPIQIIIRADAVRMQLLGFIICLFVSGAGFYFKSHRWRAAHIIVIALVQSTANGVLYSFGRILLLDASPPGKEGAFAVWYAFVRCIGAMIGFAAASAGPGRAGGSFAAAFLGSFLGIIVLIFGNVSNIGALKAAGHLKGMEDEKRLGMEKGEGMSAVADSGEGRGRV

SEQ ID NO: 184940 - protein, 494 aa, Oryza sativa
  Clone ID: PAT_MRT4530_81885C.1.pep
MGKEGKRREEEGRRRRKGKGKGAGEMVLQEEEEDAAPAMGCWIRIPRRLGGGCMSSRSKVDSSTTTSGGGGGGSARVGGESKSANDGCRDHSVQPMASGSTTSSNTGSISPSSIVGEELKLAFQLRRFTFNELKCATRNFRPESLLGEGGFGCVFKGWIEENGTAPVKPGTGLTVAVKTLNHDGLQGHKEWVAEVDFLGNLQHPHLVKLVGYCIEDDQRLLVYEFMPRGSLENHLFRRSLPLPWAIRMRIALGAAKGLAFLHEEAERPVIYRDFKTSNILLDADYNAKLSDFGLAKDGPEGDKTHVSTRVMGTYGYAAPEYVMTGHLTSKSDVYSFGVVLLEMMSGRRSMDKNRPNGEHNLVEWARPYLGERRRFYRLVDPRLEGNFSIRGAQKTAQLACACLNRDPKARPLMSQVVEVLKPLLNLKDMASSSYFFQSMQQERAASLGNPIGSQSMKAQGTFARNGQQPMRSLSYGPHASPYRQSPRPNNGKLQ

SEQ ID NO: 184941 - protein, 2273 aa, Oryza sativa
  Clone ID: PAT_MRT4530_81886C.1.pep
MTGFVLELRGMCVVLGYPHGVDYQARPLPEQEGDDAEPHAAWEVTAVILAGSPERTSLTVTAGGDSFPAACQNAALLAIGTLHQRYPDELQHSPYRYHPRRGGARDHATFRDASSEDDATIVHLARMVEAYDAARIDFHQMVRRGMVENNMKILELRQENLQLKKDLDAVEAQLHQLKIAQGEVCRPKRRRVCRSQKITARKSTSRPELVRQSLAWTCFVETPRAEPAPVVPQEGEASGIGSTEDALLLTFRPGPSQRRNAVTGDGNQPEGSNHNHQGNPPPPPPPPPPPPPDTNAILTQILAQQANMMTAFLHHLQNPPQLNAPPPPPQHSRLAEFLRICPPTFSSSNNPVDVLDWLHAVGKKLDTVQCSDEEKVIFAAHQLQGPASLWWDHFQATQPEGQPITWARFTAAFRRTHVPAGVVALKKREFRELKQGNRSVMEYLHEFNNLARYAPEDVREDEEKQEKFLAGMDPELSVRLVSGDYPDFQRLVDKSIRLEAKHKELESHKRRLANFRNQQGANQRVRYTNPYPGGSSSQQQQPRSAPRPQFVVRVPQPQQQQNQQGTRAPRPPTPAVQPVQGRRDAQGQQRLCFNCFEPGHFADKCPKPRRQQGQAPPRSNNGGKDVIRGRVNHVTAEDVLTTPDVIVGTFLVQSIPATILFDSGASHSFISVPFVGRNQLGVERLRNPLLITTPGGVMTAKYYSPAVPIEIQGIPFPSDLILLDTKNLDVILGMNWLAQFQGVVDCARRTVTLYRGPEQPVVFFAPPTSVRSSELHQIELSEIPIVREFGDVFPEELPGMPPKREIEFRIDLAPGTTPLYKRPYRMAANELAEVKKQLEELKEKGYIRPSTSPWGAPVIFVEKKDKTKRMCVDYRALNEVTIKNKYPLPRIDDLFDQLKGATVFSKIDLRSGYHQLRIREEDIPKTAFTTRYGLYEFTVMSFGLTNAPAFFMNLMNKVFMEYLDKFVVVFIDDILIYSQSEEDHQHHLRLVLGKLREHQLYAKLSKCEFWLSEVKFLGHVISAKGVAVDPETVTAVTDWKQPKTVTQIRSFLGLAGYYRRFIENFSKIARPMTQLLKKEEKFVWSPQCEKAFQTLKEKLDGHVVAYASRQLRPHEGNYPTHDLELAAVVHALKIWRHYLIGNRCEIYTDHKSLKYIFTQSDLNLRQRRWLELIKDYDVGIHYHPGKANVVADALSRKSHCNTLNVRGIPPELSQQMEALNLSIVGRGFLAALEAKPTLLDQIREAQKNDPDMHGLLKNMKQGKAAGFTEDEHGTLWNGKRVCVPDSRELKQLILQEAHESPYSIHPGSTKMYLDLKEKYWWVSMKREIAEFVALCDVCQRVKAEHQRPAGLLQPLQVPEWKWDEIGMDFITGLPKTQGGYDSIWVIVDRLTKVARFIPVKTTYGGNKLAELYFARIVSLHGVPKKIVSDRGSQFTSHFWKKLQEELGTRLNFSTAYHPQTDGQTERLNQILEDMLRACVLDFGKTWDKSLPYAEFSYNNSYQASIQMAPYEALYGRKCRTPLLWDQVGESQVFGTDILREAEAKVRIIRDNLKVAQSRQKSYADNRRRDLEFAVDDFVYLRVTPLRGVHRFQTKGKLAPRYVGPFRIIARRGEVAYQLELPASLGNVHDVFHVSQLKKCLRVPSEQADSEQIEVREDLTYVEKPVKILDTMERRTRNRVIRFCKVQWSNHAEEEATWEREDELKAAHPDLFATARAEEAAKEEAARARQAEATAAAGASTGPTPSGNPQATASGEARDVAAGTSPGPTSPGDAQDQTGPGDIPEPSTSSGGPSRIAFSPRRLFSSSSVAPLSAEPILQALAAANTAVLDGFSAQVEALRAERAELEAAWARVEEGRRSVDAMVEVGRKAHRRHISELEARKAALAEIAREVEEEREAALITTTAMIEAQDTLRLQHASWEAELKKKLDAAQGVLDSAAARERRVTETEAASRRREEALEARAMALEEHAGAVERGLTDREAAAVLREATLAAHEAACAEEECALRLREDALAERERALEEAEATTKRLADSLSLREAAQEEQARRNLECVRAERAALEQRAADLEAREKELDARARVGGAAAGESDLAARLAAAEHTVADMQRALDSSIGEAEALRLAGEMGPDMLWDSVSRMDRAGRQAGLWKGQTRMRPANLEGLAPHLNRMAWVLEQLPEELEKTIKSSSRDLARGAVELVLASYQARDPNFSPWMALEEFPPGTEDDARARVRDAADHIVNGFEGSAPRLAFAPSSDEEGDASGEDDGGDEAGDPGASE

SEQ ID NO: 184942 - protein, 1047 aa, Oryza sativa
  Clone ID: PAT_MRT4530_81887C.1.pep
MARGSALLDGSVLPPSRIVNERHAGLPRRFMPESATGREIVMLGEGRPAPDYPGRSIFFLPFAMAGLVPPFSHFFMDVLEFYDLQMAHLTPNAVMTLAIFAHLCEMFIGVRPSLQLFRWFFTVQSVSPPSAVGGCYFQPRGPVLNRYIPCVLRKKWDDWKSDRFYTPLADEARLRLPSQPPAQVSSWRAPVDLGEDYDAVLDRLAGLRSQGLTGAMVYGDYLRRRIAPLQRRARSAWEYTGPEDYMRTHQGARWDWAPEDFKIVVQRVLNLSSAEASRLPQEILPLCSDPDRVSILTIMMGVGASEERAPKGHDGAGERRRGEQPAPGGGRASGPRVGGSGSSRPAVAQGKRKLGGTPPPSPPRGGGAVRASSRRPEGAAPTSQPEGVRKKKRLRKTGETEPCRGNLISPPRWSFNRPPRSDVPSHSSRHPKSGQSEAEDPAAAEERRRESDRREAAARLREAEEAAREAARVRQAEEAAREEAARARQAEEAAREEATRARQAEATAAAGASLGPTPSGGPQATSSEAARDEAAGASPGPTSPGDAHDQTGPGDIPEPSASSGGPSRVAFSPRRLFSSSSVAPLSAEPLLQALAAANTAVLDGFNTQVEALRAERAELEAAWARVEEGRRSVDAMVEVGRKAHRRHISELEARKAALAEIAREVEEEREAALVATTAMIEAQDSLRLQHGSWEAELKNKLDAAQGVLDSAAARERRATEAEAASRRREEALEARAMALEEHAGTVEKGFTDREAATALRETTLAAHEAACAEEESALRLREDALAERERALEEAEATTQRLANSLSLREAAQEEQARRNLECVRAERAALEQRAANLEAREKELAARARIGGAAAGESDLAARLAAAEHTVADMQRALDSSIGEAEALRLAGEMGPDMLWDSVSRMDRAGRQAGLWKGQTRTRPSNLEGLAPHLNRMAWVLERLPEELEKTIKSSSRDLAQGAVELVLASYQARDPDFSPWMALEEFPPGTEDDARARVRDAADHIVDGFEGSAPLLAFAPSSDEESDASDEDDGGDEAGDPGALE

SEQ ID NO: 184943 - protein, 889 aa, Oryza sativa
  Clone ID: PAT_MRT4530_81888C.1.pep
MARSSAPLDGSVLPPSRIVSERQAGLPRRFMPESATGREVVALGEGRPTPHYPGRSVFFLSFAMAGLVPPFSIFFMDILEFYDLQMAHLTPNAIMTLAIFAHLCEMFIGVRPSLRLFRWFFTVQPVSPPTVVGGCYFQPRGQVLNRYILCVLRKKWDDWKSDWFYTPLADEARLRLPSQPPAQASSWRATVDLGDGYDAVLDRLAGLRSQGLTGAMVFGDYLHRRIALLQRRARGAWVYTGPEDYVRTHQGRKWDLDPEDFRMVVQRVLNLSSVEASLIPQGVLPICCDPERVFTHPFLFVFWFFFCLSEIPSRPPRHSKSSRSEAEETATAEARRREADRREAADRLREAEEAAQEAVRVRQAEEAAREEARLRRAGESVREAEAARARQAACQTPDPTPPEATPTSEATHDEAAGAPLGPDPSGDAWDEPGSGDAPESGTSIGGPSRAAPTLRRLSPLPSAAPLSAEPLLQALAAANSTVLDGLSAQMEALHAERAELDAAWAHVEEGRRSVEAMVEAGRKAHRRHASQLEARRRDLAEIAREVEEERETALIATAVLDEARDDLRLQYGSRAAELEEKLDAARGVLDAAAARERRAAENKAASRQREEALEARATALEERARALDAKERNLADREAACAKEESALRLREDALTERGRTLEEAEPAAQRLANSLFLREAAREEQARRNLEGARAERAALDQRAAELEARAKELDARAHSGGAAAGHGDLAARLAAAEHTIAELQGALDSSAGEAGLWGGRYAKYTANQGGLAQRLSEMAGALERLPEELEETIKSSSRDLARGAVELVLASYQARDPDFSPWAALEDFPPGTEDGARAQVRDSADHIVHSFEGTAPRLAFALDFDEEGGDDSADDSDDEAGDPGASE

SEQ ID NO: 184944 - protein, 385 aa, Oryza sativa
  unsure (1)..(385): unsure at all Xaa locations
  Clone ID: PAT_MRT4530_81889C.1.pep
MEEAAAEVPSYFLCPISLEIMRDPVTLATGITYDRSSIERWMFGGGGGDGGKGTCPVTRRQLAPAEREXTPNHTLRGLIQAWGRRRXLGGGGRQRQLPALREIKAIAAESDRNKRCXEATPGAVEFLVSVVVQSHAAASTSASSDDDDLFDSVIDSPMSTSSPEEEALGVLYSLKPSEPTLRRVLGKDNGVGFLDTLASVLRRPSYPGNVGDPPXRMMPVSPKLVKXVVRVVSHGVSSKPVKAALHVLCRLCPWGRNRVKPVXAGPVPALVELLLHEEGGGGRRRAAELAVVAIDHPVRVRGGEVGAGGAPGGARRGVQXAMRVSPAATESAVRALHAVARNAATPAVLQEMLAVGVVAKLLLVLQADGGERARARAREMLRANA

SEQ ID NO: 184945 - protein, 51 aa, Oryza sativa
  Clone ID: PAT_MRT4530_8188C.1.pep
HRGWPARRKMTANGDGKPREDDGNRRTGFGETPFAGCRSPPWTAGAGPAIA

SEQ ID NO: 184946 - protein, 122 aa, Oryza sativa
  unsure (1)..(122): unsure at all Xaa locations
  Clone ID: PAT_MRT4530_81890C.1.pep
MIFSLGRCHRLGVKIKKFHWLFNRDLKIFLVLVPIETRTNVIFCQPDNSSKYGKLSRYGYGCLCWGGIDRSAARQTVEYPRWLRFEVDDTDRLSQSSEAQDHSXQLLRRRHALLDGLARSFL

SEQ ID NO: 184947 - protein, 442 aa, Oryza sativa
  unsure (1)..(442): unsure at all Xaa locations
  Clone ID: PAT_MRT4530_81891C.1.pep
MEEAAAEVPSYFLCPISLEIMRDPVTLATGITYDRSSIERWMFGGGGGDGGKGTCPVTRRQLAPAEREATPNHTLRRLIQAWCAAHAVERFPTPRPPVDSCRVAALVDEGTTTMLGGGGRQRQLAALREIKAIAAESDRNKRCVEATPGAVEFLVSVVVQSHAAASTSASSDDDDLFDSVIDSPMSTSSPEEEALGVLYSLKPSEPTLRRVLGKDNGVGFLDTLASVLRRPSYRSRAYAILLLKAVTSAMPPERLMAVSPELVEEVVRVVSDGVSSKAVKAALHVLCRLCPWGRNRVKAVEAGAVAALVELLLDEEGGGGRRRAAELAVVAIDHLCXVRGGEVGAGGAPGGARRGVQXAMRVSPAATESAVRALHAVARNAATPAVLQEMLAVGVVAKLLLVLQADGGERARARAREMLRANARVWKDSPCLQAHLKASYPS

SEQ ID NO: 184948 - protein, 1068 aa, Oryza sativa
  Clone ID: PAT_MRT4530_81892C.1.pep
MARGSALLDGSVLPPSRIVSERQAGLSHRFMPESATGREIVTLGEGRPAPDYPGRSVFFLPFAMAGLVPPFSSFFMDVLEFYDLQMAHLTPNAVMTLAIFAHLCEMFIGVRPSLRLFRWFFTVQSVSPPSVVGGCYFQPRGPVLNRYIPCALRKKWDDWKSDWFYTPLADEARLRLPSQPPAQASSWRAPVDLGNGYDAVLDRLAGLRSQGLTGAMVYGDYLRRRIAPLQRRARGAWEYTGSEDFTRTHQGVRWDWAPEDFKILVQRVLNLNSVEAALIPQGILPLCSDPDRASILTIMMAVGASEERAPKGHDGASGSRRGEQSTPRGGRASGSRDRGPGSSRPADARGKRKQGGTPPPSPPRGGGAARASSRRPEGAAPTSQPEGERKKKRPRKMGETEPSRGNLISPPKWSFNRPPRSEIPSRPSRHSKSGQSEAEDPAAAEALRWESDRREAAGRLREAEEAAQEAARAHQAEETAREEAARARQAGEAAREEAARARQAGEAAREEVGFRQDEAMATSEAARDEAAGASLGPTPSGDTQATTSGAAGVEAAGASLGPTPSGDAQDQPGPGDIPESGTSIGGPSRVASSPRRLFPTPSIALLNAEPLLQALAAANTTVLDGLSAQVEVLQAERAELDAAWARVEEGRRSMEAMVEVGRKAHRRHVSELETRKKVLAEIAKEVEEERGAALIATTVMNEAQDTLRLQYGSWEAELGKKLDAAQGVLDAAAAREQRAAETEAASRRREEALEARAMALEERACVVERDLADREAAVTIREATLVAHEAACAEEEFTLRLREDALTKRERALEGAEATAQQLAVNLSLREAAQEEQARCNLEGARAERAVLNQRAAELEARAKELDARARSGRAATGESDLAARLAAAERTIADLQGSLDSSAREVEALRLAGEVGPGMLWDAVSRLDCAGRQVGLWRGRTVKYAANQGGLAQRLSKMAGALQRLPEELEKTIKSSSRDLAQGAVELVLASYQARDPNFSPWMALDEFPPGTEDRARAQVRDAANHIVNSFEGSAPRLAFAPNSDEEGNAGGADDSDVEAGDPGASD

SEQ ID NO: 184949 - protein, 70 aa, Oryza sativa
  Clone ID: PAT_MRT4530_81893C.1.pep
LRPFSTTVPLAGVISCIVQNTIFYKVYKTIQDGLISNTYCCINIQLKFAYGALFHNNDFKSHVLLPIDTF

SEQ ID NO: 184950 - protein, 72 aa, Oryza sativa
  unsure (1)..(72): unsure at all Xaa locations
  Clone ID: PAT_MRT4530_81894C.1.pep
LQGKYSSLNVKTDAVTMLALISACSQLGKADLAECXTAIELQKGFDGTIIGPQCSYRYAFKVRKHIFCKEDL

SEQ ID NO: 184951 - protein, 145 aa, Oryza sativa
  unsure (1)..(145): unsure at all Xaa locations
  Clone ID: PAT_MRT4530_81895C.1.pep
FQREPREEKGEGEGGGGAPVTGGWRRRRPRVFPSSTHPRRVVAGRGSXGRGRNGXVKACFGWLEEVAVVVAXGGREGGKGKNGFTSPRQSQWREGLDGADYFVTTEGXLAAACACTACALAGGGGAAQLWADLGRAREKKNSAQS

SEQ ID NO: 184952 - protein, 310 aa, Oryza sativa
  Clone ID: PAT_MRT4530_81896C.1.pep
MAVLWTVSLLYSYILLFFLRRGAPVPRLRPMPEPDDDAARRRRRRPVCVITGATSGLGKAAAAALAREGYHVILAGRSSQLLSETVQQIRDQQPDAHLEAFQIDLSSYKSIKKFETSLNQWIKDSNMEHSIQLLVNNAGILAKSYRITEDGLDEMIQANYIGPFVLTNILLPLLKNSSTPSRVVNLTSFTHRCVSEINLSEKGLSGVRAADPGVVQTGIMRELPPCLSWLALSVLRLLNLLQQPDTGVDAVLDAALAPPDSSGKYFFGGKGRTITSSQLSYNVEVAKKLWAESLALFNELQNRVCELRTS

SEQ ID NO: 184953 - protein, 223 aa, Oryza sativa
  unsure (1)..(223): unsure at all Xaa locations
  Clone ID: PAT_MRT4530_81897C.1.pep
RSEQRKRFGEPPTQTQSPPRWRARAPPRRRLHRSKQRSASIRAAEQRSLSQPPATATACVRPXSALNVAPSVAISTASRSTSDVASRQPVTSTPKHDSVHEHXRTPSRPPRRAAPPPLAPPRRRAAPTCRTRPXTAKRALASSRCSGSAPPWHSPSAAISVFRKXRSWPESPRRGCRRRRSAAGGRTSRRRGRRPALRASSPRRGWAARPAPSPPAASPCPRP

SEQ ID NO: 184954 - protein, 298 aa, Oryza sativa
  Clone ID: PAT_MRT4530_81898C.1.pep
MASLLWHRCTTSLSHNKPGATRLPCCCYQPTCFTRLRYEQRCARSSSMLCCGVATSRLEHNDHHSGGRAPSSSSICQSSKTIDTVGKVVVRPFTVQFLIKDCKFGPTLLCSARATKKGEREDRKRDDEEEGNGKGARSDRRSSKPAIAGELVDCPSNLRRRASPPTPPLLRRRRGGEGWIWPFHHPRCPSAAPAPPTPTLLWGSSKERGGSGRPTVIAPRPPLPYRLLQRCFGRTADASVASEELEGEGGSDRPTALAALEDVLISPSATPASRTPALLRGARRSADARPTDLANPSA

SEQ ID NO: 184955 - protein, 332 aa, Oryza sativa
  unsure (1)..(332): unsure at all Xaa locations
  Clone ID: PAT_MRT4530_81899C.1.pep
LALLTFPNAGFNFHEERIFQSCSVGSTGVGPTRQPLGPRWTGCTRXGAVGPTRQPHPRARAADGRAPPGSRGARPKAASPARPTGGGAPAPRWSLPATTGAAERRPRERREEGSEAAVFGSPRVDGGDGNGDRSGGRRRRGSGRRGRRCSGGRRAKRRSGRGRRGRGEAKGGDAETRGGPGRRQRRTGARRRRRRERTTARARFRRGEXAASGGNGGGRHGERLNSVGRGRERPGEGETAAKDAAAIDADEVXGERFRANPREREREKWGKRERESRGMIPPTLLRAGTAGCGGIRGGGGGARARAXRRERREDRDDRRAPQEDTQQTKARA

SEQ ID NO: 184956 - protein, 147 aa, Oryza sativa
  unsure (1)..(147): unsure at all Xaa locations
  Clone ID: PAT_MRT4530_8189C.1.pep
GGPSSCRRLTSTRTLVDGEDAPAQQPPAISRRPAALVMCXSCHGAPFTHAEFLHPQPGRHQTWASNVTXGTQWLGDEMELTSIPGSQAGPQSCRFSQRRWPAXVVVDDDDDRGVASAAASNAWSGESFDLMQCVRFQCQSSLLATCS

SEQ ID NO: 184957 - protein, 138 aa, Oryza sativa
  unsure (1)..(138): unsure at all Xaa locations
  Clone ID: PAT_MRT4530_818C.1.pep
RRLNAGGLWTQPSVALPPPGLSSPKGRRWALIQTATRPSXLLDGFIWVGLDFHSLSLAIHLIRHACGCVXEWLLISWGXLALGCLGCWLGNFAGVVRQSLYLGMLSFVFPVYFLFLSSRAPALAREKPALCKIILKAY

SEQ ID NO: 184958 - protein, 159 aa, Oryza sativa
  unsure (1)..(159): unsure at all Xaa locations
  Clone ID: PAT_MRT4530_81900C.1.pep
TLGXGHLPQVCGPKATYDEMDPLYKLLTPLLQLNDSIQNDRIHRYLSSVSGFLHKLFFHRQKFPMFSYYGIKYVLTTLAATNLDGTPATPASKYLAEHKQEIGWFTQWVAHHVKTTQAAKPPSPEEPEDDEGSTSSGSAGASNVWAANACRCAKILRNR

SEQ ID NO: 184959 - protein, 235 aa, Oryza sativa
  unsure (1)..(235): unsure at all Xaa locations
  Clone ID: PAT_MRT4530_81901C.1.pep
GGRDLRARFLLXPAALSPSRRYIIDPRAPLLRFRHSPLAISVGFVLALSSSLSAVAAELRFAAAVAPDFLPSRRHLHRLRRVLVNLVRSSVSPADRRSAIVLVVPSRAGTFLHFGRRSRRRRRPVVSRRPPXSLPLLSSLSGAAPLRRWSPAVTIEARARRXSRRPCRRGRLRARPAAARWGPAVSCPRPRVRLTRGTHGASRRQPRAPGPPXTERLTRGPHXPWTRSAHPLSRL

SEQ ID NO: 184960 - protein, 62 aa, Oryza sativa
  Clone ID: PAT_MRT4530_81902C.1.pep
MKEGEPAEQEDRSTQQRLGPAGYMWVACYLLHLHEWARVRPVPIGQFSLGLDDELSYTLPVP

SEQ ID NO: 184961 - protein, 162 aa, Oryza sativa
  unsure (1)..(162): unsure at all Xaa locations
  Clone ID: PAT_MRT4530_81903C.1.pep
MVSNMGWSEERLRIRQYGMHTVKRTEMLATQLDLLIKRLDNNEKDAKQGAVKALDSHDIATTXSSIRRSRMEHCSMGKIKYGPNPQGGQGLPRKTDSFSNFMMNFXKDQEEMRIRRYLRLAPKKPGTQVGQPAFPVSKKPLTAPKTKEVWQVKEKTXLFLYL

SEQ ID NO: 184962 - protein, 305 aa, Oryza sativa
  unsure (1)..(305): unsure at all Xaa locations
  Clone ID: PAT_MRT4530_81904C.1.pep
MATVRGGSGREAATRGDGGDRDRGKKEELAGREGARTGSTGVGPTRQPLGPRWTGCTRLAPWVPRVSRTRGRERLTAGPHLAAAGRARRRPRRHGRREAARPRPDGHCRRPPARRSGARERGEKREVKRRSSAHPGSTAATETATETIEESCAGTSYRKTRNRPRQEHEESSSSIPVQMYEADWEPTGDAPGWTQAPRHSTGGSSWHSANENRWQAPHDVHWGNAHTRSSGSSGMPPASNWWRSSSSRDLGXLTMRLDTLYMQAGEXWQQNADAQFVNINNLMQQXQADLQAYFRFQGFNPYQGP

SEQ ID NO: 184963 - protein, 72 aa, Oryza sativa
  Clone ID: PAT_MRT4530_81905C.1.pep
ILFRVIGYFRNTCRNQNCSYSIHDARMPSDASNTTCMDWGYNISTSNLLHFFKKRRREESRFEPRAEFLQPG

SEQ ID NO: 184964 - protein, 59 aa, Oryza sativa
  Clone ID: PAT_MRT4530_81906C.1.pep
SSSSYTNKLPEYGKHASIPLLFYLSTSLNLDCSLSVNKDGTKSCSLKKKKKKKKKKKKK

SEQ ID NO: 184965 - protein, 144 aa, Oryza sativa
  Clone ID: PAT_MRT4530_81907C.1.pep
MTARRLPASTRPTTHCSATFSPSSISLEFHIPDDWICEKDEAVEHQEGMAEILRHTKKAPATKEVLLSFPPSPEKSGIVVDGSFIFVFECRKLTSDGPAFHFLLKFTLQKQMEGKFAAVAFVTFRCISSVTIFGACSLLYDHYP

SEQ ID NO: 184966 - protein, 175 aa, Oryza sativa
  Clone ID: PAT_MRT4530_81908C.1.pep
VLWLSRCSHKRALRHFAARTRQGWLLRHRGVAGNGVESFAGTWPLRTSGHGRRQARRRWRRPEHARPGPTCHTHTASWSLCSGPAGASPPPPPSRPCASGRRRHRRAGRTCSGRRRQCRQAAHAPGTGVGRRRPPRSVPQYPLYPVYGYPPSTVARQVGGLGAQGSLCRSQLVRQ

SEQ ID NO: 184967 - protein, 189 aa, Oryza sativa
  unsure (1)..(189): unsure at all Xaa locations
  Clone ID: PAT_MRT4530_81909C.1.pep
STFQVLDDSIHVSGDTCKYHVILIRYHAIFYHISRDTREVSCETCQLXDDFNHVSRDTHEVSCDTCHVSDNFYHESRDTREVSDDFYHVSRDTCEVSDDTYQPRTATAAAEDERGGSGDGRGGSGGWARRRWRGTATASTGDRHGGGGGGGDWDGRRSEGGTATAASECMDKNRVWRGAIPLLLGLPYL

SEQ ID NO: 184968 - protein, 65 aa, Oryza sativa
  Clone ID: PAT_MRT4530_8190C.1.pep
KSDCSSYGIIMQIMVVTMPLERALVLLPVAVFHVPYCFRRTCMSSPRMFIKDPRVFFSFQRSIHR

SEQ ID NO: 184969 - protein, 47 aa, Oryza sativa
  Clone ID: PAT_MRT4530_81910C.1.pep
MMWAECTEKGEAGTRDKGSEAEYGPVGRQRTRREPTLVQQMVVRIEA

SEQ ID NO: 184970 - protein, 68 aa, Oryza sativa
  Clone ID: PAT_MRT4530_81911C.1.pep
MWVVLKRSKRIAAKLALIGSSDTTSRMQHNLKRKLVFVREKGLVSAEAVAAYNALFSQPLSQDHAIGP

SEQ ID NO: 184971 - protein, 95 aa, Oryza sativa
  unsure (1)..(95): unsure at all Xaa locations
  Clone ID: PAT_MRT4530_81912C.1.pep
MGQGTPGXCGKQGVLPXDRKXVDRXXTRCKDRKFEPPXAPSRVGRKQRKRKGPEAAARXPXCALXSKCRLRLLKLERVXKDYLLMEEEFRRPGSG

SEQ ID NO: 184972 - protein, 192 aa, Oryza sativa
  Clone ID: PAT_MRT4530_81913C.1.pep
MAPPPPSSELPPPPPTNAATSSSAMAVPYFCRKHVALATSRSSTVWTVAKQTGLRSVTVGSDTAVACAVCTDDLPPAATACRLPCGHLYHADCFVQWLSRRNSCPVCRRRVPLFPDHGAAYTDEDEDEDEEEIAPSPPPPHGPETTATDDHRPRSLPGASWIGRICRRLLGYTETSHPRQLNRCSGDTTQQW

SEQ ID NO: 184973 - protein, 473 aa, Oryza sativa
  Clone ID: PAT_MRT4530_81914C.1.pep
MDQANGVQGQNGSNELPYDPKKDPKWKANSKDPGWKKGKVIHVDMMMVMKMDRLLQTMRKKWLCKSSHKSWEILCGSIGQYGPRYISASYHDLQVPLLEKAKKKTNSIREKHELAWQEYGCSLMSDGWIDKRKRHLVNFLVNSLAGTFFLESIDILHLAADAQLIANLLEKQIDIIRRNYVVRIVSDNGSNYKAAGRLLMERIPTLYWTPCAAHCLDLMLEDIMKIPMLSPSIAKAKKVTTFIYSHSRLLDAMRKKTNGADIVRPAATRFATAFLTLQSMWKHCTALKGLFVDECWTSSSLARKEAGKKVSSYVLTTVFWNGVENCMRASQALLIVLRLVDGDERAALAKAKLLEKVMGIVSNRWDSQRDQKLYGAAYFLNPKRFFELKSDLANRMLCTKLRHMFNEVLWKMVPDEAKQSKISSQSDDYVREEGECFSSKLAQADKTKKNPRCERNWMPLLVIILCKNNFNQI

SEQ ID NO: 184974 - protein, 146 aa, Oryza sativa
  Clone ID: PAT_MRT4530_81915C.1.pep
AFVMTDTLMRTGGRGAGIEDEWRKRKEAQSLKRLEVKRKRIERRNSLTSNISKEAVGQILEEGRAGADKVESCDDVATGNKKTGGNVNHSSDRNRCTGLPPVHRATYTQQRGSLSGIPTKHIPAMKGKPLTFCRFAFVLSFCIIDT

SEQ ID NO: 184975 - protein, 68 aa, Oryza sativa
  unsure (1)..(68): unsure at all Xaa locations
  Clone ID: PAT_MRT4530_81916C.1.pep
MTMMTPSPLEPEEDEMLVPHQELVPVDAVQPMEDVGQTEAASTAESQPAEDPXTIXFTWTIENFNRIN

SEQ ID NO: 184976 - protein, 246 aa, Oryza sativa
  Clone ID: PAT_MRT4530_81917C.1.pep
SHSRLHCNTCFWEAHLVQRQKDLEYEAEFEQSASKSKDGLDKDAISKRLEEIYKRLEFIDADAAEARAASILAGLSFTPEMQRKRTKQFSGGWRMRIALARALFIEPELVLLDEPTNHLDLHAVLWLETYLLKWPKTFIVVSHAREFLNTVVTDILHLHGQKLHAYKGDYDTFERTREEHLKNQQKAFETNEKARSHMQAFIDKFRYNAKRASLVQSRIKALERMEHVDAVVSDPDYKFEFPTPDD

SEQ ID NO: 184977 - protein, 66 aa, Oryza sativa
  Clone ID: PAT_MRT4530_81918C.1.pep
TDDGLSLHPTCYRRCMTVAPLFPSPLQEGWWAHPISMVPMEEGAGGHRKTKLHSDRCTILDHGDWK

SEQ ID NO: 184978 - protein, 76 aa, Oryza sativa
  Clone ID: PAT_MRT4530_81919C.1.pep
AKRSGENLPARGNHSILNGRLPPTTKHDIEEPNASSCRCACPQVSIMTCSAYQNRFYSNQKCPYSQVISQTHQRCS

SEQ ID NO: 184979 - protein, 168 aa, Oryza sativa
  unsure (1)..(168): unsure at all Xaa locations
  Clone ID: PAT_MRT4530_8191C.1.pep
TSNGKILEAVGDMGRGPGRLGAPRHAPRALALPCPEALPRLPCGGGDVRCRTTDPQSFGVPSVXEEDRHKSSLIYEGMTGLSPVSGGGRXWVPLKDGLLLSFRAKARVAARSRCNRPETALTVTTDKRTHLSVPYPMLEVCWPTQVQPNPGGVSSGWPSTWTVQITPQ

SEQ ID NO: 184980 - protein, 86 aa, Oryza sativa
  Clone ID: PAT_MRT4530_81920C.1.pep
MSTRAAAINEPRVATGQPGPAPETGSQTSRPDRIRRASGASTRLWRGMLVRSVRSRSVRSRGGQTPWRALAARSASGDCSVGDRYR

SEQ ID NO: 184981 - protein, 326 aa, Oryza sativa
  Clone ID: PAT_MRT4530_81922C.1.pep
MAQLHGGSVGHSQAIDDIPQFYASSCSATAYHSHAMEMSRLDASGRGSSRTAADDKGGHVVIDIDAADDIPIPFCVVCMEPLEWVAVGPCGHRVVCSACAARVRSAPYSDHRCCTCRTPCPTVFVTKAAAAAADGELNYLLQLQGDAGSLQDGRVGEYWYLAPMSAYFDDERQYEAAAASSLMMKHQRPPPDADGEFQPRHGGDRGDGALPGDEFGAPELSFLALFFAACGAVVGLGFTGFGTGWGQKVAIVLGSAVANGVRGASKLLRFCWRHDMRAFDQPCRNHLFDEGSNQRRRLRPRRRYMAKAMWRSVWAKTKDSVPSLAV

SEQ ID NO: 184982 - protein, 86 aa, Oryza sativa
  Clone ID: PAT_MRT4530_81923C.1.pep
MALREIESTLPPGFRFFPSDEELVCHYLHKKVANERIAQGSTLVEVDLHAREPWELPEVAKLTASEWYFFSFRDRKYATGSRTNRA

SEQ ID NO: 184983 - protein, 898 aa, Oryza sativa
  Clone ID: PAT_MRT4530_81924C.1.pep
MERPSNRDWSDCDPTFSAEANAAIRALRDTGAGADARARRLAARLVERYPGSPLAHTILAEGHRVRGRLEGARSSLERAAALAPGCPRTAFMLAAVLTRMGLFDEAMEVCDRSLLVPQPTDPARHLPYRRKRIVPKDAEHRIAYTRQGIRRLRLGAEKCRRTAVPLPPESALPAPDWPPESAEANLQVARDLWRGMSEEEQQAFLKVSFQDMKSYCRSGGELEMISLLSDAEHDQFVKLSASSSCWTCPLCGFKIILDEERFMVHMENFHIEHEEYKKLRSSLPKRIPDNEMELLKSWRWEPMPIDGDDLAERTEILSKLKKLVSQLIDMEAVSLCLLYIMHKFIMRRVRPVTPLVVSMCACCGIRQLSSAHLKELYEFLQKLTPILADYVHQKAQNGEQESQQDSLAVTTWLKETGTLSFDYGKIVSRNTDGSSNPDEIVDGLFHESLLEDPLVSWGGVWQRCLDLGPDILNKISEALNKLKVNCSSCEELKQKLGDVYFLPDAIFETDIDVKPYFDDGIGSVQVEMLLIDAEVDYQKKMLLEACKVDYLAAILPIAKACLRAKMNNNLRPPNGLELQAPLNIILRSLWHIRRFHDTLQKIPSKCTDVKDGNSQIGKTLCKIFDSWDNEKAGKPCDPCDSTRFADFTNSLVYKKDGQRKTAIDIVKFIFRRLHSSQTPLHFEFKGETLDHQTPVEPSFLGCICLVHDLFGLHIYENKFNCVNEVYTEYQYTTFLHSIDLGAVGKTKVESFSELLKARKSRIESCGHMVSQYSLECPPRLFMTVFEWKEDKVGHINMHEVLMSLAVELDISHFYGDLHSGSKYTLVSAVCCNDQGPYFCFARGNNIWLIYDNNRRPMYAESWEASIQQYSQANLCPEIIFFERVEDPELGTHRDQTAP

SEQ ID NO: 184984 - protein, 82 aa, Oryza sativa
  Clone ID: PAT_MRT4530_81925C.1.pep
VPPRRRLEAAAPRRVPRRASPPCAAVAAAAVVDQDYINNKDYPEQGKSSLFFEHVDPNCEIVLFTNKIACNDKHPTCDYAMP

SEQ ID NO: 184985 - protein, 530 aa, Oryza sativa
  Clone ID: PAT_MRT4530_81926C.1.pep
MAMAAARRGHGMPLWECNVLIRTLARRGSFARVMAVYYDLRARGLVADSFTYPFVLRAVGVLKLSVEGRKAHAAAVKTGFRWDAYTGSSLMEMYTMLGRVDIARKVFDEMPSRALVLWNMMVRCYIRCGWYSAAVALSEQMERSGVTPDRVTLVTAVTACSRARDLSLGRRIHVYMDNVFGFNLPVANALLDMYTKNDCLEEAVKLFEQMPARNIISWTILVSGYGLAGQLDKARVLFNQCKEKDLILWTAMINACVQHGCFEEALTLFRDMQMQRVEPDRFTVVTLLTCCANLGALDQGEWIHQYAEQRKMKIDAVLGTALIDMYSKCGHIEKSLEVFWRMQGRDATAWTAIICGLATNGQAGRALELFQDMQRSKVKPDGVTFIGVLSACCHGGLVDEGRKQFHAMREVYQIEPRVEHYSCLVNLLGRAGLLDEAERLIGDVPINKDAMPLFGALLTACKAHGNVEMSERLTKRICEQDSQITDVNLLMSNVYATASRWEDVIRVRGKMAHPTVKKNAGCSLIEVKGY

SEQ ID NO: 184986 - protein, 117 aa, Oryza sativa
  unsure (1)..(117): unsure at all Xaa locations
  Clone ID: PAT_MRT4530_81927C.1.pep
HLQHLVSPNQSTFIKGXFIQDNVMLVQQTAKFLQSQKEPRIALKFYTCKAFHSAFRPFLLEVLXGFSQVXRDVLSRLLARFSTQVLLNVLXNVSISHRHGLQQGDLVSLMLFILVTT

SEQ ID NO: 184987 - protein, 193 aa, Oryza sativa
  Clone ID: PAT_MRT4530_81928C.1.pep
MAAPPARSVSVADRALRGVADLIKLLPSGTVFLFQFLSPLVTNNGHCAAAYSRVLSAALLALCGAFCAFSSFTDSYVGSDGRVYYGVVTARGLRTFAADPDAAARDLSGYRLRAGDFVHAALSLLVFATIALLDADTVACLYPALEVSERTMMAVLPPVVGGVASYAFMVFPNNRHGIGYQPTRATEDFEHKH

SEQ ID NO: 184988 - protein, 142 aa, Oryza sativa
  unsure (1)..(142): unsure at all Xaa locations
  Clone ID: PAT_MRT4530_81929C.1.pep
MPRFVRWLLCSISGGLSFFSSADDTLTPAEGWPWATEDRRWAVDSGGRRGGGRWWRIQRRGAAGDGEDGGAGAPRRRHLEEXEGRGGKGEGEGAHRGGLASAVDPFRLAGEAGGGAVGRLRRGSRENGVVVACDLNRWGGGE

SEQ ID NO: 184989 - protein, 153 aa, Oryza sativa
  unsure (1)..(153): unsure at all Xaa locations
  Clone ID: PAT_MRT4530_8192C.1.pep
NDAAXALHQXTSFLGTAPRRDXLVRRVXXSXGRITMRRTVXXAPXNIWYGPDRPKFLGPFXEXXXSXLTGKFXGXYRXDXAGLSAXXETFAXNKELXVIHSPWAIXGAXGCLFPEICXXTGXKFWEXVXFXAXAXIFSQGGLDYXGNXTWFTR

SEQ ID NO: 184990 - protein, 43 aa, Oryza sativa
  Clone ID: PAT_MRT4530_81930C.1.pep
FINSLIPHTPACMHTYIILQIQAKCMCMQLIKPPPWLRHKLHH

SEQ ID NO: 184991 - protein, 131 aa, Oryza sativa
  Clone ID: PAT_MRT4530_81931C.1.pep
ALLSLQTRTEFISRFQPAKMKTGNNGCGRIGRLEDREALQSDNVELRARNDPFITTDYMTYMFKDDTAHGQWKHHEVKVKDSKTLLFGEKEDTVYGWRNPEEIPWGETGAELVEESTGVITDKDKAGAHLK

SEQ ID NO: 184992 - protein, 260 aa, Oryza sativa
  unsure (1)..(260): unsure at all Xaa locations
  Clone ID: PAT_MRT4530_81932C.1.pep
MTARGPTCQLLPLPPATSPVTARGRHCCPLRRKIRTTQPFHPTPPVVAAPNPHRPGPLPLSRTHKTPSRTPLAHFPNFPEPVVPSPALPTRARAPPLAAMXSSRTPPRCAATTIGIAVPCRTPAPTPFTLSASETPPQRGPELRRPSTPSSRPTPLRATATDGFTASSRTPASPPLLHSAARTVTESSRETAFLRPRXASLILAAFGRHFPRRRASSSLPKSPVFFSXVLPATVRQFPLAEGRRSTVRFASLRSTVASSH

SEQ ID NO: 184993 - protein, 138 aa, Oryza sativa
  Clone ID: PAT_MRT4530_81933C.1.pep
MRVPQLVDPHVSWFELPQQLDLATLTFGRDVEVAVALGTRMEEKTMTEAVLERRKRRATAMVGSEGKWKGAATRGELISAVDIYHRSAVIVSRVVKTYMPSSWFLTSLFTVVDAVECKNPVPASCEMSSLIDLSFLDE

SEQ ID NO: 184994 - protein, 375 aa, Oryza sativa
  Clone ID: PAT_MRT4530_81934C.1.pep
MAVVEEEEGSPPAPAAAADPASSGSSDNEITVEEASFVHTEPPQDGSVPPVVSSNMEVLHDKVKKQVIKEGHGKKPSKFATCFLHYRAWVQGSLHKFEDTWQEQHPIELVIGKEKKQMSGLGIGVGNMRSGERALLHVGWELGYGKEGSFSFPNVPPMADLLYEVELIGFDDVKEGKARSDMTVEERIEAADRRKIEGNEYFKEKKFEEAMQQYEMAIAYMGDDFMFQLFGKYRDMALAVKNPCHLNMAACLIKLKRFDEAIAQCSIVLAEDENNVKALFRRGKARAELGQTESAREDFLKAKKHSPEDKEIQRELRSLAEQDKALYQKQKELYKGLFGPRPEPKPKASNSIVRFWQWLVSLIGYLIKLFKPKNE

SEQ ID NO: 184995 - protein, 380 aa, Oryza sativa
  Clone ID: PAT_MRT4530_81935C.1.pep
MVHAPAKVAAAAAIPLLTPYKMGQLELSHRVVLAPLTRCRSYGNVPQPHAAVYYSQRATRGGLLIAEATDISPTAQGYPETPGIYTQQQIEAWKPIVDAVHRKGALFFLQIWHVGRVSTTDFQPNGQAPISSTDKQITPDDSGMVYSKPRRLRTDEIPQIIDDFRRAARNAIEAGFDGVEIHGAHGYLLEQFMKDSANDRTDEYGGSLENRCRFAVEVIDAVVAEVGAHRVGIRLSPFVDFMDCFDSDPVALGSYMVQQLNKHPGFLYCHMVEPRMAIIEGRRKIAHGLLPFRKQFNGTFIAAGGYDREEGNKVVADGYADLVAYGRLFLANPDLPRRFELDAPLNRYDRSTFYTQDPVVGYTDYPFLEEIDEESRTTYA

SEQ ID NO: 184996 - protein, 131 aa, Oryza sativa
  Clone ID: PAT_MRT4530_81936C.1.pep
SHVNRGQSTERPTRGPPEFLEFRRSNLILYTYGKLPQAARNCAAFARAPFCSCHRAVSGKRSGFGASWPCGATRRRRPASGRRRRRPPARRRARPPGARARPPAPAPPAPSPAAPAPRPPWPPPTPGSAAP

SEQ ID NO: 184997 - protein, 214 aa, Oryza sativa
  Clone ID: PAT_MRT4530_81937C.1.pep
VLDQEDMWRRKHEAGIAHRQEIVSRGDEIDGDNEDIAEAMTSLAIRPAMAERDRKTGPGVAEGDRRDWRGSAIRTGSHGLNDADDDAARKTIKLSSMQKKTQIKLDSEKMWIRSRHRKGLCLEFSLRMRESVNDGFISSVHKTTRKKGFSSSCLTTEMIGEKVEHCCRWIQEEEITGISESLEDGGSGVDSSGGFAVKLQKKTTQVWRTGGSAW

SEQ ID NO: 184998 - protein, 74 aa, Oryza sativa
  Clone ID: PAT_MRT4530_81938C.1.pep
MAPSRAASTVSVVSAGSASATPASTPTSRPPPPPPPRRAPSGGAGAAAGQSPPPPPPRPPPPAPRAPPPPPPAP

SEQ ID NO: 184999 - protein, 113 aa, Oryza sativa
  Clone ID: PAT_MRT4530_81939C.1.pep
SVSRALAKVAPLKPDIRLGQAVSEFEADLSAKQKVEFQALRLQSSKAAPDPSDVMRLTARMDKCLSNKFGGQCFGPRFTNFVQGVQQFAALGDILVGGSQNLVACGVWSVLRI

SEQ ID NO: 185000 - protein, 147 aa, Oryza sativa
  Clone ID: PAT_MRT4530_8193C.1.pep
MWRRAPQRLHLDWLGGVPEGGAKPYEGQCVDLKFYALRPPPSAALPLNLCHRRIDGSCQLLHLRRHREPHNQPPPLAAPPLHLRHRWIDGSHPLPPSPAPPPGAFLRISAPLSPLRPPPPPSHTVSPLHSLPGDCESIPAGGDLVGD

SEQ ID NO: 185001 - protein, 62 aa, Oryza sativa
  Clone ID: PAT_MRT4530_81940C.1.pep
LKGDSCNSPLPILNIYVILCDVLCSRKHLIALLFIWPLSVSLMESVIPLLLTISATVLWIWS

SEQ ID NO: 185002 - protein, 134 aa, Oryza sativa
  unsure (1)..(134): unsure at all Xaa locations
  Clone ID: PAT_MRT4530_81941C.1.pep
RTRGWLTSITGNVDHHGELKFRGYHGSYTVEVATPSGKDPKFRNRNHSDQNSEMGTSFNLYTSRQLDLLPPCVTTRGRHRRRNLALLPPLSPLPPPHRWKAGRRSNMVVVGPNCGGSRVAPSSIGTTGGQXPVR

SEQ ID NO: 185003 - protein, 356 aa, Oryza sativa
  unsure (1)..(356): unsure at all Xaa locations
  Clone ID: PAT_MRT4530_81942C.1.pep
MAASPALVAAAAQQQQLVPCMYIFGDSLVDSGNNNNILSLARANYQPYGIDFSGAAPPGRFTNGLTVVDMLADMLGLRPPLIPAYAMAQPGDFARGLNFASGAAGIRPETGNNLGRHYPFSEQVEHFRAAVRQMGPNAGSPERLGRCIFYVGMGSNDYLNNYFMPNYYTTAQSYDPAAYAADLLQEYSRQLAALHALGARKFVLAAVGXIGCIPYELARISNNQDDDDAAPSSDSGTGISIXSAASRLNGGGGGGRMAGATVVYLDTVRTGRAVAASAAAHGFEVLDRGCCGVGRNNGQITCLPMQQPCGDRSKYVFWDAFHPTEAANRIYAARAFNSSAAAGDAYPINVSQLAAI

SEQ ID NO: 185004 - protein, 406 aa, Oryza sativa
  Clone ID: PAT_MRT4530_81943C.1.pep
MAASPALVAAAAQQQQLVPCMYIFGDSLVDSGNNNNILSLARANYQPYGIDFSGAAPPGRFTNGLTVVDMLADMLGLRPPLIPAYAMAQPGDFARGLNFASGAAGIRPETGNNLGRHYPFSEQVEHFRAAVRQMGPNAGSPERLGRCIFYVGMGSNDYLNNYFMPNYYTTAQSYDPAAYAADLLQEYSRQLAALHALGARKFVLAAVGDIGCIPYELARISNNQDDDDAAPSSDSGTGISISLGGVGLTVGGGGGGGSTRAANASRSGGNGGGGACNEEINSAIAIYNRGLLSMVKRLNGGGGGGRMAGATVVYLDTVRTGRAVAASAAAHGFEVLDRGCCGVGRNNGQITCLPMQQPCGDRSKYVFWDAFHPTEAANRIYAARAFNSSAAAGDAYPINVSQLAAI

SEQ ID NO: 185005 - protein, 99 aa, Oryza sativa
  Clone ID: PAT_MRT4530_81944C.1.pep
YSSLRDSSALSDLVRKGILPMSPTLRVGSSHLISLAPFSSSLRLTILLLVPASTFFPMNGRLFLPMIVRSSHLASSITSHVSSGRPGNQSSLLPQPTKT

SEQ ID NO: 185006 - protein, 176 aa, Oryza sativa
  Clone ID: PAT_MRT4530_81945C.1.pep
MACAPFSCCTYPPAPSPLTINESRRRLTTPDLEIPRASPSLDQPKPCSDEVMDRTGPCGLHLGVMPSRRMPIDANPPPMQLLVVMEGRQMKVLDLEFRLAIDVVLQTPCCSSTLCVGMSCVWRITMARLVPTGFRDGTCGIMVDTFRAGTCGIMVDTFSNGKDGVTVPKQAIADDG

SEQ ID NO: 185007 - protein, 37 aa, Oryza sativa
  Clone ID: PAT_MRT4530_81946C.1.pep
GSSGVPYQFLLQSRPVCSRDCATVDHVIDLKTGDESF

SEQ ID NO: 185008 - protein, 126 aa, Oryza sativa
  Clone ID: PAT_MRT4530_81947C.1.pep
DPQRAPFLLCTCDPYAPARFKEPGGFSGRAGERRRGGNTPPHLREQILSPAVAEMVLTFTKLFRRLFGEMEMRILMVGLALRGKTTILYKLKLGEIFTPMPTIHFNVETVEYKNISFTVWECCGYD

SEQ ID NO: 185009 - protein, 85 aa, Oryza sativa
  Clone ID: PAT_MRT4530_81948C.1.pep
KKTFEMYDYSLWGPTQERIEKKIKLESCRVVCSGRGTSCKLTSAIAPGLWASCLACQKGGGSKVKIYPLLVSSDHASVYKSPPPC

SEQ ID NO: 185010 - protein, 2414 aa, Oryza sativa
  Clone ID: PAT_MRT4530_81949C.1.pep
MPMRPWEFIILGRTAPISPPPLGISAFSRPLRLRLRLRLAAVVDAARIQTPPRVAFSAFFFFFFFFSEGLSREGTAARLPALIYRVPFIPCLLQLQIRAPHADPRPAGFSCAHHFLALAQGLSSSLLSGTISHIWGFIFSLYGTTHLRNRAILLFGLAGIIDLPNDAASEVDISHGSEDPRGPTVPGSYQMNGIINETHNGRHASVSKVVEFCTALGGKTPIHSVLVANNGMAAAKFMRSVRTWANDTFGSEKAIQLIAMATPEDLRINAEHIRIADQFVEVPGGTNNNNYANVQLIVEIAERTGVSAVWPGWGHASENPELPDALTAKGIVFLGPPASSMHALGDKVGSALIAQAAGVPTLAWSGSHVEVPLECCLDSIPDEMYRKACVTTTEEAVASCQVVGYPAMIKASWGGGGKGIRKVHNDDEVRTLFKQVQGEVPGSPIFIMRLAAQSRHLEVQLLCDQYGNVAALHSRDCSVQRRHQKIIEEGPVTVAPRETVKELEQAARRLAKAVGYVGAATVEYLYSMETGEYYFLELNPRLQVEHPVTEWIAEVNLPAAQVAVGMGIPLWQIPEIRRFYGMNHGGGYDLWRKTAALATPFNFDEVDSKWPKGHCVAVRITSEDPDDGFKPTGGKVKEISFKSKPNVWAYFSVKSGGGIHEFADSQFGHVFAYGTTRSAAITTMALALKEVQIRGEIHSNVDYTVDLLNASDFRENKIHTGWLDTRIAMRVQAERPPWYISVVGGALYKTVTANTATVSDYVGYLTKGQIPPKHISLVYTTVALNIDGKKYTIDTVRSGHGSYRLRMNGSTVDANVQILCDGGLLMQLDGNSHVIYAEEEASGTRLLIDGKTCMLQNDHDPSKLLAETPCKLLRFLVADGAHVDADVPYAEVEVMKMCMPLLSPASGVIHVVMSEGQAMQAGDLIARLDLDDPSAVKRAEPFEDTFPQMGLPIAASGQVHKLCAASLNACRMILAGYEHDIDKVVPELVYCLDTPELPFLQWEELMSVLATRLPRNLKSELEGKYEEYKVKFDSGIINDFPANMLRVIIEENLACGSEKEKATNERLVEPLMSLLKSYEGGRESHAHFVVKSLFEEYLYVEELFSDGIQSDVIERLRLQHSKDLQKVVDIVLSHQSVRNKTKLILKLMESLVYPNPAAYRDQLIRFSSLNHKAYYKLALKASELLEQTKLSELRARIARSLSELEMFTEESKGLSMHKREIAIKESMEDLVTAPLPVEDALISLFDCSDTTVQQRVIETYIARLYQPHLVKDSIKMKWIESGVIALWEFPEGHFDARNGGAVLGDKRWGAMVIVKSLESLSMAIRFALKETSHYTSSEGNMMHIALLGADNKMHIIQESGDDADRIAKLPLILKDNVTDLHASGVKTISFIVQRDEARMTMRRTFLWSDEKLSYEEEPILRHVEPPLSALLELDKLKVKGYNEMKYTPSRDRQWHIYTLRNTENPKMLHRVFFRTLVRQPSVSNKFSSGQIGDMEVGSAEEPLSFTSTSILRSLMTAIEELELHAIRTGHSHMYLHVLKEQKLLDLVPVSGNTVLDVGQDEATAYSLLKEMAMKIHELVGARMHHLSVCQWEVKLKLDCDGPASGTWRIVTTNVTSHTCTVDIYREMEDKESRKLVYHPATPAAGPLHGVALNNPYQPLSVIDLKRCSARNNRTTYCYDFPLAFETAVRKSWSSSTSGASKGVENAQCYVKATELVFADKHGSWGTPLVQMDRPAGLNDIGMVAWTLKMSTPEFPSGREIIVVANDITFRAGSFGPREDAFFEAVTNLACEKKLPLIYLAANSGARIGIADEVKSCFRVGWSDDGSPERGFQYIYLSEEDYARIGTSVIAHKMQLDSGEIRWVIDSVVGKEDGLGVENIHGSAAIASAYSRAYKETFTLTFVTGRTVGIGAYLARLGIRCIQRLDQPIILTGYSALNKLLGREVYSSHMQLGGPKIMATNGVVHLTVSDDLEGVSNILRWLSYVPAYIGGPLPVTTPLDPPDRPVAYIPENSCDPRAAIRGVDDSQGKWLGGMFDKDSFVETFEGWAKTVVTGRAKLGGIPVGVIAVETQTMMQTIPADPGQLDSREQSVPRAGQVWFPDSATKTAQALLDFNREGLPLFILANWRGFSGGQRDLFEGILQAGSTIVENLRTYNQPAFVYIPMAAELRGGAWVVVDSKINPDRIECYAERTAKGNVLEPQGLIEIKFRSEELQDCMSRLDPTLIDLKAKLEVANKNGSADTKSLQENIEARTKQLMPLYTQIAIRFAELHDTSLRMAAKGVIKKVVDWEESRSFFYKRLRRRISEDVLAKEIRAVAGEQFSHQPAIELIKKWYSASHAAEWDDDDAFVAWMDNPENYKDYIQYLKAQRVSQSLSSLSDSSSDLQALPQGLSMLLDKMDPSRRAQLVEEIRKVLG

SEQ ID NO: 185011 - protein, 902 aa, Oryza sativa
  Clone ID: PAT_MRT4530_8194C.1.pep
MELATGALPSVIAKLGDLLVGEYNLQKAVKGEIRFLQSELESMQGALAKVSATPADQLDPQDKIWARDLRELSFDIEDTIDAFVVRDIGNDNGDGEAKPRGISKLIDRSVGLFRKAKARHGIASEIMDIKSRVVEVHERRRRYEINIGAGGGDKTATIDPRLFTRYTDEKELVGIVSQTPDLKKLFMDIIYQLDKEKYKDLNEKPLDLDEVQLINELREFLQQKRYFIVMDDIWDISIWKMIKCALPDNDVGYKIITTTRISEVAEKAGGVYKLKHLSLNNSRRLLYGRIFGNCEDTEKYPDEELAEVSERILKKCAGVPLAIITMASLLACKARNKMEWYKVYNSVGTGLENSLDVKNMRKILSFSYYDLPPHLRTYLLYLSVFPEDYKIEKDRLIWMWVAEGFIQCGKQGRSLFELGESYFNDLVNRNMIQPIYDMYTDMVSECRVHDMVLDLICSLSSEENFVTILNGCDLSQGYSLKYVGNLFHLRYLGLRDTDIREAPEEIGNIQFLQTLDLRANPICDLPLNIVKLRHLTSLCFDGFARVPDGIGSLTRLEHLAYVLIDCATVGILEELGNLTELRVLCIIFWDGWNDKLVGLLHKLQKIQRLSIDVCMNNVRKNMGGLDAWVAPRHLVALDTEKICWFSSLPAWMTNPSHVPNLRSLSIAVREIRQADVETLGRLPALRDLQLQVDHEELGIRGVVLVIGSAGSFACLVCCGLWGFVGPAVFRRGAMPRLRTLRSRFSVREAIAVAGAGDDGLDLGLGSLPSLQEVNVSLDCEGASEEEVNELKAALRRATKIHPNHPSISIDGEKEEEDTYLISIYHTWHIGCALGMVAVFHAAPHRVEAKHVDHSVLPSVPKAWCPKPLMVVAPANAGTYPVAIFLHGCNMVNSWYEQWRKQD

SEQ ID NO: 185012 - protein, 62 aa, Oryza sativa
  Clone ID: PAT_MRT4530_81950C.1.pep
NLLHVDLLISNGQSYGNIKLFVAQVTGSPWLCAPFCRRIRKFLVPTICIGVCHKIGIHLIES

SEQ ID NO: 185013 - protein, 85 aa, Oryza sativa
  Clone ID: PAT_MRT4530_81951C.1.pep
MAGAAAPLRPWRGNRAVAQQEGEASRDHGRGKAAGRRRSTGGDRAGARARHGATTEQTLHIRGPQIGSLPKDPTQIGEGSHGSPF

SEQ ID NO: 185014 - protein, 951 aa, Oryza sativa
  unsure (1)..(951): unsure at all Xaa locations
  Clone ID: PAT_MRT4530_81952C.1.pep
MAAVAPPSLSTPVTILPSVSVALPPLPPPATDDFHWLDLFAFLNSPADSYQIPVEEQEVEVEVEVEVGVERERERERERERERERARKAEHRRLRQRQVKAETEAWARAADEYRELEREMLDRRLAPALPYVKSLFLGWFEPLRDAIARDQEVQRRKRVKHVYAKYLLLLPADKVAVIVMHKMMGLLMSSKDGVASVRVVQAAHCIGEAVERENRLNNVEALDSLALYTTDRCVRSWNFKVQTFFQKTRKKSAGENDLALEKEQAKCRKRVKSLVRRRKLTEAQKIVQQEIELEEWGTESQVKLGTRLIELLLDSAFVQSPADQTPESSPDIRPAFKHVLRQPIVENGRLKKKHWVIECDPLVHEGFESTARHVEIPYLPMLVTPKKWKGYDTGGYLFLPSYIMRTHGVKDQKEAIKSVPRKQLRKVFEALDTLGSTKWRVNRRVHNAVETIWSRGGGIAGLVDKENIPLPERPETEDPDEIQKWKWSLKKAKKANRELHAERCDTELKLSVARKMREEDGFYYPHNLDFRGRAYPMHAHLSHLGSDLCRGVLEYAEGRPLGKSGLRWLKIHLANKYGGGIEKLSHEDKVAFVENQLPDIFDSATNPVDGNCWWMNAEDPFQCLAACMDLSDALKSSSPQCAVSHLPIHQDGSCNGLQHYAALGRDYMGAAAVNLVPGDKPADIYSEIAARVLDVVREDSMEDPATNPTASLARVLVDQVDRKLVKQTVMTSVYGVTYIGARQQITKRLQEKGLITDDKLLYEVSCYATRVTLDALGQMFQSARGIMAWLGDCAKMIASENHPVKWTSPVGLPVVQPYKKYKNYMIRTSLQCLALRREGDAIALQRQKAAFPPNFVHXSLDSSHMMMTAIACKKAGLHFAGVHDSFWVHACDVDKMNQILRGQFVELYSMPILENLLKEFQTSFPTLEFPPCPSQGDFDVREVLASTYFFN

SEQ ID NO: 185015 - protein, 43 aa, Oryza sativa
  Clone ID: PAT_MRT4530_81953C.1.pep
KEQYDFYIGMYLTGQWMSITLQNVELFLRIHNTLGGKKGCTGG

SEQ ID NO: 185016 - protein, 102 aa, Oryza sativa
  Clone ID: PAT_MRT4530_81954C.1.pep
KLCKSEGLQPGLRQRPQQVLQRQRLKPRCRTQHPPHRLLVLHHRRRRRIILLVTSRLVATAAEEATQHPPHLWHRAAARECINTPNILKESRSLFAGESAGE

SEQ ID NO: 185017 - protein, 44 aa, Oryza sativa
  Clone ID: PAT_MRT4530_81955C.1.pep
WWPPWKTILVVIPDMGIVKTRFRWATFTPFQNWINNYGKSNAGP

SEQ ID NO: 185018 - protein, 249 aa, Oryza sativa
  unsure (1)..(249): unsure at all Xaa locations
  Clone ID: PAT_MRT4530_81956C.1.pep
QRVKGGGRTVDSVHRGLAAPWTRTTGVVHERPKHGRDEELSLGPTAREATSDGDRRAARGAVKGRGQGGGRRVLTELAPTRSGRHGAWRRPTAGGGGLPMMEARRRSGDSRPQRRRGRGPTEPAREGNPVPATIRRGRGVAELHMRTVVPGKATTQVDVDXGRRLDTAGDSKHDGDLGLVVEAELRHWNGEIVEAEVELGAAVPTAVAGQRDGDGNGGGGRLNDAGERRRLVVRWGGFPVAIGENGAAC

SEQ ID NO: 185019 - protein, 310 aa, Oryza sativa
  Clone ID: PAT_MRT4530_81957C.1.pep
MTHLLIIFSKEKAFADVSKVNQRRQAGPTRQRVKGGGRTVDSVHRGLAAPWTRTTGVVHERPKHGRDEELSLGPTAREATSDGDRRAARGAVKGRGQGGGRRVLTELAPTRSGRHGAWRRPTAGGGGLPMMEARRRSGDSRPQRRRGRGPTEPGEQGGGTRGGIGGAESRPKIGEISGAHRRGKGTRRLDTAGDSKHDGDLGLVVEAELRHWNGEIVEAEVELGAAVPTAVAGQRDGDGNGGGGRLNDAGERRRLVVRWGGFPVAIGENGAAAGVDFDNGLGRGAVDGVRHDAAKLLGPAAQCGSDGSGG

SEQ ID NO: 185020 - protein, 148 aa, Oryza sativa
  Clone ID: PAT_MRT4530_81958C.1.pep
MRTTLSAAPWAGPGHVHHGDRLRGRSPRVRGARRHRGRILMAANRFGSDRERYPPAAAAVRRARRCAACSIAIATPQRSCHYCRTVILSPVSYYHNAEWLLPIPVARVRHMRHESVVRDRSEFSIVFIPPLEVEACLGVVLHRAGEEN

SEQ ID NO: 185021 - protein, 90 aa, Oryza sativa
  unsure (1)..(90): unsure at all Xaa locations
  Clone ID: PAT_MRT4530_81959C.1.pep
PAGKFXGDLDHLPQAERNLLVRSSLLGLRNSELRHPAQLDTSFNQEIQDTGIELPLPMKGAARFVVENATRQIKPVNGLPSMSTYPSSLL

SEQ ID NO: 185022 - protein, 213 aa, Oryza sativa
  Clone ID: PAT_MRT4530_8195C.1.pep
MTLPSMIALLAIVLLVWFLTVTSPLLSKSRSTPIHRSPTEEEEEDEEDEGGAALAVPVCAAAVMVASSSAASAAALRGLFAGGGRKARRRGTKRRPVHAAALRGARSAAGVEDDAARASQRRGGDRKAAATSQVIAGDLFGIKPELLAIAGVYEGAQHASVEEDEPSRMNREQSRKALPKNLIAAFFRCRTSKAEVPETCSLDRRCKLASGME

SEQ ID NO: 185023 - protein, 81 aa, Oryza sativa
  Clone ID: PAT_MRT4530_81960C.1.pep
PKEASSSNSPKSVPDLYKNAEPFCLLFWPSILPPCLVEQIPPLTQMRPVIFFVPKIPMAHRLIGTWVCPISQMVIVSRHNH

SEQ ID NO: 185024 - protein, 606 aa, Oryza sativa
  Clone ID: PAT_MRT4530_81961C.1.pep
MDHHPIPADENEMTSTSPQMQMRRNKLSSHFQGDIDDDGGVGVVDIRGSPMGSAELARTGGWVAAVFIFGNEMAERMAYYGLSLNMVIFMFNVMHRPFAASANAVNNFLGISQASSLLGGFLADAYLGRYWTIAAFTTLYLLGLVALTLCATMPALQAPGQDECDGFAKLLGKCQQPHPWQMAYLYAALYTTALGAAGIRPCVSSFGADQFEERSPVLDRFFNLFYLAVTVGAIAAFTLLVYVQRNHGWAAAFGALALAMAASNALFFMGTPLYRHRVPGGSPLTRVAQVLVAAYRKRHIKHTTELLYEVGGAKSAVRGSGKIEHTEELRWLDKAAVRVEGQEEINNPWRLCTVTQVEEVKILVRLAPVSACTVMLSVVLTEFLTLSVQQAYTLNTRGLPVACMPVFPCLAILLLLALYYRAFAPLARRLTGHPHGASQLQRLGLGLLLSTLSVAWAGLFERYRRAYAIRHGFLPLFLTPMPGLSAYWLLIQYCLIGLAEVFCLVALLEFLYQEAPDAMRSLASAYAALAGGLGCFLATAINTAVDSITGDIDAGRPSWLAQNINVGKFDYFYWLLAVLSTINLIVFIYFAKAYKYRIKPPTTPHN

SEQ ID NO: 185025 - protein, 74 aa, Oryza sativa
  Clone ID: PAT_MRT4530_81962C.1.pep
MVGEPLHLHPSRICKQSRAWPSPEVERRDARRPSSASPAANTHRIEGLRMRRVGWGLGEITRGDGDSREGLGPC

SEQ ID NO: 185026 - protein, 443 aa, Oryza sativa
  Clone ID: PAT_MRT4530_81963C.1.pep
MASPRTKKRKTGDERSAACGVTVTLPDHVVTEVLVRLPARSLARLRCTCRSWNAEVSLPGFQDRHHALAAAKLTFLEPAPTHMGSYRIRRRLSRRTLPWLSNCFDCPRVIGSKPCWGLVLIARPCEGYSVCNPTTGEILHLPRSHRPHCATVMGFHAPAREFKVVQLGIDEEVVGKLHAIVLTVGDARGWRAISSFQLGLGFTDDAASIDRDVQPVFADGCLHWSFRTNYLDKPHGVLSFSLADESFRRVPQPPFSMVDLVPVHLNGVRNYRLLRAKGIRSGSGEEVAMPVGKTLAELDGRLCMVRDVRHRSDHDVLLEIWKLQDYDTGSWSLDYRVDLPAPGQRQRQLLTAPWLVVPLTYLGGSPPGDKKRKLLVATTAHEAHVYDPDSGTLRTVASIDSSGDGDDDSIRLLLYQESLVRLPGMQHGLGNIKFVQLSNSEHM

SEQ ID NO: 185027 - protein, 256 aa, Oryza sativa
  unsure (1)..(256): unsure at all Xaa locations
  Clone ID: PAT_MRT4530_81964C.1.pep
PDTASQVADVETDEDEVMYFDTRDFLSAESLRSASCRRRELLTNGCNGLEHTDXLQMSVKTTQYPSVKRRDKLPEPKEKENPVGLWSIIKENIGKDLSGVCLPVYFNEPLSSLQKCFEDLEYSYLVDHALQWGKQGDSLMRTLHVAAFAVSGYASTEGRQCKPFNPLLGETYEADYPDKGLRFFSEKVSHHPMVVACHCEGRGWKFWGDSNLKGKFWGRSIQLDPIGFLTLQFDDGETFQWSKVTTFIYNIIIGKI

SEQ ID NO: 185028 - protein, 64 aa, Oryza sativa
  Clone ID: PAT_MRT4530_81965C.1.pep
TKDRINITSESLSIIVKKSLTDKYYLFLHFSCTLVLVYGYPCQSAEKNLMVMGHAPLIGIHIRQ

SEQ ID NO: 185029 - protein, 46 aa, Oryza sativa
  unsure (1)..(46): unsure at all Xaa locations
  Clone ID: PAT_MRT4530_81966C.1.pep
PPPSTPAPASAVPXPPPPPPPPPSPPQRRGRPPRRRDPARGGAGRA

SEQ ID NO: 185030 - protein, 122 aa, Oryza sativa
  Clone ID: PAT_MRT4530_81967C.1.pep
MWSTELVAGDGRGGGAVGVVERQAAGGQKATAGDIALAHHWERQHGRRLHHLVVHQSHHGHGGARGSVVVHLLARLSSSSTCALADSVSTTSSARSSSATSPSHAHLTSPSRARCRSPSKHR

SEQ ID NO: 185031 - protein, 45 aa, Oryza sativa
  unsure (1)..(45): unsure at all Xaa locations
  Clone ID: PAT_MRT4530_81968C.1.pep
SFRVSSICDTCEDLWCEYKIEKKRSSSHYFIEKKIKNNKXEKXRA

SEQ ID NO: 185032 - protein, 38 aa, Oryza sativa
  Clone ID: PAT_MRT4530_81969C.1.pep
GAWGEACSGGGTRRRGGGRGGPRPCEPDGGSGAVRRQP

SEQ ID NO: 185033 - protein, 176 aa, Oryza sativa
  Clone ID: PAT_MRT4530_8196C.1.pep
YTFVEHFTRYYGDGEEEKQLKEAAHRVADGTLLTYGFHRYLPSMVAASSIFLARLHELGHEPWSNDLAELTAFSTLISLQLWPNRGFVEHFTRYNSRGEEELRVQRLERDIADQSLMNYGCPRATCRPWRRRPAASIFIARCSLNRPDRSGLWSTELQELTGTAPRTSLTASILAM

SEQ ID NO: 185034 - protein, 65 aa, Oryza sativa
  Clone ID: PAT_MRT4530_81970C.1.pep
MAIRKKQVTTSAPDGVVSGEGTAARGDGNQPPPGSGGGGRLLLGSGGGGRPRPDLAAVGRLDGGS

SEQ ID NO: 185035 - protein, 48 aa, Oryza sativa
  Clone ID: PAT_MRT4530_81971C.1.pep
LFKLQPKWPSFVIFLPPTYHAHMIQGRGRQASLHCATESEAPSGPFCY

SEQ ID NO: 185036 - protein, 72 aa, Oryza sativa
  Clone ID: PAT_MRT4530_81972C.1.pep
VTKLIFQLKKSHQQRTNIVYDTHTQLVGSHLINMGGLCPLATLLAAGRTLHRGQPPATRGGSVPVMRHLVPA

SEQ ID NO: 185037 - protein, 250 aa, Oryza sativa
  Clone ID: PAT_MRT4530_81973C.1.pep
MCGGALIPNDYGDKPPPPPSESSEWDATTKMKKKKKRGGGGDDDWEAAFREFIAGDDDDDDGGVSMFPSGAGTMETTTEVAPAAAVVERPRRRRRVRRSYPYRGVRQRPWGRWASEIRDPVKGARVWLGTFDTAVEAARAYDAEARRIHGHKARTNFPPDEPPLPAPSQAPFCFLLDDDDDDDGVARGNSPASSSAPDRASACTTSSTVASGERGDELILLECCSDDVMDSLLAGFDVSSEPRSVLGMVN

SEQ ID NO: 185038 - protein, 97 aa, Oryza sativa
  unsure (1)..(97): unsure at all Xaa locations
  Clone ID: PAT_MRT4530_81974C.1.pep
RGETRNTQHNRHRRHNIKAYIRQDTLPDIDFRDKHDWYPTVSPDTVRRDESAISDLAGHGFEEESYPVVDYESDHQTARSTTVRXLPQILYWCDYHK

SEQ ID NO: 185039 - protein, 115 aa, Oryza sativa
  unsure (1)..(115): unsure at all Xaa locations
  Clone ID: PAT_MRT4530_81975C.1.pep
ARAVGATRSTLTASPPPSGRSTGARGAPSPLCPSPPPTRPPLPPPPXTCVTWSSRTSTTGKGTSCGARRSTAATTRTSPAQSSPRPPWPPPSGSTGGRRTATPSGRSSGGTPTTP

SEQ ID NO: 185040 - protein, 64 aa, Oryza sativa
  Clone ID: PAT_MRT4530_81976C.1.pep
LGLISTARGSSKTHSEQLISSNYIACIIKLLICSLILKLSYSEPWALRSIKSLDFRSDARSAYA

SEQ ID NO: 185041 - protein, 69 aa, Oryza sativa
  Clone ID: PAT_MRT4530_81977C.1.pep
MADWGPVVIATVLFVLLTPGLLFQLPAHGRIVGFGTMHTSGVAVLVHAVIYFALITIFLIAIGVHIYAG

SEQ ID NO: 185042 - protein, 103 aa, Oryza sativa
  Clone ID: PAT_MRT4530_81978C.1.pep
MGWFFAFYFGSYFDVSFKARSDNFSSKRKRTESTVVDFKNKLDSSLLEIYRDNVLIGMKRKLYCHKTKKNSMKKDTTYDTKLTRLSVKYFSQVLDECLLITNR

SEQ ID NO: 185043 - protein, 173 aa, Oryza sativa
  Clone ID: PAT_MRT4530_81979C.1.pep
MALRPCHRGTMAVVAMLTGQKGSASHPGAAPHMTAPAWLPRPSSVGRDLKPHDNEARSETATDTAHVPGAMVPAALAITGMGAGARLPCSTASSSITLTAARLFLSHVTLPPIAAAVWPPTATGKAADDDGEGHHGRTNTSEMKLEEASKDKRAGMGAWGTGRATGDAMNKAA

SEQ ID NO: 185044 - protein, 232 aa, Oryza sativa
  Clone ID: PAT_MRT4530_8197C.1.pep
MKFSAIIVAAIIGVLCSCAVCEPDAALVGDEFIICQDNGQWSDYPYCHGPPSCPDPNKPFGMLALVLDTNSGIKRGDLYTERTVFNYTCQTGYHPTGDVTITCQNGTWEADADVPECNTCEKYERHGITFRRLGYENDLTDDGPNSQSKVCKKTRKTRHMTYENQVITCAPPTLEPIKNGSHNIENRTYHVGEGTYALKPYITVMRINAPQKGTNIAHRHGFDPGASQFRGH

SEQ ID NO: 185045 - protein, 149 aa, Oryza sativa
  unsure (1)..(149): unsure at all Xaa locations
  Clone ID: PAT_MRT4530_81980C.1.pep
FWIVPNTTSVGGAVIGAINREDPCNWRAAXSECSAAHFNEVKLMVALVRQTVIWITGCHPLXVGHVAICAQAKDAFGVAVELDKEARPRVKAMGEWLLNCMDQGGVIYCATTVSCXTLQGRTXDGARLQVELFRHLNGXIFGTGSHGQT

SEQ ID NO: 185046 - protein, 48 aa, Oryza sativa
  Clone ID: PAT_MRT4530_81981C.1.pep
TIAIDLAQRAYKYVQEKLEMSIIPLITLNTSHSNVNVVMQLTFAFWKG

SEQ ID NO: 185047 - protein, 186 aa, Oryza sativa
  Clone ID: PAT_MRT4530_81982C.1.pep
MMSNVKDQLMNSFQETRRGTIVQKYKLKVVAADEVGSSSSPGNAGTAAGSGDKGNVSQDGAVEDLGENGNQEQLQFNNFQDRIDYAVQHALINQSGVLVNTLTNMVKTVVDGTIAEHQTTGPVYLPGGVFPNFWPSVTGNQQGVTSVPPIQPMASVSTTAPTASSSAPRQMVNAESALILLVSFGD

SEQ ID NO: 185048 - protein, 67 aa, Oryza sativa
  Clone ID: PAT_MRT4530_81983C.1.pep
FPATGNPKIFPGNPTEGGFTNDPDSPKKFLEGPFLGQNNKGQSGKGKHYLFGRIETAFPGRGADPFP

SEQ ID NO: 185049 - protein, 558 aa, Oryza sativa
  Clone ID: PAT_MRT4530_81984C.1.pep
MASSSPLLLLLLLLPLAAATATASLPPLPLSTASRWVVGADGRRVKLACANWASHLEPVAAEGLSRRGLGDIAARVAAMGLNCVRLTWPTYLATNATLANLPLRASLERLGMPESVAGVRVNNPGLLDLPLIDVFQEKPMEVVSALAKNNIMVILDNQMTTPGWCCSENDGNGFFGDKYFGPEEWLKGLSAMATMFRNTKNVVGMSLRNELRGSKNVSLWFRYMQLGAEVVHAANPGVLVILSGLNFDNTLDFLVPNQIQLTFTGKLVFEQHWYGFSDDGNWGSQNQNDACGMVVDSIKKKGLFLLQQGWPLFFSEFGFDMSGTHVADNRYLTCFLTVAAEMDLDWAIWALQGSYYIREGTLAYDESYGLLSWDWCTARNPSFIKRINALQSPFQGPGLPNSQQPYNVIFHPLSGLCVLVKSSEALELGPCDKSNAWNYTKGYELILKQTGQCLQAKSVGENAKLGTSCSKSSSKWKLLSNSGMHVSTELTNNGTRVCLEASPDGNITTNQCKCLTVDPNCNPESQWFKIILSSKHIPGGTSILQLPSHGPWSPTSSS

SEQ ID NO: 185050 - protein, 156 aa, Oryza sativa
  Clone ID: PAT_MRT4530_81985C.1.pep
MEAKISSLCTALSSVLNHADDSSRALSDALSRRPIHLESAARGFLQGLERRSEAAGADLSRLESMAFGTVSFEELLGHCGEALSMFSRHADAIESRLVAFGYVPPEEEVSEDVQEDWDDEKLPGVAGNGCFGGTSSVLRSSREMVDDDDALFENSM

SEQ ID NO: 185051 - protein, 235 aa, Oryza sativa
  Clone ID: PAT_MRT4530_81986C.1.pep
MGKILLVYCIKHDDSILVDLAYALTREGVSAFRFDFAGNGESEGQFQYGNYRREADDLHSVVSYFTEQEYNIIGLVGHSKGGNAVLLYASMNHDIPVIVNISGRFALERGIDGRLGKNFMQRIKKDGYIDVRNRKGEFEYQVTEESLKDRLSTDTLLSSRSISKCCRVLTIHGSKDEIVPVEDALMFAANIPNHELHIIAEANHRYTGHEKELKAFVLDFIKSQPNFSSSLRPKL

SEQ ID NO: 185052 - protein, 79 aa, Oryza sativa
  Clone ID: PAT_MRT4530_81987C.1.pep
MSAFSKPNAPGMHRIRPVSGVRQERRRTAPPRRPVVAAARRSFATRPCEGRDASGTVRGPLELGGGGGTGRRRRVAASG

SEQ ID NO: 185053 - protein, 85 aa, Oryza sativa
  Clone ID: PAT_MRT4530_81988C.1.pep
SSLHGTDSLLSIVQMPKGIPVATVAIGNAENAGLLAVRMLASRDPELGDKATEYQHDLRDMVLEKAKRLEELGWEEYTELYLKKH

SEQ ID NO: 185054 - protein, 680 aa, Oryza sativa
  Clone ID: PAT_MRT4530_81989C.1.pep
MSTSATRKGLPPWQSRWLQPSTAQSTVALHGVNIQCPPGSMHSRLLSAPSHASAASSSPLPFAAAHPCRASWTPRPTSPLPPLSLLRATASMHPSPPPEGHSDQPVHGVTNTVVGVLGGGQLGKMLCQAASQMGVRMAILDPLEDCPASSVCHEHVVGSFNDGATVSEFAKRCGVLTVEIEHVDAVTLEKLEKQGIDCEPKASTIMIIQDKYRQKTHFSKFGIPLPDFVEVDTLSSIEKAGEMFGYPLMVKSKRLAYDGRGNAVAHDKKELSSVVASLGGFEHGLYVERWTSFVKELSVIVARSRDGSTVCYPVVETIHKDNICHVVEAPAEVPDKIKKLATNVAEKAIKSLEGAGVFAVELFLTQDNQVLLNEVAPRPHNSGHHTIESCYTSQYEQHLRAILGLPLGDPSMKAPASIMYNILGEDEGEAGFTQAHQLIERALDISGASVHWYAKPEIRKQRKMGHITIVGPSKYSVKARLDKLLQRDAYDPKKVKPRAAIIMGSDSDLPVMKDAAVVLKKFNIPFELTIVSAHRTPERMYHYALSTKERGLEVIIAGMVASLTSVPVIGVPIMTSSLHGTDSLLSIVQMPKGIPVATVAIGNAENAGLLAVRMLASRDPELGDKYDFFFSAIVLQILKFDTSQQATEYQHDLRDMVLEKAKRLEELGWEEYTELYLKKH

SEQ ID NO: 185055 - protein, 269 aa, Oryza sativa
  Clone ID: PAT_MRT4530_8198C.1.pep
MSRVVELHVMYLHYEPHRFAVFNFYVLIFTIEYDCPALGNPIHGSKVSSPQYRVNTKVNFRCNHGYEMVGSEERICTFSGEWTGEMPRCMGRDEFDELSRVINGLGKTFDEIVIDGGSWVGQNDTSSNSGVRRKRTINLSSGMDIYFAFDASRSVGIENFKIGKKFAKLLVRKLQVTSSPGGTRVGAVSYSSQASRLFNVNDYSSSEAVVNAIERHVNYKNKGTNLPAALNEIKEMITGETLEPYGNSSRKRIIFIITDGLHGFDLQQD

SEQ ID NO: 185056 - protein, 51 aa, Oryza sativa
  Clone ID: PAT_MRT4530_81990C.1.pep
SAANVGPTRSHLHLTTTSTQNRVLISAHSCRGKNLSNINEKITRVMFSKID

SEQ ID NO: 185057 - protein, 48 aa, Oryza sativa
  unsure (1)..(48): unsure at all Xaa locations
  Clone ID: PAT_MRT4530_81991C.1.pep
TFIKYRSVPVTLLSQIPAANKRLLKCFHCPSGFPDXLFFNXSLFPKKK

SEQ ID NO: 185058 - protein, 115 aa, Oryza sativa
  Clone ID: PAT_MRT4530_81992C.1.pep
SASSMKLDVVVGADPVQETPFEDPVHVDAGVLHRVQLEHDVRHVRLLVLALRSHQDPLLRLVLLPLPPQRTASDRQRKEEPCTALHLRLFAPTRVRCDTGLRRNKAPHRSSIASL

SEQ ID NO: 185059 - protein, 657 aa, Oryza sativa
  Clone ID: PAT_MRT4530_81993C.1.pep
MRRFCHVPLCRRVAAASHGGHPHQPPLPPPEWIEPYTDLSDPRPYAASSASSSPTPSPWLARVVSLILRSPPATLAADLRAFCATFLLRLSPAFVAAALRSPHLLPNPLPSLHFYRSLPSAVAADLLSHPHHLVSCYVSLLRSFAHSSSSSSREATPDAAAAAAHARQLVAELRAHGDTALRHLTPSSSASLIRSLAALGLAEELLWAWKAMRLAGVEPSRLIYNCLLDGLVNAGLLDTAVNVFDAMSTEDQVRPDVVSYNILIKGYCRAGRAHDAMARLSEMQEQAKLTPDKVTYLTLMQCHYSEGTFPVCIGLFQEMEERGMGNDIPQHAYVLVIGALCKDGKPFEGMAVFERMLKRGCAANAAIYTALIDSMGKFGREKEAMALFERMKDSGLKLDSVTYGVIVNCLCRFGKLDEAVACFRSCQEKGIAVNAIFYTSLIDGFGKAGMVDQSKELFEEMIAKGFVPDSYCYNVLIDGLAKSGRMDDACALYKRMEDDGCDQTVYTYTILIDGLFKEHKNEEALKFWDAMIDKGITPTAAAFRTLASGLCLSGKFSRACRILDELAPMGVIPETAHEDMINVLCKAGRFKQACKLADGIVQKGREIPGRVRTMMINALRKAGNTDLAVKLVHSKIGIGYERSGSIKRRVKFQTLFQ

SEQ ID NO: 185060 - protein, 88 aa, Oryza sativa
  Clone ID: PAT_MRT4530_81994C.1.pep
MRLQPLRISMRPERRPRHHHSRDEQGLDLGGITSSSFLEREGKALMPPSSWSADFADVPLEQRQGGRRKKEKRRRGEMWPITVAVEKK

SEQ ID NO: 185061 - protein, 91 aa, Oryza sativa
  Clone ID: PAT_MRT4530_81995C.1.pep
TDCRKKTKAYPSLPLDSWNDSYPSKFSRKNQQVLRCHLTRAQSTDIQSTFSSAVIISGYRIIKLFVPFFSFVLLIMLKMHASNEWDNLVES

SEQ ID NO: 185062 - protein, 84 aa, Oryza sativa
  Clone ID: PAT_MRT4530_81996C.1.pep
TSASCSPGGLLLLSAVVHHHHHVWPDGELLLLLLPATAPTMPRDYDGAVATLFPSAQSSCDHPQLDLSLSIRIGPTPPPSLYTL

SEQ ID NO: 185063 - protein, 39 aa, Oryza sativa
  Clone ID: PAT_MRT4530_81997C.1.pep
MSCRSWSRWCDTVSGRCRCGAGLTVVQRVARRGVHRMGM

SEQ ID NO: 185064 - protein, 75 aa, Oryza sativa
  Clone ID: PAT_MRT4530_81998C.1.pep
MASVAPSNSNALDGSDRSGPNRFSSFNRKTVEKPDIAGPSTIKTGANEASEAGIGGVPRRAFGQTRQNQKRGQQA

SEQ ID NO: 185065 - protein, 78 aa, Oryza sativa
  Clone ID: PAT_MRT4530_81999C.1.pep
MVAMLALLSTGLSLSLSRADLVAVPALGWVIPSVVVALLRPLICDADTIISAVRATHVPDQTKLINAIMEAGGDHVRR

SEQ ID NO: 185066 - protein, 431 aa, Oryza sativa
  unsure (1)..(431): unsure at all Xaa locations
  Clone ID: PAT_MRT4530_8199C.1.pep
MERLPILPXPLVCFRLPESPANGYVRMRGKSARSIAVYRCNPGFELHGQRTVVCNEATGSWQGDVPRCFRPPSCPDPNEPSGMLALVLDENSGIKHDDLYTERTVFNYTCQTGYHPTGDVTITCQNGSWEADADVPECNKIICAPPTLEPIENGTHNIENRTYNVGERPSKKPLRCSMWDPTEDCTTRMSGRTAYLNADGLVILTTGPGFNKCLVARCPHPGSRHLDNGEISFSPRNGQGATNSWPVGAVMTLRCRSHLELLGSSERVCQPDGHWNGTLTSCHNEEYDCPALGNPIHGSKVGSPQYRVNTKVNFRCNHGYEMVGSEERMCTFSEEWTGEMPRCMGRDEFDELSRVMNGLGKTFDEIVIDGGSWVGRNDTSSNSGLRRKRTIKLSDGMDIYFAFDASNSVGLENFEIGKTFAKQLVGKCYVF

SEQ ID NO: 185067 - protein, 94 aa, Oryza sativa
  Clone ID: PAT_MRT4530_819C.1.pep
PPAKNSPKLTPSALFLSVFHQDPDIRITGYKVKSGPFAKKWCPMEICSKLDIITPVSDPQMEMPKLGMEARHYCCLAITKAFSSSHFFHEPNPF

SEQ ID NO: 185068 - protein, 141 aa, Oryza sativa
  Clone ID: PAT_MRT4530_81C.1.pep
ATRKEYACKSIAKQKLVIDDDVEFIRREIRIMHHLAGHPNIISIRGSYEDAMAVHIVMELCTGGELFDRIISKGYYTERQAAEVARIIVSVIESCHSLGVMHRDLKPENFLFVSNEEDAPLKLIDFGLSIFFGQVKSINQL

SEQ ID NO: 185069 - protein, 138 aa, Oryza sativa
  Clone ID: PAT_MRT4530_82000C.1.pep
VAPLTVPLTPPPPAPPAEEVTSRRHPRRSPHAVHREEKRHDPVAAVAASSRPPSATSRRRPRPPVLPPPPAPYVLPLPQAVVALPRPPSLHRRRLPPAGPRPSATARTVAGSPRPPTATSRRPHLPALPPAGYGVEDL

SEQ ID NO: 185070 - protein, 46 aa, Oryza sativa
  Clone ID: PAT_MRT4530_82001C.1.pep
RLYPCTTKKVQAYLSCTLIEVYFFHQVLDSFTFRLIWIYKNKIIPT

SEQ ID NO: 185071 - protein, 555 aa, Oryza sativa
  Clone ID: PAT_MRT4530_82002C.1.pep
MADSDRFSDLLWMPHGQHKVSKISENPSSSMNIRHHRVGIPYHPLCRSALQNIGFYQISKMKSIKIDKYLISAFVERWRPKTNSFHLPIGEMTITLQNISCLWGLPIKGKPIVGQYDGNWSDMIERYLGIPPEDQEMKKKKRKKEDDTFALSYARYSITLSKLRDRFRVMPNSVPAMYLQFMDNLATHTEYNWGGAVLAMLYRQLNNGAEKARSEIFGPLVLLQFRSWSRLPLGRPKNIIQRTDEVEEQEEEESDGYPIFGAKWCSYHEFPTPHNCEFHYPERVMRQFGRKQLIPPPPPHGEVELRKLRKVKHVGGKVCDWNKFHAKYVQQYDGIEATIVQEDCPFDAASLKEYRCWFQANGMFAVFFDSQCLGGLENSIPYPRDNMEWTGYMPSGPPLARIGLREIKNAAWGIKCCITNGCKKIGKSILITCQGNIRDLNLEYKLQNMLSEAGLPIKVEEIQSDDDGTTACTPSPPNESSVDVFDEWMISGKGFSRYIDLGVETTNRVPTTQDTSQVTQCLENEDLVASREASAPLHPGERTSSHSESSIQVVD

SEQ ID NO: 185072 - protein, 148 aa, Oryza sativa
  unsure (1)..(148): unsure at all Xaa locations
  Clone ID: PAT_MRT4530_82003C.1.pep
TCAKQIIVHMCCLAKPATKMPFSVIITCSTHTTTCCIPWHSAHMPSVLPFNHLHIXAFLGLVPQAQPCIDSILQQCXLETLSSACCVLCYPSHSCVPSHCCLQPLCXCSVHALRSNSCTXGSGCTXIXISXVPSHPLTHFGFAKCLLP

SEQ ID NO: 185073 - protein, 265 aa, Oryza sativa
  unsure (1)..(265): unsure at all Xaa locations
  Clone ID: PAT_MRT4530_82004C.1.pep
PYHPLCRSALQNIGFYQIAKMRSIKIDKYLISALVECXRPETNSFHLLIGEMTITLQDISCLWGLPISGKLIVGQSDGNWSDMIERYLGIPPEDQEMKKKNITLSKLRDRFRAMPSNPTQREIDWHSRALVLEILGSIIFTDSSGDSVPAMYLQFMDNLATRTEYNWGGAVLAMLYRQLNNGAEKARSEIFGPLVLLQLWSWSRLPLGRPKNIIQKTDEVEEQEKKESDGYPIFGAKWCSYHEFPNTGTQXYRNQIDLIREGTVQ

SEQ ID NO: 185074 - protein, 558 aa, Oryza sativa
  Clone ID: PAT_MRT4530_82005C.1.pep
MATRKGTVQQGNDRSSDVDANWIDVQDMIERYLGIPPEDQEIKKKKRKKEDDTFALSYSRYSITLSKLRDHFRVMPSNPTQREIDWHSRALVLEILGSIIFTDSSGDSVPAMYLQFMDNLATRTEYNWGGAVLAMLYRQLNNGAEKARSKIFGPLVLLQLWSWSRLPLGRPKNIIQKTDEVEEQEEEESDGYPIFGAKWCSYHEFPTPHNCGTQYYRNQIDLIREGTVQWQPYEGLIEQMPIQIQNDRTWWFARLPLIHFWVVEFHYPERVMRQFGRKQLIPPSPPHGEVELRKLRKVKHVGGKVCDWNKFHAKYVQQYDGIEATIVQEDCPFDVASLKEYRCWFQANGMFTMFFDSQCLGGLENSIPYPRDNMEWTGYMPSGPPLARIGLREIKNAAWGIKCCITNGCKKIGKSILITCQGNIRDLNLEYKLQNMLSEAGLPIKVEEIPSDDDGTTACTPSPPNESSVDIFDEWMISGKCFSRYIDLGVETTNRVPTTQDASQVTQCLENEDLVASREASAPLHPGERTSSHSESSIQVVDWTSTERTPMFKKNTPS

SEQ ID NO: 185075 - protein, 788 aa, Oryza sativa
  Clone ID: PAT_MRT4530_82006C.1.pep
MAVMLVPIPLLLLHQHHNHEHEHPSPVAPQPTMASYYTLLLALLCPLLLLLIKLCRAKTRDDELFDKLPSPPGRLPVIGHLHLIGSLPYVSFRELAIKHGPDLMLLRLGTVPTLVVSSARAAQAILRTNDHVFASRTYSAVTDILFYGSSDVAFSPYGEYWRQVKKIATTHLLTNKKVRSYSRARQQEANSLLLGGFNLEDYFPNLARVTTVRRLLCAKAHNVNKRWDQLLDKLIDDHATKRSSSVLDLDNEESDFIDVLLSIQHEYGLTRDNVKAILVIMFEGGTDTAYIELEYAMAELIRKPQLMAKLQAEVRRPLLVPYLSIAECDIEGYTIPSGTRVFVNAWALSRDPSFWENAEEFIPESLMSTMTRMSYSLLLPILCPLILLLLFRCYAYATRSGGMLDKLPSPPGRLPLIGHMHLIGFFPHMSLRDLATDLMLLHLGTVPTLVVSSSRMAQGATDVAFSPYGDYWRQIKKIVTTNLLTIKKIRSYSQTRQQEVRLVMAKIVEEAATHMAIDLTELLSCYSNNMINSSLLGGFNIEDYFPSLARLPVRRLLYAKAYDVKKRWDQLLDKLIDDHSSKHRSSLLDNNDVESDFIDAEVRGVVSKGQDIVTEEHLGRMPYLKAVIKETLRLHPAAPLLAPHVSVVDCNVEGYTIPSGTRVIVNAWAIARDPSYWENAEEFMPERFLSNTMADYNGNNFNFLPFRTGRRICPGINFAITTIEIMLASLPLPFTAAAKHRRGFEVRGGESEAAGRAEAREKSTTGKPAAASLTPTVVDGDAVVSISI

SEQ ID NO: 185076 - protein, 89 aa, Oryza sativa
  Clone ID: PAT_MRT4530_82007C.1.pep
MATPGDGKDQEGQGTKQLDDKSMEDENPVADHPKKQMRSMQRYYHKGSFFQQDADNATQTAGAEGEGEGDEGEELVANMWGPRGSYSPH

SEQ ID NO: 185077 - protein, 358 aa, Oryza sativa
  Clone ID: PAT_MRT4530_82008C.1.pep
MASYYTLLLALLCPLLLLLIKLCRAKTRDDELFDKLPSPPGRLPVIGHLHLIGSLPYVSFRELAIKHGPDLMLLRLGTVPTLVVSSARAAQAILRTNDHVFASRTYSAVTDILFYGSSDVAFSPYGEYWRQVKKIATTHLLTNKKVRSYSRARQQEVRLVMARINEAAVARTTVDLSELLNWFTNDIVCHAVSGKFFREEGQNQMFWELIQANSLLLGGFNLEDYFPNLARVTTVRRLLCAKAHNVNKRWDQLLDKLIDDHATKRSSSVLDLDNEESDFIDVLLSIQHEYGLTRDNVKAILVIMFEGGTDTAYIELEYAMAELIRKPQLMAKLQAEVRSVVPRGQEIVTEEQLGRMPY

SEQ ID NO: 185078 - protein, 323 aa, Oryza sativa
  Clone ID: PAT_MRT4530_82009C.1.pep
MAMITLPVAAHAPSPWLPPSILRLRSTSTTTTIPAAAARSSAPHPLPDELHLVADIRSPHNHIRVADVSRTASGAGHPLAGARLLLLDAPGNIHSLSFPRSPCPLTSTYLDVFATLPPLLPASASSLAVLGFGAGSAARAVLHFFPDISVHGWEIDPAVVSASRDFFGLAELEAEHAARLSIHVGDALEASADAVAVPGGFGGVLVDLFAGGSVLPELQEMDTWRRIGRRMVAPGGRVMVNCGGPCVEAEEEGRGGEAVKDATLRALTAAFGHGMVSVMDMDESWVAMTGPAVSSAPEEAAAWKAKLPPELRRYVDMWRPCLL

SEQ ID NO: 185079 - protein, 104 aa, Oryza sativa
  Clone ID: PAT_MRT4530_8200C.1.pep
CAIDLGMWVSILDSLSSFAWPTQIEPTFVQHGYLIFFSFSSPRCVLPDDMPKLTPAMSSHLLSSCLHAWILTTSPVLTFLLLLDGSMSHHPSCSLGPYSFANLP

SEQ ID NO: 185080 - protein, 54 aa, Oryza sativa
  Clone ID: PAT_MRT4530_82010C.1.pep
PRDVFLLGSTPCFGLILVAWVSGFDVFGLYKKKRLFSVVIALPICYQGTVSCLY

SEQ ID NO: 185081 - protein, 64 aa, Oryza sativa
  Clone ID: PAT_MRT4530_82011C.1.pep
MAVRARARGDGASRLRGGWAVGGKRDRRISVVGSYARRQLGQSGPLICDRSENSTCDLYKDRAL

SEQ ID NO: 185082 - protein, 56 aa, Oryza sativa
  Clone ID: PAT_MRT4530_82012C.1.pep
LRWWRTWRWQRLWQWLRRWQRHWRIKDGWLPTHAHVPPSCRLLCAISIAAVARGSL

SEQ ID NO: 185083 - protein, 1094 aa, Oryza sativa
  Clone ID: PAT_MRT4530_82013C.1.pep
MDISRANEGYTSCGPVVEMSWHRAGVLLLGAQSYLPVPGVPAVGGIGSVLLSMARMGWKLCHVFRLYTVVEKFSSEDSESLSYLTQKVGLHEQRFAEARKNSRKINHVYPYMYGSDGEDDDSEIAAAEWVRSKKVIPYQWVKNSGKEERYDFDITKADKIFDLLVREKQIQLPAGHTIPSAEELGKKRYCKWHNSGSHTTNDCKVFRQQIQTDIEGGKIKFDDSKRPMKVDGNPFPVNMVHTAGQSADSVRAKGFQVNSAKIINKYQRKYEKQQEKHYEEHDDGFDPHWGCEFFRFCWNEGMRLPSIENYLGCNDIIESSSQSYNRSNRLRQERVSVRQRLGPVNQGRGQEDDVVRTNQWCPSGIFMKNQKRRVQRLRNRERLQEVEQEINHRLKKAKPRQELRVKNQIPIADDVVADEAKRLAKGKSVVVAPINMTRWKRNRLSWLSPEQAVFEKPEGTENRHLKPLYINGYVNGKPMPKMMVDGGAAVNLMPYATFKKLGRNAENLIKTNMVLKDFGGNPSETKGVLNVELTVGSKTIPTTFFVIDGKGSYSLLLGRDWIHANCCIPSTMHQCLIQWQGNKIEIVPADRWRTQAIILRASWRIRTSTQRIISPRGACFEFAYTIKPYATNNKAEYEAVLKGLQLLKEVEADAVEIMGDSLLVIIYNEKCQKLMKEFRLVTLKHVSREQNIEVYDLAQGASGYKPMIKDVQIEVAAMTADDWRYDVHQYLQNPSQSAYRKLRYKALKYTLLDDELYYRTIDGVLLKCLSAYQAKVAIGEVHEGICGTHQSAHKMKWLLRRAGYFWPTMLEDCFRYYKGCQDCQKFGAIQRAPASAMNPIIKPWPFRGWGIDMIGMINPPSSKGHKFILVATDYFIKWVEAIPLKKADSGDAIQFVQEHIIYRFGTPQTITIDQGSIFVSDKFVQFADSMGIKLLNSSPYYAQANGQAEASNKSLIKLIKRKISDYPRQWHTRLAEALWSYRMACHGSIQVPPYKLVYGHEAVLPWEVRIGSRRTELQSDLTANEYYNLMTDEREDLVQSRLRALAKVTRDKERVARHYNKKVVPKTFLEGELVWKLILPIGTRDSKFGKWSPN

SEQ ID NO: 185084 - protein, 158 aa, Oryza sativa
  Clone ID: PAT_MRT4530_82014C.1.pep
RPGIKKKRRKEAQKILQEKERKKRIEERKRRKQEKEIALYGRVLSSDNADGEDVENDGDEMETDDLPEPEVKTYEDGGTKITVTTSEITPEDDDEDLGPKRITPASTGYANKSVSKKSASLGVKKKPSKRTFRNKSKSKKGDQKRGAAKGKRKNKGRK

SEQ ID NO: 185085 - protein, 69 aa, Oryza sativa
  Clone ID: PAT_MRT4530_82015C.1.pep
WKLDACGAGTLYTGRPTRSLTLVRPANDHCLSSCPCWSYPSTICLLTCVTPRLNGPAVHIPLSLTCHAF

SEQ ID NO: 185086 - protein, 298 aa, Oryza sativa
  unsure (1)..(298): unsure at all Xaa locations
  Clone ID: PAT_MRT4530_82016C.1.pep
MAFLNALCPPPPPVAVPPPPXPPRRKPSSPPPPRCALTRPPPPCRPMPHPAPRSRTTPPSKPRPPRAHPHRGAPAFVPTFDGRLHPLLQVERYTRSRSSVCXPPPTPPRTPLPKLKPKANQRQIRSELVAASSRSPPTSRTXLEPPNAAPPRPPPPPPTTTRPSRAAHTPLSPPRARPRPHFPPPSQPTASSSSSPSPASSSPRPPSPSPSPPAPRPCSRRPSPPWPKPPPRSPSAAAAPRTPSAPSSPPPRGTTPPRRRGGRGRRCSPSSGCTRRSDPPPAAPRSGPPGSRPSPKAS

SEQ ID NO: 185087 - protein, 66 aa, Oryza sativa
  Clone ID: PAT_MRT4530_82017C.1.pep
IQIRTRAGLIISKRMGSMHTRTDQRLTTPYFIHLQLQATLSNGNRTLTTIHLLQCVSTPSIATPRR

SEQ ID NO: 185088 - protein, 256 aa, Oryza sativa
  unsure (1)..(256): unsure at all Xaa locations
  Clone ID: PAT_MRT4530_82018C.1.pep
MEEHDHQYATPPSPSSSSFRSFSAGTTTTTTSRDDNSSLMLAAAAASCHHQTTEVSSQILLPRPXKQHGGAAAAMAPPPPPPRSGRTPGTXGPKKHLLRRPGAATTATGGGGGQRAFKKAISVLSKIHAARLAQYYQIMEMAARASPAATAGGGGGENQQLQLQHVLSERKRREKLNDSFKALRDVLPPATKKDKASVLMRAKDYVNVLKARIAELEEKNRKLSESQQLQAADPISVCTPTTASTFSLSLPSAAEE

SEQ ID NO: 185089 - protein, 98 aa, Oryza sativa
  Clone ID: PAT_MRT4530_82019C.1.pep
SPRPRAPPRRKPSSPPPPRCALTRPPPPCRPMPHPAPRSRTTPPSKPRPPRAHPHRGAPAFVPTFDGRLHPLLQVERYTRSRSSVCDPRLLLLGRHCG

SEQ ID NO: 185090 - protein, 298 aa, Oryza sativa
  Clone ID: PAT_MRT4530_8201C.1.pep
MGNHFFFRLSSPLVCFRPPESPVNGYVRMRGKSARSIAVYRCNPGFELHGQRTVVCNETTGSWQGDAPRCFRPLSCPNPNEPSGMLALVLDENSGIKRGDLYTERTVFNYTCQTGYHPTGDVTITCQNGTWEADADVPECNRIICAPPILEPIENGTHNIENRTYHVGEMVQYECNEGYLVDGISWQVCQSHGGPNGIWSDNVPTCKVARCPHPGSRHLDNDEISFSPRNGQGATNSWPVGTVMTLRCRSHLELLGSSERVCQPDGHWNGTLTSCHSEDYQVVASLSLVYVELFSWVY

SEQ ID NO: 185091 - protein, 123 aa, Oryza sativa
  Clone ID: PAT_MRT4530_82020C.1.pep
YSPPRSPKWWAPSSISSHPPPLSSALRRRRLSSWRWQPPWWLPSWRAPPASSTSAPSGTPRTGRCPCPLSSALAFPSSLSPRRWGRSSRRIPMPTPAPSQSSPLSSISSLPPSTSTPLPPSPR

SEQ ID NO: 185092 - protein, 169 aa, Oryza sativa
  unsure (1)..(169): unsure at all Xaa locations
  Clone ID: PAT_MRT4530_82021C.1.pep
MKTTRITRIVSILVSLVLLGQRDTYGYKYKAPXEERGRSTPETINTHHNLRNNRXTEATTYKPTHAKTRRQISTSEIGTASPLRCFXVLSGETKALSLISPGTNLRRKATLLSTTSQTFRLPCRQQLDTLPQILYCLTYILVPTIPIPCKYRNRDIKRRQLFQFTLCSF

SEQ ID NO: 185093 - protein, 75 aa, Oryza sativa
  Clone ID: PAT_MRT4530_82022C.1.pep
AVMFYCNPDVINRYTPSVHSNRSNNLLMSVYRPYKASYFYIIYLYKSLAPSFMNLPPIIPHETFFIYPQYYFSHT

SEQ ID NO: 185094 - protein, 60 aa, Oryza sativa
  Clone ID: PAT_MRT4530_82023C.1.pep
GAPPLGGFPVRDMGQPGAVGVFKNWEKKAPPGARVPRAPPKKKWPSFKGEFWARPWPPLH

SEQ ID NO: 185095 - protein, 42 aa, Oryza sativa
  Clone ID: PAT_MRT4530_82024C.1.pep
HLQQEMSSQRINMNIEAHAVYVQVKAGQTQTITVTTGLTSNS

SEQ ID NO: 185096 - protein, 828 aa, Oryza sativa
  Clone ID: PAT_MRT4530_82025C.1.pep
MAEEKESFEGQWAPSDVTEENLKEMVAHGVLPAKEIIGWRPACGEAFPTPDTHETVVFSHFFYGGFALPTSKFFRGILSFYGISLHHLNPNSIVHIANFIHVCEAFLGIKPHFALFRRIFFLKPQPNKSKPCVVGGAGFQLRGTLSQKYFSMPFKTSNKGWHANWFYIQNPEPALPEYSCLPPVYQDTWNSLPIGDEAAQALELMDRMLKLKEQGLQGEQITRHFIKCRLAPIKERSRTAFEFDGKHDPNHEESDSLDFKIMKERMYKNFSNAIVVSYSHQLPVVPYNAFNPPPQEYVLMKSNPPITQRRSPRQHTVQGGRGPTIRSDPQPQTSNPTGQTGSRKRKLVLNDDEGDDGNKSGDKGSPNKLPKHTTPRKKLASRPRPKIRTTSRYKPLGTISLRHASLMEIILNIERTLCRKPSDIDPTGKDPDPTVTEPSSSKDSEPTAESQPTGAHTSGDKANPSDHPPTENQSAATETTTTQEPPTGNQSDVGPDQETPEVEAQTTTSQGPEAGNDSMIGSPDKEQGSPHAQLGTSSRPPGDDEEEIPRIKAADDSRPPILLKWWDENSQAAGIVINRQKEDEEVCQLKKALGEATRIVNRIHLRNEAKTATLEKLVPHLGTLEAVRDQLHEAKELAKKTEKELRDRIAQLQDSNFELSGSSKAQAARMAQMEKQIEALERDKVELAAQRDSALKEVEDRKIKSQAQFDVLVGKIKRLEGARDEVANVAIPLVQAMFLNNSGPSNIKKAGSMGASTALVMTKSLYPRIEIDAIDGFADGTSVEAALDLISNAQNAADKIASDVVDQFRNTDLQPSSNNSDDERTDSD

SEQ ID NO: 185097 - protein, 99 aa, Oryza sativa
  Clone ID: PAT_MRT4530_82026C.1.pep
MAEEKESFEGQWAPSNVTEENLKEMVAHGVLPAKEIIGCRPACVGGAGFQLRGTLSQKYFSMPFKTSNKGWHANWFYVQNPEPALPEYSCLPPMYHKLG

SEQ ID NO: 185098 - protein, 814 aa, Oryza sativa
  Clone ID: PAT_MRT4530_82027C.1.pep
MAEEKESFEGQWAPSDVTEENLKEMVAHGVLPAKEIIGWRPACGEAFPTPDTHEAVVFSHFFYGGFALPTSKFFRGILSFYGISLHHLNPNSIVHIANFVHVCEAFLGIKPHFALFRRIFFLKPQPNKSKPCVVGGAGFQLRGTLSQKYFSMPFKTSNKGWHANWFYIQNPEPALPEYSCLPPVYQDTWNSLPIGDEAAQALELMDRMLKLKEQGLQGEQITRHFIKCRLAPIKERSRTVFEFDGKHDPNREEPDSLDFKIMKERMCKIFSNAIVVSYSHQLPVVPYNAFNPPPQEYVLMKSDPPITQRRSPRQHTVQGGGGPTIRSDPQPQISNPTGQTGSRKRKLVLNDDEGDDGNKSGDKGSPNKLPKHTTPRKKLASRPRPKIRTSSRKPSDIDPTGKDPDPTVTEPSSSKDSEPTAESQPTGAHTSGDKANPSDQPPTGNQSAATETTTTQEPPIGNQSDVGPDQETPEVEAQTTTSQGPEAGNDSMIGSPDKEQGSPHAQLGTSSRPPGDDEEEIPRIKAADDSRPPILLKWWDENSQAAGIVINRQKEDEEVCQLKKALGEATRIVNAKTATLEKLVPHLGTLEAVRDQLHEAKELAKKTEKELRDRIAQLQDSNFELSGSSKAQAARMAQMEKQIEALERDKVELAAQRNSALKEVEDRKIKSQAQFDVLVGKIKRLEGARDEVANVATPLVQAMFLNNSGPSALDATEIFDKLRVAPDVYFKNIKKAGSMGASTALAMTKSLYPRIEIDAIDGFTDGTSVEAALDLISNAQNAADKIASDVVDQFRNTDLQPSSNNSDDERIDSD

SEQ ID NO: 185099 - protein, 812 aa, Oryza sativa
  Clone ID: PAT_MRT4530_82028C.1.pep
MAEERESFESQWAPSDVTEENLKEMVAHGVLTAKEIIGWRPACGGFALPTSKFFRGILNFYGISLHHLNPNSIVHIANFVHVCEAFLGIRPHFALFRRIFFLKPQPNKNKPCVVGGAGFQLRGTLSQKYFSMPFKTSNKGWHANWFYIQNPEPALPEYSCLPPVYQDTWNSLPTGDEAAQALELMERMLKLKEQGLQGEQITRHFIKCRLAPIKERSRTAFEFDGKHDPNREDPDSLDFKIMKERMYKIFSNAIVVSYSHQLPVVPYNAFNPPPQEYVLMKSDPPIAQRRSPRQHTTQGSGGPTIRSDPQPQTSKPAGQTGPRKRKLVLNDDEGDDSNKSGDKGTPNKLPKHTMPRKKLAGRQMPKIRTSSRKPSDIDPTGKDPDPAVTEPNLSKDAEPTAENQPTAESQPTAESQPSGPQASDDKANPSDQPPTGNQSAATETATTREPPTGNQSDVDLNQEIPEAEAQTTSQGPEVGNDSVIGSPDKEQGSSHAQPGTSSGPLGGDEEEILRIKAANDSRPPILLKWWDENSQVSGIVINRQKEDEEVCQLKKVLGEATRIVNRIHLRNEAKTATLEKLVPHLGTLEAVREQLHEAKEHAKKTEKELRERIAQLQDSNFELSGSSKAQATRMAQMEKQIEVLKRDKVELAAERDSALKEVEDRKIKSQAQFDVLVGKIKKLEGARDEVANVATPLVQAMFLNNSGPSALDATEIFDKLRVAPDVYFKNIKKAGSMGASMALAMTKSLYPRIEIDTIDGFADGTSEEAALDLISNAQSAADKIVSDVVEQFRNNDLQPSNNNSDDERTDSD

SEQ ID NO: 185100 - protein, 188 aa, Oryza sativa
  Clone ID: PAT_MRT4530_82029C.1.pep
MASLTGARRGWVSGGEPQRGRGGRATHISCQLCHITHSIRLRRKPSDIDPTGKDLDPAVTEPSSSKDSEPTAESQPTGAHTSGDKANPSDQPPTGNQSAATETTTTQEPPTGNQSDRIHLRNEAKTATLEKLVPHLGTLEAVRDQLHEAKELAKKTEKELRDRIAQLQDSNFELSGSSKVDFYHKCVL

SEQ ID NO: 185101 - protein, 96 aa, Oryza sativa
  unsure (1)..(96): unsure at all Xaa locations
  Clone ID: PAT_MRT4530_8202C.1.pep
QVKNSTSRVGSTIHVLVNNDQKRFVRHGGVNLGLKLSYEYAEAVSALHDXDRCTGSAPVQAPGSTGGRDERRRARLRHLKKGWDLTSAAFRTPPRR

SEQ ID NO: 185102 - protein, 746 aa, Oryza sativa
  unsure (1)..(746): unsure at all Xaa locations
  Clone ID: PAT_MRT4530_82030C.1.pep
MAEEKESFEGQWAPSDVTEENLKEMVAHGVLPAKEIIGWRPACGEAFPTPDTHEVVVFSHFFYGGFALPTSKFFRGILSFYGISLHHLNPNSIVHIANFVHVCEAFLGIKPHFALFRRIFFLKPQPNKSKPCVVGGAGFQLRGTLSQKYFSMPFKTSNKGWHANWFYIQNPEPALPEYSCLPPVYQDTWNSLPIGDEAAQALELMDRMLKLKEQGLQGEQITRHFIKCRLAPIKERSRTAFEFDGKHDPNREEPDSLDFKIMKERMYKIFSNAIVVSYSHQLPVVPYNAFNPPPQEYVLMKSDPPITQRRSPRQHTVQGGGGPTIRSDPQPQTSNPTGQTGSRKRKLVLNDDEGDDGNKSGNKGLTNKLPKHTTPRKXLASRPMPKIRTSSXGPDQETPEVEAQTTTSRGPEAGNDSMIGSPNKEQGSPYVQLGTSSEPPGDEEEILRIKAADDSRPPILLKWWDENSQAAGIVINRQKEDEEVCQLKKALGEATRIVNRIHLRNEAKTATLEKLVPHLGTLEAVRDQLHEAKELAKKTEKELRDQIAQLQDSNFELRGSSKAQATRMAQMEKQIEALKRDKVELAAQRDSALKEIEDRKIKSQAQFDVLVGKIKRLEGARDEVASVATPLVQAMFLNNSGPSALDATEIFDKLRVAPDVYFKNIKKAGSMGASMALAMTKSLYPRIEIDAIDGFADGTSEEAALDLISNAQNAADKIASDVVDRFRNTDLQPSSNNSDDEKTESD

SEQ ID NO: 185103 - protein, 167 aa, Oryza sativa
  unsure (1)..(167): unsure at all Xaa locations
  Clone ID: PAT_MRT4530_82031C.1.pep
MDLCQPTSQRCIAEGDTVVVYERHDAMRAVXCMLQNRFGVFRHDDWIGRPFGCKVHSAATAGGKGKGGFIHLLAPTSELWTLMLSHRTQILYLADISLVVSYLELVPGCHVLESGSGCGSLTMSLFDQENRGEADIRGPHRVIWSFLIVSLSVFTGNNKIMYPVSSS

SEQ ID NO: 185104 - protein, 777 aa, Oryza sativa
  Clone ID: PAT_MRT4530_82032C.1.pep
MAEEKESFEGQWAPSDVTEENLKEMVAHGVLPAKEIIGWRPACGEAFPSPDTHEVVVFSHFFYGGFALPTSKFFRGILSFYGISLHHLNPNSIVHIANFVHVCEAFLGIKPHFALFRRIFFLKPQPNKSKPCVVGGAGFQLRGTLSQKYFSMPFKTSNKGWHANWFYIQNPEPALPEYSCLPPVYQDTWNSLPIGDEAAQALELMDRMLKLKEQGLQGEQITRHFIKCRLAPIKERSRTAFEFDGKHDPNREEPDSLDFKIMKERMYKIFSNAIVVGYSHQLPVVPYNAFNPPPQEYVLMKSDPPITQRRSPRQHTVKGGGGPTIRSDLQPQTFNPTGANKVLARESWKPSDIDPTGKDPDPAVTEPSSSKDSEPTAENQPTGAHTSGDTADPSDQPPTGDQSAATETTTTQEPPTGNQSDVGPDQEIPEVEAQTTTSQGPEAGNDAMIGSSNKEQESPHAQLGTSSGPPGDDEEEIPRIKAADDSRPPILLKWWDENSQAAGIVINRQKEDEEVCQLKKALGEATRIVNRIHLRNEAKTATLEKLVPHLGTLEAVRDQLHEAKELAKKTEKELRDRIALLQDSNFELSGSSKAQATRMAQMEKQIEVLKRDKVELAAQRDSALKEVEDRKIKSQAQFDVLVGKIKMLEGARDEVANVATPLVQAMFLNNSGPSALDATEIFDKLRVAPDVYFKNIKKAGSMGASMALAMTKSLYPRIEIDAIDGFADGTSEEAALDLISNAQNAADKIANDVVEQFRNTDLQPSSNNSDDEKTDSD

SEQ ID NO: 185105 - protein, 771 aa, Oryza sativa
  unsure (1)..(771): unsure at all Xaa locations
  Clone ID: PAT_MRT4530_82033C.1.pep
MAEEKESFEXQWAPSDVTEENLXEMVAHGVLPAKEIIGWRATCAFLGIKPHFALFRRIFFLKPQPNKNKPCVVGGAGFQLRGTLSQKYFSMPFKTSNKGWHANWFYVQNPEPALPEYSCLPPVYQDTWNSLPIGDEAAQALELMDSMLKLKEQGLQGEQITRHFIKCRLAPIKERSRTAFEFDGKHDPNREEPDSLDFKIMKERMYKIFSNAIVVSYSHQLPVVSYNAFNPPPQEYALMKSDPPITQRRSPHQHTVQGGGGLKIRPDPQPQTSNPTGQTGSRKRKLVLDNDEGDDDKSGDKGSPNKFPKRTMPKKKLAGRQMLKIRTSSRKPSDIDPTGKDPDPAVTEPNLSKDAEPTAENQPTAESQPTAESQPTGAHASDDKANPSDQPPTGNQSAATETATTQEPPTGNQSDTGLNQEIPETEAQATTSQGPETGNDSVIGSPDKEQGSPHAQLGTSSGPLGGDEEEILRIKAADDSRPPILLKWWDENSQVSGIVINHQKEDEEVCQLKKVLGEATRIVNRIHLRNEAKTATLEKLVPHLGTLEAVREQLHEAKEHAKKTEKELRERIAQLQDSNFELSGSSKAQATRMAQMEKQIEALKRDKVELAAERDSALKEVEDRKIKSQAQFDVLVGKIKKLEGARDEVANVATPLVQAMFLNNSGPSALDATEIFDKLRVAPDVYFKNIKKAGSMGASMALAMTKSLYPRIEIDTIDGFADGTSEEAALDLISNAQSAADKIASDVVEQFRNNDLQPSNNNSDDERTDSD

SEQ ID NO: 185106 - protein, 681 aa, Oryza sativa
  Clone ID: PAT_MRT4530_82034C.1.pep
MVEEKESFEGQWAPSDVTEENLKEMVAHGVLPAKEIIGWRPACVYQDTWNSLPIGDEAAQALELMDRMLKLKEQGLQGEQITRHFIKCRLAPVKERSRTAFEFDDKHDPNREEPDSLDFKIMKERMYKIFSNAIVVSYSHQLPVVPYNAFNPPPQEYVLIKSDPPITQRRSPRQHTVQGGGGPTIRPDSQPQTSNPTGQTGSRKRKLVLDNDEGDDDNKSGDKGSPNKLPKRTMPRKKLANCPTPKIRTSSRKPSDIDPTGKDPDPAVTEPNLSKDPEPTAESQPTGAHASGDKADPSDQPPTGNQSAAAETATTQEPPTGNQSDVGLDQEIPEVEAQTTTSQGPEAGNDSMIGSPNKEQGSPHAQLGTSSGPPGDDEEEIPRIKAADDSRPPILLKWWDENSQAAGIVINRQKEDEEVCQLKKALGEATRIVNRIHLRNEAKTATLEKLVPHLGTLETVRDQLHEAKELAKKTEKELRDRIAQLQDSNYELSGSSKAQATRMAQMEKQIEALERDKVELAAQRDSALKEVEGRKIKSQAQFDILVGKIKRLEGARDEVANVATPLVQAMFLNNSGPSALDATEIFDKLRVAPDVYFKNIKKAGSMGASMALAMTKSLYPRIEIDAIDGFADGTSEEAALDLISNAQNAADKIASDVVEQFRNNDLQPSNNNSDDERTDSD

SEQ ID NO: 185107 - protein, 81 aa, Oryza sativa
  Clone ID: PAT_MRT4530_82035C.1.pep
MAARCPDRPHTAPYTAASPPHGAPPQTAGAPPPSGRAAWQPCRLAAAPFGRPAAVPPGRLAAGAASPPHLPNVTKVAHKYH

SEQ ID NO: 185108 - protein, 70 aa, Oryza sativa
  Clone ID: PAT_MRT4530_82036C.1.pep
HASPWLKPSIPNDDNADQNGVNTPWTRYSTNDRLEATLLDHTSLRHASVLHRNTRHNVLRTLLQRPWISN

SEQ ID NO: 185109 - protein, 161 aa, Oryza sativa
  Clone ID: PAT_MRT4530_82037C.1.pep
MPPMIATAVCTQSRRYDGLRFSQRKPVNVDVYPLYHLAPSLCVTYLMALQADEDVSWGMSARAWQRLEVVGTYLLSSSSVEVSARSRAAIDLPKEGVVVRRTLLVNEVGPPSAVSADGCLPVVLRERCRPGMCWTSLPRTGRAARVRLARGFFVCIYVVDE

SEQ ID NO: 185110 - protein, 72 aa, Oryza sativa
  unsure (1)..(72): unsure at all Xaa locations
  Clone ID: PAT_MRT4530_82038C.1.pep
TDIIKSRVNNKDVAGVXEPPGRGXLEAWAXXHXESXPQLSMDEIIGECKTFFFXGHDTTSHLLTWTMFLLST

SEQ ID NO: 185111 - protein, 103 aa, Oryza sativa
  unsure (1)..(103): unsure at all Xaa locations
  Clone ID: PAT_MRT4530_82039C.1.pep
MPYAHEQLEQQYSMPLHQEQGFVPIDSSASSTGGGXGQRAWAMVVIWRPPADEGGTAAADEDEGRWLLRIARQRGADRRQRKGSRWRPWAEERQAPVVVELAS

SEQ ID NO: 185112 - protein, 116 aa, Oryza sativa
  Clone ID: PAT_MRT4530_8203C.1.pep
SPSGRERQRPPPPPGGSGGPHSPSPHSSSLSSLTLTAVAGEGGGGGQGRWRWSARTTGAGSSGDGERVGWRRRAWVTAVVLPRSDPTAADLPCTDLAATTLPHPDPVAVTLPARIN

SEQ ID NO: 185113 - protein, 350 aa, Oryza sativa
  unsure (1)..(350): unsure at all Xaa locations
  Clone ID: PAT_MRT4530_82040C.1.pep
RRAAARRRTRAGPACRAPPRTSASPPPPRTASPSSCPAPRRRRRTPPPPPPAEKLDILPLSIFLSPPPANMWEETRLCEEKGKRRRCARRCSEHRRQQEKDEPAVLVKREHPSSAVAVDAARHERLDRAAVSDSAAATCDLWSAFDSMTRRKDTLDGLKLXSGDEHYWADAXCSWLGSQRRWCSPRPGSGSSCSASLAAAYVISPVTSPPVSKLTTAPLLXMGYMTGRGSEPVNVGHSGTNGVVETXRWSSLVTVTRSRPRPHRVAVLLLLLLASSPAARAWKKDEFRNCNQTPFCKRARTRAPHSLDAPLSLDAASLAVATDGSLTASLSHPSRLRPLLLRLSALPPHA

SEQ ID NO: 185114 - protein, 56 aa, Oryza sativa
  Clone ID: PAT_MRT4530_82041C.1.pep
MDLLIRSPRSAGKKNVTMVNCCEGNCKSGISGPIARTSGTCQRMVEARRRKISPAA

SEQ ID NO: 185115 - protein, 51 aa, Oryza sativa
  Clone ID: PAT_MRT4530_82042C.1.pep
MAPKRYANECKGKSNIKLAQSRQGKTAMSMRVYSSIAPLSMDRQYHCIVVQ

SEQ ID NO: 185116 - protein, 88 aa, Oryza sativa
  Clone ID: PAT_MRT4530_82043C.1.pep
TSLLNLVASVLSTCSVIKYPLRYQIKAIARSDILSLGSIIPRSLAPRIQVLRHPIVPHLDAIKQIARQPLNRTQRNVFKHVIERRHNR

SEQ ID NO: 185117 - protein, 111 aa, Oryza sativa
  unsure (1)..(111): unsure at all Xaa locations
  Clone ID: PAT_MRT4530_82044C.1.pep
WRRGAEMPATGRGGAGEVGEKPALGAGAGAEKHYXDPCFSIRVQQGWPXXAHSRSPQRSWLVVSMAEELAGQSLGXPTHGQSASSPLARTKIPSISPCSCSNKNPQILALA

SEQ ID NO: 185118 - protein, 75 aa, Oryza sativa
  Clone ID: PAT_MRT4530_82045C.1.pep
MQIRIRNRGRGSAGRAIALELSHGGDKVTLEEAAKGGGGHDNGGGGGRRLSRTLLLLATVVTRGLGKTKRGWRPN

SEQ ID NO: 185119 - protein, 1395 aa, Oryza sativa
  unsure (1)..(1395): unsure at all Xaa locations
  Clone ID: PAT_MRT4530_82046C.1.pep
MLMMRWAGTCTGVKQISQASCFXSTRFWHAQWDXKKSDXQFFLMAEKXPPPPSSPGSIKGKVLKQGLTDIIDDNVMLIDPEKFTPEQKAEFEATLQQARDQFLNSFMQTRKGTLVQKYKIKVVADNSGTSSSKDGEGKQAPDGSTQPSIKGATDGSLGNQGDNPQGVHGVQGDGVHGAQDVMREQFGLKPKETGNLYRQPYHEWFERVSLPHRFKVPDFSKFSGQDTTSTYEHISRFLAQCGEASAVDALRVRLLRLSLAGSAFTWFSSLPHGSINSWADLEKQFHNYFYSGVHEMKLSNLTSIKQKHDEPVHEYIQRFREMRNKCYSLSLTDAQLADLAFQGMIAPIREKFSLEYFESLSHLIXKVSLHEQRFAEARKNSRKINHVYPYMYASDDEDDDSEIAAAEWVRSKKVIPCQWVKSSEKEEKYDFDITKADKIFDLLLREKQIQLPAGHTIPSAEELGKKRYCKWHNXSHSTNDCKVFRQQIQVAIEGGKIKFDDSKKPMKVDGNPFPINMVHTASQTVDRIRAKGFQVNSARVINKYQRKYDKQKDKHYEEHDDGMRLPSIENCPGCSDIVESSSRSYNRGNRLRQARVSVHQRLGPVNQDRGQEDEVTRKNQWCPSGIFTKNQKRRESKTXHECRVKNQVHAADDVAADEAKKLAKGKSVVTAPINMXFTLPAEFGIDQADVEEVEQESAKLVLSPEQAVFEKPEGTDNRHLKPLYVNCYVNGKLMSKMMVDGGAAVNLMPYATFRKLGRNTEDLIKTNMVLKDFGGNPSETKGVLNVELTVGSKTIPTTFFVIDGKGSYSLLLGRDWIHANCCIPSTMHQCLIQWQGDKIEIVPADSHSKMENRSYYFEGVVEGSNVYTEDTVDDLDDKQGQGFMSADDLEEIDIGPGDRPRPTFISKNLSPEFRTKLIELLKEFRDCFALEYYEMPGLSRSIIEHRLPIKPGVRPHQQPSRRCKADMLEPVKAEIQCLYDAGFIRPCRYAEWISNLNKANPKDKYPMPVADQLVDAASGHKILSFMDGNAGYNQIFMAEEDIHKIAFRYPGAIGLFEWVVMTFGLKSDGATYQRAMNYIYHDLIGWLVEVYIDDVVVNSKEIQDHIADLRKVFKRTRKYGLKMNPTKCAFGVSAGQFLGFLVHERGIEITQRSINAIKKIKAPENKTELQEMIGKINFVRRFISNLSGRLEPFTPLLRLKADQQFTWGAEQQKALDNIKNYLSSPPVLIPPRKGIPFRLYLSAGEKSIGSVLIQELEGKERVVFYLSHRLLDAETRYSPVEKLCLCLYFSCTRLRHCLLSNKCTVICKADVIKYMLSAPILKGRVGKLIFSLTEFDLXRYESPKVIKGQAVADFIVDHRDDSIGSVEIVPWCRLQKGNVPTYLSSLRIYTFSASG

SEQ ID NO: 185120 - protein, 159 aa, Oryza sativa
  unsure (1)..(159): unsure at all Xaa locations
  Clone ID: PAT_MRT4530_82047C.1.pep
IQAVPPIPSPAQPTAPASAPTLAPRNTVDPTQQQPIQQTPPRRQVVQPVQQTPPIQQVAQPIQQTPPSRPVVQPIQQTPLRQQVVQSTRQQGLMDVSAGFASHAGQCAPNQVVPEHLIHHVQPDDTVVPXVIPEHLVRGIQPNLHNYQGGNLNYQYQPT

SEQ ID NO: 185121 - protein, 1606 aa, Oryza sativa
  Clone ID: PAT_MRT4530_82048C.1.pep
MDSPATPVGLALPLLSLVLHNEPYYTKDKCGQKSAVKTCDILEFVRDNSRVRIKSTGTLIHPKASFGPALELSRSPRPRVFVNTLLACPPPPPSSPGSIKGKVLKQGLTDIIDDNVMLIDPEKFTPEQKAEFEATLQQARDQFLNSFMQTRKGTLVQKYKIKVVADNSGTSSSKDGEGKQAPDGSTQPSIKGATDGSLGNQGDNPQGVHGVQGDGVHGAQGDGAQGSQGGNLNQNSEVAQDFFNNFQDRVDYAVHNALINQSGVLVNTLSNMMKSIADGSIAEHQAAGPVYLQGGVFPNYRPLITDAQPSIQAVPPIPSPAQPTAPASAPTLAVQLSAPGQLINPQLLVREQPHHAGPNVTQLTQDQVASMFLPPRNTVDPTQQQPIQQTPPRRQVVQPVQQTPPIQQVAQPIQQTPPSRPVVQPIQQTPLRQQVVQSTRQQGLMDVSAGFASHAGQCAPNQPTSPQVQYQQAESAQPQLVPQYNQFGPTPQQPQGTPQQRPWADVIANVMREQFGLKPKETGNLYRQPYHEWFERVSLPHRFKVPDFSKFSGQDTTSTYEHISRFLAQCGEASAVDALRVRLLRLSLAGSAFTWFSSLPHGSINSWADLEKQFHNYFYSGVHEMKLSNLTSIKQKHDEPVHEYIQRFAEARKNSRKINHVYPYMYASDDEDDDSEIAAAEWVRSKKVIPCQWVKSSEKEEKYDFDITKADKIFDLLLREKQIQLPAGHTIPSAEELGKKRQQIQVAIEGGKIKFDDSKKPMKVDGNPFPINMVHTASQTVDRIRAKGFQVNSARVINKYQRKYDKQKDKHYEEHDDGFDPHWGCEFFRFCWNEGMRLPSIENCPGCSDIVESSSRSYNRGNRLRQARVSVHQRLGPVNQDRGQEDEVTRKNQWCPSAEFGIDQADVEEVEQESAKLVLSPEQAVFEKPEGTDNRHLKPLYVNCYVNGKLMSKMMVDGGAAVNLMPYATFRKLGRNTEDLIKTNMVLKDFGGNPSETKGVLNVELTVGSKTIPTTFFVIDGKGSYSLLLGRDWIHANCCIPSTMHQCLIQWQGDKIEIVPADSHSKMENRSYYFEGVVEGSNVYTEDTVDDLDDKQGQGFMSADDLEEIDIGPGDRPRPTFISKNLSPEFRTKLIELLKEFRDCFALEYYEMPGLSRSIIEHRLPIKPGVRPHQQPSRRCKADMLEPVKAEIQCLYDAGFIRPCRYAEWISSIVPVIKKNGKVRVCIDFRNLNKANPKDKYPMPVADQLVDAASGHKILSFMDGNAGYNQIFMAEEDIHKIAFRYPGAIGLFEWVVMTFGLKSDGATYQRAMNYIYHDLIGWLVEVYIDDVVVNSKEIQDHIADLRKVFKRTRKYGLKMNPTKCAFGVSAGQFLGFLVHERGIEITQRSINAIKKIKAPENKTELQEMIGKINFVRRFISNLSGRLEPFTPLLRLKADQQFTWGAEQQKALDNIKNYLSSPPVLIPPRKGIPFRLYLSAGEKSIGSVLIQELEGKERVVFYLSHRLLDAETRLRHCLLSNKCTVICKADVIKYMLSAPILKGRVGKLIFSLTEFDLRYESPKVIKGQAVADFIVDHRDDSIGSVEIVPCTCSKSVCVVMVSHTKET

SEQ ID NO: 185122 - protein, 1113 aa, Oryza sativa
  unsure (1)..(1113): unsure at all Xaa locations
  Clone ID: PAT_MRT4530_82049C.1.pep
MAEKQPPPPSSPGSAKNKASKSGLDDIIEKNVMPIDPEKFTPEQKKEFEATLQQTRDQFLNSFMQTRKGTLVQKYKIGVVADDPGTGSSKDGEGKQAPDGSAQPSIKGATDGSLGNQGDMSQGVHGVQSDGAQGPQGGNLNQNSEVAQDFFNNFQDRVDYAVHNALIDQSGVLVNTLSNMMKSIADGSIAEHQAAGPVYLQGGSSSHSVAXPQPTTPASAPTFAAQLLALGQLINPQLLGAXLNYQYQPTSPQVQYQQAESAQLQFVPQYNKFGPIPQQPQGTPQQRTWADVIADVMREKFGLKPKETGNLYRQPYPEWFERVPLPNRFKVPNFSKFSGQDTTSTYEHISRFLAQCGEASAVDALMVRLFRLSLDGSAFTWFSSLPHGSINSWADLEKQFHSYFYSGVHEMKLSDLTSNKHKHDEPVHEYIQRFREMRNKCYSLSLTDAQLADLAFQGMIAPIREKFSSEDFESLSHLTQKVSLHEQKFAEARKNSRKINHVYPYMYGLDDEDDDSEIAAAEWVRSKKVILCQWVKSSGKEEKYDFDVTKADKIFDLLLREKQIQLSAGHTIPSAEELGKKRYCKWHNSGSHSTNDCKVFRQQIQVAIEGGKIKFDDSKKPMKVDGNPFPVNMVYTASQTADRIHARGFQVNSAKVINKYQRKYDKQQEKHYEECDDGFDPHWGCEFFRFCWNEGMRLPSIENCPGCSDIVESSSRSYNRGNRLKQARVSVHQRLGPANHDRGQEDEVIRKNQWCPSSIFTKNQKRRVQRLRSRERVQEVEQEINHRLRKAKPRQEWRVKNQVPVADGVAADKAKKLAKGRSVVTAPINMVFTLPAEFGIDQADVDEVEQESAKLVLSLEQAVFEKPEGTDNRHLKPLYVNGYVNGKPMSKMMVDGGAAVNLMPYATFRKLGRNAEDLIKTNMALKDFGGNPSETKGVLNVELTVGSKTIPTTFFVIDGKGSYSLLLGRDWIHTNCCIPSTMHQCLIQWQGDKIEIVPVDMSVNVASADLGLWEMDGLDCLSGKVWDGDFLKSKVHHRSLDLYRCVILVPKLANRLFMSSNLFDCVIPIPKLIDHSFRSSNLFSCATSVPKFGFEYHLGQIGRSKDFIFKNNS

SEQ ID NO: 185123 - protein, 110 aa, Oryza sativa
  unsure (1)..(110): unsure at all Xaa locations
  Clone ID: PAT_MRT4530_8204C.1.pep
NLRKEKPQIETPLFDLAEGGERAXAAEEGXPTACHNKDDAXAHMTKATDAGTARIIDFTASWRAPCRSIAPASAEYPQKLPGAXPPARRRPTTRTHANPTAPPAPPPSPI

SEQ ID NO: 185124 - protein, 112 aa, Oryza sativa
  Clone ID: PAT_MRT4530_82050C.1.pep
MAPPTRQPRSGGRRKRRMAAAGDGGGGVAALMPEDMVREVLLRLPAKAAARFRAVCRPWRATLSDPRFVAAHAARRGALLVATGAPCRTSRGSGGHVDLVGLAGDVLRWTPA

SEQ ID NO: 185125 - protein, 86 aa, Oryza sativa
  Clone ID: PAT_MRT4530_82051C.1.pep
MMRGGEGKGWRADGGGGATRGGFGADGGGEEAVVGTGVGWWGEEATVGADNRVEKRWSKVVIGQRSDGRRWQPGVAKLWAAATANA

SEQ ID NO: 185126 - protein, 558 aa, Oryza sativa
  Clone ID: PAT_MRT4530_82052C.1.pep
GLRNRHEGLNQTLVPCTEPVKFLQIYCKGSRIQMALSRSVEVAVPADPAGDGDRDKIRLRQLGYKQELKRGLSVLSNFAFSFSIISVMAGVTTTYSTGLRYGGPVSMTLGWLVVSAFNGCMALSMAEICSAYPTSGGLYYWSAKLAGNDWAPFASWITGWFNITGQWAATTSVDFALAQLVQVIVLLSTGGANGGGYMASNYVVLAIYGAMLVIHGAINSLPIQCLSWFGQLGAFWNAAGVFVLVALIPAVATERASVEFIFTHFNTENGMGIRDKAYILLIGLLMSQYAMAGYDTSAHMTEETKNADWSGPIGIVTSVALSTVFGWIYIVSLTSAVTDIPYLLSPDNDAGGNAVAQAFYTTFHRRYGSGLGGILCLGVVAVAVFLCGLACITSNSRMAYAFSRDGAMPFSKVWHRVNKQEVPINAVWLSVVVAFIMALTSLGSQVAFQAMVSIATIGLCISYALPIFFRVTTARGSFVPGPFHLGKYGIVVGWAAVLWVAAVTVLFSLPVAYPVAEETFNYTPVAVGGVLLLTVGAWALRARFWFQGPITNTNDGPL

SEQ ID NO: 185127 - protein, 1031 aa, Oryza sativa
  Clone ID: PAT_MRT4530_82053C.1.pep
MRTTVDKNDKEIVTKNPDYTKWMAQDQQVLAYLLNSLSKDVPQQVATLDTSAQVWDALTNMYASQSRARITNLRISLANTRKGSMTTAVYFSKMKGLADDLASVGKPLDDEELVSYILVGLDINYNLLVSTVVGGGQIQSSANAASRGRGNSNDNNFRGRGAGGNGGRGRGNGERGGGPQGPRPCWYRFDQTYQPEEKVAAAVNSAYGIDTNWYVDCGATDHITGELDKLSVREKYNGQHQVHTANSTAPGSPSPGDSSLNKNALSIIKPSSTRWHYRLGHPAFPIVSRVIKSFQLPCSSESNNVEHICDSCQRAKSHQLPYPKSLSSSNVPFALVFSDVWGPAHTSVGRHDYYVSFIDDFSKYTWIYLLKKKSDVFQAFLNFQRYVERQFKTKILTMQTDWGGEYEKLNSFFQKIGIAHHVSCPHAHQQNGSAERKHRDIVEKGLALLSQASVPLKFWDEAFLTATYLINRLPSSAISFKTPLEQLFSENPESSHLRVFGCACWPNLRPYNHRKLSIRSIRLFVASLHPNAGARLQREISLLPSYLLSTTDQGGEITNDHMLTCSTDPTCGDQATGAQIAGENSMQNGGNPGQNGEDLMQSSHEIIPGSVTNQTSMSDGSGSQGGQSSSHAASSHAAASGSSSHAANNHTTASSSSHAVGSSNHSSSGSHPGSSAQSAPAQPIQPEPVRHRTRLQSGITKPRLDVDGTIKYSLACSTGEPTDVQEALGDSRWKQAMDEEYNALVRNNTWHLVKAPQDKNRMVTKAIRCSECLFAWYSRRRSLYETTTRDLGELHYFLGIEVKKIPDGILLNQAKYALDLLTKVGMKDCKSVSTPLAVTEKLMAHRGDPLGTEDSTRYRSIVGGLQYLTLTRPDLAFAVNKVCQYLHAPTSEHWSAIKRILRYIKGTVDVGLHFKRSSSTLVSAFSDADWAGSLDDRRSTGGFVIYFGPNIVSWSARKQPTVSRSSTEAEYKAMANATAELIWVHSVLEELGVKIAQPPVLWCDNLGATYLSSNPVFHARTKHIEIGYHFV

SEQ ID NO: 185128 - protein, 72 aa, Oryza sativa
  Clone ID: PAT_MRT4530_82054C.1.pep
FKLNEVGEEYEHKVDNLVGPITSFYFFSLICFPCRHPIRKSSRTVQPRYVRKDVISVLTVEELVLEEFRKTK

SEQ ID NO: 185129 - protein, 966 aa, Oryza sativa
  unsure (1)..(966): unsure at all Xaa locations
  Clone ID: PAT_MRT4530_82055C.1.pep
MIHICHRGYQHYVLGLVPRSRFRRKRFAPFSLRHAPVRCRCTVVSDWGVTNIDYNPLVSTVVGRSDPISLSDLYSQMVSYDNRMDHLQGGGQIQSSANAASRGRGNGNSNNFRDRGGGGNAGRGRGNGGRGGGPQGPRPVCQRCGKTGHTVLKCWYRFDQTYHPEEKVAAVATNSAYGIDTNWYVDCGATDHITGELDKLSVREKYNRHEQVHAANGRGMNISHIDHSVISTPNKDLHLKNILYVPSANKNLVSANRLAFDNNAFVEIYPKFFNIKDQATRKLLLQGRSKGRLYPLAPAPSDSSLNKHALSIVKPSSTRWHYRLGHPAFPIVSRVIKSFQLPCSSESNNVEHICDSCQRAKSHQLPYPKSLSSSNVPFALVFSDVWGPAPTSVGRHDYYVSFIDDFSKYTWIYLLKKKSDVFQAFLNFQQYVERQFNTKILTMQTDWGGEYEKLNSFFQKTSIAHHVSCPHTHQQNGSAERKHRDIVEKGLALLSQASVPLKFWDEAFSTATYLINKLPSSCISFKTXFEQLFFSSPEFSHLRVFGCACWPNLRPYNHRKLSFRSIRNKXQIAGENLWQNGEDLTQSSHEIIPTDSETNGSSTESETNQTSMSDGSGEPTDVQEALGDSHWKQAMDEEYNALVRNNTWHLVKAPQGKNVIDCKWVYKIKRKADGSLDRYKARLVAKGFRQRMVTKTIRCSEAFLHGILEEEVYMNNHQGMKDLGELHYFLGIEVKKVSDDILLNQAKYALDFLTKVGMKDCKSASTPLAVTEKLMAHKGNPLGTEDSTQYRSIVGGLQYLTLTKPDLAFAVNKCLSDADWAGSLDDRRSTGGFVIYFGPNIVSWSARKQPTVFRSSTEAEYKAMANATAELIWVQSVLEELGVKIAQPPVLWCDNLGATYLSSNPVFHARTKHIEIDYHFVRERVANKMLDIRFIGSKDQIADGFTKALSIQSLRYFMYNLNLSKL

SEQ ID NO: 185130 - protein, 56 aa, Oryza sativa
  Clone ID: PAT_MRT4530_82056C.1.pep
RRVGTLEQHSTGSHMWPALAYVMLILRGLQSKLPFHAVDHPSIYAIELIRVKQCVF

SEQ ID NO: 185131 - protein, 479 aa, Oryza sativa
  Clone ID: PAT_MRT4530_82057C.1.pep
MTPPPPSPPHERKTWAESVASEFRAQRGIAFPLIAMNLTWFAKLAVTTAFLGRLGDLQLAAGTLGFSFANVTGFAVLTGLCAAMDPICGQAHGASNGKLLRKTLVMATILLLGASIPIAFLWLHVDAVLLRFGQQADMSSNARSYVVCLLPDLAVTSFVNPLKSYLSAQGVTLPTLFASALALALHVPLTMWMARTRGIQGVATAVWVSDLAVAVMLAGYVLVSERRRKAGGGGGWVEQTRGEWVRLLRLAVPSCLNTCLEWWCYEILVLLTGRLPDARRTVAVMAVTLNFDYLLFAGMLSLSVSASVRVSNELGAGEAWAARRAGMVSIVGGAVGGVGGGVAMVAARRAWGSIYSSDAGVREGVGRAMEVMAVLEVVNFPLNVCGGIVRGTARPAVGMYAVVAGFYVLALPLGVALAFKARLGIQGLLLGFLVGAAASLAVLLTFIARMDWPAEAQKARTRTTATVAQFHQHDEVVQP

SEQ ID NO: 185132 - protein, 94 aa, Oryza sativa
  Clone ID: PAT_MRT4530_82058C.1.pep
TCGDQATGAQIAGSVTNQTSMSDGSGSQGGQSSSHAASSHAAASGSSSHAANNHTTASSSSHAVGSSNHSSSGSHPGSSAQSPCANPSRGSLLP

SEQ ID NO: 185133 - protein, 1686 aa, Oryza sativa
  Clone ID: PAT_MRT4530_82059C.1.pep
MASSSSTSAPAALGPPVTEKLTRDNYVLWRAQVLPALRGALLTDYLDGTAVEPAKTRTTVDKNDKEIVTKNPDYAKWMAQDQQVLAYLLNSLSKDVLQQVATLNTSAQVWNALTNMYASQSRARIANLRISLANTRKGSMTTAVYFSKMKGLADDLASASKPLDDEELVSYILAGLDIDYNPLVSTVVGRSDPISLSDLYSQMVSYDNQMDHLQGGGQIQSSANAASRGRGNGNGNNFRGRGGGGNGGRGRGNGGRGGGPQGPRPVCQLCGKTGHTVLKCWYRFDQTYQPEEKVAAAATNSAYGIDTNWYVDCGANDHITGELDKLSVREKYNGQEQVHAANGTGMNISHIGHSVISTPNKDLHLKNILYVPSANKNLVSANRLAFDNNAFVEIYPKFFNIKDQATRKLLLHGRSKGRLYPLAPAPGDSSLNKHALSIVKPSSTRWHYRLGHPAFPIVSRVIKSFQLPCSSESNNVEHICDSCQRAKSHQLPYPKSLSSSNVPFALVFSDVWGPAPTSVGRHDYYVSFIDDFSKYTWIYLLKKKSDVFQAFLNFQQYVERQFKTKILTMQTDWGGEYEKLNSLFQKIGITHHVSCPHAHQQNGSAERKHRDIVEKGLALLSQASVPLKFWDEAFLTATYLINRLPSSAISFKTPFEQLFSATPEFSHLRVFGCACWPNLRPYNHRKLSFRSIRCAFLGYSPLHKGYKCLEISTGRVYISRDVVFDETVFPFASLHPNAGARLQREISLLPSHLLSITDQGGEITNDHMLTCSTNPACDDQATGAVQIAGENLVQNGGNLRQNGEDLMQSSHEIISTGSEIDGSSTESETNQTSMSDGSGQSSSHAASSHATASSSPSHATNSHSTASSSGHAVGSSNHSSSGLHAGSSVQTPPAQSVQPEPVRHRTRLQSGITKPRKADGSLDRYKARLVAKGFRQRYGIDYEDTFSPVVKIATIRLVLGIAVSRGWSLRQLDVQNAFLHGILEEEVYMKQPPGYEGKSTLVCKLDKAIYGLKQPPRAWYSRLSHKLFELGFTSSKADTSLFIYNKNGITMYMLIYVDDIIVTSSSSDAVIALLKNLRSDFALKDLGELHYFLGIEVKKVSDGILLNQAKYALDLLTKVGMKDCKSASTPLAVTEKLMAHKGNPLGTEDSTRYRSIVGGLQYLTLTRPDLAFAVNKVCQYLHAPTSEHLSAVKRILRYINGTVDVGLHFKRSSSTLVSAFSDADWAGSLDDRRSTGGFVIYFGPNIVSWSARKQPTVSRSSTEAEYKAMANATAELIWVQSVLEELGVKIAQSPMLWCDNLGATYLSSNPVFHARTKHIEIDYHFNPVESADARRNFFTIAYNQLKACMQRIITWMQQERLVHRKIRNTLVHEPLRALRHRITALIEKALVARTTPNFVRIVYNKLEAFIQRIIASRQQPLEEITNEDTPPSDGTGLIDDAWSIAEELLKLDDEEKMWRVIEGVWVEMLCFSAARCRGYLHAKSLGTGGKKLSRADLQNREFLANSSTTHVGEPSGIIERVAECAAQPTNYGPPQVILSLLHHRPNRSYNFSRAPSSSITDVGLNTTISPVTSTNVTPKTCYLSLGSNNLPCHINPSAATATTECRAAVAVAAAAASSYRAVVPLRIALPRRCRVTLCPSRQPPLPLLLPLCAMRRRCSRAPPSLPSHCLSLGSRVAFSCPITSIS

SEQ ID NO: 185134 - protein, 67 aa, Oryza sativa
  Clone ID: PAT_MRT4530_8205C.1.pep
FFPHVSLLYGDLSDEEKEVARKMVEEIDKEICGLQFEISELALYRTDTEDKSLESWELVEICHLERK

SEQ ID NO: 185135 - protein, 391 aa, Oryza sativa
  Clone ID: PAT_MRT4530_82060C.1.pep
MARSPRPPWSDGLPPELLGVIFEQLSCLADRACFAAVCRPWRTAAAFVDAPQRGLPWLLLPSRDAPSFFSLHSGATRHLTLPEGVRGARLCGAHDGGWVAVAVDPWRGFAAVNLFTGVRVTLPEKLRLEVPYAHGYGPVTVTSHHPMLVRTIVFSAPPASPDCIAAAHVSSASNIAFWQPGMSRHWIASRPEPDVIQDIIYYSGEEKQGFHVLTNREEVLVFAPRAGRDPNALLEMTCASYQMRRRANHLPASFIATRYLVESRGKLLMVVRHCTGNPRVRRRTRMFRVFEMSLLPTGAYWLEIHELSGRALFLRRGCSRAVEVSQFKMLKEDTIYFLDDANVDMCDSMVMNNGSRYNMGIYRDGKKIRAGSRQFPRGFTADCSPPIWLVP

SEQ ID NO: 185136 - protein, 99 aa, Oryza sativa
  unsure (1)..(99): unsure at all Xaa locations
  Clone ID: PAT_MRT4530_82061C.1.pep
SSTPRKKSKRIYDVIDDIIAGHGTAPTPTXRGRRRELTGARNYDGRRRTATGDEDQRRRGSARRRRRRSSGLRRRRRGGQGTPPPCEPGGGDGQRRRRR

SEQ ID NO: 185137 - protein, 668 aa, Oryza sativa
  Clone ID: PAT_MRT4530_82062C.1.pep
MGIDLNTVEEEAEEGAAAAVCGELWHACAGPGVALPRRGSALVYLPQAHLAADGGGGEVPPAGAAAVPPHVACRVVGVELRADAATDEVYARLALVAEGEMLQRNFREGGGEDGAGEMEGCDAEKKPRMPHMFCKTLTASDTSTHGGFSVPRRAAEDCFPPLVIHLKEKLVTFNDYKTVRPSQELIAVDLHGTQWKFRHIYRGDDGQLRLGVRRAVQLRNEALFEPVNSSDSKLRILSSVASSLENKSVFHICFNPRSGASEFIVPYWRLLKSLNHPFSIGMRFRVCYESEDANERSAGLISGISEVDPIRWPGSRWKCLLVRWDDSTDSSHQNRVSPWEIERVGGSVSVTHSLSSGSKRTKLHFPQGSLDTPFLNGNGHPDSMGTENFHRVLQGQEFRGSRSHGVVCSESPGVPNFQSPDNRRFSADMRGYMMPASGPPQRNTEFTYQPIGFSESLGFPEVLQGQEMSQVVPLFRGATFGARTQNDRVVSANSVHRSAAQSGLLASTLGHPISQFTLSSSKVSSPSSVLMFNQATAPNHETVSGTNNKGMHVSQFASQEMLSETVTWPGTQRQTPSEITSNQFALARIPAPPSGAESGLPKRDAGRSSCRLFGFSLTGNMLGEDGEGLDDGAIEAGCENPPVLELFGHSHSTPGALHALCAAAPLGM

SEQ ID NO: 185138 - protein, 395 aa, Oryza sativa
  Clone ID: PAT_MRT4530_82063C.1.pep
MSTATPTPNVVDGDCGGTPPSRSASTIIAARTLHVLTIHGYSDTLKSNVDPSQHLLLSSPFSAGGHTWCIRYCPIGCTEESKDFISIYLVLEDTITDVVSAQVTFSLLDQQGNPMPSHTLTTPLLKFSLQGTLPKALGYNSFIRRDDLERSGHLKDDCFAIGVHVVVTKEAEPSSITVPPSDMHLHYGDLLSSEERYATDVEFLVGGETFTAHRLVLAARSPVFMVELFGPMKEGTTVNKIHIFDMEAQVFRALLKFIYTDMLPEMDQEDETAMVQHLLVAADKYGLHRLKMICVEILSNHIDAYSVATILVLAEKHYCYGLKEACFEFLNSSAILSAIVNTSDFLYLIQSCPDVLEDISFNIVARQLERAIFLSENQEGQINSVEIRINSVMTN

SEQ ID NO: 185139 - protein, 39 aa, Oryza sativa
  unsure (1)..(39): unsure at all Xaa locations
  Clone ID: PAT_MRT4530_82064C.1.pep
MGTKFXCRHRPFNTEARGAQSPERLKPRIPNWTVLALGQ

SEQ ID NO: 185140 - protein, 31 aa, Oryza sativa
  Clone ID: PAT_MRT4530_82065C.1.pep
MRYRLSFLYLARCLISIDLLLMFCLIPFKRN

SEQ ID NO: 185141 - protein, 128 aa, Oryza sativa
  unsure (1)..(128): unsure at all Xaa locations
  Clone ID: PAT_MRT4530_82066C.1.pep
LGTDFSIYYSRYTCLASLLRRCNYVGIMFIYXVCLFHEDDSRVVFGSISEVLRLLNIIIWGYMLQNSRGGPLMVIAQYGYSSMLVYNPKLLSCGGYSSIFCPIWMAMKGCRKELGNQGWSLETPGGHR

SEQ ID NO: 185142 - protein, 557 aa, Oryza sativa
  Clone ID: PAT_MRT4530_82067C.1.pep
MERQTSFRLGALEKLKSFRGMEKQKSFKMMSTDNFRRHRDSPGKRGDTPLHLAARSGNAAGAQRIIAEFDPEVAAERAAQANHDGETPLYVAAERGHTDVVREILKVSDVQTAGVKANNSFDAFHIAAKQGHLEVLKELLQAFPALAMTTNSVNATALDTAAILGHTEIVNLLLESDANLARIARNNGKTVLHSAARLGHVEIVRSLLSRDPGIGLRTDKKGQTALHMASKGQNAEIVIELLKPDISVIHLEDNKGNRPLHVATRKANIVIVQTLLSVEGIEVNAVNRSGHTALAIAEQLNNEELVNILREAGGVTAKEQVHPPNPAKQLKQTVSDIRHDVQSQIKQTKQTKMQVQKIKKRLEKLHIGGLNNAINSNTVVAVLIATVAFAAIFTVPGNFVEDITQAPPGMSLGQAYVASNPAFLVFLVFDALALFISLAVVVVQTSLIVVEQKAKRRMVFVMNKLMWLACLFISVAFIALTYVVVGRDDWWLAWCTMAIGAVIMLTTLGSMCYCIIAHRMDERKIRKASTSQSRSWSQTVDSDPDLLNSEYKKMYAL

SEQ ID NO: 185143 - protein, 168 aa, Oryza sativa
  Clone ID: PAT_MRT4530_82068C.1.pep
MAAGLEWFWWRRPVVLAAATVAASSGGREAGWSCAGMQGDGTRPAHGRRMRWTGVSTTAIAREEARKEVTGNGEEGERRPHAGMVGCGRQRRREQFDGCGARPEADTARGGADDGDGGRHGARRCHRWQRRPAQHVEARSAGGGGWRGTQRLTGGESRCSEAHAPVEA

SEQ ID NO: 185144 - protein, 195 aa, Oryza sativa
  Clone ID: PAT_MRT4530_82069C.1.pep
MPSKSIKKEGEKKKKKAMSKEGINAKRTHLTSGGASSARLSCSSSPPGNAPLLLLPHQVPGGGGAERKPPTPSLTFTSPHLTETREREREMERRRRGRPSEVCERDSWVVVGVGFLAGAWEQRRRSWLGWRLEDARGGWAPRRGGGGRCGLGGVRAERKEAEELLSSSGGTSHACPLARQPQQRQTRARSSSSPS

SEQ ID NO: 185145 - protein, 94 aa, Oryza sativa
  Clone ID: PAT_MRT4530_8206C.1.pep
KILCKEYNHTDITLNTKKKLEQLSGKNDVYQKCHQIKFGNHVDSKMQNVALSNISSDTYWPPYVARCLQLSFVVKWILWKIPLSKSLWSFSLCS

SEQ ID NO: 185146 - protein, 52 aa, Oryza sativa
  Clone ID: PAT_MRT4530_82070C.1.pep
LPMGEWCHCIGISGVGVFCVMCVCGNVCLIRLGFCELGVGFRDVFMGLSLRI

SEQ ID NO: 185147 - protein, 454 aa, Oryza sativa
  Clone ID: PAT_MRT4530_82071C.1.pep
MAPPCGRVVLFPMPYPGHTIPMFHLAAVLRSRGFSITVLHTELRAPDPAAHPPEYRFVAVADGTPPELVVSEDAAAVLTSLNETCAAPFADRLAALLAEEGGVLCVIADVMWYAPAAAAPELGVPLILLMTSSASSFRTFMEYPLLLERGFLPVDDAQKDTLVDILPPFRVKDLQRIDTTNLYSFANVLANVVAAARLSSGLILNTFDFIEGDNICRIRDELSIPVFAIGPLNKLIPLVGRSSFLPPDCDCLRWLDTQAPSSVLFVSFGTMATIDAQEFLEVAWGLAGTKLPFLWVVRPSLVRGLRLHSSELPSDLQEEINGRGRIVSWAPQEKVLGHPSVRAFMTHNGWNSTIESISEGVPMICRPCFGDQMGNARYVCAVWRLGVEMEVGSVLQRAKVQTAVEKLVNGEEGQNVKQRMRNLRIEAEKCVSKGGSSDTGLRNLVDSILSFGKC

SEQ ID NO: 185148 - protein, 143 aa, Oryza sativa
  Clone ID: PAT_MRT4530_82072C.1.pep
AGFPVLAKMKLDLSEAVGYALTAPTGQMDLSLWERFYLHGIESLQTLYELDYWPPQDKDVHHRSLTLPAVGLIQRCVGLRKLFIHGTTHEHFMTFFLSIPNLRDMQLREDYYPAPENDLMFTEMRAESWLRFEVQLNSRQIDD

SEQ ID NO: 185149 - protein, 83 aa, Oryza sativa
  Clone ID: PAT_MRT4530_82073C.1.pep
TTTVSPPTRSGKEEGTAAVTRPSPPPLQSDGAEGRACHGAAATSASARSGGGEGAAAYPPTARPPLPPPGGVVERERGREREL

SEQ ID NO: 185150 - protein, 99 aa, Oryza sativa
  unsure (1)..(99): unsure at all Xaa locations
  Clone ID: PAT_MRT4530_82074C.1.pep
MTYEVADQRWAMDKAGSAAGKGEVAVEEEGQFTRRRKKGLAGELSSSPSLAPLRLRALRRQGQRLTGTSRQLDPVTPNLHAARSAALVTXGEEEVTSGP

SEQ ID NO: 185151 - protein, 98 aa, Oryza sativa
  Clone ID: PAT_MRT4530_82075C.1.pep
VPPLSLSPPFPIPSRLPSCPPPIPPSATAVVLPAPPLPSSRCRRSPGTTPAVVLPAPPHFVFPSTIRDLERGGDGNGDDDDEPALPSPSAHSAPPTSR

SEQ ID NO: 185152 - protein, 727 aa, Oryza sativa
  unsure (1)..(727): unsure at all Xaa locations
  Clone ID: PAT_MRT4530_82076C.1.pep
MEIAEKSRQKELESAQEKNTMGNPTISTTKDFSSEKQIAKSIQMEESTNPRANLSSAGTNSTEIAYGGQMLHEEYALLSLQTELGQQMSYTALMQQVIQSQSPKINLHTNQGRLAEMNYHLQSPIGYSNSMILTTNRCIDNFDQAVLEAEQEVQVQITSTENSALEQVNGAVQASIASTEDNAEITDKENKESAADEEEADNDEIDSRHIPCEGMQFKTDDEAYTFFNFYAYLIGFSIVIAHSLKTSDKKRNNEVIKYTYKCNRHGKNQDNATNQVQKKKGTRNTNVLVRTDCKCVMVVRENNGIWSVIRLDLSHNHNLCPPEERKFLYSHKDMTQEEKSLILTLKECNIPTRSMVVILASLRGGLSSLPYTKKDISNVASSSNSETKNKDMSQVLRYLRKKEAEDPXFWTDGRCRDLYEQFGDFXKTSTTFTITSKTDETKKQLYKDFDDIVHNCLTEQEFETLWPQMIEKYNLQNVKYLQLMFKARATYIPVYFKNDWFPFIHSTTLSEGTNARXGKTYLVFAATNQTRQEWRPRXKIPDKYIIDRWRKREKKIATNVERFTYNGDNLALRYNILSKKGALISSKACKKVETYNYLLEEMDRLDKHIDSMLAQEEQITTLVDIAEDSMIAEDETITEPNEEEQLQEKETNEEEEIQDPDQANTKGRKSIRRKRIVEQMIDNNNKKKKRSKGEKNHAKNQQRSNRAAGQKQQKNRELESSNKTKKK

SEQ ID NO: 185153 - protein, 145 aa, Oryza sativa
  Clone ID: PAT_MRT4530_82077C.1.pep
MRPYAQVNITTFGELVSLLVAEAEDEARASPTPARRRPPLVAARPAAASRPPAALAASALARRHPQLIVACPAAASCPQACSASTSTAGHPSYRRPPGGQVAPRSTARRLGIGKPLSVTRARSVSVLGPALLPHPCLQHGDVLRR

SEQ ID NO: 185154 - protein, 1601 aa, Oryza sativa
  Clone ID: PAT_MRT4530_82078C.1.pep
MRRRRWRRRLAPVFRFYPTEEELICLYLRNKLDGFRDDIERVIPVFDIYSVDPLQLSGTSTRVYLLLPAARRGSGWFYFCPRQEREVRGGRPSQTTPSGYWKAAGTTGVVYSAEPWPRAVGNKDRVEDDEREREGGRWKMRSYRWVFPIAKRQITVLAEKCLPRDTDEDLGGGHVDDMTKLTYLNEPGVLYNLKRRYALNEIYTYTGSILIAVNPFTRLPHLYNEYMMEQYKGVRLGELSPHVFAVADASYRAMVNDSRSQSILVSGESGAGKTETTKFIMQYLTYVGGRAAIDDRTVEQQVLESNPLLEAFGNAKTVRNDNSSRFGKFVEMQFDANGRISGAAIRTYLLERSRVVQINDPERNFHCFYQLCASGKDAELYKLGHPGSFHYLNKSKTYELEGTNNEDEYWKTKRAMDIVGISRNDQDAIFRILAAILHLGNIEFSPGKEIDSSKIKDPTSNFHLQMAAKLFMCDPDLLVSTLCTRAINTLEGAIIKALDCSAAAANRDALAKTVYARLFDWLVENINKSIGQDVDSKVQIGILDIYGFESFKNNSFEQFCINFANEKLQQHFNEKPIGIIALLDEACMFPKSTHETFATKMFRNFSSHHRLEKTKFSETDFTISHYAGKVTYQTESFLEKNRDYIVAEHCNLLSSSRCPLVSGLFGTLPEESLRSSYKFSSVASRFKQQLQALMETLNSTEPHYVRCVKPNSVNQPQIFENQSVLHQLRCGGVLEAVRISLAGYPTRRTYAEFVDRFGVLVPELMLGSYDERALTKGILEKMKLDNFQLGSTKVFLRAGQIAILDMRRAEVLENAARHIQGRFRTFITRKEFVKTREASISIQAYCRGCLARKKYMVKRETAAAIIVQKYVRRWRLHRTYQQAHSAALLIQSCIRGFIARRYFSVIREQKAALVIQSLWRKRKVIILFQQYRQATVKIQCAWRQKLARRELRRLKMAANEAGALREAKNKLEKKLDDLTLRLTLERRLRAAGEEAKSVEILKRDKMIESLSAECAAAKSDAQSEHDKNRLLQRQLDDSLREITMLRGSKIMTAEAEKENSNLKNLVESLSKRNSSLEYELTSARKGSDATMKKLKDVEGKCNHLQQNLDKLQEKLTNMENENHVLRQKALNMSPLNNMPMTTKAFPQKFATPIGLPNGEQKHGYETPPPAKYLASLPQSLTRSRRTRMPVERQEENHEILLRCIKENLGFKDGKPVTACIIYSCLLHWRAFESERTAIFDHVIEAINNVLKGEEADGRLPYWLSNTSSLLCLLQKNLRSNGLFATPSRRSGGPLGIGDKIVQTLRSPSKLMGRSDTLGQVDARYPAILFKQQLTACVEKIFGQLRDNLKKEISPLLSVCIQAPKSSRAQPGKATKSPGIGAQPPSNSHWDNIVKFLDLLMDTLHENYVPSFFIRKLITQLFSFINIQLFNSLLLRRECCTFSNGEYVKAGLSLLEKWITDATDEFAGTSRHELNYIRQAVGFLVIHQKRKKTLEEIRQDLCPNLSVRQIYRICSMYWDDKYNTQGISNEVVSAMREEVNKYTQNLVSNSFLLDDDLSIPFSTEDLSMAIPAIDYADVEFPESLHHYPSVQLLVKHHDPQPV

SEQ ID NO: 185155 - protein, 106 aa, Oryza sativa
  Clone ID: PAT_MRT4530_82079C.1.pep
VLSSRRNAGDVACVGVEEVVDRNSSTFSSLCVLFAVLSHRSASPTIGTSTGSMTRVSKAHRTPIQIPIRSSFTLGCNPKTIFRSTCQQRPLAECIDPLGIHEDHID

SEQ ID NO: 185156 - protein, 107 aa, Oryza sativa
  Clone ID: PAT_MRT4530_8207C.1.pep
MQGFLRRNQGFEAGANTSNIDPWSIIGDESSVHVTTDRSSCFSQNPVAVRIEVVCDDCPAGGVGIYNPGFWGMNVEEGKAYNLVMHIRSLESVELTASLTCSNGSQN

SEQ ID NO: 185157 - protein, 1507 aa, Oryza sativa
  Clone ID: PAT_MRT4530_82080C.1.pep
MSYRKGLKVWVEEKGEGWVEAEVVEVKDRAVFVLTSQRKKITVLAEKLLPRDTDEDLGGGHVDDMTKLTYLNEPGVLYNLKRRYALNEIYTYTGSILIAVNPFTRLPHLYNEYMMEQYKGVRLGELSPHVFAVADASYRAMVNDSRSQSILVSGESGAGKTETTKLIMQYLTYVGGRAAIDDRTVEQQVLESNPLLEAFGNAKTVRNDNSSRFGKFVEIQFDANGRISGAAIRTYLLERSRVVQINDPERNFHCFYQLCASGKDAELYKLGHPRSFHYLNKSKTYELEGTNNEDEYWKTKRAMDIVGISRNDQDAIFRILAAILHLGNIEFSPGKEIDSSKIKDPTSNFHLRMAAKLFMCDPDLLISTLCTRSINTLEGAIIKALDCSAAAANRDALAKTVYARLFDWLVENINKSIGQDVDSKVQIGVLDIYGFESFKNNSFEQFCINFANEKLQQHFNEHVFKMEQEEYKSEKIDWSYIEFIDNQDVLDLIEKKPIGIIALLDEACMFPKSTHETFATKMFRNFSSHHRLEKTKFSETDFVISHYAGKVTYQTESFLEKNRDYIVAEHCNLLSSSRCPLVSGLFGSLPEESLRSSYKFSSVASRFKVVMNSVADVRKGTKRKISLHYPTFARDFHGVLEAVRISLAGYPTRRTYAEFVDRFGVLVPELMLGSYDERALTKGILEKMKLENFQLGSTKVFLRAGQIAILDMRRAEVLENAARHIQGRFRTFITRKEFVKTREASISIQAYCRGCLARKMYMVKRETAAAIIVQKYVRRWRLHRTYQQAHSAALLIQSCIRGFIARRYFSVIREQKAALVIQSLWRKRKVIILFQQYRQATVKIQCAWRQKLARRELRRLKMAANEAGALREAKNKLEKKLDDLTLRLTLERRLRAAGEEAKSVEILKRDKMIESLSAECAAAKSDAQSEHDKNRLLQRQLDDSLREITMLQGSKIMTAEAEKENSNLKNLVESLSKRNSSLEYELTSARKGSDDTMKKLKDVEGKCNHLQQNLDKLQEKLTNLENENHVLRQKALNMSPLNNMSMATKAFPQKFATPIGLPNGEQKHGYETPPAAKYLASLPQSLTGSRRTRMPVERQEENHEILLRCIKENLGFKDGKPVAACIIYSCLLHWRAFESERTAIFDHVIEAINNVLKGEEADGRLPYWLSNTSALLCLLQKNLRSNGLFATPSGRSGGPLGIGDKIVQTLRSPSKLMGRIDTLGQVDARYPAILFKQQLTACVEKIFGQLRDNLKKEISPLLSVCIQAPKSSRAQPGKASKPPGVGAQPPSNSHWDNIVNFLDLLMSTLHANYVPSFFIRKLITQLFSFINIQLFNSLLLRRECCTFSNGEYVKAGLSLLEKWISDATDEFAGTSWHELNYIRQAVGFLVIHQKRKKTLEEIRQDLCPNLSVRQIYRICSMYWDDKYNTQGISNEVVSAMREEVNKDTQNLVSNSFLLDDDLCIPFSTEDLSIAIPAIDYVDIELPESLHHYASVQLLLKHHDPQPV

SEQ ID NO: 185158 - protein, 120 aa, Oryza sativa
  Clone ID: PAT_MRT4530_82081C.1.pep
MARTHDRAPVIPGFDMCWQIPVIDLSWTTSADLVHESWPPFLADREARLLTPGVFVPRPAAAHLQQMQQLARPCGPVAAARGARAASGDHPIRSFTAQNRCSARLHVRHSTVKVAVDVDK

SEQ ID NO: 185159 - protein, 742 aa, Oryza sativa
  Clone ID: PAT_MRT4530_82082C.1.pep
MAAAASASLEGRGNPSSSGGRTTCLELLFAGARAQRPSSSPAAAASLPGAAALDGLCCDRPDHSGPNPVGTKIYSNKVLEGWIVRVRKVAYRVEDITDEYSYNIALEHENHFKRLIHKFFYPTAFHRIAIELKDIEEEIKHLSQLKRDYREMFNELLDNTSDSAHIHLLSSNGSPHAVKGDDIVGMKEDMELLGRWLDPKELDRTVISIWGFGGLGKTTLVRKVYDWEKGMKSFDCYSWIAVSHNYNINAILRQLIQELSEDQSKIPTDLDTMHHDGYFTELIQQSMMQLVENDEIGRVVSCRMHDIMRELALSFSRKERFGLADINLETQKKDDVRRLLVSNFDQVNQLIKSSMDLPRLRTFIAANRVANYQLLTLLISRCKYLAVLELRDSPLDKIPENIGDLFNLRYLGLRRTRIKSLPISIKKLTNLETLDLKSTNIERLPREVAKLKKLRHIFAEQLYDPEERQLRYFRGVKLPDCAFDLAQLQTLQTVEATKESVKLLKYLPELRLLCVENVCRADCATLFSSLSNMNHLYDLVISANDLNEPLDFNAFNPICTKLEKLTIRGCWDNETFRRPVFCEYGANIKGCWAEDIILRAGWFPQLRTLWLGKLEELRRLVIEEGAIIRLEVLLLLSLPSLREVPKGLELLASLKKLNVTMQHHELKASCEPSRWSLRRISIAAGTVLWLTTSRRRPPPRRRQRKERGEDVAGPAPVGAQESVFRKRARVTNGVGPKSLLTP

SEQ ID NO: 185160 - protein, 311 aa, Oryza sativa
  Clone ID: PAT_MRT4530_82083C.1.pep
MPWLDAKEARSVVYVSFGSAGRMPAAQLMQLGMPLVSCHWPTLWVINGADTLPGDVRDWLRENTDADGVAHAHSKCLVVRGWAPQVAILDHPAVGGFMTHCGWGSTLESVAAGMPMVTWPFFAEQFINERLIVDVLGIGVSVGVTRPTENVLTAGKLGGAEAKVEIGADQVKKALARLMDEGEDMRRKVHELKEKARAALEEGPAERKNNPFAGYRKLMQPRVSRWRQAAVPGDDDELASAARDGLERRGAGLGRRRVAAGSKDGAQGAVMVAARADLGTAALPRADPGAPASKISSLYRGEVTTPYGGLQ

SEQ ID NO: 185161 - protein, 122 aa, Oryza sativa
  Clone ID: PAT_MRT4530_82084C.1.pep
IMRILKDYNQYVMRNLARGYSRKDLGVAYVKEKQLQVNMKINKLRETVKAHQEKLQTVAKTAGINHEEWLANADRWVAGFLEKFEEHCHNMETAIKGRIQEKLRRQTSRGIIGGLMQQPVAA

SEQ ID NO: 185162 - protein, 94 aa, Oryza sativa
  Clone ID: PAT_MRT4530_82085C.1.pep
FLFYWPLHLQHLLLRKSLALPHLKHLVTHHLFLLSPLPFFASSDHPYQHFSNLSYQWLHSLYLLINPPLCRIYPHPGRFSYQRPSSSSFRFLTS

SEQ ID NO: 185163 - protein, 90 aa, Oryza sativa
  Clone ID: PAT_MRT4530_82086C.1.pep
PFLPSDGFHLRTTQVWPQLALGGHPSPYRDITFVRAKGQRLHPHQFGDLSFDRNLAQAQALLAFNGPSRYGISPRANGAPRPLPPLGGVL

SEQ ID NO: 185164 - protein, 95 aa, Oryza sativa
  Clone ID: PAT_MRT4530_82087C.1.pep
NLRRCSFLPGMSSVSFPSLGSGGSPFLAPTVAPCSRLLSVLNSVRSPPGTGSIVTTSVHAKNGFEPVVLCIMHHFRVVLMVSWKSALAFPGYSTQ

SEQ ID NO: 185165 - protein, 81 aa, Oryza sativa
  Clone ID: PAT_MRT4530_82088C.1.pep
MAANTAAAAAVAAALCGDSYGSVLSTFTRNTACKFVEIDQNSEFLQQLNANGSSEQNERRQWEVRRYAIASTFVAGESTWD

SEQ ID NO: 185166 - protein, 437 aa, Oryza sativa
  Clone ID: PAT_MRT4530_82089C.1.pep
MAKHSTTMSCLLFFVLLCLGSHLAQAQVLFQGFNWESWKKQGGWYNFLHSHVDDIAATGVTHVWLPPPSHSVAPQGYMPGRLYDLDASKYGTGAELRSLIAAFHSKSIKCVADIVINHRCADYKDSRGIYCIFEGGTPDSRLDWGPDMICSDDTQYSNGRGHRDTGADFGAAPDIDHLNTRVQTELSDWLNWLKSDVGFDGWRLDFAKGYSATVAKTYVDNTDPSFVVAEIWSNMRYDGNGEPSWNQDGDRQELVNWAQAVGGPASAFDFTTKGELQAAVQGELWRMKDGNGKAPGMIGWLPEKAVTFIDNHDTGSTQNSWPFPSDKVMQGYAYILTHPGVPCIFYDHVFDWNLKQEISTLAAVRSRNGIHPGSKLNILAADGDVYVAMIDDKVITKIGTRYDVGNLIPSDFHVVAHGNNYCVWEKSGLRVPAGRRH

SEQ ID NO: 185167 - protein, 176 aa, Oryza sativa
  unsure (1)..(176): unsure at all Xaa locations
  Clone ID: PAT_MRT4530_8208C.1.pep
MSASNTHPRATLTSRCQPRKLTPHRPPAAPSHINSCRAAYRRRRPHATSMLHSPATSLHPALSTHPLPATGAGLPLPSVPSTRSRPWAPTARCHPHHTQPPSPAAPRPDLRGGTGSGRGGPGXQPTRSAPPPVPRRSFAGSVSPPRRCQICPREPPPSLDLPIAEAVTVGSTHRSP

SEQ ID NO: 185168 - protein, 165 aa, Oryza sativa
  unsure (1)..(165): unsure at all Xaa locations
  Clone ID: PAT_MRT4530_82090C.1.pep
ASEGGTTTERRTRQRAQGNDGKKRTTNKSEAPKKKQTQRQHSKRSKATKGGKPTRRXGSTPQGRXRRRRKSNRTRREKQTARHEKETDGRKEXGXXGXQXSHPHPPHHPRPSNLLSHKPHHPSSDHPPPPPPPPPRLVAALPPPRRRRRPRVCLARLACGEKRVA

SEQ ID NO: 185169 - protein, 169 aa, Oryza sativa
  Clone ID: PAT_MRT4530_82091C.1.pep
MRGLYLSIECMNTLNEGLVLHHASVGCPKPQWSKYLSFLKSRRFSELTKPKHWNGQTIENRNIVQHVASLKEDHKLPKIHTLFSTECTPYFDWQTVGLMHSLRVSRQPGNITRLLSCSDEDLKNYKGHDLAPTHYVPSMNRHPLTGDWYPAINKPAAVLHWISHVETDA

SEQ ID NO: 185170 - protein, 191 aa, Oryza sativa
  Clone ID: PAT_MRT4530_82092C.1.pep
MIFFCRLLVPISLNCPPPPLFCLCYSAALNCYSKFRIVSVRSLSILNLQEIDPKVENDDFANEGMEGFLSELTNAIPGVDEAMSFAEMLKLVQTMDYSVVVFDTAPTGHTLRLLQFPATLEKGLEKMMALKNKFGGLLNQATRLFGLGDELNEDAMLGRLEGMKDVIEQVNRQFKDPVSLTKTCRESEFFY

SEQ ID NO: 185171 - protein, 107 aa, Oryza sativa
  unsure (1)..(107): unsure at all Xaa locations
  Clone ID: PAT_MRT4530_82093C.1.pep
RVCFLVLWIGHQDLRRPPSGSCFAGWGPHPRAAQSHATTSAVRLGGRANGDERXAAWTSSVVGATPSRHFPSSAKDGGGVLQDSXAGNPTRLRGGEGAVVPLPRKLQ

SEQ ID NO: 185172 - protein, 105 aa, Oryza sativa
  unsure (1)..(105): unsure at all Xaa locations
  Clone ID: PAT_MRT4530_82094C.1.pep
MFAYAITLSHDEDIRVVSSNLGVVSRLLGIIIWVYMLWKRGGLLMVTAQYGYSSAHVYNPXLISWGGYSSVFSSGCIVMTSYRKKLGSXGRLLKVPGGHEKEDIS

SEQ ID NO: 185173 - protein, 68 aa, Oryza sativa
  Clone ID: PAT_MRT4530_82095C.1.pep
NRERITDRSWCPIHKTKKHTLQDCWVFINVHAEIRAPPPRGTGDLRDQINGRREARRARDDVNHSRRH

SEQ ID NO: 185174 - protein, 501 aa, Oryza sativa
  unsure (1)..(501): unsure at all Xaa locations
  Clone ID: PAT_MRT4530_82096C.1.pep
GFGLLTRLEAPELTGAFWEAAPPHLHLLAVVSGFLRTLSWSTPPPSFAEDGKCRLGVAPTTDEVQAAQRSSPFARPPNRTADVVAWLCAALGCGPQPAKQEPLGGRRRSWCPIHKTKKHTLQDCWVFINVHAEIRACKERGIQRTSPTRDVYCPIHKTKNHDLSSCKVLLGAMKTPSPKSYVPVRDNGKEQGATPAPDRFVGVIDXDAAREVLAIDGVGTSAQANAETANQSTTPAQHIRAVXAILRETPYDPVLNDDLERWTEQLRASVTNLSNAFEEAATAAQQNRSPVGDANGEILERRESPRQATPPPRGTGDLRDQINGRREARRARDDVNHSRRHVSSRHHDRRSRPNEDRDYDDRDRRGPDSIGHGRRRNDEDEEDRRRDNSERRRQDSRDPGRHPRNRTPEPSDPSSSSSSSESSSSSDQDPRRSRDRRQPAAPSAGCRAFGRSLRDVRWPERFRPGAIEKYDGSTDPEEFLQVYLTVLYCRAIDLNYLSNLY

SEQ ID NO: 185175 - protein, 194 aa, Oryza sativa
  unsure (1)..(194): unsure at all Xaa locations
  Clone ID: PAT_MRT4530_82097C.1.pep
KSRDENGDDGFFFISPVIXNGASSPPKKPRVVWFVXLPPKFVAAVYPLGLEKAVPKKILGFLNVETLPRGNVFCLFQKDRLSLXRLGPYASRRGTLAAAFGGRNPAFINMNSFGNSPAYGXFRPVPTAGHTPANNLFFRMDPPFGFGVHGLLPSPPIPFGHAPNNLGPSLNDLGGGAFPLGKRFPLPWDLPIEA

SEQ ID NO: 185176 - protein, 64 aa, Oryza sativa
  Clone ID: PAT_MRT4530_82098C.1.pep
MGGIVVVQLDASETIRENLEKKERETCRDSVCAVQGKWMNDLIAQERGKAVIMYHDLDAPVTSL

SEQ ID NO: 185177 - protein, 751 aa, Oryza sativa
  Clone ID: PAT_MRT4530_82099C.1.pep
MDFFLTVTDSSIGPPGAAQYANGLLGLDARGAAHCWKTRIGRGEGGKWVAARRRGGAAGRGGRWPISPALVERSGVGEASPAAGRRRGGWEAVMETAHEVAIYIDRFHNLDLFQQGWYRLKISAAWEEDEYRAPVSPARVVQYEVPDIGSKGAFGLWKIDDVDNSFYTQPFQIKYSRQDIYLSVMVSFYIPNTEDEGPATSSVILKFELIYVPTLEDRTEIEDPSDIYVPVHEFRIPYKALLGLHAYFPVHFDAFHPVLVDLTMHIVYLKAGVTKSSQKASEQGLCSKSCYIIKALLSSREILLEEVMKMSAGIGKTLEDLDDADLTLGKHEPIDSSKAGLPKYSKGLYIPTKCIGHLTGVLHDLIERSDNVVRSTNDILLYTLSKEDLLELFQAPVQNSSSRAELHRRSIAQMKVGSQSMLKTETICITPKKRILTQIILQINARFIQDMQIYANPSEIPVVHIEQHVMVVPQHGSSKRLGHHLDLRLIRNQWILCDPGAECLLSQTNEDRTCGDFKEMGRRLSNEVVAFLKRKIDRYSRNGGCKDLKLSFVGHSIGNIIIRSALADPKMQPFLKNLYTYMSISGPHLGYWYSSNSLFNSGLWLMKRLKGVQCMHQLTFSDEQDPQNTFFYKLCKLNTLDNFKNIILVSSPQDGYVPYHSARIDSCPASSSDNSKKGQVFTEMLNNCLDQLRAPSSETRVFMRCDVSFDQSSHGRRRSLNTMIGRAAHIEFLENDLYARFIMWSFPDFFR

SEQ ID NO: 185178 - protein, 140 aa, Oryza sativa
  unsure (1)..(140): unsure at all Xaa locations
  Clone ID: PAT_MRT4530_8209C.1.pep
PIVEFVSNSASTVPTPFFXQSPVFKLRNCQVMQQLCCQQLRYXIRNKSHCQPQLASVQAXIVQQLQATNKFAGVYXDQAQAQAQAYVAPLNFAVKIWRYXYPSYKQLLHCSIPTVGGIMVLNCTKYSSTGEKNKVMHHRV

SEQ ID NO: 185179 - protein, 95 aa, Oryza sativa
  Clone ID: PAT_MRT4530_820C.1.pep
SEQKLQFSVPSCVASPPRFAACFAKYKAWSSDPFCFDVQGQNKHTHTHLSLLQVSGLLAALLLLPLCGAPALLRLMIGDPTIFITYRDGVWCINP

SEQ ID NO: 185180 - protein, 273 aa, Oryza sativa
  unsure (1)..(273): unsure at all Xaa locations
  Clone ID: PAT_MRT4530_82100C.1.pep
MEIRILVIRASVLGFLENQDVSLEEREPENFWKESWKFQIRGVEREKEAGDDEEEEVRGAMQGDLSDRPVLEDEPLWIIFAKEMIINLKEGMMINSDKTIDRRGAHVRITNGVQVTVQNSNNVIIHNIHIHDIVLGKLGMIRDSLEQFGFRTQCRWGYFHVVNNDYTHWLMYAIGGSKNPTIISQGNRYTAPPNLTAKQITKHLGAAEEEWKNWXTWHLEEDLFMEGTYFTTSGDATQKQFSNKDLIKPKPGSYVARLTRFAGFIPCTPGKKC

SEQ ID NO: 185181 - protein, 105 aa, Oryza sativa
  Clone ID: PAT_MRT4530_82101C.1.pep
RSRSRAFAHRSLGRFPPPAPPSSRLCRPPHVARLFPPPPHAARRCYPPRSRSLRRFLPPALPPPLPLMLTPTSTLPWLPASTAPPLRRSCSPASPPSSIRAARAR

SEQ ID NO: 185182 - protein, 319 aa, Oryza sativa
  unsure (1)..(319): unsure at all Xaa locations
  Clone ID: PAT_MRT4530_82102C.1.pep
MEIRILVIRASVLGFLENQDVSLEEREPENFWKESWKFQIRGVEREKEAGDDEEEEVRGAMQGDLSDRPVLEDEPLWIIFAKEMIINLKEGMMINSDKTIDRRGAHVRITNGVQVTVQNSNNVIIHNIHIHDIVLGKLGMIRDSLEQFGFRTQSDSDDINIFGSTNDGLIDVIAKSTGVTMHLQLPPHQPQRHQALQLQCRWGYFHVVNNDYTHWLMYAIGGSKNPTIISQGNRYTAPPNLTAKQITKHLGAAEEEWKNWXTWHLEEDLFMEGTYFTTSGDATQKQFSNKDLIKPKPGSYVARLTRFAGFIPCTPGKKC

SEQ ID NO: 185183 - protein, 210 aa, Oryza sativa
  Clone ID: PAT_MRT4530_82103C.1.pep
MAASSWWVVAACVVLAAAAAADPRDGFTAVSLGDGNFQLQWPYDVESSSRYSFDGTVRRLWVFSDDKPFKPQSGTNPRTEIRMTGYDYSSGVWQFEGTGYVPSGTTGVSIMQVFGGGTATTLMLHVYGGDLWYYHQQVVETNIYDRWFRLNVIHDVAASQLTVFIDGRERLRVAGKGGDSHYFKFGVYMQTNPSNRMESRWKGISILNKT

SEQ ID NO: 185184 - protein, 119 aa, Oryza sativa
  Clone ID: PAT_MRT4530_82104C.1.pep
PSKQVSAPTLRPSCWAAFRPALRRLVLRRLPSHADRVRLRAVCHPWRSNAEMQFVPPPHPWRSNGQMQPFPPPLPWLGLLDGTFLGIASCAIHCMTVPDDACCHGSLGNWLFLMKSDGG

SEQ ID NO: 185185 - protein, 678 aa, Oryza sativa
  Clone ID: PAT_MRT4530_82105C.1.pep
MEVYRNLLLLPLLLALVAAAASAAGDERAVLEVSGSPEGVVWVVQLSDLHFSVHHPDRAYDFRRYVGPALAMVNPALVLITGDLTDGKSKDLLTMKQNEMEWIEYRSKLKDVIESSKLPRSIFYDLRGNHDSFGVPSPGGDHDFYQKYSINAILRRHSRVQSITLENSGRKHLFVGFDSTMEIGLRGPTNLFGHPTDKQLIELDQSLSQWDTDFNKAQVTKVAFGHFPMSFSTLTESGKSIKDVFLKHSLAAYLCGHLHTRFGKNLKRYYHRSTEGSPLSEHYYQFNMHQGYEIHSDKESCSKEAVHAEEEFWEWEMGDWRKSRSMRILAIDDGYVSYTDIDFRLGSKSIIVLPTFPLDSRFMQRATASRDFKCQVMGASTFDTVRALVFSRHEIVSVSVKIYDSRSGHLDVVFDSEMKRVNANETRGDMYLVPWNWRAFADPSLNRYWLQIEVMDITGDASVSQLRPFSVNGFASKVSWTWKEFFVMGIQWALVYHPALWVTIVWSLLLVYMIYLLVFPWLFGHPITEDSNLASMTFRGWILGKSNSGSEVLHAGTPDVMVIVLPHLCFVVLPTIVILAAMAAERTAYREQYLSQSGKKKDDHYQKSRRQKEHDNFWNSRWTRKFLFLLCLAVLWKHWKHCRALVKAYAMNPVIHSPVHFFFIPVLIAFAIYKTSSL

SEQ ID NO: 185186 - protein, 104 aa, Oryza sativa
  Clone ID: PAT_MRT4530_82106C.1.pep
DRTKPPLCPSLRSCSPASNLLLLLVQRWSKRGLDPQYSLLRDPQTKAYTEDLTFENKRKQNYTDKLKGSLCFDKITLNVVQKIHSFLQLQNQFYFAITQTKIHD

SEQ ID NO: 185187 - protein, 52 aa, Oryza sativa
  Clone ID: PAT_MRT4530_82107C.1.pep
FHITQGEPIYGDGSYKVGGTQATTQIGSLRANYRMEISENCYSMNINYLLIT

SEQ ID NO: 185188 - protein, 301 aa, Oryza sativa
  Clone ID: PAT_MRT4530_82108C.1.pep
MASLWRLALAAAMCGALILSSSSSAAAAGKKTGRITVYWGQTAAEGRLREACGSGLYTTVIVSFLTGFGGGRYKLDLAGHDRGAVGPDVKYCQSRGVLVLLSIGGGIGRYSLASKADAKAVADHLWDFYLGGRSKSRPFGDAVLDGIDFDIELGRPAHYDDLARYLKAYSGRKPGGKKVWLTAAPQCPFPDRMLGEALRTGVFDRVHVQFYNNPACSYRASNAAAFAAAWRKWASSLPRSSVYLGLPAAPGAANSGYVPPAALAGEALPIVQRSRNYGGVMLWSRYWDRRTGYSKKIKHAV

SEQ ID NO: 185189 - protein, 89 aa, Oryza sativa
  Clone ID: PAT_MRT4530_82109C.1.pep
MVASVGGGGRVAAGPRQRRAGAVSATVAGAGGGDGAWAERQRWRQGDTNQVFDEMPTRDVSPSPQRREYDPAGPVGPQKRCYLARLHPR

SEQ ID NO: 185190 - protein, 214 aa, Oryza sativa
  unsure (1)..(214): unsure at all Xaa locations
  Clone ID: PAT_MRT4530_8210C.1.pep
KGLVLLARTILRFRRPKTTXLLARRXPYRXPAREEGTATLPWRPDAMAXNLPLPTSDLPQXTQSFAXTHGLSXQDDMVILSGAHTIGLAHCSSFSSRLYGYNSSTGQDPXLNAAMASRLSRSCPQGSANTVAMDDGSENTFDTSYYQNLLAGTRGLASDQTLTADNATAALVAQNAYNMYLFATKFGQAMVKMGAIQVLTGSDGQIRTNCRVAN

SEQ ID NO: 185191 - protein, 47 aa, Oryza sativa
  Clone ID: PAT_MRT4530_82110C.1.pep
TECIETVHGSIEVDPVCQPRRVADKRTLLDTTRATHGKTTWLPSGHT

SEQ ID NO: 185192 - protein, 186 aa, Oryza sativa
  unsure (1)..(186): unsure at all Xaa locations
  Clone ID: PAT_MRT4530_82111C.1.pep
XLSXXLTAPRHARRVRAGETSHERSPRRRRGVHPAAATAPPCSAMAXGAASPRSPPAAKKRAVVVAGDXDNSXVFDRLPDDIVLVVLSRLAANAASPPTSPRRXSRXXGSGSXRRTRRCCXARXRXSXXCGGARCPXXLTVLAAVRGRRAPPXCYFLGMVRFXXLGXXAXGAXLLGXXXXXXXPXF

SEQ ID NO: 185193 - protein, 148 aa, Oryza sativa
  Clone ID: PAT_MRT4530_82112C.1.pep
AHFLRHLGEHHLLRRQLIPQSTGTSPPAGLRGAPWPCVICRPLDGTDNAKTVLPPGIYPLSLAGKRRRPERKKGRPVGGAQPRVGAGQGGVWARARQLFPPHSSPSIHVWIWCGLVTGCAAEALGPYRLQRSLSLHAVVPLRFQHLRL

SEQ ID NO: 185194 - protein, 291 aa, Oryza sativa
  Clone ID: PAT_MRT4530_82113C.1.pep
RKFSCWKEVPLPKYHFLDEGPVQQEDGLLHTTCGTPNYVAPEVINNKGYDGAKADLWSCGVILFVLMAGYLPFEDSNLMSLYKKRITIAELINNEWFKKGYQPPRFETADVNLDDINSIFNESGDQTQLVVERREERPSVMNAFELISTSQGLNLGTLFEKQSQGSVKRETRFASRLPANEILSKIEAAAGPMGFNVQKRNYKLKLQGENPGRKACATTLSWVYRLKSVHPFLKVFEVTPSLYMVELRKSNGDTLEFHKFYHNISNGLKDVMWKPESSIIAGDEIQHRRSP

SEQ ID NO: 185195 - protein, 462 aa, Oryza sativa
  Clone ID: PAT_MRT4530_82114C.1.pep
MSVSGGRTRVGRYELGRTLGEGTFAKVKFARNADSGENVAIKILDKDKVLKHKMIAQIKREISTMKLIRHPNVIRMHEVMASKTKIYIVMELVTGGELFDKIASRGRLKEDDARKYFQQLINAVDYCHSRGVYHRDLKPENLLLDASGTLKVSDFGLSALSQQVREDGLLHTTCGTPNYVAPEVINNKGYDGAKADLWSCGVILFVLMAGYLPFEDSNLMSLYKKIFKADFSCPSWFSTSAKKLIKKILDPNPSTRITIAELINNEWFKKGYQPPRFETADVNLDDINSIFNESGDQTQLVVERREERPSVMNAFELISTSQGLNLGTLFEKQSQGSVKRETRFASRLPANEILSKIEAAAGPMGFNVQKRNYKLKLQGENPGRKACATTLSWVYRLKSVHPFLKVFEVTPSLYMVELRKSNGDTLEFHKFYHNISNGLKDVMWKPESSIIAGDEIQHRRSP

SEQ ID NO: 185196 - protein, 317 aa, Oryza sativa
  unsure (1)..(317): unsure at all Xaa locations
  Clone ID: PAT_MRT4530_82115C.1.pep
PRHADAPAPLCFRRRRAPSRXRRRPVSRRFPAPPPPPSPLEPPRCAAXGRARAVPPIPPPHGRRRQPPPRRLSLIRTVELAPLDPRLLPVHAAPPGSPPLAGKPRMPIVGNAGAGSVGANPGSWLPEWKRIVVLLGSWTLGVQENEKGSGSRFNQVKWLWEPRSNDLTREQQSMDVPFFLAFAIIALLSRYVPFALPPMARDLLADNSAEPARAAKCAVSVAVAGLMLLVSLQCGAGGEQYCPDVRVEGRALWLNCAALFLGMVVGGVAVVVMPPLAAVSPLVQVMVEHLTRFTETIAVTAFAHDFCIFIKLVRLKQ

SEQ ID NO: 185197 - protein, 105 aa, Oryza sativa
  unsure (1)..(105): unsure at all Xaa locations
  Clone ID: PAT_MRT4530_82116C.1.pep
MRFNRAPKRQVQLGDQFREPPRKASRRRRDISSASGQAERKGAILGAAGGIGQPFSLLMKLNPFDSALSLXTISGEPPGMAADVSHINAPAQVKGFMGDDQLGEA

SEQ ID NO: 185198 - protein, 233 aa, Oryza sativa
  Clone ID: PAT_MRT4530_82117C.1.pep
MAMSALFGQRLPCEFSPLFLLFYFFFFLLCLTMTHNCVMYLKNKEKAAGSVKGKTAIPATPRRCRRPDGSNPACKMRWERPPEGWMKANVDGSFDSQLLKGGIGVVIRDWEGAIIFASCKSMCRCSSPLEAELLALREGIYLFLIWTLRPVILETDCLVALQMIQSKERATSELAYLVREIRDLLNGSREFVLWKIRREQNMVSHFLANKRRCEDLSSRVSISYLVRNNIIPE

SEQ ID NO: 185199 - protein, 298 aa, Oryza sativa
  Clone ID: PAT_MRT4530_82118C.1.pep
MLTWCLYGNTILKIMGPYVNIKENKNRKAPYQKLQPKLGRWLSAKPSGTEVMLNSANGAGADLVPPCWPSASPCRRGRNISANRIGDGCLGRIASAMPQSSCLHQDSFGQRYWMCRNYAYNLEKPKPVPKGKKGKAKMPVKWIYKEMTEFYKGMIQTWREHQKEHEERQRQRAAKEKAERERREELDLREFARLNREKEEGAKDQARKLVAKSLPSQYVQLASLQADRSAPAKMALGLGTLAPQALALRSDLAASVEPQTCNPSRWLRVRTSAPAKMALCLGTSAQAKMALCLGTSAP

SEQ ID NO: 185200 - protein, 437 aa, Oryza sativa
  Clone ID: PAT_MRT4530_82119C.1.pep
MARMPPPLAVACTALLLLLFVSVSPCRAASGGDPSAVLLPVSKDDATQQYVTMFRQRTPQAPVKAVLDLAGATLWVDCEAGYVSSSYARVPCGSKQCRLAKTNACATSCDGAPSPACLNDTCGGFPENTVTHVRTSGNIITDVLSLPTTFRPAPGPLATAPAFLFTCGATFLTEGLAAGATGMVSLSRARFAFPTQLAATFRFSRKFALCLPPAAAAGVVIFGDAPYVFQPGVDLSKSLIYTPLLVNPVSTAGVSTKGDKSTEYFVGLTRIKVNGRAVPLNTTLLAINKKGVGGTKLSTVTPYTVLETSIHKAVTDAFAAETSMIPRVPAVAPFKLCYDGSKVAGTRVGPAVPTVELVFQSEATSWVVFGANSMVATKGGALCLGVVDGGVASETSVVIGGHMMEDNLLEFDLVGSRLGFSSSLLFRQTTCNNFRLG

SEQ ID NO: 185201 - protein, 199 aa, Oryza sativa
  unsure (1)..(199): unsure at all Xaa locations
  Clone ID: PAT_MRT4530_8211C.1.pep
WDSRCSPDAPVPAQHSTQGKSXQLAEGWGEDRRGNAGEEEGVGGQRRAATRQQATAPGGEEAGEEEGVGGQRRAVTRQQATAPGGEEACCRXGVVTAANELEDAAGLRARLRRMWWDAGVDGVMADVWWGIVEGTGPARYEWRAYREPSRCRAESATSATMTPTPGGATNQEYLTIGVDDRLLFHGRTPIQIMRSYQGC

SEQ ID NO: 185202 - protein, 887 aa, Oryza sativa
  unsure (1)..(887): unsure at all Xaa locations
  Clone ID: PAT_MRT4530_82120C.1.pep
MAQHAGNVVLPSSHITEERHLSLIRKIMPDGSVVRAREPQPRPRYLDRADPTFLPFLLQGVDVKTRGLGDLLNSSVANPSAHKAISKRFPFRSNLPPTEMSYYASPSVAPSAEYAEKTALEKSGAVWYKRVSASKHVHWDELGISQALALTLANLDNDEPLMASAAYFWSNAFLFNQGPMTPTLHDITMITGLDVTSSANPMSLNTKNQFDFKTKSIGGWSGYVAAYMGKGPVTPREHTAFLLMWLEKFLFCGSSCGPTTNWQFLAEALETKRQFLLAKILLGYLYQMLNNASAKIAVGSVVSAGGPWWLLQTWINFVAMKAVNRPAVTEAEFPRLEPITDGDGEERTHRRCMSYEEYASTPADAGAKLLAELLNDWFCSFYEGFQKDARVWFPYEDLVNLDLPADFRFEDINSEKFDKSREVFSAAIXPCILPVGIHQGRNIQXDNIELAKFRSKNFDRCWGEWKQHIFHQLASMYMTDLFPDVVPQTTESSPPRKSNSGKDIEYAPGLLRNGGGLTPPVIGYHAPKTSSLLQGQMREPADVGRKRKTKAPAIDPSALAPMKKAKKHKPKLADDLPTLDPSIQQALDEEEIEEDVDQAAAELTDYLSISHLPKKKIAEKKKSAATTLKPAPPMSSDCTPSTTGSHHVEEEEQPAAPAIPALADLFSFDIKDYFDEEAEDESTSKALAPLDETVKKILEDISLRLESSLDNLVADCGSFQARFAEIQAQIPDDLANTITPAIYLEQHQFNLKKAKQRIADRRDRKDIEDTIQANRQLVHEEKAKLDQLSVRPIQSNIDRLEARKIDLIAQLEECNAELYQVGQKLANLPSAIEEQKSRLRSAIKNVADMTKSLKVISGTDAEDIQAIKEVDQIRQGTVSAIQCYLSG

SEQ ID NO: 185203 - protein, 164 aa, Oryza sativa
  Clone ID: PAT_MRT4530_82121C.1.pep
MAGKAGGLKGVALIGGAGGNSAVAGALHFFQDPSTGYTEVRGRVTGLAPGLHGFHIHSFGDTTNGCNSTGPHFNPHNKSHGAPSDDERHVGDLGNIVANKDGVADIFIKDLQISLSGPHSILGRAVVVHADSDDLGRGGHELSKTTGNAGARIGCGIIGLRSAV

SEQ ID NO: 185204 - protein, 194 aa, Oryza sativa
  unsure (1)..(194): unsure at all Xaa locations
  Clone ID: PAT_MRT4530_82122C.1.pep
MAGKAGGLKGVALIGGAGGNSAVAGALHFFQDPSTGYTEVRGRVTGLAPGLHGFHIHSFGDTTNGCNSTGPHFNPHNKSHGAPSDDERHVGDLGNIVANKDGVADIFIKDLQISLSGPHSILGRAVVVHADSDDLGRGQKSNCQSLFLCCIYARFVXGHELSKTTGNAGARIGCAYKRCCFEFGHKPMSFMVLL

SEQ ID NO: 185205 - protein, 140 aa, Oryza sativa
  Clone ID: PAT_MRT4530_82123C.1.pep
MAWWRKKVVFPARRAWAAVSTRVRARKPASLQVLAVSVSNNSDLLGLKRLFLARTEEESSGGSILKLHEDVQTCGYKDVQLSGIIIHPPARLSGKRAKIFGSISVGLSGFWQVQLVGFLSCQKSTFSRTEQPQRSNPLMV

SEQ ID NO: 185206 - protein, 55 aa, Oryza sativa
  Clone ID: PAT_MRT4530_82124C.1.pep
CLKSSVLLVLFRSVLGGRSYLRWCRSISSWSDLKCLSSNGIATHSSEGSFYVHMN

SEQ ID NO: 185207 - protein, 174 aa, Oryza sativa
  Clone ID: PAT_MRT4530_82125C.1.pep
MQAYLLDAEAITGILKVEQLCLQALCMKEYLGAPIIDVPVDINFPIKDLEIGRLNRKGPSTPVASKSISGSDLPEFVKIISSCPYGIGKLVESLRVQFPCVPKLQLKNKIWEIADFTNNRWQVKKDILDWCGLSLPPDKDRGIQQMQPDESGDSVQPSPQPGAKLEIHKHQIDA

SEQ ID NO: 185208 - protein, 68 aa, Oryza sativa
  Clone ID: PAT_MRT4530_82126C.1.pep
MAVDRRAEHNAAQNGSSKRVPSVGGGKEREVLKIDSETKSNQPPTKKASSKPAPKKNDKVQGGGKGKK

SEQ ID NO: 185209 - protein, 292 aa, Oryza sativa
  Clone ID: PAT_MRT4530_82127C.1.pep
HEGFPRQPNRFALTPPAIRDQTRGPLRSTNTSHATPREPVRSPPPAPRLALWLVASPAMSTQSISPAAAAASAQYSYPAAAAAAVPSYFPVPFHLQNVQQPATWPAAPAAYNAVYPMPQVQQVQQLFQKDSQIITPEALATVKAAIANSEKDKKIEANKKAVPRKAAGQSWEDPTLADWPENDFRLFCGDLGNEVNDDVLTKAFSKYPSFNMARVIRDKWTGKTRGYAFVSFANASDLAAALKEMNGKYVGNRPIKLRKSTWKNRIDYEALQKPKTQPQKKFKAQKKSILHK

SEQ ID NO: 185210 - protein, 531 aa, Oryza sativa
  unsure (1)..(531): unsure at all Xaa locations
  Clone ID: PAT_MRT4530_82128C.1.pep
MAEEKESFESQWASSDLMEENLKEMVAHGVLPAKEIIGWRPAFGEAFLTPDTHEVVFFRGILNFYGINLHHLNPNSIVHIANFVHVCEAFLGIRPHFALFRRIFFLKPQPNKSKPCVVGGAGFQLRGTLSQKYFSMPFKTSNKGWHANWFYVQNPEPALPEYSCLPLVYQDNWNSLPMGDEAAQALELMERMLKLKEQGLQGEQITRHFIKCRLAPIKERSRTAFEFDVVPYNAFNPSPLEFALMKSDPPIAQRRSPRHQTVQGSGGPKIRSDSQSKTPNPTGQSDSRKRKLVLSDDEGDDNNKFGDKGSPKKLPKHTAPKKKKFRKSSRKPSDIDPSGKDSDPANTETGSSKEAGPTSEDHPTGVQTSTDYVNPSDQPPTGNQLAEAETATSQEPPTGNQSEVGPDQEIPEVEVQATTSQGLDAGNDPTPGSPDKGQGSPHAQPEIASGPLGGDGEEIPRIKATTDSRPPILIKWWDDNLQPAGIVINRQKEDEEVRQLKKALGXEATRIVNVSLPGGCLWRPCFLLSKT

SEQ ID NO: 185211 - protein, 833 aa, Oryza sativa
  Clone ID: PAT_MRT4530_82129C.1.pep
MAEEKESFEGQWASSDVTEENLKEMVAHGVLPAKEIIGWWPACGEAFPTPDTHEVVLFSHFFYGGFALPTTKFFRGILNFYGISLHHLNPNSIVHIANFVHVCEAFLGIRPHFALFRRIFFLKPQPNKNKPCVVGGAGFQLRGTLSQKYFSMPFKTSNKGWHANWFYVQNPEPALPEYSCLPPVYQDTWNSLPMGDEAAQALELMERMLKLKEQGLQGEQITRHFIKCRLAPIKERSRTAFEFDGKHDPNREHPDSLDFKIMKERMYKIFSNAIVVSYSHLLPVVPYNAFNPPPLEFALVKSDPPIAQRRSPRHQTVQGSGGPKIRSDSQSQTPNLTGQTNSRKRKLMLNDDEGDDNNKFGDKGSPKKLPKHTAPKKKLSSRPMPKFTKSSRYKPSGTVSLRHASLMKIILKTRRKLCRKPSDIDPSGKDSDPANTETGSSKEAGPTTEDQPTGAQTSADKVNPCDQPPTGNQSAEAETAKNQEPPTGNQSEVGPDQEIPEVEVQATTSQGPDAGNDPTLGSPDKGQGSPHAQPEITSGPLGGDGEEIPRIKAAADSRPPILIKWWDENLQPAGIVINRQKEDEERIHLRYEAKTTTLEKLVPHLGTLEAVRDQLHEAKELAKKTEHDLRDRITQLQDSNFELSGSSKVQAAKIAQLEKRIEALENNKAELAAQRDSALKEVEDRKIKSQAQFDVLVGKIKRLEGARDEVANAATPLVQAMFYNNNGPSRFHASEVFDKLRIAPDTYFKNIREAGSMGAGLALAMTKSLYPKIDIDTVDGFADWTSEEAALDLINDAQKAADKIAGDVVDRFQDTDLRPTGNNNSDDEKTDTD

SEQ ID NO: 185212 - protein, 130 aa, Oryza sativa
  Clone ID: PAT_MRT4530_8212C.1.pep
MPFWHRPDNMYDGMSSLKLQDEDCHHLLVATSRRRCGELSERRWCNASFQTPADEENTLADWWLATRRCFRTSYRTDFDSAFMLICWLIWKERNAKIFQHVSQTLDQPAEDIKEEIAVWGVAGIFSQFRE

SEQ ID NO: 185213 - protein, 826 aa, Oryza sativa
  Clone ID: PAT_MRT4530_82130C.1.pep
MAEEKESFESQWASSDVTEENLKEMVAHGVLPAKEIIGWWPAFGEAFPTPDTHEVVVFSHFFYGGFALPTSKFFRGILNFYGINLHHLNPNSIVHIANSVHVCEAFLGIRPHFALFRRIFFLKPQPNKSKPCVVGGAGFQLRGTLSQKYFSMPFKTSNKGWHANWFYVQNPEPALPEYSCLPLVYQDTWNSLPMGDEAAQALELMERMLKLKEQGLQGEQITRHFIKCRLAPIKERSRTAFEFDGKHDPNREDPDSLDFKIMKERMYKIFSNAIVVSYSHLLPVVPYNAFNPPPLEFALMKSDPPIAQRRSPRHQTIQGSGGPKIRSDSQSKTPNPTGQSDSRKRKLVPSDDEGDDNNKFGDKGSPKKLPKHTAPKKKLSSRPMPKFRKSSRKPSDIDPSGKDSDPAKTETEAEIATSQEPPTGNQSEVCPDQEIPEVEVQATTSQGLDAGNDPTPGSPDKGQGSPHAQPETASGPLAGDREEISRIKATADSRPPILINWWDDNLQPAGIVINRQKEDEEVRQLKKALGEATRIVNRIHLRNEAKTTTLEKLVPHLGTLEAVRDQLHEAKELAKKTEHDLRDRDGAGGSSPGDRAGPPLPPTPTSTPGGDRRNAGSWLSDADATSVRPVTDRSFLSSMRQFSDLHDHPSFCSILPVMVGMKPGIHLTRANVPSLRDRKIKSQAQFDVLVGKIKRLEGARDEVANAATPLVQAMFYNNNGPSRFDASEVFDKLRIAPDTYFKNIKEAGSMGVGLALAMTKSLYPKIDIDAVDGFADGTSEEAALDLINDAQKAADKIAGAVVDRFQDTDLRPTGNNNSDDEKTDTD

SEQ ID NO: 185214 - protein, 160 aa, Oryza sativa
  Clone ID: PAT_MRT4530_82131C.1.pep
SPSSTVFVPTWFSARLLLQQALHPRRLEGGSGRHEGEDLEFPDVFWASGGRPWVQLLPGPSKLYLGSAPHGSLTKRAPPQGILLFPPRSPHAPECCRHRVLLQIEHRLPSVRFAAWPAGVWTPHVIRTYCKTLLCLPQIPHPHRHSRRFLELHLLACPRH

SEQ ID NO: 185215 - protein, 501 aa, Oryza sativa
  Clone ID: PAT_MRT4530_82132C.1.pep
LELRGSSRVDLQACKLRARSEKISSKSSFRDDQEFPISAPKTPVKMRSRSPKITTAKSTSDQRKVSATCYDCGEQGHYVRNCPWKVFARSPEKDEKQCPGSNQAPSQSTDKKDGTLQRNSGANRTVIWKMDNGRTIIITSSEFTPEDAARIPKRERFSADDDDDNDDDNDDNDDATLDSFRERELKFKACARCGIVGHTASLCLPTCRCDHVPKDCQLNAVIAKTKKEQGTTVQPIRQPMTIDNSGHNPSALSLTPAPVEANHGRSNVTKDVHKPLLVPVSAAKVHNQKPAPQDQASRLCRNCRKPGHRFSDCPLPRAAKAVRRDSQVTSTAHDTKRHLNVQPPPQRIIVKGTVKGRIVPPAIVSSLQHQRQQGKQCQENNSSLQLQRGGTLLRQHPQQVLSAPGRPTVVSSSNAPGIAPIWRPIDKSPLGNPTGKKILPVTADKIVAPPPSKINKQSNVPETLGNSLTLEAVTGWTRSSGRRINELQMPDASLRNNFTLL

SEQ ID NO: 185216 - protein, 91 aa, Oryza sativa
  unsure (1)..(91): unsure at all Xaa locations
  Clone ID: PAT_MRT4530_82133C.1.pep
TTSQGLDAGNDPTPGSPDKGQGSPHAQPETASGNLSSQVMLIXGIVINRQKEDEEVRQLKKALGEATRIVNVSLPGGCLWRPCFLLSKTKP

SEQ ID NO: 185217 - protein, 63 aa, Oryza sativa
  Clone ID: PAT_MRT4530_82134C.1.pep
MPRRRREADAEDASPLHLIRMHSTFYLLVSKGRDQPPSRQPIGSVDSDTALAAWPMGDGDQAL

SEQ ID NO: 185218 - protein, 823 aa, Oryza sativa
  unsure (1)..(823): unsure at all Xaa locations
  Clone ID: PAT_MRT4530_82135C.1.pep
MAEEKESFEGQWASSDVTEENLKEMVAHGVLPAKEIIGWRPACGEAFPTPDTHEVVVFSHFFYGGFALPTSKFFRGILNFYGISLHHLNPNSIVHIANFVHVCEAFLGIRPHFALFRRIFFLKPQPNKNKPCVVGGAGFQLRGTLSQKYFSMPFKTSNKGWHANWFYIQNPEPALPEYSCLPPVYQDTWNSLPMGDEAAQALELMERMLKLKEQGLQGEQITRHFIKCRLAPIKERSRTAFEFDGKHDPNREDPDSLDFKIMKERMYKIFSNAIVVSYSHLLPVVPYNAFNPPPLEFALIKSDPPIAQRRSPRHQTGQGSGGPKIRSDSQSQTPNPTGQTDSHKRKLMLNDDEGDDNNKFGDKGSPKKLPKHTAPKKKLSSRPMPKFRKSSRYKPSGTVSLQHASLMKIILKTGRKLCKKPSDIDPSGKDSDPANTETGSSKEAGPTTEDQPTSAQTSADNVNPSDQPPTGNQSAEAETAKNQEPPTGNQSEVGPDQEIPEVEVQATTSQGPDAGNDPTLGSPDKGQGSPHAQPEITSGPLGGDGEEIPRIKAAADSRPPILIKWWDENSQPAGIVINRQKEDEEVCQLKKALGEATRIVNRIHLRNEAKTTTLEKLVPHLGTLEAVRDQLHEAKELAKKTEHDLRDRITQLQDSNFELSGSSKVQAAKIAQLEKRIEALENNKAELAAQRDSALKEVEDRKIKSQAQFDVLVGKIKRLEGARDEVANAATPLVQAMFYNNNGPSRLDASEVFDKLRIAPDTYFKNIREAGSMGVGLALAMTKSLYPKIDXFDGFADGTSEEAALDLINDAQKAADKIAGDVV

SEQ ID NO: 185219 - protein, 218 aa, Oryza sativa
  Clone ID: PAT_MRT4530_82136C.1.pep
MAIGGADLTPSHPDPTLSWLDLAVAQGSGCPAQGVLPGEDVSADNQRSVEAGWRRGGMAGVARTAEKTNTVRPRQREACVRQKQQVAQWTGVVGGTACAAGAHITEAQRSIEEASATRGQVRSARVARRLVVVKHGAQPTVVWQRAWHGRRTARLEWRGGEATVVGGRQLEEGHASFSTLEINQLRTAKHSVSNQVDLLLGLDDDNIIDIWLHIALEL

SEQ ID NO: 185220 - protein, 123 aa, Oryza sativa
  Clone ID: PAT_MRT4530_82137C.1.pep
MDGDWYGCRPNDTSIGQPTPTSTPGGDRRNVGSWLSVADATSVRPVTDRSFLSSMRQFSDLHDHPSFCSILPVMVGMKPGIHLTRANVPSLRGNTLAPAGDVCLEALVLTGRGEACVRPPVAT

SEQ ID NO: 185221 - protein, 704 aa, Oryza sativa
  Clone ID: PAT_MRT4530_82138C.1.pep
MTEEKESFESQWAPSDVTEENLKEMVAHGVLPAKEIIGWRPAFGEAFPTPDTHEVVVFSHFFYGGFALPTSMFFRGILNFYGINLHHLNPNSIVHIANFVHVCEAFLGIRPHFALFRQIFFLKPQPNKSKPCVVGGAGFQLRGTLSQKYFSMPFKTSNKGWHANWFYYSCLPPVYQDTWNSLPMGDEAAQALELMERMLKLKEQAFEFDGKHDPNREDLDSLDFKIMKERMYKIFSNAIVVSYLHLLPVVPYNAFNPPPPEFALMKSDPPIAQRRSPRRQTIQGSGGPKIRSDSQSKAPNPTGQADSHKRKLVLSDDEGDDNTKLGDMGSPKKLPKHAAPKKKTSSRPMPMFRKSSRKPSDIDPSGKDSDPANTKASSSKEAGPTPEDHPTGAQASTDNVNPSDQPPTGNQLAEVETAASQEPPTGNQSEAGLDQEIPEVETQANVSQEPDADNDPTPGSSDKGQGSPRAHPETSSGTLEAVRDQLHETRELAKKTEHDLRDRIAQLQDSNFELSGSSKVQAAKIAQLEKQIQTLESDKTELAAQRDSAVKEVEDRKIKSQAQFDVLVGKIKRLEGARDEVANAATPLVQAMFYNNNGPSRFDALEVFDKLRVAPDTYFKNIKEAGSMGASLALAMTKSLYTKIDIDAVDGFADRTSEEVALDLINDAQKAADKIAGDVVDRFQDTDLRPTGSGNSDDDKTDTD

SEQ ID NO: 185222 - protein, 139 aa, Oryza sativa
  unsure (1)..(139): unsure at all Xaa locations
  Clone ID: PAT_MRT4530_82139C.1.pep
FMCNPFFCNLYLSCITIXGVATIAFSLLPVFQNPEFRTIRACLFFGMGASGVIPVIHKLILFWHQPEALHTTAYEVLMGLFYGIGALVYATRVPERWMPGKFDIAGHSHQLFHVLVVAGAYTHYHSGLVYLKWRDVQGC

SEQ ID NO: 185223 - protein, 356 aa, Oryza sativa
  Clone ID: PAT_MRT4530_8213C.1.pep
MAQNGPSKGVKMPMGSADWNDYNTRVVYEIFVEQVDAGNRPNTYLSNPRYDEVIEKFAARTGWDNTKETVTATVERWKQLKADTPGCTKFMKSFTKTREDPPDCSIKDVMALVEECGAVEQINEYFIAIEIFIKKDQREMFVNYLRTPTGRFGWLKKKYEVKCQSESKNGSSDEEYEFDLLAIIAENYYSLYLDKAEPRTSRLSGMGWVQETLATPGECYKMLRMNDHTFIALNDFLVSKYKLELTVHMHTLEALAIFLYILGDGSSNQRAQNRFKHCGETISRKFEILYVVVDLGRDIVRPNNPNFPTVHDRIRKDRRMWPHFNDCIGAVDGTHIFALVPDDEKIRYIGTSKSTT

SEQ ID NO: 185224 - protein, 302 aa, Oryza sativa
  Clone ID: PAT_MRT4530_82140C.1.pep
MVAASRLLARASRQCVAAVAASAARRRRCPAAALSLPVVTAAKAAAAEPWLGVPYMLNQPLRYSTTIFQRFGFSSTSPELSDKEENQRKDQENSTNVSNEGTEDVDLSKEDLVQLVLEKDGLLKSKDEEINDMKDKVLRSYAEMENVIARTKRESENSKKYAVQNFSKSLLDVADNLTRASSVVKESFSKIDTSKDSTGAVPLLKTLLEGVDMTDKQLGEVFKKFGVEKFDPLNEKFDPSRHCAIFQIPDPSKPSGTVASVVKVGYMLHDRVLRPAEVGVTEGGPTTTEEAAENSEQKSSEV

SEQ ID NO: 185225 - protein, 83 aa, Oryza sativa
  Clone ID: PAT_MRT4530_82141C.1.pep
MDQAHERAELTSRTEATQQSERKRRSPSTAATAGRQHRTSSIERTAQQARRDGQPQRSQRRMTCRAPTASTTARKAEKRAIGG

SEQ ID NO: 185226 - protein, 38 aa, Oryza sativa
  Clone ID: PAT_MRT4530_82142C.1.pep
MEEANAIFIDPLDTIAVDSMNKEKATSSASEHYVGSLD

SEQ ID NO: 185227 - protein, 84 aa, Oryza sativa
  unsure (1)..(84): unsure at all Xaa locations
  Clone ID: PAT_MRT4530_82143C.1.pep
LCGGIERXEKEAAEMNKRXFKYAXVLDKLKAERERGITIDIALWKFETTKYYCTVIDAPGHRVYIIFFFTXTXQADCAGLRGDY

SEQ ID NO: 185228 - protein, 487 aa, Oryza sativa
  Clone ID: PAT_MRT4530_82144C.1.pep
MEGRSGSLKKATWIHGELALRVYRRAEWRDGGRSSGALNGGNPPGLTGEGSWPPPPPRAPSLRGVQVVVVAAPSRRSRMGTSSLPPPRRVPESNLADEVDWRSDEEFKRFMGNPSIEAAMAPSSWRRSAPTGSSASSIASPTPTRSPASSAASPGTSLPRTPRSASLPFPPHACSRICACGGDVVWCAVVLVGGRVASTSTSTRLSRLPPPRFAHRRSEGRRAGRKSLTAATISRPSLLLVSSPFLLVFGGGAAEMLSGDIPPNQTVYLRNLNEKVKKEELKRSLYALCSQYGRILDVVALKTPKLRGQAWVVFSEITAATNAFRGLQEFDFYGKRMRVQYAKTRSDCLATEDGSTAPKEKRKKQEEKAAEKKRRAEEAQQSGPNAAAQSNGTGYQASRLGKTSQEPPAPPNNILFIQNLPAETTSMMLQILFQQYPGFREVRMIEAKPGIAFVEYEDDSQSMVAMQALQGFKITPYNPMAISYAKK

SEQ ID NO: 185229 - protein, 522 aa, Oryza sativa
  Clone ID: PAT_MRT4530_82145C.1.pep
MEVALCASFVAILLTTMLFLKAISTRCRRRKYNLPPGPKPWPIIGNLNLVGALPHRSIHELSRRYGPLVYLRFGSFPVVVGSSVEMARFFLKTRDAAFIDRPRTAAGKHTAYNYRDITWSPCDAYWRQARRVVLTELFSARRIESYEHIRREEVHALLRDLHYASSSGGRRAIVIKDYLSTASLNMITRMVMGKRYVQGEVVHEEPGSARTTLAQFKELLEELFFLNGVFNVGDQIPWLEWLDLQGYVKRMKKVSKALDQLLEHVVDEHSERRQREGNGFVAGDMVDVLLRLADDSSLEVKLSRDSIKAFTQDLIAGGTESSSETIEWAISELLRKPEMFAKATEELDRIVGHRRWVNEKDILDLPYIEAIVKETMRLHPIGPLLAPRLSREDTSVGGYDIPTGTRVFVNVWAIARDPTLWDASEEFMPERFLGKKIDVKGQDFELLPFGSGRRMCPGYNLGLKVIQLSIANLLHGFTWRLPKDMVKEDLSMEEIFGLSMPRKFPLEVAVEPKLSSHLYKGD

SEQ ID NO: 185230 - protein, 84 aa, Oryza sativa
  unsure (1)..(84): unsure at all Xaa locations
  Clone ID: PAT_MRT4530_82146C.1.pep
MYRVPCSCMIIISHHVGKVYKLCRVKTNXXAVLAVMSGMSGVWICIEYRLVFILLNAEIHLQIVMRFENDLLTAMDGNGVNIFT

SEQ ID NO: 185231 - protein, 70 aa, Oryza sativa
  Clone ID: PAT_MRT4530_82147C.1.pep
ETSWFFYVYVRSLNLWRCVIQTLNPHIFFSLNLFWVSYRSNEFHLILYANMACHGAPMYRWDLLPPSQKK

SEQ ID NO: 185232 - protein, 68 aa, Oryza sativa
  Clone ID: PAT_MRT4530_82148C.1.pep
EDKLNGIRAGTKKTKPGDTKPELMSLGGTERKKLWPGRTKKPKGSPKPRRVQKRKPPRGLKPYQTPGK

SEQ ID NO: 185233 - protein, 166 aa, Oryza sativa
  Clone ID: PAT_MRT4530_82149C.1.pep
MAEVEVRVRQEQVAEFRETFAFFDKDGDGCITLEELDTVVRSLGQTPTREELAEMIRDVDVDGNGTIEFAEFLALMARKASRGGENGGGGDDSGDAADEELREAFKVFDKDQDGLISAAELRHVMISLGEKLTDEEVEQMIREADLDGDGQVNFDEFVRMMMLSDQ

SEQ ID NO: 185234 - protein, 549 aa, Oryza sativa
  Clone ID: PAT_MRT4530_8214C.1.pep
MAQNVPSKGVKMPMDSADWNDYNTRVVCEIFVEQVAAGNRPNTHLSNPGYNEVIEKFAVRTGLRYTRLQIKNKWDKHRVEYNCWKKLTSQTGLGWDNTKETVTATVEHWKQLKGDIPGCTKFMKAGLQNEELLQKMFEDIRNTGADHWSLGQSTIPTPTNEAIHIADDNEIDEETEDDEPSAKRKRGGGSKVDKSKKSKSGSQKMMSSDSEDGSSDEEYEFDLLAMELFETAVGNFSTTRRIAKNYYSLYLNKAEPRTSRLSGMGWVQETLATPGECYKMLRMNGHTFVALHDRLDPNFPTAHDRIRKDRRMWSHFKDCIGAVDGTHILAVVPDDEKIRYIGRSKSTTQNVMAICDHDMRFTYAFIGQPGSMHDITVLFTALQTDLTIFPHPPQGKYYLVDAGYPNCPGYLAPYKGQRYHVPEFRRGTAPSGEKEKFNFLHSSLRTIIERCFGVWKMKWWILLKIPSFPMWKQKMVVAATMALHNFIRDHDAPDRHFHRFERNPDYVPTIPSRFRRYVLSQDASDTSTEGQSDVSMDVFRDDLAGCIAG

SEQ ID NO: 185235 - protein, 71 aa, Oryza sativa
  Clone ID: PAT_MRT4530_82150C.1.pep
IFISNPEETEPIREIGAAPPLLSYILSNSMSKTEKAVTKVWISILKYWYKLFLLFSCSFQPTSPPALASMH

SEQ ID NO: 185236 - protein, 267 aa, Oryza sativa
  Clone ID: PAT_MRT4530_82151C.1.pep
MDSPPHQLALIVLLVVALAALFLALLRSTSLVRFFLTILANTFLHSPYQHSSPPESSQCSTPLGSESGGKRRRGRRGKQKGLGEVVSVHEKKEAKTSPFPLLLLCRATRRRITEVYDEMYQIVRAKRNDTGKVHEFINCLVDARNELLHKSEMVQRSCRIKKALLSNPCSRRANSYDRLCEQVHKLEAEHKRLKKDADIYNYIQEQLQMSESYKLLIELSALVEKAEREDALATEAAEMTFEELLAQEKSDAAFWQRHRKLTSILPK

SEQ ID NO: 185237 - protein, 285 aa, Oryza sativa
  unsure (1)..(285): unsure at all Xaa locations
  Clone ID: PAT_MRT4530_82152C.1.pep
GRALVRRRRQTLAPPPPPXPPSKPDPSSPRPXPPAPRSLPSPLSTASSPPPPPPHPSPQNPSPSRTTWSPPAASPGTKRGRRPRLSPASGPPPSPTPPSPSSPASASRAPASPPPWPPTRGCCAPTWRRTWPSASPSSVSWASRAPRSRASSRSPVSPSAAARSPRTLASGSRSWALSRMCSWRSRRTERFLAPTSRRWSSPTWPSSSNVGYMSAISPIHACPLCSAGHPTMFKKLWHASVSLACHSTHRCSAMRLCHLLTKTRRSSLPKLESLKCLGGQRTISR

SEQ ID NO: 185238 - protein, 46 aa, Oryza sativa
  Clone ID: PAT_MRT4530_82153C.1.pep
PTTISASCIRYLGYLINRRFVSMPATYVAKLVMVVPHYFLSNRIHD

SEQ ID NO: 185239 - protein, 944 aa, Oryza sativa
  Clone ID: PAT_MRT4530_82154C.1.pep
MARLVLPLLIILVAAAAAIPALANAATPTEAEALLAWKASLQDDAAALSGWSRAAPVCAWRGVACDASAAAGARVAKLRLQGLGLGGGLDELDFAALPALAELDLNGNNFTGAIPASITRLRSLTSLDLGNNGFSDSIPPQFGDLSGLVDLRLYNNNLVGAIPHQLSRLPNIIHFDLGANYLTDQDFGKFSPMPTVTFMSLYLNSFNGSFPEFVLRSGNITYLDLSQNTLFGKIPDTLPEKLPNLMYLNLSINEFSGSIPASLRRLMKLQDLRMAGNNLTGGVPEFLGSMSQLRILELGDNQLGGAIPPVLGQLQMLQRLKIKNAGLVSTLPPELGNLKNLTFLEISVNHLSGGLPPAFAGMCAMREFGLEMNGLTGEIPPVLFTSWPELIAFQVQNNSLTGKIPSELSKARKLEFLYLFSNNLSGSIPVELGELENLVELDLSENSLTGPIPSSLGKLKQLTKLALFFNNLTGTIPPEIGNMTALQSFDVNTNRLQGELPATISSLRNLQYLSVFNNYMSGTIPPDLGKGIALQHVSFTNNSFSGELPRHICDGFALDQLTANYNNFTGTLPLCLKNCTALYRVRLEENHFTGDISEAFGVHRILQYLDVSGNKLTGELSSDWGQCTNLTYLSINGNSISGNLDSTFCKLSSLQFLDLSNNRFNGELPSCWWELQALLFMDISGNDFYGELPATESLELPLQSMHLANNSFSGVFPNIVRKCGALVTLDMGNNKFFGHIPSWIGISLPLLRILILRSNNFSGEIPTELSQLSELQLLDLASNVLTGFIPTSFGNLSSMTQAKTLPATEYFNAESSPFQPEVPQVPKPHRRREPKNQSPLDQSRDRVSIQWKGHEETFQRTAMLMTGIDLSGNSLYGEIPKELTYLRGLRFLNLSWNDLSGSIPERIGNLNILESLDLSWNELSGIEASSNEEYKVDEGQNFCD

SEQ ID NO: 185240 - protein, 630 aa, Oryza sativa
  Clone ID: PAT_MRT4530_82155C.1.pep
MPLLAAAAAVAPPLSSFHSLSLSSRGLRVPSPCEARPRAPLRRGDLAIRMGGGPRTFPGGVSKWQWKRMQARKAKQLLKARLARERQLYEMRKRAELRDAAAHLERPWDPDASDSAAAAAAAPNLLSVAADDQMKALADRFHRPGGVDLWNDRDGPRVFAAPDTGRASARFFPKGSVHSVQPYGLVNGGLESTLAARGNPSDATDRSHRHRLQGVRENAAKKEMRGVGGDREPAVEYIERGGVWEPVSNLDGGDDDDSSDGGWNDDIVTSDLEDMGDVDLRPEQRAMVGRDRRKDNVARWEATTSVAIGSDGVRDQRGNGFSLEPEGTSEYHLGQSWQERNSGSRGKRPAGRRKALNTDGGSAIGKDRVVGGSSFSDSEVTRNGFEPKWRSTTRGRTTNDVRRWNPPNEGGRNVPRKGWTDDEFGSNSDSGMDHKLMPKWKTQNRLNRSENGRDRPELKYMANTNNGERTRRYMRGSDGEGRRDRFVNRFASDLEEPEWKPRRKSGAGNDGDGRRDRFVNRFASDLEEPKWKPGRKSGARMNIGNREYIDDMNGRFRRGSDGDGMNGRFRRGSNGAARLLDAMDSNREIGSEDDSYRMSRNGGQRRGDGYSLRPTSELHNSRRLRESNEM

SEQ ID NO: 185241 - protein, 85 aa, Oryza sativa
  Clone ID: PAT_MRT4530_82156C.1.pep
MGCGQSKTDGGGGGGGAAVALCRDRAALLADAIRHRYALADAHRAYAASLRDAAAALHDFLRGVQALPPPSSSDVDHAAPLRLPD

SEQ ID NO: 185242 - protein, 273 aa, Oryza sativa
  Clone ID: PAT_MRT4530_82157C.1.pep
MLLAEMMNSSVLFLPSSSLFLTKQLVPATKGRASAAAAVRCSSGPNLSEAHEEEDGVASLMGRRHAMASAAAACGVSVFGFAGESMAVKQGLLAGRIPGLSDPDEKGWRTYRRPDDKSGGHGVGWSPIIPYSFKVRDGWEEVPVSIADLGGTEIDLRFANSKQGRLFVVVAPVRRFAELDDATIEKIGTPEKVIDAFGPEVIGENVEGKVLSMATAEYSGRTYYQFELEPPHIFITATAAGNRLYLFNVTANGKTTVPISKLYDIFFRTPNAE

SEQ ID NO: 185243 - protein, 384 aa, Oryza sativa
  unsure (1)..(384): unsure at all Xaa locations
  Clone ID: PAT_MRT4530_82158C.1.pep
MPAIKLPKGTIEDLDWMRRAFLWTGEDSCIGARCLVAXDSICIPKQFGGLGIKDVGRQNNALLVKRLHHLHSSDLPWSKWIWAEHASPNLNEQKQLDPHWESTKLLLPVLQDLTSIQIGDGRHTSFWHDCWCGEDVLAYKLNPLYTHSPNKHASVFQVLAEDLRNHFVPCLSSVAEDQFLQLCTLLQGHISSLDQDVRSKRGGGGILKSKQIYLAACNDIEPCANWKFIWNNKAPLKVQFFTWLLALERLHTKSNLHKKKIVQSPSCDLCNSATETASHLCLHFPFTAELWELLNIQISISTTKQLAALLPPAQIPARHYKVFYLLCFWNLWNHRHGVVFRNETVSLYRLLVKCIEDATLWADRLKVDDRFVVSAWKDLFSSSL

SEQ ID NO: 185244 - protein, 88 aa, Oryza sativa
  Clone ID: PAT_MRT4530_82159C.1.pep
MATAQRLTTTAEARGDDDDLSNGEGMFAAFWESWEVGHVCQLMRIENRVKKNCSRSTITPPQFLSMRQIESRCLVWGYVRWLTRRIFL

SEQ ID NO: 185245 - protein, 205 aa, Oryza sativa
  Clone ID: PAT_MRT4530_8215C.1.pep
LGWDNTKETVTATVEHWKQLKGDIPGCTKFMKAGLQNEELLQKMFEDIRNTGADHWSLGQSTIPTPTNEAIHIADDNEIDEETEDDEPSAKRKRGGGSKVDKSKKSKSGSQKMVEEMSKSNELSAQTLSSIQSFTKTREDPPGCSIKDVMALVEECCAVEGTNEHFIATEIFIKKDQREMFVNSLCTPAGCFAWLKKKYEVKYGN

SEQ ID NO: 185246 - protein, 86 aa, Oryza sativa
  Clone ID: PAT_MRT4530_82160C.1.pep
LIPHPKKILLHLKIPKTQSLNSFFIHALFVLRLFLFPHTFINKFFYNSLYISLYPPPLFPLYKIKPFNISYTTFLIYLSILPNSLF

SEQ ID NO: 185247 - protein, 110 aa, Oryza sativa
  unsure (1)..(110): unsure at all Xaa locations
  Clone ID: PAT_MRT4530_82161C.1.pep
TWRGERARRGPKLDSHKYAAPQLSLTAFNAVRADVRCDQSVTGLLPVTSDXNGRPCPHVASVSGEVEVEGMTGLSPVSGGGGGGGRRWVPLKDWLLLSFRAKARIEARSK

SEQ ID NO: 185248 - protein, 90 aa, Oryza sativa
  Clone ID: PAT_MRT4530_82162C.1.pep
NSMPPSVMPRKQATMSAPRPSAAPATACCRWYPSITVRGSAILAISVVPWCAHGHLTNCLMKCMVEVHSCYCLNPYYYLIFTLFCTVCCD

SEQ ID NO: 185249 - protein, 122 aa, Oryza sativa
  Clone ID: PAT_MRT4530_82163C.1.pep
MEQPELNVDGPTTPRLPELMTTRFSHLRSTWMSDLIAPEPAACMELCLSHFSFFFFAEVEYMEIWSDLAQQEAARLRDGWVWRGGGNLGRGRWGWGRADTNTLVTDALANGVQLRVATGGGG

SEQ ID NO: 185250 - protein, 202 aa, Oryza sativa
  Clone ID: PAT_MRT4530_82164C.1.pep
MTIERPRRWHEMQRAQAEGIDWSVRFSWLPEWRRGGAGLWYPLIVRLVEPVAYTLRTQLHRLRLEIEILCGTLEYLRATPTRRPEPCRPQTSCSPSAHGAVQDQKNRMFRGVAGRAGEGPGDGLGGKEEANCGPSVDGIGGDGIWASPSRGAVACCVIEERSGRLGATGEGSALREAINSMAWTGPQRLGVTGDSSGWAVWR

SEQ ID NO: 185251 - protein, 90 aa, Oryza sativa
  Clone ID: PAT_MRT4530_82165C.1.pep
MGRSSVCQCRAYADDLPPSNARDVVTDMWAQPLASPPVSDHVKGDFTSEDLLLWPTGRSLFLVLAVPGLAMHDMAKWDVWKKYIYRDTSA

SEQ ID NO: 185252 - protein, 50 aa, Oryza sativa
  Clone ID: PAT_MRT4530_82166C.1.pep
EMRTHAVLVRQGHDRQVYVCRALLHPDLTLRAMLQAKDQRAGPLTLHIRC

SEQ ID NO: 185253 - protein, 190 aa, Oryza sativa
  unsure (1)..(190): unsure at all Xaa locations
  Clone ID: PAT_MRT4530_82167C.1.pep
KKTKLGAGQSKKQRSQVTGQRAGAPNRARAQFPRFRPKQGPEKPPPPKKRPPRGKETGARESTPKHEALAGGXATTPTGGGPPQERGGGLKQEPPGKPPPPLWEPPLKNLKPGXGGPRRKPRGEQNPPGGFGGGIGPPPGAPLPGPKSKFWEGAAFPPPAPLGGRGKTPGPGQFQPRPRGSPEFLGGGGG

SEQ ID NO: 185254 - protein, 138 aa, Oryza sativa
  Clone ID: PAT_MRT4530_82168C.1.pep
VGRQPSHRRQRHGRKGQREFVTNEMEAGVRWRKRRRCWRGGGKKEASPSRRCRIQEKGKGVAVAPAPRPGWEERVPPSRATVRVRELGIEASTAPVGKGGGAAPFEKKPSLAASAVDGSARGRGAAPPPGEEGAPPRL

SEQ ID NO: 185255 - protein, 315 aa, Oryza sativa
  Clone ID: PAT_MRT4530_82169C.1.pep
MGMGPLENAVVDAAAEAVAAKAAVGGVGVGGSYAVLQCGEDSEYVRKAYGGYFEVFRALLAEDGERWRVYRAVRGELPGEEEAAGIDGFVISGSCSDAHADDPWIVALVDLIRRQNAAGKRILGVCFGHQLSLNLIPDTVDDSLAQCAKAVHVLCRALGGKTGRSKKGWDIGVNCIHPTAAMARLFSPIKLPVHMPIIEFHQDEVWELPPQAEVLARSDMTGVEMFRLGDRAMGVQGHPEYSKDILMSIADRLLRNDLILDHQVDKAKASFDLRQPDKDLWKKVCRGFLKGRLQSSQQPQQQQHQKQQKAAQLVL

SEQ ID NO: 185256 - protein, 631 aa, Oryza sativa
  Clone ID: PAT_MRT4530_8216C.1.pep
MSDSSDLVAAVAAPFQFHLPPPGAKLATIAGFTSPPRASSASLAEVGRGDQRWCGQEEKPTSCRPCTSSPQAAIDKTAHEPPSTSPLHTAVHEPENRRRFVAYYSMMSSSSSWSTPSFGLARESSSLLFTPGLVQHMGPNPSSSWSTPAHPVSDSPTFSFPTPFFCEPAKGSRVYAYTKTADDLPHKHTLSISAMPAYISKSHEELRHEDYQRGDKGGDGLQKIMVNSAPVPPMPMLSSVGAPVNMINSSQPAFSLKSKTNFSTPFSPAATADQQSAQLQFSTQNHYYTSNPFWPAPIGLEPTTSSLGPTSCPATRHGDAPSTGFACQENVFSNSAAYTSTINADVPTNTIDLLLPNNIRLVRLRFSSTNDGNGSVASEVHCHHDAKTSETPISLCIYPGENQELIIKSMVQPAKSHTGKQSSPTGGHPDDQSGRSKVCNSAAGLPSSGPGENQKGNSSAGHKTPKSPLAAPRCEAIAESVLPRLYSADYYTVPSIVELAVGERDEPGYCSHVKGFTVGRHGYGSVKFDGETDWRRLDIGSIVEFNEREIIVYRDVSNTPPVGQELNKPAEVTLLNVKCVEQKNGLQFTEGPAVDRYKEILVQWTKDHGAEFVSFDAAKGEWKFRVKNFNM

SEQ ID NO: 185257 - protein, 194 aa, Oryza sativa
  Clone ID: PAT_MRT4530_82170C.1.pep
YNASSIFENQIKSKSLGCLDSLAERALLCRSAATRETVRRALLSYRRHQRRRHVGAEDLVLRALTRCSFSEFATEKYIRTDAAALLAMNLNERAMIGLQRDYLTMPTPYVGGKQQAPSPTWRNRPAGYISIDAAAAARQNGRSHRPQGAQGGALRPLPPLGERMGKRDEDKTVIKTDEGLDLLRFLKMKMLYLV

SEQ ID NO: 185258 - protein, 56 aa, Oryza sativa
  Clone ID: PAT_MRT4530_82171C.1.pep
MEEVVGKPLCQSAPRIAGAVADCQDFYPFPCRSTEEGRREDGKPVLLDGNKLANAC

SEQ ID NO: 185259 - protein, 61 aa, Oryza sativa
  Clone ID: PAT_MRT4530_82172C.1.pep
FSSSPFSLLLLCVNLKFSYGSRGLSCLKKAVLWGPKSFLRNVGTASEFQPLDGLLLSWFGS

SEQ ID NO: 185260 - protein, 104 aa, Oryza sativa
  Clone ID: PAT_MRT4530_82173C.1.pep
MQLNLKVRTRRNKTKIKGWRCAEIVLNVTLSMRGNHHEARQPKPTTYAVSYCRIRLNRLTPSDSNSADLSRSRFGLQPIFTLFPGQSLSRFLLHIRSSFTFGYH

SEQ ID NO: 185261 - protein, 615 aa, Oryza sativa
  Clone ID: PAT_MRT4530_82174C.1.pep
MAASSSSTSFSSSSSHEGDAGSSYIECFKYSRRATLRSVVGRPDGGAGLVGERAVVGGWVRSSAVVRARRAAAGPASPSRKPEVEATGLTCTEVLMSRVPLIRCIARLMAGGITAAASAGGSARRPAVGTALVRINDGSCVADLQIVVDSALLPLDQITATGACVLVEGKIEQVEGTLPQYVVQMKVEKILHIGPVDSEKYPRSNAHSSPDLVRGYPHLAARTATVASTARVRSELVHAVHAFFQSNGFFHVNTPTITTTTATSAGNRGKMLRLTRLFSKSDNGNRITPEAVRAAIKEKTKQVEALKRSESNKEALEAAEQDLQRANALSRQLEQGASAESSQDEFFHRPAYLTPCHTLHLETYACALSSVYTFSPVFQAESESLDSDRSLAERWTVDVELAFAELEDAISCAEDCVKSLCSTVSKDCSDELKFLSSNQAGDATSSVIEAAVSSPWQKIKYTEAVNTLLQVTDKTFESKLELGMPLSRVHLSYLADDLYKKPVIIYDYPKQLKPFYARLKEDLKTVSAFDLVVPKVGIVACGAQKEERMDNLTSRIEESGLQVEQLEWYLDTRRHGTVKHSGFSIDLESLILFVTGLKDVRDAIPFHRTKGHAKC

SEQ ID NO: 185262 - protein, 97 aa, Oryza sativa
  unsure (1)..(97): unsure at all Xaa locations
  Clone ID: PAT_MRT4530_82175C.1.pep
PRHHEPPVTRPHSLTRIDASPXSTQLLXTQRXMXRRTPKARCXPFRSYQMMVMHRVCCPICLLTXNNCANHTRPQAAGRSYSAGPNHRVQRVYGRLH

SEQ ID NO: 185263 - protein, 128 aa, Oryza sativa
  Clone ID: PAT_MRT4530_82176C.1.pep
MSPPLPPPQWRAAASPRRCWFDASLLDWLGYNCERGGTGNDAASSASRWENNGEVEVEGAVALEDEEDEVGGRTEVSVVVEEDTIGEAELRSGVMRRCEGREQIKVACRDEVTVEDGDKVSTAEDGGH

SEQ ID NO: 185264 - protein, 261 aa, Oryza sativa
  Clone ID: PAT_MRT4530_82177C.1.pep
MAGASAKVVAMLLSVLATYGFAAGVVYTNDWLPAKATWYGQPNGAGPDDNGGACGFKNTNQYPFMSMTSCGNEPLFQDGKGCGACYQIRCTNNPSCSGQPRTVIITDMNYYPVARYHFDLSGTAFGAMARPGLNDQLRHAGIIDIQFRRVPCYHRGLYVNFHVEAGSNPVYLAVLVEFANKDGTVVQLDVMESLPSGKPTRVWTPMRRSWGSIWRLDANHRLQGPFSLRMVSESGQTVIAHQVIPANWRANTNYGSKVQFR

SEQ ID NO: 185265 - protein, 49 aa, Oryza sativa
  Clone ID: PAT_MRT4530_82178C.1.pep
QGYQSSAMVRHQSPTSSSCRQTAMTNIGCPRLSINLCCCCQLCKQPDGG

SEQ ID NO: 185266 - protein, 218 aa, Oryza sativa
  Clone ID: PAT_MRT4530_82179C.1.pep
MAIFKKNTTALFLAALVILASLLSSCDADQVRVNSARGINWQVHGYSWSFAPIVAASTVAESTLSVEGAAVIESMHLEARSRKGGECRVTATTPSADAAAVAAASSLCRQSLCCVPPPPASSHPTTRSGRGKEGEGRVTATTSSAAPQPLISFHPTNRSGRGKGRRRCCRHSLCCSTATDLLPSHHRIRLPLPSHLKAREVWGEEGEEAREKPRRRDE

SEQ ID NO: 185267 - protein, 66 aa, Oryza sativa
  Clone ID: PAT_MRT4530_8217C.1.pep
MARLLVRLCAARHRQRPQPPVIPAEQPIFWYPRISASLLQLLEKMANQSFMLQQSYLQGMQWPHQS

SEQ ID NO: 185268 - protein, 30 aa, Oryza sativa
  Clone ID: PAT_MRT4530_82180C.1.pep
MEGVESNDRHGGAAADRRKSNRRNRWACTF

SEQ ID NO: 185269 - protein, 59 aa, Oryza sativa
  Clone ID: PAT_MRT4530_82181C.1.pep
MAKAAIAVTAPQQLDGQGARAATTLVGDGSVLGGAWVTARLGGADPAAKFKLLVADFRA

SEQ ID NO: 185270 - protein, 126 aa, Oryza sativa
  unsure (1)..(126): unsure at all Xaa locations
  Clone ID: PAT_MRT4530_82182C.1.pep
DHMSRTFIVPIAHIKRNYKLKNLESKDAITEKGSIELANIEATSPISSSLRISIKPKEHNCLHLEKQSFNSLLCQQLQSPYMEHILTFYGASYIAFSYPCKRGEEIKEXPQAINRLLTDQGSAIIQ

SEQ ID NO: 185271 - protein, 317 aa, Oryza sativa
  Clone ID: PAT_MRT4530_82183C.1.pep
MASGPSVEAADEMTALGSTGLRLQVFIVGCRAPARPLPISAAWMLCVVGAGVLLCRHIKSRKGAHRRGEGAPCVPTRACVPRRDPAGTRGTTTPTRRRGGGQRRDGGTPREGRRLRCHRRRTEEEGEEGGLDLEHDRCSSIDPTCSDSHFDPPFTFVFLSSPLSCLLLLRCLSDGLSFREHLLVVDGVGEEGTPVVAAGGAGGAKRRVLGLTRRSEASGEEILQSVDLDVPRGVVVGVIGPSGSGKSTLLRALNRLWEPAPGAVLLDGVDICGIDVLALRRKVAPPPSSLPPRLPASAVCTRRFASPRKREEEKEEG

SEQ ID NO: 185272 - protein, 590 aa, Oryza sativa
  Clone ID: PAT_MRT4530_82184C.1.pep
MATASIASNVAGGGCPTPSRSAAASTVVTTQAYHVLKIDGYSRTLQVHCYRSLSSFPFNAGDRTWYICYYPHGKNDISKDFISIYLVLYDAIAEAVMVQATFSLLDQHGKPVPSHTHATRLLSTSNQDDMANNLGFETFIAKGDLEKSGHVQDDCFAIGVHVVITKETPPPIIAVPPSSDMHLHYGDLLSSKRCADVEFLVGGETFAAHRLVLAVRSPVFVAEHFGPMKEGVNVNDVIEINDMDAQVFKALLNFIYTDTLLEMDQEEDATMAQHLLVAADKYGLERLKVKCEERLSNHIDADSVATLLVLTDKHNCRGLNKACIEFFSSPTALAKIIETDEFQYLTQSHPNILEDIISNIVASQLEKAIFSPENEGGKINKVDIRIQPWQNSNARCGKAAGADCRGRQARRERGGRRRDLAAEREDVDTADVDAVEEHSTRRRLPEAVERAEQRGLAAAAGPDDTDDHPSRHVQVLTVRYYDLRVNTRPPRRHHRRPFFPDAVHDQEVLPDIMLFNSIVDRTCQQHVHWNTKLTQKRRGVLAHLKLSPSERQRRRSKQESGEERKTKIEKTEIAGVDCSNRRPPFCSFRR

SEQ ID NO: 185273 - protein, 159 aa, Oryza sativa
  Clone ID: PAT_MRT4530_82185C.1.pep
MAEVAATQHGHAVAARAMPGRGEVDTSSPFESVRQAVDLFGGGALSPWRHHHPPPPPPPPPLQLRPEEVELMKVEEQTVKLEMELFVKEKETFKVLKELQATKQVADNLKLQLEKAASESAASARGHSDAGKVYPLPDTERKCSYHTGQVESAKGISPR

SEQ ID NO: 185274 - protein, 482 aa, Oryza sativa
  Clone ID: PAT_MRT4530_82186C.1.pep
MAGAGEYGGGGGGGGGFGGDFMVLRPDKGGIGDLFHLLWSCKVAENAAVDCPIGTEIAERRRRWALFVSLVAQMLLLWTKKPMALLGGGTEYWMNLLNENGGSVFMLITNALQGKVKMPDKSSINYRSCIGLLDTRIDLDEKIKPEDRNYHAALSIMAAKLAYENELVVRTVVQNHWQMNFVGFYNCWNEFQEDYTTQAFMVSDKAEDASLAVVAFCGTKPFDTEQWCADVDFSWYEIPGVGKVHGGFMKALGLQRNGGWPEQPTGAGDDGGSDKKPFAYYVIRERLRAFLAENPRARFVVAGHSLGGALAILFPTVLALHGEEDMLARLHGVYTFGQPRVGDEGLCRFMDGHLATPVSRYFRFVYCNDIVPRVPYDDTALLFKHFGTCLYFDSFYKGHVTEEEPNKNYFSLLTVVPKYANAAWELARSFVIGYVDGPEYGEGWLMRIARAAGLLLPGLPPHAPQDYVNATRLGAASLEPLR

SEQ ID NO: 185275 - protein, 307 aa, Oryza sativa
  Clone ID: PAT_MRT4530_82187C.1.pep
MMPAGPGPLVVVLLLSLLLLVAGIHGRLQHEEEEEEEEVQDQEGGSSSFTLPVWAPHVPESGEERREHFRALMAKDMRRMMRQVPELMSKTDMFELPMRSALNIAQVGMYVVVVRIGTPALPYSLALETANVVMLINLSLRRRKGKHPGRPHVPPAATTMSIQVDDDGGGGGSGGKSKVTKVIMNWYRPAKSSSWRRFRCSQRACMDLPYNTCESPDQNTSCTYYQVMKDSTITSGIYGQEKATVAVSDGTMKKLPGLVIGCSTFEHGGAVNSHDGILSLGNSPSSFGIAAARRFGGRLSFCLLATT

SEQ ID NO: 185276 - protein, 288 aa, Oryza sativa
  Clone ID: PAT_MRT4530_82188C.1.pep
MEKDPTEVIRKAVMRMLPRNRLRDVSETSFLFVSDWRLDARFIWCYLYTHEDIPATLDVNQVNGLCLSMNDQTYLGLITCNRARKIHQEVNSLFTHLNPNFSENFILPKCFILVLLRFTPEDIITTSRRMSYVEDDKGYAEEESTHAQPAAVYANKKMVYVVKTQLPRLVRPSQSSRSTGGLGSFSPSPLGRIQPWQVSSSYSGSGRKLVIPEVVASNLGWYKASYSGSGIQSWQLVILLSTVCAGALLLQTYCREDWATPREYVRIIWYQSFVDTSRKIPTKIPSLW

SEQ ID NO: 185277 - protein, 109 aa, Oryza sativa
  Clone ID: PAT_MRT4530_82189C.1.pep
MVLARGVRGRRRIRLPPTSGRSDLAAAVATAAAAVGARVWSRRLPLDPVLARGSQRPPPDQASPDLREVGSGGDGGGGGRYLVTCDGPEVEADKGVSLTDSILDPSQVS

SEQ ID NO: 185278 - protein, 107 aa, Oryza sativa
  Clone ID: PAT_MRT4530_8218C.1.pep
AAEPKSPAAAARTIVKADGHSTTAGRSCRRGQSSSPRSSTTCRRRWRRRGRTSRRRAPPSEAPSRRRRRRQPRTAQKCCMLLDRRLIPEASGRTSARGSTSLDAPPR

SEQ ID NO: 185279 - protein, 40 aa, Oryza sativa
  Clone ID: PAT_MRT4530_82190C.1.pep
TPLQTQLMELNSGVEAVPNRASMGALVTGEQQSRHARGGK

SEQ ID NO: 185280 - protein, 755 aa, Oryza sativa
  Clone ID: PAT_MRT4530_82191C.1.pep
MGRGTSKPPIIGRDDQQQELEAMLLSSAGCLAVIYVVGDSGVGKTILVNSVCSKPSVREHFKERIGVKVGKDAGISNILSLISKELKKENNESDNENPRSKIQRRLGEECYLIIIDGRQMSIADWNAVIHALPKNERGSRVVLITKIKPQFLDHPMNDVHEIKLTCLNQTDCRKLFHMRLHGKEEDEQNQTYLPIYYQRVYDITGGSPLAVILLAGLMHNKEYPHEWDRVLKYLESAKEKRLNRILSLSFDDLHHELKLCFLYFTAFPVSYKVYQNVLVNLWVSEGFVVPRHGKTVQQLGQLYLRQLTTRGLVTEASADGDYDIRHFFLHDSVYLFARSEAHEANFMELHDGDYFPSPDRARRLTLHNSMDRYAALDNKMPKLRSIFAIFEEIPASTAEESVSSPSCFPTCCSCEQHRSPKISRFDLTKLLKRSKFLRVIMIEGLNIGTELPEAIGGMVHLRYLSTRCRSLRRIHPSIGNLKNLQTIDVRQSLVHELPCSFWKITSLRHVFGSELIVPRWTRELKQLNTLKSVRALQDWDGSMLRRMVNLKLLDVTIQEKLKEEKARKLSDNLNNLNNLTTLILKGVDLPISSIFTAPSLQFLKTIELTGTILLTTPSPEIDKMTTSPSDFQLPNLSKLSLSKTCLQQGFIGKLGKLPLLSNLTLKDVSCDGEELVFRPDGFHCLKKLEVNDTSKRVVIEEHALPVLVSLHIIGNSRNYQHSIHPTHKIINKIRHEDINLFQRICTCHQKEITKG

SEQ ID NO: 185281 - protein, 41 aa, Oryza sativa
  Clone ID: PAT_MRT4530_82192C.1.pep
MGRRRVVVDARVREDTLKTKTVTRSQQSLRSSTQLPEKSEV

SEQ ID NO: 185282 - protein, 136 aa, Oryza sativa
  Clone ID: PAT_MRT4530_82193C.1.pep
MAAYGSINKEDPVNWGVVVVEMAGRHIHEVKLMVEQLRKPVIKIQGATLRVGQVGAVIQAKDAVGVVAELDQEVRPRVKVSSEWILNCIIHGGDMYGVTTGLGGTSYRRTKDGPALQVELLRHVNAGIFGTGCDGH

SEQ ID NO: 185283 - protein, 128 aa, Oryza sativa
  unsure (1)..(128): unsure at all Xaa locations
  Clone ID: PAT_MRT4530_82194C.1.pep
RRMAXTXETXLRIALRPRXXVPXVVDVXLXXXXWWXGGGVIXVHCSTGXRRKSYRYRCFSEVGTXIVLSLVICMSXTXDSXANTXHGXMILXXKFRGKWXARXFQKKKKXTRGGAXYPIRXIVSRIXI

SEQ ID NO: 185284 - protein, 33 aa, Oryza sativa
  Clone ID: PAT_MRT4530_82195C.1.pep
RIESYNNYAGVFIKTGFRTHNYSNRILCTAVTE

SEQ ID NO: 185285 - protein, 44 aa, Oryza sativa
  Clone ID: PAT_MRT4530_82196C.1.pep
PATTLRAQSWGFRLQWLVLVVGGIYIHSPAARLVWHLIILGKHP

SEQ ID NO: 185286 - protein, 144 aa, Oryza sativa
  Clone ID: PAT_MRT4530_82197C.1.pep
MLDRSLRPPPPQQAAAQAEAGPGGGEGGGNVDRVLFKNLVEMVPLVESLMGSDLKSVKSPQSVSVKKRRDPGETGKKSTADSNGENGAVAPVGLLGGENKPKDKDEIVLLREQIEELQKTLLEKEEALKSAESLVGEMNTLYST

SEQ ID NO: 185287 - protein, 315 aa, Oryza sativa
  unsure (1)..(315): unsure at all Xaa locations
  Clone ID: PAT_MRT4530_82198C.1.pep
MLDRSLRPPQPQQAAAEAEAGPGGGEGGGNVDRVLFKNLVEMVPLVESLMDRRSNPSYSRRASMVYTPAPAKKGFXLKSVKSPQSVSVKKRRDPGETGKKSTADSNGENGAVAPVGLLGGENKPKDKDEIVLLREQIEELQKTLLEKEEALKSAESLVGEMNTLYSTVDELRRQVADKEGLIKSINSQLHNAKIMLADKQASLEKLEWEVKTSNKKVEDLQGDVSNMEFEIGSLMALFEKISENVSGELQDGSLPSSFELEALQSTSEIDKIEVEKIEQEAVTYAEALAAARENPNEEQLNIAAEARLRLQVLVL

SEQ ID NO: 185288 - protein, 421 aa, Oryza sativa
  Clone ID: PAT_MRT4530_82199C.1.pep
MAQQLRTPAAEEALLRGHAAGDKDDAVAGESKDAKRARAGLCGVLRERKVVELARAKRRLVEVPYTATLAHTANALLAARVSAVAVAAPPGHWIGAGGSMILESDPATGAVRKHYIGMVNMLDILAHIAEAGDDNDAAADAAPSEAVDLDRRMAVPVSSVIGHSLEGLTLWTLHPNTSVLDCMETFSKGVHRALVPLESAAENVVAAELVEAAPGYRMVTQMDVARFLRARAAELGDAILSRSVRGVGVGGAVLAVASGTKVIEAVRAMRAASLAAVPVVDAAPADDADARRILLQLQDGRGKRVFETFSATDLRDCPVAELQAWLGVAVAEFKKKVAMYRAGVLAADADEDEERRREMVTCSPESTLGEAIEKAVAHHVHRLWVVDEEGLLAGVVSLTDVLRVVREAAIGEDRELHDILS

SEQ ID NO: 185289 - protein, 415 aa, Oryza sativa
  unsure (1)..(415): unsure at all Xaa locations
  Clone ID: PAT_MRT4530_8219C.1.pep
TEYTETVHGSTEADPVCQPRRVADKQTPLDTTRAGSTTTRRVRGNTERTRTGAARGEILTTTRRGVGTTTTNERGGDGSGTTEANGEGMTSAVILARRRDVAGATLDDAEARTKTTTGLRHLTERGRQTRTAXRRDERHDDRERREDDNDDDQGRRGDGDGSRQQLHRCEDGVEHAAVMMTMVVAQRDDVPGDRQDVDVEDERXRRRRTAEGFGWREGDAEDVVAGSPLRCRRRRRRRPAHGNGGRGCRKNSGEAEGETGAGDGVPAKPRVGRGGGRRGDVEGGWRRRQSVAPIISPRNGGDAGEEEAATRPLGVTARPDGTPARRERRLEATGGTGERGGRRGEVVRPRDRTREGAKTGERIEGVPFYRGGEGAGQGRGGERWRNSWPAAVECGRGWRGRSRRLGSRIKGEIWG

SEQ ID NO: 185290 - protein, 490 aa, Oryza sativa
  Clone ID: PAT_MRT4530_821C.1.pep
MGHEGYRASHACGGLDKEYALYLDTIVGGSFLHKTPSEGQIILDRIMENTSFIEQYNESLPKASMRKIKEPSIAESETEPPTSIDSAKESSSKPSPAKSKEIQTLECAIMFRNDLDEDFGNTQNYFSKKKPPMALPPPDLIEDEYLKEIVWELTTVMSNEWLKEAELSSEVIRNNSTPRTIPCNLEGNTVGILYSPTVGVNLVSESFTFAYLSDKAITPMNKFFKHPNRKLIEGFGIVQDVSVQYNDKEAILDFHVFEIQDFDVLIGHLIKKLLINCPRLGSLKFSLVGNKFSISFSQSRFALTDSLPEDEYAKEVTTIIPFESPESLLENNVSDFIEEEEDSEIVLRHRVPERGIEVDQAKIEVIDQLPPPVSIKGIRSFLGHAGFYRRFIKDFSTIGRPLTNLLVKDVPFEFNDECLNSFEILKKAPVSAPIIQPPDGTLPFEIMCDARDFPVGAVLGQTKEKKHNAICYANKILTGAYGCYFCYRYV

SEQ ID NO: 185291 - protein, 1027 aa, Oryza sativa
  Clone ID: PAT_MRT4530_82200C.1.pep
MADYLGELALANDDKATVAEATRGRGEEGDKDVNGDGVRDEMKKVTGVAWFFSSRATALHLRRRELKLLPFPSFPCSSSSAPNTCSQQSHLLLVSSAGPREQTLLPADSRSSLPHGITDNGTRKEGRRRRRGRKRKETAKDEGECVPSAEEVSIRVNTLYESGDPIGKKELGRCVVQWLKQGMHSMAIKYASTEMQNDGATFLLDGGSSEDNLGFVMLAQPYLSAIPMPKGQEALCLKASTHYPTLFDHFQRELRDVLLKQQNQGLISDWRTTQSWMLLKELANSAQHRAAARKPKAPTTHSTLGISLDKTRLMQTKIEDFVKKMSDLLHIERDAELEFTQEELNATPVMDGNSKKPLKPVEYLVTHGQSQQEQCDTICNLNVISSSTGLDGQHLVLFRVKDNHRLPPTTLSPGDMVCIRTCDNRGEITTSCMQGFIYNLGEDGCSITVTLKSRRGDPTFSKLFGKNVRIDRIQALADALTYERNCEALMLLQRKGLQKKNSSIGVVATLFGDKEDMMMMEQNNLADWGESTIHDDELLKKNKYDFDASQLKAITLGLNNKRPVLIIQGPPGTGKTGLLSYLIACAVRKGERVLVTAPSNAAVDNMVEKLSDTGLDTVRVGNPARISPSVASRSLGELVNRRLQKFTEEFERKKSDLRKDLKHCIQDDTLAAGIRQLLKQLGKNFKKKEKEIIREVLSNADVVLSTNIGAADPLVRRIGCFDLVIIDEAGQAIEPSCWIPILQGKRCILAGDQRQLAPVVLSREAMQGGLAMSLLERASSLHNELLTTKLTTQYRMHDSIASWASNEMYDGFLKSSPSVASHLLADYPFIKETWITRCAFLLLDTRMPYGSLNIDCEEHLDPAGTGSFYNNGEADVVSQHVLNLVQCGVSPTAIAVQSPYIAQVQLLRDRLEDYPEASGVEVSTIDSFQGREADAVVISMVRSNTLGAVGFLGDNRRMNVAITRARRHVALVCDSSTICNNAFLARLLRHIRQHGQVRHVEPGSFGGDSGLGYTPPGRIVVASVLPP

SEQ ID NO: 185292 - protein, 74 aa, Oryza sativa
  Clone ID: PAT_MRT4530_82201C.1.pep
PIRILPSTFLDKYKYEIAKNFREFFFNLLNIYLFQRRNSTLAHYLMSQDSPRIYCARLWKILKHTCAYALFLST

SEQ ID NO: 185293 - protein, 135 aa, Oryza sativa
  Clone ID: PAT_MRT4530_82202C.1.pep
PPHPGGLDLFFFNFPVGNSFYGWPLFSCFRPNGFPAPPMDGPASFLVGGGQMGPLVCSLGWGPLRDCESLPSLGPLAYAFVWEPLSLLLCTWGHLLFFSTRKNKQTIHFWKLNFKKKKKKKKKKKKKTKKKKKTK

SEQ ID NO: 185294 - protein, 126 aa, Oryza sativa
  unsure (1)..(126): unsure at all Xaa locations
  Clone ID: PAT_MRT4530_82203C.1.pep
KKWAGGILFGGERAPRVALQAKQGFGGPGYINGGPPGRLFKNAKLFXIGAGPCWLKRMFFGPGLFKGGGNFFFGSRGFDRENLGGGAFFGPFGPMGPGGPNLKIWPRLGMALGISLFLGNKRPPFF

SEQ ID NO: 185295 - protein, 68 aa, Oryza sativa
  Clone ID: PAT_MRT4530_82204C.1.pep
QPPIFYTSYHYSFFFSSLLPFFICLFFFFFFFFFFFFFFFSPHKTCIRTCISFWIISVKRLKQQFFIF

SEQ ID NO: 185296 - protein, 70 aa, Oryza sativa
  Clone ID: PAT_MRT4530_82205C.1.pep
FILLTNPQSVATQPFLWSSIYIAAHYHLILEIKINISFLQIMTTYRCLAYFLSTGLGKSRGFRLILTIYI

SEQ ID NO: 185297 - protein, 51 aa, Oryza sativa
  Clone ID: PAT_MRT4530_82206C.1.pep
FDGYLAQAQALLAFNVPSRYGIYLRYNGAPSTFSTFAGFLYLVLSVYWFGS

SEQ ID NO: 185298 - protein, 95 aa, Oryza sativa
  unsure (1)..(95): unsure at all Xaa locations
  Clone ID: PAT_MRT4530_82207C.1.pep
GAIRRMVRIYEESMPMPLEQGWSSSSWEYYGXRGSRXEQGYYGEGXLEEGYYGEQQHQPGMTRVSMTRARQXVGQLPLMCGVQPQQCSILNAGQY

SEQ ID NO: 185299 - protein, 134 aa, Oryza sativa
  Clone ID: PAT_MRT4530_82208C.1.pep
MVPIRAKLRFQQDKILLVSSFASFARQKVMHRGTVKAFGLGLLRKGFLSMRTLRKGERILRVADGAEIKVMAVGELHLRLPSGNNLLLHDVLYAPSVKRNLISVMVLTNSGYVSHPDFRVRIYKLFNKLLIEFI

SEQ ID NO: 185300 - protein, 564 aa, Oryza sativa
  unsure (1)..(564): unsure at all Xaa locations
  Clone ID: PAT_MRT4530_82209C.1.pep
WAKWKADVLLNLGILDYDYAIREDRPEEPFSVEHDYEEKLKLYREKTIEWEKSNRISLMYIKSAISNVIIGGIEDSDDVKTYLENIDRNFRSSSKSYASSIIKRLTSMRYNYKDGVRKHIMQMGAMNGELKSMDMGINDDLLVHFILSSLPSDFESFIINYNNQRDKWSIEELISHSVEEEDRQKADKXKHKDQLNLLHGAKGSKKKFYQGESSNSQNKKKKPNTPSTQASNGAHKGKSQVPAGQNSAGKFLCKFCEAEGHAQRDCEGFWAWLAKKGTNVDIVSNVDELLYVEFSHKSWWIESGATVHVANSLQGFRSVRTLRKGERILRVADGAEIKVMAVGELHLRLPSGNNLLLHDVLYAPSVKRNLISVMVLTNSGYDCNFSKDKCFIKYNNIDIGLASVQDKLCLLSLDNHIMNILNACNDNETSSKLWHCRLGHISKGRMERLIKEEILQPLDFSNADHCLDCIKGKFTKKXKKGATRSSXPLEIIHTDICGPFPVTSVDGYDSFITFTDDXSRMGYVFPIIDRSESLDKFKXFKAEXENQHNAKIKVFTTYIDLSYG

SEQ ID NO: 185301 - protein, 166 aa, Oryza sativa
  unsure (1)..(166): unsure at all Xaa locations
  Clone ID: PAT_MRT4530_8220C.1.pep
MASPECPTGLICPWASSSTLRHLFHLPVAHRRPWHPPIAAAVALCMHAHHVLSPAXGRDDNDHRCHHRRGMLPDLVLAAGDAGTQTWSHCGRQRKIAVMDDEAAEPSMASWLTCGCLRLLVLLVCLLVEKDELALLVLNELAADHRGLPSWLHLLSNATASVGHGT

SEQ ID NO: 185302 - protein, 149 aa, Oryza sativa
  unsure (1)..(149): unsure at all Xaa locations
  Clone ID: PAT_MRT4530_82210C.1.pep
LDYDYAIREDHPEEPFSVEHDYEEKLKLYREKTNEWEKSNRISLMYIKSVISTVIISGIEDSDDVKTYLENINRNFRSSSKSYASSIIKRLTSMRYNYKDGVRKHIIQWGAMNGDLKSMGMGINDXLLAHLSWVXSSRFEPSTIXYNRG

SEQ ID NO: 185303 - protein, 110 aa, Oryza sativa
  Clone ID: PAT_MRT4530_82211C.1.pep
SKCPLLEVPIQVQKLSRIRQWCHPVELLSYVMGQLLSSRCAQHWSTVSVIVHAVLWPATIVQFRFLSCRSVGRRSAVFVMIGPSLLPVVKRCVFMPEYYREGKDNCFPKK

SEQ ID NO: 185304 - protein, 196 aa, Oryza sativa
  Clone ID: PAT_MRT4530_82212C.1.pep
MGRSPCCDESGLKKGPWTPEEDEKLLHYIQKNGHGSWRTLPRLAGLNRCGKSCRLRWTNYLRPDIKRGKFSQEEEQTILHLHSILGNKWSAIATHLPGRTDNEIKNFWNTHLKKRLIQMGFDPMTHRPRTDFFAALPQLIALATLRDQLAATACGGGGGGDTAAAAAAQIMQGAGGGGGADVAIQAAKMQYLQCLL

SEQ ID NO: 185305 - protein, 36 aa, Oryza sativa
  Clone ID: PAT_MRT4530_82213C.1.pep
CSAHLVGSPYEGGIFFLDIVFPIDYPFKPPMVRTKN

SEQ ID NO: 185306 - protein, 568 aa, Oryza sativa
  Clone ID: PAT_MRT4530_82214C.1.pep
MVRWSPSRSAAASPASTSLHAAARTRPRCGSRAVRSPPRPSAAATTCSSRRACSCRPPPRPAVAPRPRSQCLSSPRSHASRSSAAWPAMEQSAAASSYARRSDGSLATAALYRCMASSKRPSRIARNARRRLTSTTAAEASASASASATARTSRRRSPQSGRAPSTGASIAWEHSTSALFSWDSVALMGGGGGRVHVQDLNSGFMESVSSAIAAATSTTIPSTPSSTRCGEDPGMAYTTMVTNRSLVLKRRALSGTLLSHSNAVPDRPWRQHSAAAASRGRMSPGLSLASWTAAASASSRRPSRACRVASSSLRWTAAFESPLDSAAASFLGILSETIKRIAPPVMVGTRSALAASACAASRKKEASALPPLVVVVVRAALRSRSPGCARTNPRWPQRVASSAPRWGDGRERRTETPHCSALERAKVAAAPAMAVKPQEESERPAEGSDDEEDDSGAIATVLETEMEFDGGEAAAVASAHGGVEPCASLVLLGVADSAAHLPHGRCRTPVNRLATSWNRSCVRFTNTRLAAATSPFLLIDSHTTAMRTIRLAVHPSNPTSEFRIKKDK

SEQ ID NO: 185307 - protein, 481 aa, Oryza sativa
  unsure (1)..(481): unsure at all Xaa locations
  Clone ID: PAT_MRT4530_82215C.1.pep
MVRWSPSRSAAASPASTSLHAAARTRPRCGSRAVRSPPRPSAAATTCSSRRACSCRPPPRPAVAPRPRSQCLSSPRSHASRSSAAWPAMEQSAAASSYARRSDGSLATAALYRCMASSKRPSRIARNARRRLTSTTAAEASASASASATARTSRRRSPQSGRAPSTGASIAWEHSTSALFSWDSVALMGGGGGRVHVQDLNSGXAAAAKRLDTKRRSNLPSTASSSLSSVDHSPSSSFMESVSSAIAAATSTTIPSTPSSTRCGEDPGMAYTTMVTNRSLVLKRRALSGTLLSHSNAVPDRPWRQHSAAAASRGRMSPGLSLASWTAAASASSRRPSRACRVASSSLRWTAAFESPLDSAAASFLGILSETIKRIAPPVMVGTRSALAASACAASRKKEASALPPLVVVVVRAALRSRSPGCARTNPRWPQRVASSAPRWGDGRERRTETPHCSALERAKVAAAPAMAVVSAARRRNLETD

SEQ ID NO: 185308 - protein, 112 aa, Oryza sativa
  Clone ID: PAT_MRT4530_82216C.1.pep
KAKQKKQKMNRSCGQTKNTLQKAKVRFSDLHSELKKPSSPDSTHTHINITSHTQARTRNQPAPIHTPSSAAAVLPTLSMDWKGCPGAAFAARGGRRRRRTPTRMQWLGRMRR

SEQ ID NO: 185309 - protein, 61 aa, Oryza sativa
  unsure (1)..(61): unsure at all Xaa locations
  Clone ID: PAT_MRT4530_82217C.1.pep
NWXWARCPSRRTXPXCRRRRXCTXTPRXXTTRPRQAWXGTXLGIRIRSRSFLPARAARAES

SEQ ID NO: 185310 - protein, 300 aa, Oryza sativa
  Clone ID: PAT_MRT4530_82218C.1.pep
MAARLLAPLLLLLLLAPLPPPAAAAEPEEARCPRERLPPFVAAAAAAALRPSCRASAERCPAEEINGEELVKELSGKEECTAVLFYASWCPFSQRMRPVFDDLSSMFPRIKHLAVEQTNAMPAVLSRYGVRSFPSILIACGPYAYWPVGSKELDSLVNVYTAVTGQEPIAYLGPRKWSAARTGSTQHVKLWKSSIIEALKSEPYLAFSILFICLKILVAFFPKFFSCIKGIWVQYFRHANLGILAKLTQLLECVPHAVDLRKIWSKCRLMGGAMNSRVWASSLASMSFGERSSPRAAVLD

SEQ ID NO: 185311 - protein, 96 aa, Oryza sativa
  Clone ID: PAT_MRT4530_82219C.1.pep
MEKGAIETPPPQLKPREEVNKGGVVQWAFSTSKVTPARQMDIYNVLGREMGGNERHSFAFLCQAKRACARAECITHHPTWHRCDALHSVAAPGREP

SEQ ID NO: 185312 - protein, 120 aa, Oryza sativa
  unsure (1)..(120): unsure at all Xaa locations
  Clone ID: PAT_MRT4530_8221C.1.pep
XGXMCQFMFSHRVXKSLRSRVPXKLHTFCDITIIVGSYLGLLQAVFPVFSAQFVWNIMGVXNDSPXLRAAXRSXQSNHLVLPAYYCLWACKVFSVVSXTPXPIXCXCGWRCTNIILHPFD

SEQ ID NO: 185313 - protein, 102 aa, Oryza sativa
  Clone ID: PAT_MRT4530_82220C.1.pep
LQPSEELMLYPPELNSFGPPKINACQPQGHPSLPRISPKLYQSSLGGENPTPQCERENKTRETDRWPQCNPNWEGETPCGFVESSNLEQPSALGMKFSENPH

SEQ ID NO: 185314 - protein, 61 aa, Oryza sativa
  Clone ID: PAT_MRT4530_82221C.1.pep
CGGKHEKKMPRRPIGGGVSFSLLLLLFLLIVSLLYLFSSVFISVILFVSFLTAFNYDFHLL

SEQ ID NO: 185315 - protein, 125 aa, Oryza sativa
  Clone ID: PAT_MRT4530_82222C.1.pep
MPYRPIMPRWCYDGPFAIVLVPWLASPVYYRISPFPDPKQSTSTPIGGRASSSAKPRVLDIQVTLFGPSDYASFSSGFEIDQEWDDKEEGNEAVQQWEDDWDDDDVNDDFSLQLRKELESIPSKN

SEQ ID NO: 185316 - protein, 138 aa, Oryza sativa
  unsure (1)..(138): unsure at all Xaa locations
  Clone ID: PAT_MRT4530_82223C.1.pep
NLQHRGAEVVAIEIEHKFLVKDDRWRSLVQGYLYRQGYIATPDLTTLRVRTIGDRAYLTIKGKNASIARLXFEYEILAVEANXILTELCSPPLIEXYRYCLDYHGKTXEVDEFLGDNQGLILTEVELTYTGEKISLLP

SEQ ID NO: 185317 - protein, 110 aa, Oryza sativa
  unsure (1)..(110): unsure at all Xaa locations
  Clone ID: PAT_MRT4530_82224C.1.pep
GXQPWKDXXIQFXRXKAQXFDTYXTXHPPRRKLLXQINSCSRXNXXLXSNFMESXXSXGKTXVSLNESXXVKGTNXNFXXFRSXGSXXLXKKXRKPAXAXXDXFFPRXRA

SEQ ID NO: 185318 - protein, 320 aa, Oryza sativa
  Clone ID: PAT_MRT4530_82225C.1.pep
MPMPGDVYPALGIVKREGGGGGQDAAAGRIGLNLGRRTYFSPGDMLAVDRLLMRSRLGGVFGLGFGGAHHQPPRCQAEGCKADLSGAKHYHRRHKVCEYHAKASVVAASGKQQRFCQQCSRFHVLTEFDEAKRSCRKRLAEHNRRRRKPAAAATTAVAAAKDAAAAPVAAGKKPSGGAATSYTGDNKNVVSMSAAKSPISSNTSVISCLPEQGKHAAAAARPTALTLGGAPPHESSAPQIGAMLHHHHHHQQDHMQVSSLVHINGGGGGGSNNILSCSSVCSSALPSTATNGEVSDQNNDNSHNNGGNNNNMHLFEVDFM

SEQ ID NO: 185319 - protein, 496 aa, Oryza sativa
  Clone ID: PAT_MRT4530_82226C.1.pep
MDAAVVAIAGDGDADAGHRRPLLASADDDDEIRPYPASSPSPQHPAGAERKPRRVASLDVFRGLTVAMMILVDDAGGAWPGMNHSPWLGVTVADFVMPAFLFIIGVSAALVFKKTPNKTVATKKAAIRAIKLFILGVILQGGYIHGRHNLTYGIDLDHIRWLGVLQRIAIGYFLAAISEIWLVNNISVDSAISFVKKYFMEWIVAVMISALYVGLLLGLYVSNWEFKVQTSNSILTIPTPGNEIGMKMIQCGVRGSLGPPCNAVGFVDRVLLGENHLYKNPVYKRTKECSVNSPDYGPLPPNAPDWCLAPFDPEGLLSTLMAAVTCFVGLHFGHVLVHCKTSLTFASTTGSFTSNAIMATSFHCVNSLRISTSVISKPLYTVSYMLLTGGVSGFLLLLLYYIVDVINIKKPFILFQWMGMNALIVYVLAACEIFPTLVQGFYWRSPENNLVDLTESLLQTIFHSKRWGTLAFVVLEIIFWCLAACFLHMKGIYLKL

SEQ ID NO: 185320 - protein, 70 aa, Oryza sativa
  unsure (1)..(70): unsure at all Xaa locations
  Clone ID: PAT_MRT4530_82227C.1.pep
GMSRECVTAHRNVDVSYHYDHRLTIXQLTYTLXCASHVAACGTMPCPVRIAECDTTKLEIPDHTPYDLLM

SEQ ID NO: 185321 - protein, 90 aa, Oryza sativa
  Clone ID: PAT_MRT4530_82228C.1.pep
ILPRSGQLAFRGFALKQFQTNLPPLGKLKRVPRFPVSNFFPAKGNPPREKGGKSPKKQKGGLKGPCFFEQGFLPGAIFCPPKKIFQGFRG

SEQ ID NO: 185322 - protein, 207 aa, Oryza sativa
  Clone ID: PAT_MRT4530_82229C.1.pep
MCGGAIIYDYIPARRRLCASDFWPDADDSDPHTPAPEKPPRAKRERKNQYRGIRQRPWGKWAAEIRDPVKGVRVWLGTYPTAEAAARAYDRAARRIRGAKAKVNFPNDFGAAPAPAAAAAKAVPRVAPTPAVLPPPKMEAVSEGAGACSSDEVKELSEELLAYENYMSFLGIPYMEGGAASAAGAEEAAAPAGLWTFEDYELPSLAL

SEQ ID NO: 185323 - protein, 76 aa, Oryza sativa
  unsure (1)..(76): unsure at all Xaa locations
  Clone ID: PAT_MRT4530_8222C.1.pep
AKXSAXTXTWPXXXRXLLLPXPPXXRRHHXPPPPSLPXRATAXSTXXXRXRRXRRGRRXRXRXXTXXCRRXXLILS

SEQ ID NO: 185324 - protein, 204 aa, Oryza sativa
  Clone ID: PAT_MRT4530_82230C.1.pep
FGASTLKSMDRNDFIMFIQGTLGYLDPETFVSHHLTDKSDTYSFGVVLLEIMTRKKALYNDTLNGNEALSHIFPLMFHQKRHCDMLDFDMIDEKVMVVLQKLAELAMHCLNPRGDDRPTMKEVAERLQMLRRLHMQLVSKSSPTRVSCSYEGSSMRIPSDPMKYQSMETAKLVLRAPLAPWKPAILAAVAAPVDGDSLAAAAAP

SEQ ID NO: 185325 - protein, 162 aa, Oryza sativa
  Clone ID: PAT_MRT4530_82231C.1.pep
MSAGHPLPPSSSNASPPPERPPAKPRGCKDGGGGAPRFSPSDLARVAWGTTLGGGGGDRQIRVAPAGSGGWDGDGDGRGELCRAAGSKAAGMATAAGKAVVRQRRIWLGGASWRRWWRWSSQRRVSGSGASDDDARLAETTVAGRWYERLEARLVMDDGGSG

SEQ ID NO: 185326 - protein, 96 aa, Oryza sativa
  unsure (1)..(96): unsure at all Xaa locations
  Clone ID: PAT_MRT4530_82232C.1.pep
FLFNKCLDRGLPLQISFLLYTMICYGCLLMDALVRARAMEQSLASSSILSAISGAAPPSVIRHSSMHVSPSALASVTHALAPAASWRTSIAASDXL

SEQ ID NO: 185327 - protein, 56 aa, Oryza sativa
  Clone ID: PAT_MRT4530_82233C.1.pep
FSFFLKEVTNAAPERCFVPIPFEPPILDKLLGANLAKIKEQGPIFRELRPIGYSFP

SEQ ID NO: 185328 - protein, 73 aa, Oryza sativa
  Clone ID: PAT_MRT4530_82234C.1.pep
QKKLVLVDLGSVTDVQVPGYALYTLVIGKPATWELLPFQCHSSFRYLAVAPTSVTKSHFCGGFLCLDCCGVLT

SEQ ID NO: 185329 - protein, 431 aa, Oryza sativa
  Clone ID: PAT_MRT4530_82235C.1.pep
MIFPPAFLDSSSWNDNNNNNHNQQQQQQHAHGHHQHHQVAAGCGGGGGGGDGNSHELLQQQSMIPGTLADGGGGGGAVGPAKPMSMSERARLARIPLPEPGLKCPRCDSTNTKFCYFNNYSLSQPRHFCRACRRYWTRGGALRNVPVGGGYRRHAKRAKPKPASAAGSASAATTTAGSTPAGSTTTTTTSSTCATPNAPALPAMLGGNLSILPPLLRLADFDAMSLGSTFSGMAAAAGKPPPVDAAGCYSVGAATGLEQWRLQQMQSFPFFHAMDHQAAMAAPPPAMAMPGMFQLGLDGDGHGSGGGEDGGELHHAMPSSKREGYPRGMYGDHHLAGGYTSYSSATTVFVVVLVMVCAWKFEKCTEKEEEDELKKEVHALVQWWNRLGQKEEESQTGRSVASTEVLGVGDPPPQVGSGAAADLRGSASARE

SEQ ID NO: 185330 - protein, 809 aa, Oryza sativa
  unsure (1)..(809): unsure at all Xaa locations
  Clone ID: PAT_MRT4530_82236C.1.pep
MVEDPFLVLAGGKEGGFLELEEIDEADFGIFGGAVEDLGEIDRKAGKDQKKKKRKKRKRGDDDYALPGDGDLVVECEEEGEKGEKRVKKKRRSRKKRKVKEMEEKMESKEDVSDDNVEDMQDGNDMEQDNNDGLILGEDEVYAWRELRLHPLLITAVRRLGFKEPTPIQKACFPAAAHQGKDVIGAAETGSGKTLAFGLPILQRLLEEQEKAMRLSREDESTQDENSRESPLRALILTPTRELAKQVCDHLKEAAKFLRIQVVPIVGGLSMEKQERLLKRKPEIVVGTPGRLWELMSTGNQHLIKLHSLSFFVLDEADRMIERGHFHELQSIIEMLPVTNGSDEQTVGTTPSCETVPILQIKKRQTFVFSATLALSANFRKKLKRGLVTAKASASTDLSSIEALSKQARMKPNAEIVDLTKASILPEKLEESFIECSDDDKDAYLYYILSVHGQGRTIIFCTSIAALRHLSSILRVLGINVLTNHAQMQQRARMKAVDRFRESENSILVATDGFARGMDFDDVRTVIHYQLPHSTDXVYIHRSGRTARKSMAGCSIALISPADKAKFYSLCKSLSKILLFFSXVATSALLTLTELGSFSTYVNENLQQFPVDHAYMPAVMNRLTLARQIDKITRYNLHLHAFQENANKSWLQRNAESMGLLLETSDSEEERVQGHKQRKATSANLQKLQQDLSELLQRPLQPKTFSRRYLAGAGVSPLLQKQLEELSKRNVKGSASVNANKGSRFVVIGQDQIEPLQALQNSGQEVCVSIDKQREKRRLAENWRRKKQKEKKSTREQKRKEKRIAKERD

SEQ ID NO: 185331 - protein, 243 aa, Oryza sativa
  Clone ID: PAT_MRT4530_82237C.1.pep
MAASTTALSMKLLVDTNAQRVLFAEASKDVVDFLFSLLALPVGTAVKLLGKDSMVGCVGNLYASVEKLDGTYVQPGASKNALLSPVVLSPAASSNTSVLRLPAPSSSQPKSFFSCRSYDCFYYVTDVSGVKCPSCGNQMTTACTYAAPTAAQKLQAAAAEGAGKGFVQGIVTYTVMDDLTVSPMSSISSITLLNTFAVKDLGALKEQTVQLGYTEGLAILRASLQSKTVLSDVFLARRPAKQA

SEQ ID NO: 185332 - protein, 118 aa, Oryza sativa
  Clone ID: PAT_MRT4530_82238C.1.pep
HREKKKKVLRLPPPPSRPAPAVPDAAGCRPLDRRRPPPPRPAPVAPISPPRARCSRPPPLSTGAGRRRPRCSPPPPPSRRLASGRRGGLHPVALSGAAVAGLHPAAPLEGRRGEEEMG

SEQ ID NO: 185333 - protein, 125 aa, Oryza sativa
  unsure (1)..(125): unsure at all Xaa locations
  Clone ID: PAT_MRT4530_82239C.1.pep
RPAGAQTPVQRTSVSXPSMVIEHFTYDTAKKYLNREDGEPAKIPIPIPLCAGDLVGALSTPLXLYPMVAGRTRLTIEKDVYDNVLHAYANIVRQGGLVELYRGLSPSLIWVGPYADTNFYAVCGR

SEQ ID NO: 185334 - protein, 72 aa, Oryza sativa
  Clone ID: PAT_MRT4530_8223C.1.pep
CGKQRADLQSVPPRKSVPSHHATGPVALLALAGRPTRAIPGGLNHAVLFPIPAHRVRAPRRTPGAEVTPLLL

SEQ ID NO: 185335 - protein, 101 aa, Oryza sativa
  unsure (1)..(101): unsure at all Xaa locations
  Clone ID: PAT_MRT4530_82240C.1.pep
MYTIMFRLCSQPSYWITMGLIVAVXMGPVLALRYFRNMFRPNAINILQQIEQSNGHTHTPRNMESRIISAGSYLTHLLADSGRNRGATYQPLLSDSVASDG

SEQ ID NO: 185336 - protein, 61 aa, Oryza sativa
  Clone ID: PAT_MRT4530_82241C.1.pep
QQSGIVHPRPSTTSSAGYPISVSKDANLFGNLIHIKTNARGQNKSISTTNQQTISISTTNQ

SEQ ID NO: 185337 - protein, 744 aa, Oryza sativa
  unsure (1)..(744): unsure at all Xaa locations
  Clone ID: PAT_MRT4530_82242C.1.pep
MSSAPPPPRSPAATPDAAAPASPARTRVVRAPPRPPRPRLAHPGAAPPGWAERRPAVSVDYDRGRREARAEVEGVGAASLPARHRLRVEGSRWQRDWKVSEAAARVLALPRAEARAVDAVLNCWAGRFARRNFPLLIREITISGNLQHAVHVFCWMKNQDNYCARNDIYGMMIRLYARHNQVDQARGLFFEMQEWRCKPDADIYNSLIHAHSRAGQWRWAINIMEDMLRAAIPPTRTTYNNVINACGAAGNWKKALELCKKMTENGVGPDLVTHNIVLSALKNGAQYSKAISYFEIMKGANVTSDTFTLNIIIHCLVKIGQCGEAIELFNSMRERRTKCPPDVVTYTSIMHSYCIYGQVENCKAIFDLMVAEGVKPNIVAYNSLLGAYASRGMHREALAIFNLIKKNGLRPDIVSYTSLLNAYGRSAQPEKAREVFNKMKKNSCKPNKVSYNALIDAYGSAGMLKEAVGLLHEMEKDGIQPDVVSISTLLAACGRCRQITRIETILEAARSRGIDLNTVAYNSGIKSYLSFGDYEKALELYTSMRESNVKPDAVTYNILISGSSKLGKYTESLRFFEDMVDSKVSSTKEFLWTXGGWKRAWDLFKEMEVNGIRDWKTASEMIEYLDSSLSSISVGTLNHVLNFLGKCGKTENMMKLFYKMVTSCSTVGLSTYAVVLRNLLVVGKWRKYIEVLQWMEDSGVHPTLYMFQNVLPYIWRENGMDFAATMQEKISMIRPTLIIISRRL

SEQ ID NO: 185338 - protein, 321 aa, Oryza sativa
  Clone ID: PAT_MRT4530_82243C.1.pep
MGRKPCCSKEGLNRGAWTAMEDDILVSYIAKHGEGKWGALPKRAGLKRCGKSCRLRWLNYLRPGIKRGNISGDEEELILRLHTLLGNRWSLIAGRLPGRTDNEIKNYWNSTLSKRVAMQRTAAATSMPAAATTSSNADAAGAAARRRRSPEPRTVVVSPIRTKALRCNNNSSSGIVVVQQAGACSHGGRPPESGAPGDAAADKVATPQAVQQQQQQELAGAEDDDDLPVPAVCIDLDLDDIELGGLDGFLISPWRGGGHDDGNAAAGAVPNLPMPIGYELGGAGGGGEAGAVDLEALLGQLEAEEDDDGDHHHHHHHHHHQ

SEQ ID NO: 185339 - protein, 503 aa, Oryza sativa
  Clone ID: PAT_MRT4530_82244C.1.pep
MALAILARRRAAEALLRRPLGAAGVSALRASYAAVAGEESDVVVVGGGPGGYVAAIKAAQLGLKTTCIEKRGTLGGTCLNVGCIPSKALLHSSHMYHEAKSSFAHHGVKFSNLEVDLPAMMAQKDKAVAGLTKGIEGLFKKNKVTYVKGFGKLASPSEVSVDLSDGGSTVVKGKNIIIATGSDVKSLPGVTIDEKKIVSSTGALCLSEIPKKLVVIGAGYIGLEMGSVWNRLGSEVTVVEFAPDIVPSMDGEVRKQFQRMLEKQKMKFMLKTKVVGVDTSGDGVKLTLEPAAGGEQSVIEADIVLVSAGRVPYTAGIGLESVGVETDKAGRILVDKRFMTNVNGVYAIGDAIPGPMLAHKAEEDGVACVEFIAGKEGHVDYDTVPGVVYTHPEVASVGKTEEQVKALGIPYRVGKFPLLANSRAKAIDDAEGLVKVVAEKETDKILGVHIMAPGAGEIIHEAVLALQYGASSEDIARTCHAHPTVSEALKEACLQTFTKAIHI

SEQ ID NO: 185340 - protein, 718 aa, Oryza sativa
  Clone ID: PAT_MRT4530_82245C.1.pep
MSSAPPPPRSPAATPDAAAPASPARTRVVRAPPRPPRPRLAHPGAAPPGWAERRPAVSVDYDRGRREARAEVEGVGAASLPARHRLRVEGSRWQRDWKVSEAAARVLALPRAEARAVDAVLNCWAGRFARRNFPLLIREITISGNLQHAVHVFCWMKNQDNYCARNDIYGMMIRLYARHNQVDQARGLFFEMQEWRCKPDADIYNSLIHAHSRAGQWRWAINIMEDMLRAAIPPTRTTYNNVINACGAAGNWKKALELCKKMTENGVGPDLVTHNIVLSALKNGAQYSKAISYFEIMKGANVTSDTFTLNIIIHCLVKIGQCGEAIELFNSMRERRTKCPPDVVTYTSIMHSYCIYGQVENCKAIFDLMVAEGVKPNIVAYNSLLGAYASRGMHREALAIFNLIKKNGLRPDIVSYTSLLNAYGRSAQPEKAREVFNKMKKNSCKPNKVSYNALIDAYGSAGMLKEAVGLLHEMEKDGIQPDVVSISTLLAACGRCRQITRIETILEAARSRGIDLNTVAYNSGIKSYLSFGDYEKALELYTSMRESNVKPDAVTYNILISGSSKLGKYTESLRFFEDMVDSKVSSTKEFLWTIRWLEESLDLFKEMEVNGIPPDAIICSSLMEAFNKGGEPERVLQLMEFMKKKSIPLNQKSYFEIIASCTMIRDWKTASEMIEYLDSSLSSISVGTLNHVLNFLGKCGKTENMMKFIVLVDIFLRT

SEQ ID NO: 185341 - protein, 55 aa, Oryza sativa
  Clone ID: PAT_MRT4530_82246C.1.pep
HVRNWHVMWTVRISYLFRVPTLLCNQISYQFLGLCIEIGYSIEKILTIQLFDLVR

SEQ ID NO: 185342 - protein, 79 aa, Oryza sativa
  Clone ID: PAT_MRT4530_82247C.1.pep
TTSFAAHALLGQRISALLSDRSSDSSFPVLSLVVRNAASIFSKHYVDSILLACPACVTLDPLDGIAPFFLVCFFLCFCC

SEQ ID NO: 185343 - protein, 403 aa, Oryza sativa
  Clone ID: PAT_MRT4530_82248C.1.pep
MKGDRVRRGKEEALGAGGGQLCPECGYEYPNANPNPRLRRSHSKNCRRKMKMPVVAEEAGVAVHKRRRGLAVENASRGGGGDKVVHEGSSEQGCSAKAKEISAEPKLMADDPMSSHEKHMIWHRHYKLYPTKVAPQCNDLSFGPFLGLRRKAMIVTKGIKVMSGETLDYKPEGGRIMFLFEAGVVDELHASAIRDPIGIYLKDKNETMCIGSITKAQPRARLWLMLSEEMKLFHNSERRSVYFNGYEFYPMYKRLHPLETYRKLWVVEVKPFEDASFNPVEDERKYYLLKVFSTAIPKEEIDVHVRSNKEVKRLGVISSYDTSFSCKLDFEDQFTLSHTSQEEDVVFYGYTLRHAGTILLFVYIDIITLCLLNFYMMMELRLNIEMIQSIVRLRHSLQRENQR

SEQ ID NO: 185344 - protein, 130 aa, Oryza sativa
  Clone ID: PAT_MRT4530_82249C.1.pep
ECDEFYANSLFVVGEFGGNDYNAPLLREGPLGGLQQLIAEGARELIVPGVMPTGCFPVYLNMLDEPADGYGPQSGCVRRYNTFSWVHNAHLKRMLEKLRPKHPNVRIIYGDYYTPVIQFMLQPEKFDQVN

SEQ ID NO: 185345 - protein, 171 aa, Oryza sativa
  Clone ID: PAT_MRT4530_8224C.1.pep
MADQLTDDQIAEFKEAFSLFDKDGDGCITTKELGTVMRSLGQNPTEAELQDMINEVDADGNGTIDFPEFLNLMARKMKDTDSEEELKEAFRVFDKDQNGFISAAELRHVMTNLGEKLTDEEVEEMIREADVDGDGQINYDEFVKVMMAKCNFVGIDMFQTEILDIQRHPML

SEQ ID NO: 185346 - protein, 382 aa, Oryza sativa
  Clone ID: PAT_MRT4530_82250C.1.pep
MGAVRGILVVAVVLAVAAILAGAAEGKVNGKAKGKYRALFNFGDSLADAGNLLANGVDFRLATAQLPYGQTFPGHPTGRCSDGRLVVDHLADEFGLPLLPPSKLKNSSFAHGANFAITGATALDTPYFEAKGLGAVVWNSGALLTQIQWFRDLKPFFCNSTKVECDEFYANSLFVVGEFGGNDYNAPLFAGKGLEEAYKFMPDVIQAISDGIEQLIAEGARELIVPGVMPTGCFPVYLNMLDEPADGYGPQSGCVRRYNTFSWVHNAHLKRMLEKLRPKHPNVRIIYGDYYTPVIQFMLQPEKFGFYKQLPRACCGAPGSVAKAAYNFNVTAKCGEAGATACDDPSTHWSWDGIHLTEAAYGHIARGWVYGPFADQPIFQSS

SEQ ID NO: 185347 - protein, 47 aa, Oryza sativa
  Clone ID: PAT_MRT4530_82251C.1.pep
FRRPLGWRFLKIALLEGGRRPLRRRGTVSRLSGPASQWRTTASKKVW

SEQ ID NO: 185348 - protein, 384 aa, Oryza sativa
  Clone ID: PAT_MRT4530_82252C.1.pep
MGKWRGWEMGGNGGGREGRRARWWPWRRGGSVGEPGVAKRRRQRPLRCPRTTWCSTAIAAHRYGWCTSYAAAAQAMSYKSTRHAPAWRSSFRAIELHGLPELRHFTCLGNDHAPVVALVVGPTPAPTISPLHPLRPRLDPAMASPGPATAGELLRIDPVELRFPFELKKQISCSMQLSNLSDDYIAFKVKTTSPKKYSVRPNTGVVLPRSTCDVVVTMQAQREAPPDMQCKDKFLVQSVIAPSGVTVKDITGEMFTKESGNKVEEVKLRVTYIAPPQPPSPVPEESEEGSPSRVSESENGDSLGGGFTRALRERIEPQENSLEAGALINKLNEEKNSAIQQNHKIRQELDMMRREISKKRGGFSFIIVIIVALIGIFLGYMMKS

SEQ ID NO: 185349 - protein, 59 aa, Oryza sativa
  Clone ID: PAT_MRT4530_82253C.1.pep
SLHLACYVLLSVFYLMRNVVRIAFYFEIVQSRIWTVTLTSKGLDFQYFPLFLAFVHHVN

SEQ ID NO: 185350 - protein, 266 aa, Oryza sativa
  Clone ID: PAT_MRT4530_82254C.1.pep
MALVAGATGVSSVEVTGDGKDRLQVVGDGVDPVCVVNRLRKKIGHAEIVQVEEVKEKKPDLPKKPDPPKPEPPKPPVVCYPPTPYYHHHYGGPPPPVVFCDQPSPNGTCRSAATATAVAAHSECGTVYVGCGAAAKAQKIVIKACMPCDGCRVKALGVAAKADGVISMAITGDDRDRLEVVGDGVDVTCLVTCLRKKVRFADVLQVEEVKDKKPEEEKKKPEEEKKPPECPCQATLPVPWCPPPPCYYPPPSMVYCEEQPSPCSIM

SEQ ID NO: 185351 - protein, 217 aa, Oryza sativa
  Clone ID: PAT_MRT4530_82255C.1.pep
MRRGSRRARQRRRGGGGASAGGGCLWLWRAARITGLTTNPPPPTPSPMAGRSNAATSTSTPNSGSCNPYGGKKSRRPLWFLKWNSANSRKEIAPVRSPPNQKRPKISDRAIGQRQHRPETEIYRFGAKTGARIWRMRVDRGGVRFERTRATYTHRAREDARTVVHRRGCGRTPAQPLAVMEIGGGGGGGGAAGLGIGGDETGRERERERDRWCEINF

SEQ ID NO: 185352 - protein, 98 aa, Oryza sativa
  Clone ID: PAT_MRT4530_82256C.1.pep
GGLGGLGVGVVDVGLLRGLRLRVRLALPPPPPPPPPPPPPPPTPAPTPSFSSSPGAAPPPRPGPPALALARSRALGFLVSSPFLALAGGVRDRERAHQ

SEQ ID NO: 185353 - protein, 61 aa, Oryza sativa
  unsure (1)..(61): unsure at all Xaa locations
  Clone ID: PAT_MRT4530_82257C.1.pep
ADTYNPRAGRVTNXNSQNXPILNLVQMSAVKVNLYQNXLLSPFWNTTSQHVYITQGTSQSV

SEQ ID NO: 185354 - protein, 126 aa, Oryza sativa
  unsure (1)..(126): unsure at all Xaa locations
  Clone ID: PAT_MRT4530_82258C.1.pep
MSLHARVALFAAALAAVLAVSTAGFISNEAVGASSAASGGAGRSLLQAKKDCPVNFEEANYTVITSRCKGXMYPPAXCCQALKDLACPFTAYINDAQTTCAAFMFSYINLYGRYPPGLFANTCRRA

SEQ ID NO: 185355 - protein, 55 aa, Oryza sativa
  Clone ID: PAT_MRT4530_82259C.1.pep
MPRVRDDWSDQERRAGGKRERRSITEGLWEEHAAGLSPRAYGRSTQPVGADDGGG

SEQ ID NO: 185356 - protein, 149 aa, Oryza sativa
  Clone ID: PAT_MRT4530_8225C.1.pep
MADQLTDDQIAEFKEAFSLFDKDGDGCITTKELGTVMRSLGQNPTEAELQDMINEVDADGNGTIDFPEFLNLMARKMKDTDSEEELKEAFRVFDKDQNGFISAAELRHVMTNLGEKLTDEEVEEMIREADVDGDGQINYDEFVKVMMAK

SEQ ID NO: 185357 - protein, 141 aa, Oryza sativa
  Clone ID: PAT_MRT4530_82260C.1.pep
MPRKKEHDEGNSLRVTATTINDGKRPATSSEGRRGTSRRRQRLSGDEQRQRRGGRASPRCCDAEGGGGTGRGRPRRRQGADGGEADRLDVGDGLPVVFGFEGVEAGLPLFDLVPMEATALTGDGGADGYSRLERRPEERDG

SEQ ID NO: 185358 - protein, 936 aa, Oryza sativa
  Clone ID: PAT_MRT4530_82261C.1.pep
MARSAGIVVSASMGVMKPLLAKLTTLMGDEYKKLKGVRKQVSFLKDELTTMSAFLEKLAFMDDDGGELDPLVKDWRNHVREMTYDIEDCIDDFMHQLGGGADASGFLQKTARRLKTLRVRHQIANQIDEIKARVIEVNQRRKRYELDGCSNSRASDPVVVDPRLTSLYQKADNLVGIDGPTEELIQLLTDAGQQKLMVVSIVGFGGLGKTTLAKQVYDKIGQQFDCKAFVSVSQRPDIARLLSTIQSKLNIQESSQAHEVQDIIDGIRYYLGNKRYLIVVDDLWKREAWDIISCAFPENANGSRVIVTTRVEDVACWACSNHQYIHRMKPLNSEDSKRLFFKRVIRSKDGCPSQYEEVSAEILKKCGGLPLAIITIASLLACEQARIMQEWESIRNSLGTPFGTNPSLEGMRQILNLSYKNLPLHLRTCLLYLAKYPEDSSIDRDDVVRQWIAEGFVRSSPGQDLEDVGKSYFNELINRGLIQPEQNNYGVVMGCRVHDMMLDLILSRCKEDNFISVAYSCEEYMLIAGQHGYNYNKVHRLSVQSMDSESDCTILMEGGVIPARLAHVRSVSLFGKHPRELPLLLPLFKYLRVLHITFYLLDQADLTAIRHLVQLRYLLFVSHCFKVELPSRICGLVHLETLEIVAYHAVSFPSDIVSLACLSHLRLPRGGLPNGIPKIKSLRTLEMFHPPDMDIKALAELTNLRKLSLFFDLEATMGTASNLNALGSSIGKLQNLRYLEFTVPTVKFDDDGLLGSLSAFPCSIEILKLETWRFSRIPTWINADLCHLHLLELLVSETCTDEVGVVGELPSLIHLHLQVELKMKGTVVFGASGGSFPALESLILTCGGDVASQLGFQAGVMPKLQMLDVRFERCDSGIDTPPVGMEHLLSLQHIRVEINVELEDRKIYPRDTAEHVLREAAQAHPNKPAFNFYFFS

SEQ ID NO: 185359 - protein, 54 aa, Oryza sativa
  Clone ID: PAT_MRT4530_82262C.1.pep
LPSLLVGWAVLIDLYSNPESTENKAGNLVSSIIPHLTRSRAFCNRISRVAGLSI

SEQ ID NO: 185360 - protein, 173 aa, Oryza sativa
  Clone ID: PAT_MRT4530_82263C.1.pep
MGAAAPAPSPLPYLAGGEAAHLGDGSGGVCAFPFAGSGRRGGGMRWRKRGGGGRQAAGDGNALLSPPATNAANARRSAARALWDSAGRGYATTGPGFNAVAMLMLGRVSSDLLVTVKFDKLRNRHRSKVFGIFIGLNGAEVTNKMVLCVEVGQTVAASGGVGTIVMDTTLSPP

SEQ ID NO: 185361 - protein, 83 aa, Oryza sativa
  Clone ID: PAT_MRT4530_82264C.1.pep
RGGHAKISSEFILVILYKSEVPKRLMDRQWMYADWRSKEFTNGVHYFLRVAKANRQKGFICCPCNKCKNQKEYSASRTIHFHL

SEQ ID NO: 185362 - protein, 255 aa, Oryza sativa
  Clone ID: PAT_MRT4530_82265C.1.pep
MADQIEFRQTWVANYLTGQIRNHHQYKDADVIAFHILFIGLTRHNTGKVLIEYGGLALQLVAVFVYVMLKVGDKKYVLSEERNKILTHSEAKTHNIGLLSFFMIAVLAAIIQIQFQFPFPENYSTLAKAIGIFGMFFQVKGENGLKNDAPHIRKLKITATLIKFMTLSYELWAQISQGYRQSVLTKPLCDMTIAALIVNCVLFAARYIGPKTIKEYFFPPSPPTETRQEYFTRTLALLHKDDFPSAVQRADEKHD

SEQ ID NO: 185363 - protein, 40 aa, Oryza sativa
  Clone ID: PAT_MRT4530_82266C.1.pep
MSVEWSSPGGAATSVERSSPDLAVSRANEGCNAGGRGKLR

SEQ ID NO: 185364 - protein, 61 aa, Oryza sativa
  Clone ID: PAT_MRT4530_82267C.1.pep
ICHWSWGTGKAFVLPSMERLPLPISKGGFLNNWGQGRPRHREKNSLFRGSGVSPIWPSESF

SEQ ID NO: 185365 - protein, 101 aa, Oryza sativa
  unsure (1)..(101): unsure at all Xaa locations
  Clone ID: PAT_MRT4530_82268C.1.pep
QNQNFXVXGFKYALGIXLHDFFFLAGNFAFPFPVSPSPNKKPXXVLLLLQQREVGXQKNNYFQLNPDPPKKKKXKELARRNESPYLPPDPPNPVAFTPXTD

SEQ ID NO: 185366 - protein, 78 aa, Oryza sativa
  Clone ID: PAT_MRT4530_82269C.1.pep
SMLKQDYRDGMTREEAVALALKVLSKTMDSTSLTAEKLELAKVFLQPGPGEVQYQVCSPEAMGKLLAKAGLSQPAPEA

SEQ ID NO: 185367 - protein, 374 aa, Oryza sativa
  Clone ID: PAT_MRT4530_8226C.1.pep
MGSAVETLCGQAYGAHKYDMLGVYMQRSTVLLTATAVPLAVIYVFSKEILILLGESPEIAGAARLYVVGLIPQIFAYAANFPIQKFLQAQSIVAPSAYISAATLAAHVALSWFAVYKLGLGLLGASLILSLSWWVIVLAQFAYIVVSDRCRLTWAGFSSKAFSGLPEFLQLSAASAVMLCLETWYFQVTVLIAGLLKDPEIALDSLAVCMSISGWVFMVSVGFNAAASVRVSNELGAGNPRAAAFSVKVVTSLSLIVAAIIAAIVMCLREYLSYVFTQGEEVARAVSSMTPLLAVTIVLNGIQPVLSGSPSHAATATTTCGGGKRWTQPPLLPQDDEDKDKDGDGDKMTTTTTTASSNDGDNDPAASSNEGGDE

SEQ ID NO: 185368 - protein, 76 aa, Oryza sativa
  Clone ID: PAT_MRT4530_82270C.1.pep
SRVPCVFIDGCGLVQRDPVFFVSTALLNWPSCEVKLTSFLRYCSKTVFRGISIANSSMSLDRCGYKYVFLLSVKQK

SEQ ID NO: 185369 - protein, 65 aa, Oryza sativa
  Clone ID: PAT_MRT4530_82271C.1.pep
LPGPFVGFRRIVPPLPLPPVGVVSFGPAPGPAPALLAFNLPSLCGVFPNYSLAPGGPPPLGGVWA

SEQ ID NO: 185370 - protein, 2683 aa, Oryza sativa
  unsure (1)..(2683): unsure at all Xaa locations
  Clone ID: PAT_MRT4530_82272C.1.pep
MEEAEKFSPTPCLLQFGTQPPLVVIEHGGKVYVHATQDSADSCAALSKKAKKRAGSKARKERLALVTEARELLKNSKTSSTTAAAKELRSTPAVHQEETKIMEKLDKEAYRLSWSVRSARSQNNINAARNYRRKRSQVNKLHAQLKDQLNQNDEQNQVDDIGSEHPDPINEPYTFFPGQCANQPHRLKQLIRQAIMNEFWTRLLKRVANFPGGMLNNGVNNFRPLTLVSACHITAGTSKDENKFAALANEVPAPHSDPLQQQLQQLQSQMMEIQQQLQRRNNGGSGRSSPRRYPQQPESYARSGGMLSRSSPRRHFEIPESSRLAGARHYVPSYRPQHERRTWAPRRRSPPPASFQPRQSHMPQLWNSWSRPQWRPVESQQQQRHDEPKRESTPPHPGVANMQQGQRSPPRQLDQRREAEHAKREPMMGPRVAPPLLPTPPSQSRAAYVPTVNQRKRDKRRQNRRAMYQELQELVLGNVHVRPRQPQGEMAQNLDGSHQPSFQKAPDQGEKKHEPMISKKEDVLLEAPIVASQVADKQASHQNSPNIHERKKSTLSSHVNEIDSQSSSVKVRPKEVDPNTMDIVMCGALTAHSDSENDTNWVPPRVEKELSYPSDEEIVPIPKTVFTKKILPKFEKVRERRILQTSALYHPYTELTARLPQNIRFLEQIASRPGIGTRLKVIASQRVSNAREDGYLTECTDDDSSSSLQFLPNHPDYPVLASSIFSDDEGMLGDQNTAPAHVTGEATDVLPGTGSQALLAVQIPPGTGSLTLPAVQIPPGTGSLTLPAVQISTDLAASSRDPELEERLRSQQRQLDNLHARFDQLFDILTEYYDVIEDLIDRKMKQVIAEQAPMNSESELDKPYDSWHDLVPFPVGWHPPKFRQFDGTGDAREHLAYFEATCGDTARNPSLLLRQFSGSLTGAAFHWYSRLPVGSISDWKSMKDLFKAHFVTMKKDFSVVELAQVQQKRDEKIDDYIIRFRNSYVRLAREMHPEDAIEMCVHGMLHHWSIEVSRREPKCFSALSLAVAATKLEYEKSPQIMELYKNASGFDPSKRFNTNVKANNGGAKPKASNEANTTRMVNQNNVPMLGSRSEPTGGKSRPSIQELLKKLYVFRREMVKGFFNQVMAHNHLTLPEPRRPDQVGMTDNRLYCPYHRYVGHVIEDCVAFKEWLQRAVDEKRLAIQPDAINPDYHAVNMVTVGPTSKMRNTNIEKGDWVPLAQVERQLVNLANTQKQIPRRAAQEQYRRPFNNTYRHDGHATFTRRWHDPSKRRMPPRFVPRSEGDESFPRPRRIPPTLAQFMPRNWGQLPKEVNSSSEKESPSTPSHKAACNVILDYKDNTSTDSDEGVTPHEREAMRAEAELEKVLVKEVNMNLRGGKVLPERVYLQRPGKEQAQPVKDDGVPDSTPKGGVHEKGRVTDIDYNVVAHLKRIPALLSVYDALMLVPELRESLVKALQTPELYEVSMAKHRLQCNYFNTNEITFSEEDKVVADDNHNHPLYIEGNIGVAHLRRILIDPGSAVNILPVQSHFNQSSSKKQERRRATSSKKAAASSSTPPFSLSTGVSTSVPLILRSVPDTKIIYGSTYHEPLLLSTPILTASLTNKNDTGAHGVPKSSATENDLLPPVILQTPQDKKDKDVAPEGGVVRQRVAEIEESIGGLLRQPPAMYVTVTTPLEVWAIPGPYIHTFPTLFYKVPEVHPCDFIFKLPASVPDTEVALVSLKAEPKLVRLLENSGIKLQRNRRLPPPPAICEEWWEQAEEFIKRKCKDQPKYGLGYIPSEFSESEDEEDGDQCVTCHVIHTDNDQYLSDEEVHRAMNVKEGEVLEAAPAPQQLEDGGQLTVDELTEINIGTEEDPRPTFVSSSLSPEEKENYREFLMEFRDCFAWSYKEMPGLDTRVATHKLAIDPQYQPVKQAPRRCRPELQDDIIAEVSRLITAGFIKEIQYPRWLANIVPVIKKNGQVRVYVDFRDLNRACPKDDFPIPITEMVVDATTGYGALSFMDGSSGYNQIKMDEQDATDTAFRTPKGNFYYTVMPFRLKNAGATYQRAMTIVLDDLIHNSVECYIDDIVVKTKNRLQHQDDLRVVFNRLRQHQLKMNPLKCAFAVQSGVFLGFIVHNRGIEISPKNIRAVTKLPPPTDLNKLKKLQGHLAYIRRFISNLSGRTQPFTRLMKKGVPFQWDDKCQNAFDSIKRYLLNSPVLAAPVKGRPLILYIATQPASVGALLAQHNDEGKEVACYYLSRTMVGAEHNYSAIEKLCLALIFALKKLRHYMLAHQIQLIARADPVRYVLNQPALMGRLGKWAVLMMEFDITYVPQKAVKGQALADFLAAHPVPDDSPLVVELPDEDVFATDIESPWELYFDGASRTESDPDGTPRRRAGAGLVFKTPQGGMIYHSFSLLKEECSNNEAEYEALIFGLLLALSMNVQSLLVYGDSQLIIRQVNDIYEVRKPELVPYYDAVQKLMKKFEYINISHVPRSKNASPDALAKLAAALVLPEGKPAQIIVEEKWLLPAVLELIPEEYEVNHVMTVDDKEDDWRKPFLNYFKHGIMPDDPVERRRLQRRLPSYVYKANTLYRQSFGQEILLRCVSRDEAEKILKEVQHGVCGGHQGGPKMYHSIRIGGYYWPGIMIDCLRVARSCHNCQIHGDLKHQPPVPLHPTIPXPFDAWGMDVVGPFDPPSSGGHKFIL

SEQ ID NO: 185371 - protein, 155 aa, Oryza sativa
  Clone ID: PAT_MRT4530_82273C.1.pep
MRWLKSPKKDPAACVEFSFHVEYHWAALESMLDVLCTGYQDLGLRVVVLTGKTMDSTLVHTSGVEVKAPRSTPVLVLLPITKRVVETDDTDEIIVEGFDEIPRRLGSAYSGFVNYATNRERHNSRRERSSDYGGSCLPSNVGDDTSLCSGGWIWS

SEQ ID NO: 185372 - protein, 99 aa, Oryza sativa
  Clone ID: PAT_MRT4530_82274C.1.pep
MGRSAIAKSAGLLREIKNKQSSNLMSRVQPSEARSAETALWVPHPRTGIYYPKGFEWVMEDVPSSAASFRQLYWLRSGDAETASSPTSNDAAAFDHPFV

SEQ ID NO: 185373 - protein, 88 aa, Oryza sativa
  Clone ID: PAT_MRT4530_82275C.1.pep
VPPYYVRRPCLLDHGGNMPILDASTPPSALGSSRSPKKAYPEAFVRYQSAIRTYVSHECSSSSFIAYKPPGCEESGGTKPSSSLYSLV

SEQ ID NO: 185374 - protein, 271 aa, Oryza sativa
  Clone ID: PAT_MRT4530_82276C.1.pep
MASAPLPQATQLGYKPNVFSFWILFLQLSHGTGGDLAGARVVGRTFGGHLRVEDNIANSMVLTDTTNDDGRRPAARWTAAAASVGGGAGAAVVGGFGGQAAGLLHPPAHLTVVTATGGDDGGGGATRMELGRRRWRGSYEGVDAAGDGGTAAQDGGEGDAAAGDRGTVVGDGVFVWIATGHINSNDVHGDLGIRNFRVAGKGVLHDMNLIGIIENRLACSHGGIELALGDSNCGTIELHLGHSHGGIELALDHINCNNINCNNMELHHSQR

SEQ ID NO: 185375 - protein, 612 aa, Oryza sativa
  unsure (1)..(612): unsure at all Xaa locations
  Clone ID: PAT_MRT4530_82277C.1.pep
MDCFLSSVCTPLNLQFIDVAYRVKVSTTAAAAKGAPPGRISHAGGTGGGGGAQEERTILKGITGEARPGEVLAVLGPSGSGKSTLLSILGGRLAGRHAGTVLAGGRAPCRAVQRRTGFVAQDDVLHPHLTVRETLLFCAMLRLPASSPAAAKAAAAEAVIAELGLAPCADTIVGNAFVRGVSGGERKRVSIGHELLVNPSLLVLDEPTSGLDSTAAARLVATLSSLARRGRTVVMSVHQPSTRVYRMFDSVLLLAEGTCLYFGAGRDAMDYFAAVGFSPAFHVNPADFMLDLANGFAQTEYDNCNAADGGNVKQSLISSYNRVLAPRVKASINAGDXPRRRAAATAAGGGELQXCTSWSNQFAILLRRSLKERRHEAFTSLRLFQIIAPALVAGAMWWRSSPAAVGDRMGLLFFVSIFWGVFASFNAVFAFPQERPVLARERASGMYALSSYFMSRMAGDLPMELALPAAFTVIVYLMAGLNPSPAAFALTLAVILSYVLVAEGLGLAVGAVMMDAKRASTLVTVVMLAYLLTGGFYVHNVPGFMAWAKYTSFTYYCYRLLIAVQYSGRLARLLPPEEARGEASPAACVAALVAMFFAYRLLAYLALRRVRK

SEQ ID NO: 185376 - protein, 72 aa, Oryza sativa
  Clone ID: PAT_MRT4530_82278C.1.pep
LLMGKPHPCATERVPSCPVALPQLDGSTPNALLSRYPPRVRGLRGSKLYTEGDGVRCNSTAPANDTELPRRL

SEQ ID NO: 185377 - protein, 131 aa, Oryza sativa
  Clone ID: PAT_MRT4530_82279C.1.pep
ISEYIRPKFIKKSRHQNCKIQRAIIHLRDAWNVSGVSVRFYTFVKFSVQFYTFGNLGKFTSKQMFNISKRKIVRFGNVPCNSELKMCPQNVSLSKCPEPPTFKLKKSLQRLGRRLGLGVQGIPIRIEDGLS

SEQ ID NO: 185378 - protein, 778 aa, Oryza sativa
  Clone ID: PAT_MRT4530_8227C.1.pep
MRAGGYTVHQALSADAAAVLKLALALARRRGHAQLTPLHVAFTLLRSSSSSSSSSSPSDPPPFACSGGEPSCCAHGLLRRACVRAHPAVAACAPAAAAASHPLRCRALELCFNVALNRLPATNAMADCGRACSPASSLVPPDPTLSNALVAALKRAQANQRRGCIELQSLQPPQHALQPQQQPLLAIKVELDQLIISILDDPSVSRVMREAGFSSAAVKSTLEEGGAMLPSLGGHHVCYSSSSPEPHIDLDAHAASGGGAPWPAQFLHRPDTGSSCKEEDVRAILEVMVRKQWARPNPVVVGDSVSVAEASVAELMRRLETGDVPGELRGAHVLRLHLSRVHLRLMTRADVDAQVAELRRTANSIVVDAKAAGLVIYVGDVRWAVDDDDHHHHHALAEYSAPEDHMVAELARLMSELRAASRGRAWLVAAASYQTYVRCQQRRRRRRAPSLEATWSLQAVVVPAGAGADAGTGLSLGRRAPPAPPPSRVAEDDQIAKLGEIPTLDLALGGDDGGVPALCAECADGYEKEASQVRAKADGTTLALTYFPGWPHANEPQTSHKAELMELRRKWGILCQRVHSRSHNDQASVPSPMPWWCRPSSVSRDGEARTELNPSSAGLRLSFGTPGDHDRSESVDERGADTTLSLLPPDSAAAATTWQDTRGRWSEGGGGGADGEMMTVNGLDATVDAVSIRRVWLEQLLLSGDLKRKAEKGGLSGEPKPRRRGGVSLDLNICAAADDDDDGGDSEEEAAPSDLTNEGGCDGGGEPGRLDDSLDSHE

SEQ ID NO: 185379 - protein, 706 aa, Oryza sativa
  unsure (1)..(706): unsure at all Xaa locations
  Clone ID: PAT_MRT4530_82280C.1.pep
MVAHGVLPAKEIIGWRPAFGEAFPTLDTHEVVVFSQFFYGGFSLPTSRFFRGILSFYGISLHHLNPNSIVHIANFIHACEAFLVIRPHFALFRRIFFLKPQPNKSKPCVVGGAGFQLRGTLSQKYFSMPLKTSNNGWHANWFYVQNPEPALPEYSCLPPVYQDTWNSLPMGDEAAQAVELMERMLKVKEQGLHGEQITRHFIKSRLAPIKERSRTAFEFDGKHDPNHEDPDSLDFKVMKERMYKIFSNAIVVSYSHLLPVVPYNAFNPPPPEFALMKSDPTIAQRRSPRRQTGQGSGGPKIRSEAQPNTSNPASQSDSRKRKLVLSDDEGDNANXPGDRETTRKLPKQAIPKKKTSSHPTPKIRKSSNQHGNNTDNKNXRKPSDIDPSGKDSDPANMETSSSKETGPTAEDHPSDNQLATDNVESSNQPPTGNQFAEAEARVNQEPPTGNQSDLGPSQEIPEVEAQADSPHGHDASNDPRPGSPAKTQEPTRPRPGIITGPMIGDEEEVLRIRAAEDSRPPILVKWWDDDLQPQGIVINRQKEDEEVCLLKKALGQGTRIVNISQLEKRIQTLESDKAELASQRDSALKDVEDRKIKLQAQFDVLVGKIKRLEGARDEVANAATPLTQAMFFNNNGPSTFDASEIFDKLRVALDTYFKNIKEAGSMGASLALAMTKSLYPKIDIDAVDGFADGTSEEAALDLINDA

SEQ ID NO: 185380 - protein, 67 aa, Oryza sativa
  Clone ID: PAT_MRT4530_82281C.1.pep
MYRNGGFGSVPASSKAMAELQEAQVSEARESDCAVCFEGFDQGEKLTRMPCSHCFHATCILDWLSLS

SEQ ID NO: 185381 - protein, 542 aa, Oryza sativa
  unsure (1)..(542): unsure at all Xaa locations
  Clone ID: PAT_MRT4530_82282C.1.pep
MVDYIRLLVKLHFPRVPKEEEKVAPIAMAWLKCSTLRNHLRADQMQLACSAISSLEHVDFVSELGLVGISSVEAVGKGGKEIAGIRQSAAMGFGVVGHVLQNPELIGPGPRALKSRHPLPLVVASVGPSSRGFIVRVLRQRGAPATACWGKGMGGEGEDEVLDPEKASALLPPLLPKEEKRMSQDHHELIAAAASLFLGEKIGGKFDSRVKKIGGTGGLRVVRGQGVDYVTSMYLVALVSRLHHLPLLGGGVLVVVVAVVESDRPLIQLGLPYVKQWAPSDVTEENLKEMVAHGVLPAKEIIGWRPAFGEAFPTPDTHEVVTPFDFKVMKERMYKIFSNAIVVSYSHLLPVVPFNAFNPPPPEFALMKSDPPIAQRRSPRRHTGQGSGGPKIRPETQPNTSNPAGQSDSGLRKLVLSDDEVDDVEKPGDRETTRKLPKQAIPKKKTSSCPAPKIRKSSRKPSDIDPSGKDSDPANMKTSSSKEAGPTAEDHPSDNQSATDNXPSQEIPEVEAQADSPRGHDASNDRRSGSPSKASEPTRPRL

SEQ ID NO: 185382 - protein, 638 aa, Oryza sativa
  unsure (1)..(638): unsure at all Xaa locations
  Clone ID: PAT_MRT4530_82283C.1.pep
MAEERESFESQWAPSDVTEENLKEMVAHGVLPAKEIIGWRPAFGEAFPTPDTHEVVXHIANFIHACEAFLGIRPHFALFRRIFFLKPQPNRSKQCVVGXGFQLRGTLSQKYFSMPFKTSNKGWHANWFYVQNPEPALSEYSCLPPVYQDTWNSLPMGDEAAQTVELMERMLKLKEQGLQGEQITRHFIKSRLAPIKERSRTAFEFDGKHDPNREDPDSLDFKVMKERMYKIFSNAIVISYSHLLPVMPFNAFNPPPPEFALMKSDPPIAQRRSPRRQTGQGSGGPKIRSEAQPNTSNPAGQSDSHKRKLVLSDDEGDDAEKPGDRETTRKLPKQAIPKKKTSSRPTPKIRKSSSMEIILITKTCRKPSDIDPSRKDSDSANMETSSSKETGPTTVDHPSDNQPATDNVEIGDQPPTRNQSAEAEAGANQEPPTGNQSDTGPSQEIPKVGAQADSPRGQDASSGPKRIHLRNEVKTTTLEKLVPHLGTLEAVRDQLHEAKELAKKAEHGLRDRIAQLQESNFELSGSSKVQAAKISQLEKRIQTLENDKAELASQRDSALKDVEDCKIKSQAQFDVLVGKIKRLEGADCDNDATLASIGPTELRLLRGPLPAGVGHPLGRLRSALRENCENAKIQILLH

SEQ ID NO: 185383 - protein, 176 aa, Oryza sativa
  Clone ID: PAT_MRT4530_82284C.1.pep
MARQGFRPQFPVQTYTTNPHKKDRRRSTTLSLQRFGQGHRPQLFPPSTACPHLDSSFPAARPLPSLHIPPLTTTHRTIVDSHHRHYHSHHRRQPPPSATIATATATATDTPVQPPPSSRHHDASRPDPAGVARIGGAARSAGRRHHGERRHGHGVHSRRRSIDEEGGGKHGATLLT

SEQ ID NO: 185384 - protein, 712 aa, Oryza sativa
  unsure (1)..(712): unsure at all Xaa locations
  Clone ID: PAT_MRT4530_82285C.1.pep
MTEENLKEMVAHGVLPAKEIIGWRPTFGEAFPTPDTHEVVXHIANFIHACEAXFLGIWPHFALFRRIFFLKPQPNKSKPCVVGGAGFQLRGTLSQKYFSMPFKTSNKGWHANWFYVQNPEPALPEYSCLPPVYQDTWNSLPMGDEAAQAVELMECMLKLKEQGLHGEQITRHFIKSLLAPIKERSRTAFEFDGKHDPNREDPDSLDFKVMKERMYKIFSNAIVVSYSHVLPVVPYNAFNPPPPEFALIKSDPPITQRRSPRRQIGQGSRGPKIRSEAQPNTSNPASRIEIILITKTCRKPSDIDPSGKDSDPANMETSSSKETTPTDEDHPSDNQPATDNVESDDQPPTENQSAEAKAGVNQEPPTGNQSDTGPNQEIPEVEAQADSSRGQDASNDRSSGSPSKASESTRSRPEIITGPMISDEEEILRIQAAEDLRPPILVKWWDDDLQPQGIVINRQKEDEERIHLRNEAKTATLEKLVPDLGTLEAVRDQLHEAKELAKKTEHDLRDRIAQLQESNFELSGSSKVQAAKISQLEKQIQTLESDKAELARQRDSALKDVEDCKIKSQAQFDVLVGKIKRLEGARDEVANAATPLVQAMFFNNNGPSTFDASEIFDKLRVAPDTYFKNIKEAGSMGASLALAMTKSLYSKIDIDAIDGFADGTSEEAALDLINDAQKAADKIAVDVVERFQDTDLRPTGPDNSDDEKTDTD

SEQ ID NO: 185385 - protein, 173 aa, Oryza sativa
  unsure (1)..(173): unsure at all Xaa locations
  Clone ID: PAT_MRT4530_82286C.1.pep
QGYETTTSCSSSSSSSSFSLTEFMLSQDLWEGHGGCWVLTRGSRSPPRPSSPPASCRALSPPPPPPSHLERGSETAGVAAAGCSSAGFSTWAPRRRAVGGGGGGRTEPGRRRGHEASSPLRGACRSKSRSKPSQTKPRTAARAKSSPLGVLGVCVICGRMRRWTRGRITRPXR

SEQ ID NO: 185386 - protein, 316 aa, Oryza sativa
  Clone ID: PAT_MRT4530_82287C.1.pep
MEVMGAEEARTSRVVVAAAGRSLNPNAKEFVPRWHRHAAAADDDDAARRTKLSADAPEFVYEGFWRGVDGLTGYGYGYGDGHDGAPEELVVVVSERLNPDAPEFTAAASIRRRRSPGSGNGISSTRHWSRRGSRNFSRQGRSAPFSSRVRRAQKEEFVRRTIFVSDIDHTVTEDMLAELFGSYCSVVVDCRICGDHSSGLRFAFIEFQDESDAYAALDLDGYVLGICPLRVSPSKTAIMPVNPSFLPQVNVTDLKYFCEEHFGQVFRLKLLGDDGHPTRIAFIEFAEVDGAINALNSSGIFASGQPIRFNNPYYTG

SEQ ID NO: 185387 - protein, 744 aa, Oryza sativa
  unsure (1)..(744): unsure at all Xaa locations
  Clone ID: PAT_MRT4530_82288C.1.pep
MAEERDSFESQWAPSDVTEENLKEMVAHGVLPAKEIIGWRPAFGEAFPTPDTHEVVVFSHFFYGGFSLPTSRFFRGILSFYGISLHHLNPNSIVHIANFIHACEAFLGIRPHFALFRRILFLKPQPNKSKPCVVGGAGFQLRGTLSQKYFSMPFKTSNKGWHTNWFYVQNPEPVLPEYSCLPPIYQDTWNSLPMGDEAAQVVELMECMLKLKEQGLQGEQITRHFIKSWLAPIKERSRTAFEFDGKYDPNREDPDSLDFKVMKERMYKIFSNAIVVSYSHLLPVVPYNASNPPPPWKILCLAICSAPITSPSDWSGERGTKDPSDSHKRKLVLSDDEGEDGEKPGDRETTRKLPKQAIPKKKTSSHPMPKIRRSSRYKSYNILVLMLTYHENNADSTTQTRRKPSDIDPSVKDSDPTNMETSSSKETGPTAADHPSDNQPATXSAEAEAGVNQEPPTGNQSDTGPSQEIPEVEVRADSPRGQDASXTEGPMIGDEEEVLRIRATEDSRPPILVKWWDDDLQPQGIVINRQKEDEEVCLLKKALGQATRIVNLQLTGVNVVQAVKISQLEKQIQALESDKAELARQRDSALKDVEDRKIKSQAQFDVLVGKIKRLEGARDEVANVATPLVQAIFFNNNGPSTLDTSEIFDKLRVAPDTYFKNIKEAGSMGASLALAMTKSLYPKIDIDAIDGFADGTSEEAALNLINDAQKVADKIAVDVVERFQDTDLRPTGPDDSDDEKTDTD

SEQ ID NO: 185388 - protein, 688 aa, Oryza sativa
  Clone ID: PAT_MRT4530_82289C.1.pep
MAEERESFESQWAPSDVTEENLKEMVAHGVLSAKEIIGWRPTYGKAFLTPNTHEVVVFSHFFYGGFSLPTSRFFRGILSFYGISLHHLNPNSIVHIANFIHACEAFLGIKPHFALFRRIFFLKPQPNKSKPCVVGGAGFQLRGTLSQKYVSMPFKTSNKGWHANWFYVQNPEPALPKYSCLPPVYQDTWNSLPMGDEAAQAVELMERMLKLKEQERSRTAFEFDGKHDPNREDPDSLDFKVTKERMYKIFSNAIVVSYSHLLPVVPFNALNPPPPGSGGPKIRSETQPNTSNPAGQSDSRKRKLVLSDDEGDDAEKPGNRETTRKLPKQAIPKKKTSSRPTPKIRKSSRKPSDIDPSGKDSDPANMETSSSKETGPTAEDHPSDNQPATDNVESGDQPPTGNQSAKSEVGVNQEPPTGNQSDTGPSQEIPEVVAQADSSRGQDASNDRRSGSPSKASESTRSRPEIIMGPMIGDEEEILRIQAAEDLRPPILVKWWDDDLQPQGIVINRQKEDEEVCLLKKALGQATRIVNRIHLRNEAKTATLEKLVPHLGTLEAVRDQLHEAKELAKKTEHDLRDRITELQESNFELSGSSKAESCSDTYFKNIKEAGSMGASLALAMTKSLYPKIDIDAIDGFADGTSEEAALDLINDAQKAADKIVGDVVERFQDTDLRPTDPDDSDDEKTDTD

SEQ ID NO: 185389 - protein, 43 aa, Oryza sativa
  Clone ID: PAT_MRT4530_8228C.1.pep
AQHYHLHNSSTTRGGSICRGACTANVGTHMHHIALCLDTLIIY

SEQ ID NO: 185390 - protein, 63 aa, Oryza sativa
  Clone ID: PAT_MRT4530_82290C.1.pep
KKGPRTEFRGDFRKGFNYQWTRNKRLDYLKGATVIYKYTLSLFFFFFFFFFFFFFFFFFFFFF

SEQ ID NO: 185391 - protein, 499 aa, Oryza sativa
  Clone ID: PAT_MRT4530_82291C.1.pep
MAEERESFESQWAPSDVAEENLKEMVAHNVLPAKEIIGWRPAFGEVFPTPDTHEVVDTWNSLPMGDEAAQAVELMERMIKLKEQGLQGEQITRHFIKSRLAPIKERSRTAFEFDGKHDPNREDLDSLDFKVMKERMYKIFSNAIVVSYSHLLPVVPYNAFNPPPPEFALMKSDPPIAQRRSPRRQIGQGSGEPKIRSEAQSNTSNPVGQSDSRKRKLVLSDDEGDDAKKPGDRETTRKLPKQAIPKKKTSSRPMPKIRKSSRKPSDIDPSGKDSDPTNLDTSSSKETGPTAEDHPSDNQPATDNVGSGDQPLTGNQSVEAEAGVNQEPLTRNQSDTGPSQEIPEVEAQADNPRGQDASNDRRSGSPSKASESTRPRPEIITGPMIGDEEEILRIRVAEDSRPPILVKWWDDDLQPQGIVINWQKEDEEVCLLKKALGQATRIVNRIHLRNEAKTATLEKLVPHLGTLEAVRDQLHEAKELAKKTEHDLSRPRKLPFPER

SEQ ID NO: 185392 - protein, 274 aa, Oryza sativa
  Clone ID: PAT_MRT4530_82292C.1.pep
GVGRGHHPPPPSLHHHRLPPPHHLDDFREPPLLPPHHRLDDFREPHHLPPPHHHHHREEFGEPPRHHVFAGHGGGAGPPPAPHVVAALEERLGAEIEEAHVLLGQNQRLAATHVALVQEVSAVRHELGRTARGLAAAQEEGELRLREVYERSMKMEAELRAVEEMRAELAQVRLDIQKLGAARQELMGQVQGFTQDLARSAVDLQQVAALKAEIQEIRHETQHLRSGIEVEKKGYAESYEQGQEMQKKLISVASEVEKLRAEAEKRSRAACLRQ

SEQ ID NO: 185393 - protein, 204 aa, Oryza sativa
  Clone ID: PAT_MRT4530_82293C.1.pep
MSSLCLFDPKLSDLVYERSMKMEAELRAVEEMRAELAQVRLDIQKLGAARQELMGQVQGFTQDLARSAVDLQQVAALKAEIQEIRHETQHLRSGIEVEKKGYAESYEQGQEMQKKLISVASEVEKLRAEAEKRSRAAVSGGNQVYVGGYGNPKAAYAANPYNAGYNINQPHPQANTADSGSQFGPGSTHAPWGAYDMQRATGRR

SEQ ID NO: 185394 - protein, 342 aa, Oryza sativa
  unsure (1)..(342): unsure at all Xaa locations
  Clone ID: PAT_MRT4530_82294C.1.pep
WRRCGSGIPAEGGDAALASACSHSIKMCASSASPSESKKTVWXTARINPLFIDGLEIFDEKKQKIAVISEVSSPGELELIQPDNVEVENIVIDFRGGWQGCRGTVLAVSTNSTEAQVFLEALEQGLDGVILKVEDMDDIIKLKDYFDRRNEAKSQLMLTKATVSKVEVVGMGDRVCVDLCSMMRPGEGLLVGSYARGMFLVHSECLETNYIASRPFRVNAGPVHAYVAVPGGRTSYLSELQSGREVIVVDQNGLWRTAIVGRVKIESRPLILVEAKENGGDDTYSIFLQNAETVALITPEKGSSGRTAIPVTSLKVGDEVLVRKQGGARHTGIEIQEFIVEK

SEQ ID NO: 185395 - protein, 123 aa, Oryza sativa
  unsure (1)..(123): unsure at all Xaa locations
  Clone ID: PAT_MRT4530_82295C.1.pep
ICGPNSVPSVWFNPGNFEIDLVNRDVKRTLLFPLSREKNGEPVRCWSLLWDRRWPKSNRGDHGXESPIRAAILKGGKHNRFFPKKNLNVAARVHRFGFKKLAQTFLPAPPGGININVWFCTNL

SEQ ID NO: 185396 - protein, 121 aa, Oryza sativa
  Clone ID: PAT_MRT4530_82296C.1.pep
MSPSTSRHRRPSPVELHTDDDDVTARLTVTGADGISPPSLYPSTRLARRSRERGRPMSPKSGHLSSPRRVPRRRRNEDRGASSRLTLSTSPPPTTSAPDAARIAFVKSRGDLSGALCHLGT

SEQ ID NO: 185397 - protein, 87 aa, Oryza sativa
  Clone ID: PAT_MRT4530_82297C.1.pep
MDIPATPTDLSPLLSLAPRNEPCYSKGKAVTCTRLWITCDEKLWPDLLKGSTNLITIAESLHTRRTIETITLPRTDEASPRNHTIKM

SEQ ID NO: 185398 - protein, 116 aa, Oryza sativa
  unsure (1)..(116): unsure at all Xaa locations
  Clone ID: PAT_MRT4530_82298C.1.pep
IVVAVHRSSLCPRQRPPPTTSSQPPLPTPXSPPMPPTHHARPRCCQRIAPPSFYPNPQLQSPQPCHDCDSLPLPFCYRHRRGPSASPNPHLNLTRPSDHVPTSSTPYISISPRTSP

SEQ ID NO: 185399 - protein, 678 aa, Oryza sativa
  Clone ID: PAT_MRT4530_82299C.1.pep
MQAFVFIFAVLALLAGDVEGRQGCYPFSCGHLQNISHPFRRRGDPQRCGVPSYELDCRDSKATIRINTGTYYVTSINYTTSVFWVVDASLKDTNSSCPLPRSDQLPFVSGGIQGSHGGWDLALDPGPGATWVSFVNCSQAVRNNSVYVPVDCLSTSSSFVYVFGSWIMPPSVFPIIGNLETSCRYLAMIPLGGWDSPLPHNASFSDIVRSMRNGFAVHFPIIHRWSRIGHIKDCLMGSIRGFHEEPLSNQTIKDQIVDILFIDFSFWSCIIGGVGMKDYFDMPQYMMGMLRGKIEFYGGFIVQFALFVFKWIAVLCRFVIAPLTLLTFLAFKYWKTRIKIDAVEKFLQMQLMLGPTRYAYTDIIAMTSHFRDKLGQGGYGSVFKGVILPGDVHVAIKMLSNYNCNGEEFISEVSTIGSIHHVNVVRLVGYCAEEMRSALVYEYMPHGSLDRFIFSPDKSLSWDKLNEIALGIARGINYLHQGCDMQILHFDIKPHNILLDSNFVPKVADFGLAKLYPRDNSFMPVSAARGTVGYIAPEMISRSFGIISSKSDVYSFGMLLLEMAGGRRNSKQNMSSSSQSYYPSWVYNQLVQQKMGEIANAFNMHELEKKLCVVGLHCIQMKSHDRPTMSEVIEMLEGDVGGLQLPSRPFFCDDEPLPLLVDSCRFSSELTEISEEDE

SEQ ID NO: 185400 - protein, 86 aa, Oryza sativa
  Clone ID: PAT_MRT4530_8229C.1.pep
YKITRCSFKSPKNLKSNNKIEMGFYLLPESNFPQHEVTFPQLFLIVIDCTLRRRFLFLFLFLYMRVIVTCQVSVVCKIDCRSPLNI

SEQ ID NO: 185401 - protein, 721 aa, Oryza sativa
  Clone ID: PAT_MRT4530_822C.1.pep
AKQHEILPPEKDSRVATGKRRGITSSLLMRSHRRLAPVCTVSSPLLMRSRHRFIPARAAGSPLLPSPPRALAADSPLLPPLTLERSQSAIQQYTSTIKCANGDWPKLREIIIFQQMNKESIGLDKEYALYLDTIVGGSFLHKTPSEGQIILDRIMENTSFIEQYNESLPKASMRKIKEPSIAESETEPPTSIDSAKESSSKPSPAKSKEIQTLECAIMFRNDLDEDFGNTQNYFSKKKPPMALPPPDLIEDEYLKEIVWELTTVMSNEWLKEAELSSEVIRNNSTPRTIPCNLEGNTVGILYSPTVGVNLVSESFTFAYLSDKAITPMNKFFKHPNRKLIEGFGIVQDVSVQYNDKEAILDFHVFEIQDFDVLIGHLIKKLLINCPRLGSLKFSLVGNKFSISFSQSRFALTDSLPEDEYAKEVTTIIPFESPESLLENNVSDFIEEEEDSGETFELHARMEPMFISCMVSIFSDMIEYIMEVFMDDFSVYGKTFGHCLQNLDKKDLVLNRENCHFMVHEEIVLRHRVPERGIEVDQAKIEVIDQLPPPVSIKGIRSFLGHAGFYRRFIKDFSTIGRPLTNLLVKDVPFEFNDECLNSFEILKKAPVSAPIIQPPDGTLPFEIMCDARDFPVGLSCRRHRHRVAKPKFFEQSTLFLYYKSHQLSFSLTQVQANARLYWIYYKAHFGPQYLMFVAVAPPPDTDIPVQTYSMSIYCEPVTDET

SEQ ID NO: 185402 - protein, 216 aa, Oryza sativa
  Clone ID: PAT_MRT4530_82300C.1.pep
MAIVLILIGGVKFSDFARMRKKLPMHERLGPIHQDYFEEKAEDKPRVRNPQCCPYGIFTKNKKRRVQRMRNREQMQEIEEEIDNRLKRTKEWWVKSKVVPADEVRADKTKDQASSSINMVFVLPAEYNAKQAGDDVFEESLAKLRHYLLSNECTVVCKADVVRYMLTAPVLKRRIGKWILDLTEFDLRYESTKAVKGQTVADFIVEYRNDSLGYVE

SEQ ID NO: 185403 - protein, 75 aa, Oryza sativa
  Clone ID: PAT_MRT4530_82301C.1.pep
RRLVTAALTDHAATVLLLVLADLTGSATDAGAERGGASSPPPSGTGTDLTRPSLRRPADLPRTTLTAGWNLPQPS

SEQ ID NO: 185404 - protein, 157 aa, Oryza sativa
  Clone ID: PAT_MRT4530_82302C.1.pep
ALAEVTTVFSGSTYPTANVFYPSIVNVKRALLAASKSTNRDKVLKNMVEAILEKFDKYWKEKNNLMIIATTLDPRFKIRFPVVSRLAKRFLTVPASSVSSETTFSAGGRVLDDYRSSLRPSMVQALICASSWIRGSQDNKTPPMAVAEDDKDDVASN

SEQ ID NO: 185405 - protein, 137 aa, Oryza sativa
  Clone ID: PAT_MRT4530_82303C.1.pep
MVENFVAEYFSITLTVTSKQSTARKYYKVSKWRRCGGYCDLYLQRYFRVQVGPIIAAVGFGLDDRDARVENNNRPISPAQAEDLNNTTSGSCAGAGVRRLQIGALIELLLYKIDAYQKITLPTGPINCQRFRQLEKD

SEQ ID NO: 185406 - protein, 59 aa, Oryza sativa
  Clone ID: PAT_MRT4530_82304C.1.pep
RSRGSGFVSFRNQQDAHNAINELNGKWLGNSQVSCNWAAKGANAWEEKPDSYFTGLIRF

SEQ ID NO: 185407 - protein, 63 aa, Oryza sativa
  Clone ID: PAT_MRT4530_82305C.1.pep
VTGAKLPVTNYKASMAIINWHLLVWTKRPWKALNSFQRWFVGWGWGFPSVKQANRVYKLLEGH

SEQ ID NO: 185408 - protein, 87 aa, Oryza sativa
  Clone ID: PAT_MRT4530_82306C.1.pep
MGIAMPGCREGRVCGVDGGGGVDAASDCHIERWGRRGWQRRVVGKEQILWHRVAAGKERCSGDCRASGNSERIWGSIRNLHEGIEER

SEQ ID NO: 185409 - protein, 178 aa, Oryza sativa
  Clone ID: PAT_MRT4530_82307C.1.pep
MEYSSRRVSCCVALAAVLLLSSRTLGGAAGGAPRRLLQISEAQQFVVPQTHLRAIYGLHPLKWSSDLADLATRWADQYKGDCAAASAASAAGGVNVFRGYGGEAWQPSDAVAAWAEEAQHYDYGANACAAGKECGHYKQMMWRDSTQVGCATVTCSSGETLMACHYEPQGNIMGQKPF

SEQ ID NO: 185410 - protein, 40 aa, Oryza sativa
  Clone ID: PAT_MRT4530_82308C.1.pep
LGKVSSIYSANRNYGLAELTELNPPTKATRSYTIGVLPCT

SEQ ID NO: 185411 - protein, 71 aa, Oryza sativa
  Clone ID: PAT_MRT4530_82309C.1.pep
MNNNNNNNDDDDDDDDDDDDDDDDDEMKLQSPLQFLESLDVAAFSGTGTGWELISSTRKTERSIRASLIEQ

SEQ ID NO: 185412 - protein, 54 aa, Oryza sativa
  unsure (1)..(54): unsure at all Xaa locations
  Clone ID: PAT_MRT4530_8230C.1.pep
RSGNIADNQTXITLGADNLHXTSYHCKXIPTCYCCMNTTXINIKKAFGSKFXIE

SEQ ID NO: 185413 - protein, 96 aa, Oryza sativa
  Clone ID: PAT_MRT4530_82310C.1.pep
GKRHAWGPGLKLVLENGVFVRTMKSFQLSNYRPEIDRSKNKRHMVYALTSSKKKERALFFESSRKRLLVRAICLLLLIWELPTKLLHCRQCPDVHY

SEQ ID NO: 185414 - protein, 115 aa, Oryza sativa
  Clone ID: PAT_MRT4530_82311C.1.pep
MRRRRRRGARAEAWRRGADGTCTEKGAAVTAAVASGRSSSGSMTTRRSNGGRARVVAVDDPSAAGRASRESGGVKACGLRIWWRRVDDGGAAVVSETAGLLKWLEVHKLLELGSP

SEQ ID NO: 185415 - protein, 189 aa, Oryza sativa
  Clone ID: PAT_MRT4530_82312C.1.pep
MARMLLEAAASGSVEDSLNSDLVVILAGLLCALICVLGLGLVARCACTRRWARAAGGGTAAGGGGGGAAAANKGVKKEVLRSLPTVTYVSDGGGGEAEECAICLVEFEDGQAVRVLPQCDHRFHAACIDTWLRAHSSCPSCRRVLVAAEMPPGERCGRCGARSGGRGIGALLLNYWKAPACDAEGPELA

SEQ ID NO: 185416 - protein, 118 aa, Oryza sativa
  Clone ID: PAT_MRT4530_82313C.1.pep
RAPPFRTPPVSGPLQVPPPPRAQGRGPHSLLCQFSVPSPSPRFRFGLAKSSFPFEPPKNALFPPPVSVAFKYLRGKLPPCCSWFIDKTTWHDFSYGFSKNNQPKKKKKKKKKKKKKPQ

SEQ ID NO: 185417 - protein, 176 aa, Oryza sativa
  unsure (1)..(176): unsure at all Xaa locations
  Clone ID: PAT_MRT4530_82314C.1.pep
AVSSRAECWSLDTGDGGELAAVESIIEWWVKERHPNQLAGLPLVGIGASSGGYFLSALAARVRFSSVAIMIAEGVFATMEEIPARYPPALFVQMPKDGERAREVAASMGKLRGSRVSVREIQCGEFAVSAQFLAARIPGLTPRVADGLXRVLRRKGFVDEEGFXKNDGRSTPWRRR

SEQ ID NO: 185418 - protein, 153 aa, Oryza sativa
  unsure (1)..(153): unsure at all Xaa locations
  Clone ID: PAT_MRT4530_82315C.1.pep
MAKPSAGAVTGVPIGSAAWSTGLCDCFDDCGLCCTTCWCPCITFGRVAEIVDRGSTSFGTGGALYALLCAFTGXSGCTCTYRGKMRAQHGLGDAACGDCCVHCCCESCALCQEYRELVARGYDPKLGWHLNVERGAAAAAAAAAAPAVQHMGR

SEQ ID NO: 185419 - protein, 143 aa, Oryza sativa
  Clone ID: PAT_MRT4530_82316C.1.pep
MTTRRSNGGRARVVAVDDPSAAGRASRESGGVKACGLRIWWRRVDDGGAAVVSETAGRQRRATPSPLRQALQRSPPLAAVLRASLPARAPSPLVLRASRLRSRVAAARPPHADELELCTGRRFLPQRLLKWLEVHKLLELGSP

SEQ ID NO: 185420 - protein, 144 aa, Oryza sativa
  Clone ID: PAT_MRT4530_82317C.1.pep
KESRRSMAKPSAAAWSTGLLDCFDDCGLCCMTCWCPCITFGRVAEIVDRGSTSCGASGALYALLAMVTGCQCIYSCTYRGKMRAQYGLADAACGDCCVHCWCESCALCQEYRELVARGYDPKLGWHLNVERGAAAAPAVQHMGR

SEQ ID NO: 185421 - protein, 167 aa, Oryza sativa
  Clone ID: PAT_MRT4530_82318C.1.pep
MATYGRRATSRISVACHRGQSIYACDAHRRMIDRLIKMDTETRKRKIPPESPEFYRKTVRFLFKNREKGILVKKENCIWRTQHEGIRFCRREYAFQSSSPIITLNKLPAAGRRLVRRWPPSVWSGQVSMILQRENASQLWRRLATDRQADRPENYSLAPEASNAFGR

SEQ ID NO: 185422 - protein, 39 aa, Oryza sativa
  Clone ID: PAT_MRT4530_82319C.1.pep
QRTRSAPHMGMSKAMEASISGSYQPINKNAHSHQAHSYR

SEQ ID NO: 185423 - protein, 134 aa, Oryza sativa
  unsure (1)..(134): unsure at all Xaa locations
  Clone ID: PAT_MRT4530_8231C.1.pep
RPPRLAPSPSPSLSSPLPQADGGELSVIYPVAGGGXHHRSPPPITFSALPPPPTPAXACSRPHGFGGGAAASPPARSAAHRRAATSHGHPSKADPNSSALCRSLGSPTPEKKRXSPEFEKKSTNHEAHPAYPVI

SEQ ID NO: 185424 - protein, 56 aa, Oryza sativa
  Clone ID: PAT_MRT4530_82320C.1.pep
MEASWVASSSRRLCRRRPSAEYSWKPAAKHSWREDGPLRAHSMPTTICRYTRGGSR

SEQ ID NO: 185425 - protein, 69 aa, Oryza sativa
  unsure (1)..(69): unsure at all Xaa locations
  Clone ID: PAT_MRT4530_82321C.1.pep
LXNFSFHLLLLVVVLXAAAXAVTXXIXNKCGYTVWPAALPSGXXNXLDPGXSWAXYVPAGTXGARFWGR

SEQ ID NO: 185426 - protein, 73 aa, Oryza sativa
  Clone ID: PAT_MRT4530_82322C.1.pep
MAAMLLLKAVTGFGESVQRWRLLMPHDHFVGYPNIGHPRIIAAARVRRPGPTARSLSRWALSPTESSLTPMSL

SEQ ID NO: 185427 - protein, 58 aa, Oryza sativa
  unsure (1)..(58): unsure at all Xaa locations
  Clone ID: PAT_MRT4530_82323C.1.pep
CIQGLPEGALRRIILTASGGAFXGLEVIEAHYLFGAEYDDIEIVIHPQSIIHSMIETQ

SEQ ID NO: 185428 - protein, 105 aa, Oryza sativa
  unsure (1)..(105): unsure at all Xaa locations
  Clone ID: PAT_MRT4530_82324C.1.pep
KNLQIIPKKSSGACAPLPFPPDPTEGSARPPPLPSLXPPSPIQSDLEEGRTRAAAAAASTGPPPAIARGPPPPLRPDPVKGRAPPPPAAAAASARPLPKPTDSQM

SEQ ID NO: 185429 - protein, 481 aa, Oryza sativa
  unsure (1)..(481): unsure at all Xaa locations
  Clone ID: PAT_MRT4530_82325C.1.pep
HYLSQGRHGAQGRLFPRGLEPQVSFLDSNRGGAFNQLKVDLPFQTRDRRAVSLRRTCCSMQQAPPPAWPGRAVGEPGRRSWDGPKPISIVGSTGSIGTQTLDIVAENPDKFRVVALAAGSNVTLLADXVKTFKPKLVAVRNESLVDELKEALADCDWKPEIIPGEQGVIEVARHPDAVTVVTGIVGCAGLKPTVAAIEAGKDIALANKETLIAGGPFVLPLAQKHKVKILPADSEHSAIFQCIQGLPEGALRRIILTASGGAFRDWPVDKLKEVKVADALKHPNWNMGKKITVDSATLFNKGLEVIEAHYLFGAEYDDIEIVIHPQSIIHSMIETQDSSVLAQLGWPDMRIPILYTMSWPDRIYCSEVTWPRLDLCKLGSLTFKAPDNVKYPSMDLAYAAGRAGGTMTGVLSAANEKAVELFIDEKIGYLDIFKVVELTCDAHRNELVTRPSLEEIIHYDLWAREYAASLQPSTGLSPVPV

SEQ ID NO: 185430 - protein, 316 aa, Oryza sativa
  Clone ID: PAT_MRT4530_82326C.1.pep
MLSEQTAASGSSSSSRGADDREIVISTGREIVVRSSGGEEREEEVVVEEELEEPEFRDIHALSPPPTPTPSQPSSSYHRRRRESWESAAGSRHTSIRSVGSDTAPSELFPTMSREFSAMVAAAANANAAAAAAANGGDSSRAGVDDALGRIGEDELEETNPLAIVPDSNPIPSPRRAHLALPAPGDVSSAGGGHGDEVSVGQVKKEEVESKIAAWQIAEVAKVNNRFKREEVVINGWEGDQVEKANAWLKKYERKLEEKRAKAMEKAQNEVAKARRKAEEKRASAEAKRGTKVARVLELANFMRAVGRAPSKRSFF

SEQ ID NO: 185431 - protein, 542 aa, Oryza sativa
  Clone ID: PAT_MRT4530_82327C.1.pep
MALKVVSFPGDLAAVSFLDSNRGGAFNQLKVDLPFQTRDRRAVSLRRTCCSMQQAPPPAWPGRAVVEPGRRSWDGPKPISIVGSTGSIGTQCFIFSFLCITKKTLDIVAENPDKFRVVALAAGSNVTLLADQVKTFKPKLVAVRNESLVDELKEALADCDWKPEIIPGEQGVIEVARHPDAVTVVTGIVGCAGLKPTVAAIEAGKDIALANKETLIAGGPFVLPLAQKHKVKILPADSEHSAIFQCIQGLPEGALRRIILTASGGAFRDWPVDKLKEVKVADALKHPNWNMGKKITVDSATLFNKGLEVIEAHYLFGAEYDDIEIVIHPQSIIHSMIETQDSSVLAQLGWPDMRIPILYTMSWPDRIYCSEVTWPRLDLCKLGSLTFKAPDNVKYPSMDLAYAAGRAGGTMTGVLSAANEKAVELFIDENHQKVRYLFLHCQKVRIGYLDIFKVVELTCDAHRNELVTRPSLEEIIHYDLWAREYAASLQPSTGLSPVPPADDIHRLDSMSWKAQKSNQKQALDLKWKTKNKSGMKSSTIRK

SEQ ID NO: 185432 - protein, 484 aa, Oryza sativa
  Clone ID: PAT_MRT4530_82328C.1.pep
MAPQLTGAPGTPGAAGGAASVNPQFHHFHHHRLATRHHHPSPTSLLSKLAFWSVCSLSLLLAFLLLSPSAAPAPRAAPDSPRRSLHTSSPSAAATWGGAAWEKKVRASARVRRANGRGLTVLVTGAAGFVGCHAAAALRRRGDGVLGLDNFNDYYDPALKRGRAALLARSGVYVVDGDIADAELLAKLFDVVPFTHVLHLAAQAGVRHALVDPMSYVRANVGGFVALLEAARMANPQPAIVWASSSSVYGLNSHVPFSEHDRTDRPASLYAATKKAGEEIAHAYNHIYGLSLTALRFFTVYGPWGRPDMAYFFFTRDILAGRPITVYESAGGGTHQTTISRDFTYIDDIVKGCVGALDTAGRSTGSGGKKRGPAPFRTYNLGNTSPVPVTQLVDLLEKLLKVKAVRKIVKMPRNGDVPYTHANISLAQRELGYRPSTDLQTGVKKFVRWYLEYYMPGFAGKQKQHGSSNSKSSRGRSGNTSSAR

SEQ ID NO: 185433 - protein, 251 aa, Oryza sativa
  Clone ID: PAT_MRT4530_82329C.1.pep
MALGARHPPRRKPPTNIKSNSNNINTNTRCSITHLPTTRSNNFTESQQKRTIQNEKKNSAASNSTTTNTNTPAMEEVKESHAFLGAEESRGGGECGREIKIKSSPLRNSAALAEAKSVGAQSPACIARCCFLLPGHISSVRSALRGLLAPDPTVEEHPSRSSCPWAPLALPWPSDGCHVCGPMRSTRRRRPAGDGEGKRGFLRSAAAADAAAAALASRAASLRRGRCIWSAPPSSSDSSVPSSSAPAAARL

SEQ ID NO: 185434 - protein, 81 aa, Oryza sativa
  unsure (1)..(81): unsure at all Xaa locations
  Clone ID: PAT_MRT4530_8232C.1.pep
XALQXPIPXPQLLPWXHPLXALPLPLRXCVRRLPPXARGSSTGRKGSAAGGSGTGPPCSRRRRRXAXWRAGRRQRRRPGPG

SEQ ID NO: 185435 - protein, 70 aa, Oryza sativa
  unsure (1)..(70): unsure at all Xaa locations
  Clone ID: PAT_MRT4530_82330C.1.pep
ELRMRFLWIFFPVLVFHGRPSDQDLVGSRLYLSITFNTKPRXQSLYDYHLVSSYNLPCVISPKWVMSIII

SEQ ID NO: 185436 - protein, 66 aa, Oryza sativa
  Clone ID: PAT_MRT4530_82331C.1.pep
MDSGGAKEAGVVVRGCDATAAAVRRWERTANFMKDLHGLLPFEPSDGSYWLVITSDGSSFLDDVDT

SEQ ID NO: 185437 - protein, 92 aa, Oryza sativa
  Clone ID: PAT_MRT4530_82332C.1.pep
WRWRRRWSRARGSSCSSSSPASRSRRRPSSPPRSQSLPRPPSPSSSPWMPPPPPPPPRPHPRSAGSGPGATLYPPPFLSVFSSAASPRSWAA

SEQ ID NO: 185438 - protein, 79 aa, Oryza sativa
  unsure (1)..(79): unsure at all Xaa locations
  Clone ID: PAT_MRT4530_82333C.1.pep
GKAAPEKDKAKSTLQSFPRXKRQPTQGRERTTRAXPPPHPKPRHQAGQEAKRSQQRRAACNHRKGPRPGLALNQPDLPN

SEQ ID NO: 185439 - protein, 61 aa, Oryza sativa
  Clone ID: PAT_MRT4530_82334C.1.pep
TPLRSVLLMVGPTNSVAVSGRSSLARMDAGATSPEWTCVRLIGIAMDFYSVCRIYPFSLNL

SEQ ID NO: 185440 - protein, 658 aa, Oryza sativa
  Clone ID: PAT_MRT4530_82335C.1.pep
MAMAMARLTPNGVAAALAGDTNLKPVLQIVELRGVQVNGAGVTRGERFRAVVSDGTAASSALFAAQLSDHARSGALRRGSIVQLSEYVINEVGPRRIIVILNLEVLVSECEIIGNPTALSETGSPIPNPTRVEQFNGAPQYGLMAGNSSNTTTKPSDNVPLFQNSMAGNSSNFATRPSDKVPVFQPTVQPSYRPAPNYKNHGAIMKNEAPARIIPISALNPYQGRWAIKARVTAKGDIRRYHNAKGDGKVFSFDLLDSDGGEIRVTCFNALLDRFYEVVEVGKVYVVSRGNLRPAQKNYNHLNNEWEILLENGSTVDLCPDENSSIPTQRFDFRPINEIEDAQNNAILDIIGVVTSVNPCTTIQRKNGMETQKRTMNLKDMSGRSVEVTMWGDFCNREGSQLQGMVERGIFPVLAVKAGKVSDFSGKSVGTISSTQLFINPDSAEAHSLRQWFDSGGRDASTQSISRDITPGASRNEIRKTVAQIKDEGLGMGDKPDWITVKATVIFFKNESFFYTACPNMIGDRQCNKKVTKSTNGNWTCDKCDREFEECDYRYLLQFQIQDHSGTAWVTAFQEAGQELLGCSATELNALKEREDPRFADTMLNCLFQEYLLRLKVKEESYGDERKVKNTAVKVEKVDPSGESKFLLDLISKSSALH

SEQ ID NO: 185441 - protein, 71 aa, Oryza sativa
  Clone ID: PAT_MRT4530_82336C.1.pep
MRKQREEDRGSDACPWAPASAANVRATCRVEGPRAGARLLSSAGGSDAVAPRDTGCTSGMEEDSSGFAGLA

SEQ ID NO: 185442 - protein, 236 aa, Oryza sativa
  Clone ID: PAT_MRT4530_82337C.1.pep
MADQGLPSKKKKKKGSSAAAARGFMCGCGGAKSVSVVSRLSAAGNISPATTTPPTMTSSATATSAKTTRVTVPTPAPNTVHDADGTPSVGTLLLQLRELERGVRALGVREDRGIRPATPPPPRHRRSASDASSGGRRRRGRLEEESVPVVTESDDPLGDFRRSMAQMIVENEITATPELRELLHRFLSLNSSRHHHLILRAFADVCEELFAGAGEHNHHRPRRRPTKPLPYSATTN

SEQ ID NO: 185443 - protein, 65 aa, Oryza sativa
  Clone ID: PAT_MRT4530_82338C.1.pep
MEKNFVHVSFAFGSGGHGVGKGGGGKGGGVARHWWRGTAASSALASAVALARRRWHGAAAAAASA

SEQ ID NO: 185444 - protein, 129 aa, Oryza sativa
  Clone ID: PAT_MRT4530_82339C.1.pep
HSHTLLTPTSIPSPAHSPSHEPPRRRSPPFSPSSSVTAESTPRTRATSHPHPRPRPLPRSPNPNPNLPSSLHDSPPHADSSSPRAAPALPSPLTGFLITPSCRHHSDPHLASRAGEGSPPRPLPTGTVA

SEQ ID NO: 185445 - protein, 113 aa, Oryza sativa
  Clone ID: PAT_MRT4530_8233C.1.pep
TEYRCSTSPLGDPKRISNSGNMCNLPKSKTIQGQQLMRGSGYSSMMYPNVEDYLDGIQGCHHLPPTSDKSVGYTTNKDNPGGSRIGSADLVVRPNQKSILPASPLASRLLIGP

SEQ ID NO: 185446 - protein, 81 aa, Oryza sativa
  Clone ID: PAT_MRT4530_82340C.1.pep
KLRNGPPKFKEPYHTGVPPLTEKAQELNQSLLKEKKTSALKIKNPPPSNSTPTVVEPRRGERRPPRGPLFFFRRPWKKIWP

SEQ ID NO: 185447 - protein, 113 aa, Oryza sativa
  Clone ID: PAT_MRT4530_82341C.1.pep
MVDPKSTDVNPKNIIPITMDKLTPEQKAECEDLMNMLQNQFLHSFVQTRSCTVIQRYKVALPNNKDPESSSGKDKEVKQEETPVEPKNLQDLIDYTVHNALTNQSGDQTNWHA

SEQ ID NO: 185448 - protein, 136 aa, Oryza sativa
  unsure (1)..(136): unsure at all Xaa locations
  Clone ID: PAT_MRT4530_82342C.1.pep
TLLRGHLQLLEGGVQLCPTGYLPCPRQRGFSPLQVPSCQKYTCCCPDCCPPFGVLPFXIWPGXLHRGAALSASIAXFMXITGASHPPAASLPLLFIDGPKFHHLQLWYALFPGAAGCIILCLIQEVVIYLKKNFKF

SEQ ID NO: 185449 - protein, 158 aa, Oryza sativa
  unsure (1)..(158): unsure at all Xaa locations
  Clone ID: PAT_MRT4530_82343C.1.pep
METTRTTRIVSILVSLVLLGQGDTYGYKYKTPXGGEGTINTPTIDDTTINTPTIDDTEDRSRHQIDXKPTYAKTNRRISTSEIRLXDPIWHLHXASRRDLALSLILPGTNSRRKTERXTLLSTTSQTFRPPCRQQLYRLPQILYCLAYILVPTIPILC

SEQ ID NO: 185450 - protein, 1310 aa, Oryza sativa
  unsure (1)..(1310): unsure at all Xaa locations
  Clone ID: PAT_MRT4530_82344C.1.pep
MVPNGLLPNASAGVTRRLDGERWAAAEVRTAELIARIQPNADSERRRRAVYDYVRRLITNCLSCQVFTFGSVPLKTYLPDGDIDVTAFSDSEELKDTWANLVRDALEHEEKSENAEFRVKEVQYIQAEVKIIKCLVDNIVVDISFNQVGGLCTLCFLEEVDALISQNHLFKRSIILIKAWCFYESRILGAHHGLISTYALETLVLYIFHVFNNCFTGPLEVLYRFLEFFSNFDWEKFCLSLSGPVPISSLPDMTAEPPRMDAAELLLSKSFLDKCSYAYAVTPRIQESQGQQPFVSKHFNVIDPLRTNNNLGRSVSKGNFFRIRSAFSFGAKRLAKLLECPKEDLIAEVNQFFTNTWIRHGSGNRPDAPTLGLVHQHHLKVVPAEASNSQRSAMALKKNAENPNIRANQDNLSENANSYPEATSQPLQRSVLHPRNSLRTVNPSDSHAHHQKVHVTHANTKVSEQLERNSSDGSMQNERNKTVPNSLFVNDRNGQNRSRFARTRSSPELTDPSVEGYSRGRRTGVVEMDKSLKVDYNSRRNNLAPEVSSSHITKSSQDESVSSMNSSSHYSGKAASDSNSVSSSYREDNGFIMNEELPSVSEASDKQQEEQVLVNLMSSAKLHDFNGQVQLPIEMPPHFSVAPSPLLAPAAFPPKHFAGIPPTSLIGAPWSNMHLIHGYVSPPMAHYVQNHTFAPNIEEGNESEKPITPDASRDDGNNWHEYGVGFPRYFNHQGRDPQMRHFNGKEHSSSPNSVSGAPFERQGEIAVEDNGAVEENYTNMFQNQTSRQASINTRIGSGNARIPSSQSGLSRNKAMPENSWGESAGNTTRSLRDKWGKRPAFAAPDTTTHSKNNTGWQTGNASEHIPPEVDDGARNGVIVPNIRHEASDIITGSGSTASRTSQVPNDFEPSQIGMPNPLFAPLFIGSPQQRQSGPAVPFLMLPYAPGNDGSVPQFERNEGVDQLPVNIAVQNFSSLNNVHHPDINATSTASSSTAGDPSEEQKPDILNSDXGMNWCNLQYGRSCQNPRPMNPVFTILISIPMYLQGHVPWDGPGRPASTNVNWTQMVPPSQRIYPMMPLQPSSERITGGPQHHTEDAPRYRGGTGTYLPNPKVPFKDRHSGSRNHRGNYNTDKGDHNDKEGNWINSKQRNPGRSYGRSHSERSGIRSDRQAADENQYDRQRRSYRNDSYRHETGAQSSGSTNYIRRPGNMTHGDPSPSASNGIGALSGSSAPYFMYYSCEPGTNHGSSSEPLEFGSLGPVPTADGGDMPRPTRQAMPNEFYGQRHVAFRGGSSHSSPDQPSSPQTRRSGPF

SEQ ID NO: 185451 - protein, 457 aa, Oryza sativa
  Clone ID: PAT_MRT4530_82345C.1.pep
MAAAVRDGAAVAGYMAEDDPDGAASEDGDMDVEVGGEESQARDGDRRDGGDGDDEYALLTRITDTSAAEARAGKDIQGIPWERLQITRSDYRKARLVQYKNYENFPQSGELMDKICKQVDKISKYYEFHYNTRLVKPSILHFQLRNLLWATSKHDVYFMSNSTVGHWSSLSHNLSEVLDFSGHVAPAQKHPGSLLEGFSGVQVSTLSVNEGLLVAGGFQGELICKVVGDRDVKFCTRTTLSDNAITNAIDIHRSASGSLRVTVSNNDCGVREFDMETFQLLNHFSYNWPVNHTSVSPDRKLLAVVGDDRDALLVDSRNGKVTSTLVGHLDYSFASAWHPDGRTFATGNQDKTCRVWDVRNLSTSLSVLRGNIGAIRCIRYSSDGQFMLFSEPADFVHVYSAAADYKKRQEIDFFGEISGISLSPDDESLFVGVCDRVYASLLHYRMVHSFGYLDSFM

SEQ ID NO: 185452 - protein, 144 aa, Oryza sativa
  unsure (1)..(144): unsure at all Xaa locations
  Clone ID: PAT_MRT4530_82346C.1.pep
FFFXQQGLESMPNFXELQLWFLIPLHGITHRRCHASDDERSEVTSPASDPIEQTKKKKKHNKNRENRARSRRRRRRGGGGRRRGRRGTRRRRAGRRSPPPRTAPSIRAPSSSPPPQPHCRCRASWSPPSPPRSSGEGAARSRER

SEQ ID NO: 185453 - protein, 63 aa, Oryza sativa
  unsure (1)..(63): unsure at all Xaa locations
  Clone ID: PAT_MRT4530_82347C.1.pep
XGRXRSPPTPRXPRHXAGAEAAPLXWPVGHRAAXRHAGGRDWVERRDXTSARWRGWANRLGPR

SEQ ID NO: 185454 - protein, 52 aa, Oryza sativa
  Clone ID: PAT_MRT4530_82348C.1.pep
LWRLDGKVGTRAVVKHRLPVSALELDQLNKLFATNGLTQTDMIALLGGHTIG

SEQ ID NO: 185455 - protein, 197 aa, Oryza sativa
  unsure (1)..(197): unsure at all Xaa locations
  Clone ID: PAT_MRT4530_82349C.1.pep
PRVRPRVRPRVRGRVGYNTRLVKPSILDLQLRNLVWATSXHDVYFMSNSTVGHWSSLSHNLSEVLDFSGHVAPAQKHPGSLLEGFSGVQVPKSPPPISRGCGGGACAAATDVAAGDRDVKFCTRTTLSDNAITNAIDIHRSASGSLRVTVSNNDCGVREFDMETFQLLNHFSYNWPGNHTSVSPDRKLLAVVGDDRD

SEQ ID NO: 185456 - protein, 172 aa, Oryza sativa
  unsure (1)..(172): unsure at all Xaa locations
  Clone ID: PAT_MRT4530_8234C.1.pep
RRRRRRRGWPRPLPSPLPPLQAPWPSTPTQMTAXQPPPPALWPATPPPAPGRRRSSLDAVAGAWPPMPSHAPWPPPPPAPAQPWPPPPPLAPGSRRHRPSLPPDGRAGFALAPVPPPPPSPPSSPPPRAIGGLPMGGAWRGTRRLASTLRGEGSRAILPLHQPGTGGMRRGT

SEQ ID NO: 185457 - protein, 111 aa, Oryza sativa
  unsure (1)..(111): unsure at all Xaa locations
  Clone ID: PAT_MRT4530_82350C.1.pep
IGEKKAEQNVNSLXGFELVDKIKQKLEAECPGTVSCADLLAIAARDAVVLVGGPYWDVPVGRLDSKKASLDLANRDIPTAQQGLVTLIAKFWEKGLDATDMVALVGSHTIG

SEQ ID NO: 185458 - protein, 95 aa, Oryza sativa
  Clone ID: PAT_MRT4530_82351C.1.pep
DFGKALDQEASKGQGQAHDGDGVRDRVHQLYALAEKALSDENVLNDMVMTLRVIWSGTSAIKHMMSQETTEEGDNISWDCAEQVPLPDKKCRMSH

SEQ ID NO: 185459 - protein, 52 aa, Oryza sativa
  Clone ID: PAT_MRT4530_82352C.1.pep
PRVRAACQFHFNVEPPQKKNVVLCRSIAVTYCLLLIYDEPPSLLFGQPLYLI

SEQ ID NO: 185460 - protein, 400 aa, Oryza sativa
  Clone ID: PAT_MRT4530_82353C.1.pep
MATGVLCSREFALCLACVLLAVPLLVAQDPSSLSLEHYSKTCPNYEHVVRTEMECAVRADSRNAALMLRLHFHDCFVQGCDGSVLLDDTATLIGEKKAEQNVNSLKGFELVDKIKQKLEAECPGTVSCADLLAIAARDAVVLVHIRHSIQENMNRQTYISGITQYTIEKFKHPFHNNYLLPHKIIVSISILFCLQSCQHVELASNQRTVGGPYWDVPVGRLDSKKASLDLANRDIPTAQQGLVTLIAKFWEKGLDATDMVALVGSHTIGFARCANFRDRIYGDYEMTTKYSPISQPYLSKLKDICPLDGGDDNISAMDSHTAAAFDNAYFGTLVNGEGLLNSDQEMWSSVLGYSTADTVSKYWADADAFFKQFSDSMVKMGNITNPAGGEVRKNCRFVNT

SEQ ID NO: 185461 - protein, 189 aa, Oryza sativa
  Clone ID: PAT_MRT4530_82354C.1.pep
MALRCRSHVVGAELFAHGEVAPRRLEDKREREMTPVVLTSTAMVMAEAVASEKLGGVGFRRRRQTPAAGAVGSCIEEEAPLDVGWRPVVSRAAADLTGRVSETMTAGSRTPCAAASGPKWFSAAARLNDEACSSGAWWSGRKRCGAAGGRRRAWAEKEEHGERGGRKKRKRKGEKGEGGGERKDKGGRG

SEQ ID NO: 185462 - protein, 222 aa, Oryza sativa
  Clone ID: PAT_MRT4530_82355C.1.pep
MAAIVPLCAAYYLLGRALPTVAGSSMACSCSSFSFPLLLLLDSEATFTRSICLLPELSCGSLAEEGCRYDEKREERWPEHQRRGGVHRRRRVVHSRRPHRSRVRATRLFSISAAGGGEAGGGGQIQGPRHRPTPAATRRRRSSSNSRRRTRREMRGGAARRGEAVRRGEEERSRRRTGRRRREGRPGGGERDGGGEDEEKTRVGGEIISPHEPSPRGRDHPR

SEQ ID NO: 185463 - protein, 288 aa, Oryza sativa
  unsure (1)..(288): unsure at all Xaa locations
  Clone ID: PAT_MRT4530_82356C.1.pep
GTVLIHSAEQLENYAKTEEAKVEELIKAVADSGAKVIVRGAAVGDMALHFCERYKLMVLRISSKFELRRFCRTTGSIAXLKLSRPNADELGYADSVSVEEIGGARVTVVKNEEGGNSVATVVLRGSTDSILDDLERAVDDGVNTYKSMCRDSRIIPGAAATEIELARRLKEFSLKETGLDQYAIAKFAESFEMVPRTLAENAGLSAMEIISSLYAEHAGGNTKVGIDLEEGGCKDVSIMKIWDLYVTKLFALKYSADAACTVLRVDQIIMAKPAGGPRRDAQPGMDED

SEQ ID NO: 185464 - protein, 112 aa, Oryza sativa
  Clone ID: PAT_MRT4530_82357C.1.pep
RGTATPATPRPPPAWPGSGTTSCCGAPPHRPTSPPPPPPTPPPSAASTPAASPPASTPASPASPRRTPPATPSPPAAAAATSGTAAAAAAPVAASWGHSWMDLGTNRPDPKP

SEQ ID NO: 185465 - protein, 172 aa, Oryza sativa
  unsure (1)..(172): unsure at all Xaa locations
  Clone ID: PAT_MRT4530_82358C.1.pep
MGDGRAAGERDGGSASRMASSSSSSTCCSSAAKSNSFVGTEDYVVPEIVAGSRHDYAVDWWGLGVVLYEMLYGRTPFRRRSRRESGKPTPLRDLIGLLLEKDPGRRLCAHGVKRHAFXPPFIPTPDDDDAGAAAEALDMEKVLHEDERRRSARRRAWPTRRGGGGCGKGEEA

SEQ ID NO: 185466 - protein, 131 aa, Oryza sativa
  Clone ID: PAT_MRT4530_82359C.1.pep
MVKRGGKSPSWPARPCWECCLHRRVGLVAASIVIVAGVILLLGVAWFVHRYRNQRKWSMKDAAGDKLRWVVTSFHKPEFNEEDILSCLDEEVVGVGRTPSSDSKKQATPCDEDSMTSFDEASMKESDGDGC

SEQ ID NO: 185467 - protein, 229 aa, Oryza sativa
  unsure (1)..(229): unsure at all Xaa locations
  Clone ID: PAT_MRT4530_8235C.1.pep
MAINADADDGAWQPPPPALWPATPPPAPGRRRSSLDAVAGAWPPMPSHAPWPPPPPAPGRRRSSLDAVARAWPPPPPLAPXQPTPSPEPGPPVGGCPPPPPSPPMAGAPTPTPRGLKIPPVPAPVGADPLRVPGPTGEIAIPSSXPTLSQRPPPRCTLLYPSASPPPPPPLPPPPPSPPSSPPPRAIGGLPMGGAWRGTRRLASTLRGEGSRAILPLHQPGTGGMRRGT

SEQ ID NO: 185468 - protein, 120 aa, Oryza sativa
  Clone ID: PAT_MRT4530_82360C.1.pep
MEEQNARRGRGQGNDEEQRSMAKELRIKAKDQLRSLWWTFSMKVKYNDFTTCMCGGCNNKRAAAEYTVAEFAVHGDGDGPSTSGHLRRPRPADSPSPPPLPPPTTPSPSLRRRHRQSNLS

SEQ ID NO: 185469 - protein, 101 aa, Oryza sativa
  unsure (1)..(101): unsure at all Xaa locations
  Clone ID: PAT_MRT4530_82361C.1.pep
SSSXLPSHFAHLPEAGFLLLXGGPXMLLPSPTPTXRPARTXLLGFPXXAGRVGSRAKWRAGIEVXEGCGCGCGCGRGWAXXXAAAEGEGEWRPWRPWGFGF

SEQ ID NO: 185470 - protein, 64 aa, Oryza sativa
  Clone ID: PAT_MRT4530_82362C.1.pep
WNTPNVMMTSGWEDQLMGWFESGRTLCTLCCRKMRKCQCRKCNTNWKVEMDGEHTQLPCPRNET

SEQ ID NO: 185471 - protein, 546 aa, Oryza sativa
  unsure (1)..(546): unsure at all Xaa locations
  Clone ID: PAT_MRT4530_82363C.1.pep
MGSDADMEDYGFEYSDDEPEEQDVDIENQYYNSKGMVETDPEGALAGFDQVVRMEPEKAEWGFKALKQTVKLYYKLGKYKEMMDAYREMLTYIKSAVTRNYSEKCINNIMDFVSGSASQNFSLLQEFYQTTLKALEEAKNERLWFKTNLKLCKIWFDMGEYGRMSKILKELHKSCQREDGSDDQKKGTQLLEVYAIEIQMYTETKNNKKLKELYTKALSIKSAIPHPRIMGIIRECGGKMHMAERQWADAATDFFEAFKNYDEAGNPRRIQCLKYLVLANMLMESEVNPFDGQEAKPYKNDPEILAMTNLIAAYQKNDIMEFEKILKSNRRTIMDDPFIRNYIEDLLKNIRTQVLLKLIKPYTRIRIPFISQELNFPEKDVEQLLVSLILDNRIQGHIDQVNKLLERGDRSKGMXEIPSHRQVEYSAEEHLPNGVQQSWVREIAGCLGCTALGTCLHVLLWWMLGFCPELNLSANSNPSETILASMARNFWFCWHCRTSKFWYGRENVWFRVKYAPGTRHTANIVPLPSSDSVANQSLSNQKXXXK

SEQ ID NO: 185472 - protein, 184 aa, Oryza sativa
  unsure (1)..(184): unsure at all Xaa locations
  Clone ID: PAT_MRT4530_82364C.1.pep
ELHKSCQREDGSDDQKKGTQLLEVYAIEIQMYTETKNNKKLKELYTKALSIKSAIPHPRIMGIIRECGGKMHMAERQWADAATDFFEAFKNYDEAGNPRRIQCLKXSNHLHFFSILISYIDKFRTSSSFFIVLHIRYLVLANMLMESEVNPFDGQEAKPYKNDPEILAMTNLIAAYQKNDIMEF

SEQ ID NO: 185473 - protein, 61 aa, Oryza sativa
  Clone ID: PAT_MRT4530_82366C.1.pep
RFLQWLNLKELPLVRQVLGKFLSNWIKVTMVLGRPDATCAQMSRFKLNPFIFDGVPISLVE

SEQ ID NO: 185474 - protein, 265 aa, Oryza sativa
  Clone ID: PAT_MRT4530_82367C.1.pep
MVSRTPTKQPLSPLPRAASGSPTKPTPSPSPSPASARRRRVLRRGSPGRIKSLAATFDTSLRGCRRRLLKLFARLAVLGSPTKRRAAAAGFRRLRSPPRSPSPPTPKPNQVAAVSPQLPLPLPPVSPGRRTLFLDLDETLIHSQTDPAARARHDFAVRPVIAGQAVTFYVVKRPGVDAFLAAAAAAFELVVFTAGLPEDLRRAVIVDDNPNAYSLQPDNAVPVAPFIDDADDHELERVMGILSIAAEFDDVRDAIKRYKEIVEAS

SEQ ID NO: 185475 - protein, 94 aa, Oryza sativa
  unsure (1)..(94): unsure at all Xaa locations
  Clone ID: PAT_MRT4530_82368C.1.pep
THEANRVDHVGTRPPHQSPPPPQRNAPPDLAPPPQRPLADPRRSSPAEPPAGAARPPFTATTAGARARARAPRHPAHMPPPRXSPPSPPAPTPA

SEQ ID NO: 185476 - protein, 121 aa, Oryza sativa
  unsure (1)..(121): unsure at all Xaa locations
  Clone ID: PAT_MRT4530_82369C.1.pep
GVRDRRVAALAEDERLWEAACVREWANLGFSERXLRAVVLSRGGFRRLHAVYIRPLQRRGAGVPRQQGRRQPPVRLGRDQVQLSLSLFSIGFFQNMPCPKKDGPKKDKGNDSDKNGGGQCG

SEQ ID NO: 185477 - protein, 61 aa, Oryza sativa
  Clone ID: PAT_MRT4530_8236C.1.pep
PRVRPRCPPPLNVHQTLPLIDEPPARATTCSPTSRMCHRVERTEPNCPKKKKKCLAKAWFS

SEQ ID NO: 185478 - protein, 119 aa, Oryza sativa
  Clone ID: PAT_MRT4530_82370C.1.pep
MDWAYSGNSYGYGYYSSGTSSPPAGGEDAYMTVSSAPPKRRGGRTKFKETRHPVYKGVRSRNPGRWVCEVREPHGRQRIWLGTFETAEMAARAHDVAALALRGRAACLNFADSPRRLRV

SEQ ID NO: 185479 - protein, 104 aa, Oryza sativa
  unsure (1)..(104): unsure at all Xaa locations
  Clone ID: PAT_MRT4530_82371C.1.pep
RLVVDVLLVEGAPNHAPMGRVIPTSTPPGTEAXVGARPPVQSDVTGDRPVTDRWGAARIDSGSAWVPSPLAVPATWQLDGGLGARRREGPRGMTWHPEASRPRL

SEQ ID NO: 185480 - protein, 62 aa, Oryza sativa
  Clone ID: PAT_MRT4530_82372C.1.pep
SPRANCAACCGGRGNSEAPTAIRIKAWGARSSTSTLGLVFVGLYNQRSDVEDSKPRTSPWKA

SEQ ID NO: 185481 - protein, 2350 aa, Oryza sativa
  Clone ID: PAT_MRT4530_82373C.1.pep
MGAAPPPPGTGAPPPPLPAAAAAAGPPGGGKPLTPAELEAQLVEKARKWHQLNSKRYGDKRKFGFVEAQKEDMPPEHVRKIIRDHGDMSSKKYRHDKRVYLGALKFVPHAVYKLLENMPMPWEQVRHVKILYHITGAITFVNEIPWVVEPIYLAQWGTMWIMMRREKRDRRHFKRMRFPPFDDEEPPLDYADNLLDVEPLEAIQLELDEEEDSAVHEWFYDHKPLVKTKLINGPSYRKWHLSLPIMATLYRLAGQLLSDLIDRNYFYLFDMESFFTAKALNMCIPGGPKFEPLYRDMEKGDEDWNEFNDINKLIIRQPLRTEYRIAFPHLYNNRPRKVRLGVYHTPMIMYIKTDDPDLPAFYYDPLINPITSTSKVDRRERRTIEEDEDEDFCLPDGVEPLLKGTELYTDTTAAGISLLFAPKPFNMRSGRTRRAEDIPLVSEWYKEHCPPAYPVKVRVSYQKLLKCYVLNELHHRPPKAQKKKHLFRSLQATKFFQTTELDWAEAGLQVCKQGYNMLNLLIHRKNLNYLHLDYNFNLKPVKTLTTKERKKSRFGNAFHLCREILRLTKLVVDANIQFRLGNVDAFQLADGLQYIFSHVGQLTGMYRYKYRLMRQIRMCKDLKHLIYYRFNTGPVGKGPGCGFWAPMWRVWLFFLRGIVPLLERWLGNLLARQFEGRHSKGVAKTVTKQRVESHFDLELRAAVMHDVLDAMPEGIKQNKARTILQHLSEAWRCWKANIPWKVPGLPVPIENMILRYVKSKADWWTNVAHYNRERIRRGATVDKTVCRKNLGRLTRLWLKAEQERQHNYLKDGPYVTPEEAVAIYTTTVHWLESRKFSPIPFPPLSYKHDTKLLILALERLKESYSVAVRLNQLQREELGLIEQAYDNPHEALSRIKRHLLTQRAFKEVGIEFMDLYSYLIPVYEIEPLEKITDAYLDQYLWYEGDKRHLFPNWVKPADSEPPPLLVYKWCQGINNLQDVWDTSDGQCVVMLQTKFEKFFEKIDLTLLNRLLRLVLDHNIADYVTAKNNVVLSYKDMSHTNSYGLIRGLQFASFVVQYYGLVLDLLLLGLTRASEIAGPPTMPNEFLTYADTKVETRHPIRLYSRYVDKVHIMFRFTHEEARDLIQRYLTEHPDPNNENMVGYNNKKCWPRDARMRLMKHDVNLGRSVFWDMKNRLPRSITTLEWENSFVSVYSKDNPNLLFSMCGFEVRILPKIRMTQEAFSNTKDGVWNLQNEQTKERTAIAFLRVDDEHMKVFENRVRQILMSSGSTTFTKIVNKWNTALIGLMTYFREATVHTQELLDLLVKCENKIQTRIKIGLNSKMPSRFPPVIFYTPKEIGGLGMLSMGHILIPQSDLRYSKQTDVGVTHFRSGMSHEEDQLIPNLYRYIQPWESEFIDSQRVWAEYALKRQEAQSQNRRLTLEDLEDSWDRGIPRINTLFQKDRHTLAYDKGWRVRTDFKQYQVLKQNPFWWTHQRHDGKLWNLNNYRTDVIQALGGVEGILEHTLFKGTYFPTWEGLFWEKASGFEESMKYKKLTNAQRSGLNQIPNRRFTLWWSPTINRANVYVGFQVQLDLTGIFMHGKIPTLKISLIQIFRAHLWQKIHESVVMDLCQVLDQELDALEIETVQKETIHPRKSYKMNSSCADILLFAAHRWQMSKPSLVSESKDVFDQKASNKYWIDVQLRWGDYDSHDIERYTRAKFMDYTTDNMSIYPSPTGVMIGIDLAYNLHSAFGNWFPGSKPLLQQAMNKIMKSNPALYVLRERIRKGLQLYSSEPTEPYLSSQNYGEIFSNQIIWFVDDTNVYRVTIHKTFEGNLTTKPINGAIFIFNPRTGQLFLKVIHTSVWAGQKRLGQLAKWKTAEEVAALVRSLPVEEQPKQIIVTRKGMLDPLEVHLLDFPNIVIKGSELQLPFQACLKIEKFGDLILKATEPQMVLYNIYDDWLKSISSFTAFSRIVLILRALHVNNEKAKMLLKPDKTIVTEPHHIWPTLTDEQWLKVECALRDLILSDYAKKNNVNTSALTQSEIRDIILGAEIAPPSQQRQQIAEIEKQSRETTQLTAVTTRTTNVHGDELIITTTSPYEQQAFASKTDWRVRAISATNLYLRVNHIYVNSDDIKETGYTYIMPKNILKKFICIADLRTQIAGFLYGLSPQDNPQVKEIRCIAIPPQHGTHQMVTLPANLPEHEFLNDLEPLGWMHTQPNEAPQLSPQDLTSHAKILENNKQWDGEKCIILTCSFTPGSCSLTAYKLTPSGYEWGRSNKDSGSNPHGYLPTHYEKVQMLLSDRFLGFYMVPDNTPWNFNFMGVKHDPLMKYNMKLGTPRDFYHEDHRPTHFLEFSNIDEGEVAEGDREDTFT

SEQ ID NO: 185482 - protein, 322 aa, Oryza sativa
  Clone ID: PAT_MRT4530_82374C.1.pep
MAAVSRGLLARLRHLSIAGPRLPPCCRPFSAEPLVSHPDDDDAAAGGGGGGGEGSGGGRIIEARAGVMGPDSRRTGVIGVKCGMSAMWDKWGAKVPITVLWVDDNVVCQVKTAEKEGFFALQLGAGQKKEKHLTKPEVGHFRAQGVPLKRKLREFPVTEDALIPLGTTITVRHFVPGQFVDVTGITKGKGFAGGMKRHGFSGMPASHGASLSHRSIGSTGQRDAPGRKRQVFKNRKMPGRMGGVQRTVKNVWVYQIDPARNLLYLKGQVPGPQGSFVFVKDSIYKKPDIAKLPFPTYFSQEGESEELLVADLGDIDPFMVAD

SEQ ID NO: 185483 - protein, 2314 aa, Oryza sativa
  Clone ID: PAT_MRT4530_82375C.1.pep
MGAAPPPPGTGAPPPPPPAAVGPPGGVGGGKPLTAAELEAQLVEKARKWHQLNSKRYGDKRKFGFVEAQKEDMPPEHVRKIIRDHGDMSSKKYRHDKRVYLGALKFVPHAVYKLLENMPMPWEQVRHVKILYHITGAITFVNEIPWVVEPIYLAQWGTMWIMMRREKRDRRHFKRMRFPPFDDEEPPLDYADNLLDVEPLEAIQLELDEEEDSAVHEWFYDHKPLVKTKLINGPSYRKWHLSLPIMATLYRLAGQLLSDLIDRNYFYLFDMESFFTAKALNMCIPGGPKFEPLYRDMEKGDEDWNEFNDINKLIIRQPLRTEYRIAFPHLYNNRPRKVRLGVYHTPMIMYIKTEDPDLPAFYYDPLINPITSTNKVDRRERRTTEEDEDEDFRLPDGVEPLLKGTELYTDTTAAGISLLFAPKPFNMRSGRTRRAEDIPLVSEWYKEHCPPAYPVKVRVSYQKLLKCYVLNELHHRPPKAQKKKHLFRSLQATKFFQTTELDWAEAGLQVCKQGYNMLNLLIHRKNLNYLHLDYNFNLKPVKTLTTKERKKSRFGNAFHLCREILRLTKLVVDANIQFRLGNVDAFQLADGLQYIFSHVGQLTGMYRYKYRLMRQIRMCKDLKHLIYYRFNTGPVGKGPGCGFWAPMWRVWLFFLRGIVPLLERWLGNLLARQFEGRHSKGVAKTVTKQRVESHFDLELRAAVMHDVLDAMPEGIKQNKARTILQHLSEAWRCWKANIPWKVPGLPVPIENMILRYVKSKADWWTNVAHYNRERIRRGATVDKTVCRKNLGRLTRLWLKAEQERQHNYLKDGPYVTPEEAVAIYTTTVHWLESRKFSPIPFPPLSYKHDTKLLILALERLKESYSVAVRLNQLQREELGLIEQAYDNPHEALSRIKRHLLTQRAFKEVGIEFMDLYSYLIPVYEIEPLEKITDAYLDQYLWYEGDKRHLFPNWVKPADSEPPPLLVYKWCQGINNLQDVWDTSDGQCVVMLQTKFEKFFEKIDLTLLNRLLRLVLDHNIADYVTAKNNVVLSYKDMSHTNSYGLIRGLQFASFVVQYYGLVLDLLLLGLTRASEIAGPPTMPNEFLTYADTKVETRHPIRLYSRYIDKRRKNEAHEGDPLESTCRHASLSIFWDMKNRLPRSITTLEWENSFVSVYSKDNPNLLFSMCGFEVRILPKIRMTQEAFSNTKDGVWNLQNEQTKERTAIAFLRVDDEHMKVFENRVRQILMSSGSTTFTKIVNKWNTALIGLMTYFREATVHTQELLDLLVKCENKIQTRIKIGLNSKMPSRFPPVIFYTPKEIGGLGMLSMGHILIPQSDLRYSKQTDVGVTHFRSGMSHEEDQLIPNLYRYIQPWESEFIDSQRVWAEYALKRQEAQSQNRRLTLEDLEDSWDRGIPRINTLFQKDRHTLAYDKGWRVRTDFKQYQVLKQNPFWWTHQRHDGKLWNLNNYRTDVIQALGGVEGILEHTLFKGTYFPTWEGLFWEKASGFEESMKYKKLTNAQRSGLNQIPNRRFTLWWSPTINRANVYVGFQVQLDLTGIFMHGKIPTLKISLIQIFRAHLWQKIHESVVMDLCQVLDQELDALEIETVQKETIHPRKSYKMNSSCADILLFAAHRWQMSKPSLVSESKDVFDQKASNKYWIDVQLRWGDYDSHDIERYTRAKFMDYTTDNMSIYPSPTGVMIGIDLAYNLHSAFGNWFPGSKPLLQQAMNKIMKSNPALYVLRERIRKGLQLYSSEPTEPYLSSQNYGEIFSNQIIWFVDDTNVYRVTIHKTFEGNLTTKPINGAIFIFNPRTGQLFLKVIHTSVWAGQKRLGQLAKWKTAEEVAALVRSLPVEEQPKQIIVTRKGMLDPLEVHLLDFPNIVIKGSELQLPFQACLKIEKFGDLILKATEPQMVLYNIYDDWLKSISSFTAFSRIVLILRALHVNNEKAKMLLKPDKTIVTEPHHIWPTLTDEQWLKVECALRDLILSDYAKKNNVNTSALTQSEIRDIILGAEIAPPSQQRQQIAEIEKQSRETTQLTAVTTRTTNVHGDELIITTTSPYEQQAFASKTDWRVRAISATNLYLRVNHIYVNSDDIKETGYTYIMPKNILKKFICIADLRTQIAGFLYGLSPQDNPQVKEIRCIAIPPQHGTHQMVTLPANLPEHEFLNDLEPLGWMHTQPNEAPQLSPQDLTSHAKILENNKQWDGEKCIILTCSFTPGSCSLTAYKLTPSGYEWGRSNKDTGSNPHGYLPTHYEKVQMLLSDRFLGFYMVPDNTPWNFNFMGVKHDPLMKYNMKLGTPRDFYHEDHRPTHFLEFSNIDEGEVAEGDREDTFT

SEQ ID NO: 185484 - protein, 79 aa, Oryza sativa
  Clone ID: PAT_MRT4530_82376C.1.pep
HIESQCIDAGEFATSLSTSSCIQTSTLQGRDTIRATGLGGVAVALPQLLDGRHCSRSGGTRCQTKSGVQVESRSPAVVV

SEQ ID NO: 185485 - protein, 127 aa, Oryza sativa
  Clone ID: PAT_MRT4530_82377C.1.pep
RGGGNGSCSKNPVVLNPLPRIRRWQWCFRRADSVEASAAPAGGSNRGGCGGVSGGCIRWRRWRRHFRRVDPAVLYPLLLSLRAQASPTAAAVASALPWADPVEVAAVVFPAAESSFFEAKTRIYSII

SEQ ID NO: 185486 - protein, 53 aa, Oryza sativa
  Clone ID: PAT_MRT4530_82378C.1.pep
NSLRLISRNFKLGVIDKCSYNHLARKQKNCTIKWVSPYFTSYMFPRIDAAKPT

SEQ ID NO: 185487 - protein, 85 aa, Oryza sativa
  Clone ID: PAT_MRT4530_82379C.1.pep
LDREPAPALYFFSLAVMKGQQLPHAIALRSSTMHNYMTAWSPQHGNTTLIQIWGANTLDDLTKHSGTGLHYYCAATTKTLFFTIQ

SEQ ID NO: 185488 - protein, 34 aa, Oryza sativa
  Clone ID: PAT_MRT4530_8237C.1.pep
WTAMAGIDGESRTSVVGEHGVGKLSSNSAVRSPA

SEQ ID NO: 185489 - protein, 760 aa, Oryza sativa
  Clone ID: PAT_MRT4530_82380C.1.pep
MEINNNFGGAVGSLPSGFGKKPWLVQAQGTETLSFVDILDRSLHVRVVPDLQGKLCLGCVHGGDWLLMVDEITGGCFLFCLSNSSTISLPPLREPLGDMGACVVLGSSPLNRDCTVVITSLPEPEESFLLHCHPGDEEWTKLMVPLGSDRLFGKLVNCAGQLYSLSSFRKLLTIDVIDDALHAKILNIEWESSCGHNFEPYIVESCGKLFVVLASLYGYPYNCPLNGVSVYRLDRAESMLKKVDDIGTDRAFLISGHYGFSCTAMEGLVQGNCVYIVWSGYDCERIYKFCLDDMTISLQPILAHPTEDLRRGFWSVPAGIEATELVQSAPSIHCDTEVNVLNNFNKDEDAQATIKASWQDLPIEMLELIVSNLSLVDRLRFPSVCKQWSSVSNPVAQAKVWPWLMHCVRQDGACKMFDPLCGVEYSMKVGPFDANERQAFRFSKDGWVIVTQSDDNIFVINPFTKEIVKLSMASGWYRFTGISFSSVPTSPDCVFLGVCSSPKGDGIKVWTCRPNEEETEDNEIYYEEETEDEERDSEENEINYEEEADQDEEREAEENEINYNEEAEDEESETEEDYWSEFDFENDEVMFPVARNNPVYFRGEFYFLGQRGNLSVFNPGNNEWRILDKPEPIRADLTPYDEGKEACYMVELRGELIAVFHRNANEPPRVLKLDESKMEWVEIEDIGGGALFLDYRASIALPSSEAGHGNRIYFPKFSEDGKKAIFYDLEAKKYSPMFSGAKEPMNCVWFVPKLQSDEYS

SEQ ID NO: 185490 - protein, 757 aa, Oryza sativa
  Clone ID: PAT_MRT4530_82381C.1.pep
MEAVQPPVLSDRLNPLIHHRSAFPASVVQPQDHGDSVPGLCSGSFIDTRGRLSSGSMTSEDSPALTPRWLSIKSNSSSDNCFEGSKRAVSWSDRHVFNPNGQVNYAEFMDLMEQELDTQLDRLKGDVTGLENFALPDNGYIIGTHLGMSLDVMLIEIDERFNALKLLLATVFRKAREMDSSSVSDLQWEHELQLEVINITIGEFISGLQEEMERKLYEQISMTNSMSKNWQDAIAQFASMRDDLGALSKLLLPSLQESHISHSKHETSSNRSNRWKYNIFGKKNKEDHSSRAEENKSFRKQKSMVVLEKSDFRHLNGMSKEEIITYFKSEMSKLKRMHELDLQEKTEELFKFKREKGLLTLKNDVEFEPLRKKIPQIISRMDQIISKNIKMPSLCMTNDGLDERCISAKRIDSLYYENQHLRGLLADNMKDVKELSSQLSEASKEMSIQLSSEDDLLRQIAKIKEEYEDLQIEAGVRDGVYQTITRKLLDDSMNSMHDAATNFSTELSSLEAMISEKEKALCLSNEENRMLKEKIAELEQCLIQDKQEDPEVIKQESTEIILRDIEVAPHISPRRSHETPKQDMQYDELVKLNSSLEIASAALKEVENKNIDYNGIFTKNEQEKQLECILISIMKLSKEFVEIEQKLSVERSASRSEDLSDHCNHMVRQAVVLTKIGLWYKQMLETRRSELQKAEAKVVILGDKVNSHLNLLQKIYVTLDRYSPTLQQYPGLLDAFLKTCKLVAALRSNQNKDDTTA

SEQ ID NO: 185491 - protein, 607 aa, Oryza sativa
  Clone ID: PAT_MRT4530_82382C.1.pep
MSPPPPQRPSPSRAGRANLFSSPPPPLPNCYDPKHRRPAPPPLPSARRLPSNRRRRHDQPPNPTTGNGGNPAFRAPHLRTAYRKPVPPVAAAGEGEALLAADASDAADGRAVVVGPSGLSFRLPGAPFDFRFSYSECPRAPPVAIREPAFLPFAPPTMPRPWTGKAPLLTKEEKARRRGVRLHTPLGEEAPRTVSAHGIMMEVRGRRKLDLARVSPGDGRSREEVLGEPLTAAEVRDLVKPHISHNRQLNIGRDGLTHNMLEMIHCHWRRQEICKVRCRGVPTVDMKNLCYHLEEKSGGKVIHRVGGVVFLYRGRNYNPRTRPRYPLMLWKPATPVYPKLIQEAPEGLTKEEADEMRRRGKDLLPICKLAKNGIYIYLVRDVRDAFEGSDLVKIDCEGLNPSDYKKIGAKLRDLVPCVLLSFDNEQILMFRGKEWKSRYPKPLTLIPKIRKNNVPMSSDESSSDEATDDDDRLAVREVLRPKMFELWTNAIESSVALMLDDAEVDALTPDSLLTRVEDFSVTSQVVEHSFPAVLVANDESNPDVLNAEYTEDEPETGTLEPQQHEFTESSDVAEDDHFEDDMLKRLESSVPLGALPIDAVVKQLNDE

SEQ ID NO: 185492 - protein, 71 aa, Oryza sativa
  unsure (1)..(71): unsure at all Xaa locations
  Clone ID: PAT_MRT4530_82383C.1.pep
KVIPARYQVLIPFLPGNTTADGKPRLVRSYKHVVDGFTALLMEXIEMEEVSKKPVFWRCFLDGIARLHPSP

SEQ ID NO: 185493 - protein, 47 aa, Oryza sativa
  Clone ID: PAT_MRT4530_82384C.1.pep
FVFFFFFVLFFFFFFFFLRMEISFNTFTLKLNLTLFFKKSPLLWPHV

SEQ ID NO: 185494 - protein, 466 aa, Oryza sativa
  Clone ID: PAT_MRT4530_82385C.1.pep
LQARFRRRRRAEGARLRSRPSVAEGRRRLARGGGRDDDAPYLPAPAASITYAPVPCHVLPSETERINAVVRRNLGGSPEVYHKKLKIAVPLKHGFRAFVNVTDQGVTGYCIDLFEAAMKKLPNHLSYEFVVFNGSYDQLVQSVSSGVKPYSLCFDDIVTEPNSYTISAGSYYQINDAAVGDITITADRASQVEFTMPYTESGVSMLVLAKNESESTTKWVFLKPLTKELWFATMILFPIHCLGQIIKSPLSKIVVSYGASLASILTVKRFQPSVTDLDQLLCNGDYVGYQEGSFVHSFLTRRGFSEGRLRSYSKKQEYAESLRKGSKNGGVSAIVDEIPFLTAIVSDPHYENEFQMLKRIYKTPGFGFVFPPGFPLVHNLSTAMLDVTSGDEGSPLMLMISISMSVLAQYTKIRVSDVQSPGVDDGNGAHEGSNQAQNSMGNGFVADRPLREIRIDDSSQDIHGSV

SEQ ID NO: 185495 - protein, 115 aa, Oryza sativa
  Clone ID: PAT_MRT4530_82386C.1.pep
LRIRECGFGILSSVYKPEGRKGSLPLSDAQERSLDRIDPLSRRPSPSARRSPPQSPMCTAPTPTTSPRRCPPLPSATPTYHPPLPELEEKMVTCCFFFTLEELEEPAAFFFVFHP

SEQ ID NO: 185496 - protein, 520 aa, Oryza sativa
  unsure (1)..(520): unsure at all Xaa locations
  Clone ID: PAT_MRT4530_82387C.1.pep
MEEHRRLAMAAAFVILLTVWSSPAMAMAAAAATEVHSLGLNCNETKRINAGVRRNLGCLPEVYHKKLKIAVPLKHGFRAFVNVTDQGVTGYCIDLFEAAVNKLPYRLIYEFVVFDRSYDELVQSVSSGINDFPXKDITIIADRASHVEFTMPYTESGVSMLVLAKNESESKIEWVFLKPLTKELWFATVIFFLFTALVIWIIEHPRNMEYQGSNTRQLSTALYFAFSTLTFSHGQIIKSPLSKIDLSTAMLDVTSGDEGSRMETKWFGAEAVSPXVMQFPTQIRHLSLCGFSGLFIITGCISTLMLMIRFSIMGCIVVYMHLHEVRIGSSQDIHAAIVSDPHYQKEFQMLKRIYKTPGFGFVFPPGFPLVHNLSTAMLDVTSGDEGSRMETKWFGAEAVSPSSPCQFLPITPKLEILMCKVLMWVVETMHMKNLIKHRTAWVALWLIYTSMKLELAVPRISMGVSNVLADGGEPRPIQNGPVPANSIQTVLTNNLLQKLVWDVPTQQLAMLHRRRQAVLD

SEQ ID NO: 185497 - protein, 50 aa, Oryza sativa
  Clone ID: PAT_MRT4530_82388C.1.pep
HEGASRDPYGILQWASKQSFMMQDPLIESLLPEAKIRLELYQSRGAKGYH

SEQ ID NO: 185498 - protein, 47 aa, Oryza sativa
  Clone ID: PAT_MRT4530_82389C.1.pep
WVGYEATGLVLHKEVDQFRDWTLSPWCPGVQRVFSFQVPGPEDFRNQ

SEQ ID NO: 185499 - protein, 67 aa, Oryza sativa
  Clone ID: PAT_MRT4530_8238C.1.pep
TREIALAIDTIIFYQDFVPIDTGMFGTGWIQIQNRGSRTSGEVFELKPSGGWNFGHYQSVICICYCL

SEQ ID NO: 185500 - protein, 949 aa, Oryza sativa
  Clone ID: PAT_MRT4530_82390C.1.pep
MELTAGAMSLLLKKVCELLMAELNLDKKLTKSIGDLRTELTMMHGVVRWIGEVPPEQLDGQVRLWARQVREISYDMEDAVDAYLVRVADGEPEAAKQNRRLSESLKRAARLFTKGRALHQIAGAVEEAQGRGKSLSDLRQKYGGLKLHGAGEGCAAIDPRLTALYVEVAKLVSVDKARDELSELLLSSSGGSMQQQQQLRTVSVFGFGGLGKTTLARAVYESIREQFDCAAFVSVSRNPNITKIFRKLLFELDREQYSDINDLDRDDVQLIDELRSFLQSRRYLIVIDDLWDENVWKFIKCVLYENNLSSRIITTTRKINVSKACCSSGDDKIYEMKRLSDDDSKKLLYTRIFTHENNCPHELKQVSTDILKKCDGVPLAIITIASLLAGNNNRPIKTKDQWHNLLNSIGRGLTVGEGVDDMQKILSFSYYDLPPHLKTCLLYLSIFPEDYEIERDRLIWRWIAEDFVQCENNWDNLFEVGESYFNELINRSMVEPVGIDFEGRAQACRVHDMMLDFILSLSKEENFITIIDDSEHRTSWQHKNDNKIRRPGVNSMPSLSLFQVLRVLDLEGCDLSKFSNLNLRHVGKLSHLRYLGLRRTYIAELPTEIGNLKVLQTLDIRGAHGIRELPPAITGLRQLMCLRLDWDTRLPRNGGLATLTSLEEMTGLRVRRDSADGVVRELRCLKKLRVLRLQWGEMEHGAGRAVVGALGELQGIQSIEIYAYGGGGGGVGNVGDGWVPPACLRRFVSNGPTSAFSALPAWVRCSPLPRLAFLDVWVDRVRRGDIGVVGELPALQSLRLRATGRIDARPAVERFAVRAGAFPCAAACALLHFVTAPSMFPRGAMPRVRRLSFSLRAWDFAAAGDGGGGGGLRLGLRDLGMQNLPSLEDVRVEVWYKNTGDGGGSAVTRKVEEALRRVAAVHPNRPAINIRRRKMTTGSAQSDSSTLSI

SEQ ID NO: 185501 - protein, 86 aa, Oryza sativa
  unsure (1)..(86): unsure at all Xaa locations
  Clone ID: PAT_MRT4530_82391C.1.pep
VPPPPPPSRIRSRPGVXSSASSAPTPPPPMSASTAVRSAGRQQRAPPSSRIRSRELPASLSASVVVVGGVGNGRTGGEILGGWGPP

SEQ ID NO: 185502 - protein, 70 aa, Oryza sativa
  Clone ID: PAT_MRT4530_82392C.1.pep
NRREQQVFSNHFRKDFCKSKTSRFASVGTQASEKEVANVFKLAPPLFPCYPRAQSRQKTIMGNKLPMSLF

SEQ ID NO: 185503 - protein, 56 aa, Oryza sativa
  Clone ID: PAT_MRT4530_82393C.1.pep
INISLLFTKRGLEFPNSALATYLPIFTRKLAEITLPAGIPQVKHSLTMRIPTNYIS

SEQ ID NO: 185504 - protein, 79 aa, Oryza sativa
  unsure (1)..(79): unsure at all Xaa locations
  Clone ID: PAT_MRT4530_82394C.1.pep
ASERRRRASEGSDGRTRRRRPSGSSGRVLTCATWISGKAPPSLKSSSRRGTNPPRXGTGLVGPEDFAAAAASDCADSPP

SEQ ID NO: 185505 - protein, 1193 aa, Oryza sativa
  Clone ID: PAT_MRT4530_82395C.1.pep
MATPTPMAGEGTLAAVMPRSPSPTASAAAGSAAEAPMLIFLYFHKAIRAELEGLHAAAVRLATERAGDVGALAERCRFFVNIYKHHCDAEDAVIFPALDIRVKNVAGTYSLEHKGENDLFSQLFALLQLDIQNDDSLRRELASCTGAIQTCLSQHMSKEEEQVFPLLTKKFSYEEQADLVWQFLCNIPVNMMAEFLPWLSSSVSSDEHEDIRSCLCKIVPEEKLLQQVVFAWIEGKTTRKVTENSTKSNSEATCDCKDASSIDHADNHISSHEDSKAGNKKYAESIDGQVERHPIDEILYWHNAIRKELIDIAEETRRMQQSGNFSDISSFNARLQFIADVCIFHSIAEDQVVFPAVDSELSFVHEHAEEERRFNNFRCLIQQIQIAGAKSTALDFYSELCSHADQIMETIEKHFCDEETKVLPQARMLFSPEKQRQLLYKSLCVMPLKLLERVLPWLVSKLSDEEASSFLENMRLAAPSSETALVTLFSGWACKARSEDKSNSGEYLCLTSGEMRCLLDEVDGLEKCRPFCPCASRSNTDASLHPQTENGSRPGKRGNDAESVPGTNGSDLSQTDDTEARPCSKKPCCIPGLRVETGNLAISSSLASAKSFRSLSYNSSAPSLYSSLFSWETDASLSCSDGISRPIDTIFKFHKAIRKDLEYLDVESGKLIDGDESCLRQFIGRFRLLWGLYRAHSNAEDEIVFPALESRETLHNVSHSYTLDHKQEEQLFGDISDALAELSQLHERLTHPHIEVSEAEKNDFNSSDEIDWTRKYNELATKLQGMCKSIRAALTNHVHREELELWPLFDEHFSVEEQDKLVGRIIGSTGAEVLQSMLPWVTSALTQEEQNMMLDTWKQATKNTMFGEWLNEWWKGAPTSSDSSEEASSAPEDSHLQDKIDQNDQMFKPGWKDIFRMNQSELEAEVRKVSRDPTLDPRRKAYLIQNLMTSRWIAAQQKLPEPKSEECSEGAGIPGCAPSYRDQEKQIFGCEHYKRNCKLVAACCNKLFTCRFCHDKISDHTMERILMLPDHTRESDTGDDVHGLGVDFFHCMKCNCCLGMKLTEHKCREKRLETNCPICCDFLFTSSAAVKGLPCGHFMHSACFQAYTCSHYTCPICSKSLGDMTVYFGMLDGLLAAEELPEEYRDRCQDILCNDCERKGRSRFHWLYHKCGFCGSYNTRVIKIDRADCSTSD

SEQ ID NO: 185506 - protein, 334 aa, Oryza sativa
  Clone ID: PAT_MRT4530_82396C.1.pep
MPDGERHEEAPDVNFWGEQPATEAEYYAAHGADGESSYFTPPGGRRLFTRAWRPRGDGAPRALVFMVHGYGNDISWTFQSTAVFLARSGFACFAADLPGHGRSHGLRAFVPDLDSAIADLLAFFRSVRRREEHAGLPCFLFGESMGGAICLLIHLRTPPEEWAGAVLVAPMCKISDRIRPPWPLPQILTFVARFAPTLAIVPTADLIEKSVKVPAKRLIAARNPMRYSGRPRLGTVVELLRATDELGARLGEVTVPFLVVHGSADEVTDPDISRALYDAAASKDKTIKIYDGMMHSMLFGEPDENIERVRADILAWLNERCTPREEGSFLTIQD

SEQ ID NO: 185507 - protein, 108 aa, Oryza sativa
  Clone ID: PAT_MRT4530_82397C.1.pep
NLFQFLQNSFKIHPFQGRPINRGYTYMVGQCPNAKKRFSSSGLFPQKKKYYYYEEPRDSGYMSSQSPTAGTRRVGCEPREYSAERGYTRAEGVHPSSFPLYECESAYI

SEQ ID NO: 185508 - protein, 152 aa, Oryza sativa
  unsure (1)..(152): unsure at all Xaa locations
  Clone ID: PAT_MRT4530_82398C.1.pep
GGEASHGRKRREEDGGRRMEARVGRRTGRRSKRDXRGLGTARRGVVDTVAGVALVDGDGAYAEGGNLTGEAAVREERGEQVVDEVVHGAVVGLGLHAVEGVHGGQVVAQLGDLAADTAELLVFLGQQLTNVAYEVLSRVLHASISLAWLAGS

SEQ ID NO: 185509 - protein, 134 aa, Oryza sativa
  unsure (1)..(134): unsure at all Xaa locations
  Clone ID: PAT_MRT4530_82399C.1.pep
ADFCGGGGTRAHSRATASSSKRRRGGRRSARGRDARRRRADTAAASSXRARGSPAAGCWGLGAPGXYHALPQGAARGRTGGGTRRSPPPAAARQLRRGNKASSAGQQQSRRKAGRHQPPRQHGRQQQAPEAQRK

SEQ ID NO: 185510 - protein, 90 aa, Oryza sativa
  Clone ID: PAT_MRT4530_8239C.1.pep
MARRQELQLQRHPKLEANSNTSRDEGKKEERGMAQRMEDRGLAGSSTCQQARTQLLNEPYRVQWLVQCQALSCMEVEEEVRKQVEGGMRG

SEQ ID NO: 185511 - protein, 90 aa, Oryza sativa
  Clone ID: PAT_MRT4530_823C.1.pep
MAGCGGFGGGGGARARAAAGAAEAHARFVHLLTSSTRVQIKLNKDRLSGYQVQHKSVELRAAVHGFGEGRKLDGISPPMRQVHEEPEEAW

SEQ ID NO: 185512 - protein, 96 aa, Oryza sativa
  Clone ID: PAT_MRT4530_82400C.1.pep
IGRRSLCVSSKAFPTIVPDTIVMPDTKIYLSQYHLSNGTLSQATDGVIAEEKDIPGPYSIMCHIITCCSPAYWNKGKISCKELPTWRVKKKFRFGA

SEQ ID NO: 185513 - protein, 613 aa, Oryza sativa
  Clone ID: PAT_MRT4530_82401C.1.pep
ANLFCEAHRLSSIIKAQWMLCSEMRNNRARSPCMAACSIARIINLGDLAKCPKNLCCLLFRVVSKFLALSPSLLKEVEKDDGDQPSMTESVMANLPELHQDILMEIFALLEIPDLVRAGSVCNSWRSAYNGMRSLGIYKLSQTPCLLYTSESAGDSVVSLYSLVEKREYKITLPEPPVRSRFLIGSSLGCLVTVDDVSEMHLVNPITGEQIALPSVITIEHVNPIFNESGAIHMYEYSWYSASRVYHSEPSIFSLDELREYLLDKAFVFSDTSTENYLVVLIHNPHSQLSFARVGDDKWTWLPPHTHYADCIYKDGILYAVNKVGEIHAFDLSGPVVTMKTIIEMVPGYACDKMYIVQAPWGDLLQVWRSYEYIEGDYEADLHDADPAISVENTAEIKIFVVDTVEKKRVEIENLDGHVLFLGHNQSLCLSTEQYPHLKENYTYFTDDNDLSLFGHKNNRRDIGLFDLKHNSREELVSPQLWSNFPAPVLCGSHLRGISEIYKANVTNVILENGKAHTCPAFKKMLEHLHHVVLNKFKSDLDQSLRSGGGFAASARYCAQSSMVKLNARSSFIDDECLNHSLVKHAVWDTTEVRGKLEHHIEAHATSVRDFPA

SEQ ID NO: 185514 - protein, 244 aa, Oryza sativa
  unsure (1)..(244): unsure at all Xaa locations
  Clone ID: PAT_MRT4530_82402C.1.pep
MGPLLHCRGGAGWLSSSRSCSRAAAAAFELLLPQSSRCRSLRSAAAAFKPPPPPPPPKARSGDLKAGSGEEGHGAAVVKPPPVPSSCRWGGRAAELGRNRAVKAELREPAASEGGQRGGRPATHCRRRPPLGPPRRPAPSPPFDPPLAPPPFGLPRHPASSPPLKPPSAPLSLXAGRPPPFAPPRRPTLSPPLDLPLAPPPPRRRKIVLTPSGLVRSNSRASVSSPSGHHPLSWRRLRGATEEE

SEQ ID NO: 185515 - protein, 153 aa, Oryza sativa
  unsure (1)..(153): unsure at all Xaa locations
  Clone ID: PAT_MRT4530_82403C.1.pep
GETAGAAAEARRRGGGREEGAGDHSKEPLWRRPAARQRERRRIRRGEGPIXRPRGSRRRAAGTATAYAGGSGGAVLGKAGSAVLGALGSEQRARRVGGAVLGRAGSAALRRSTTLGDDDGXAARAAGTALPRDGRRPQRRGSGAGACLAAKYN

SEQ ID NO: 185516 - protein, 254 aa, Oryza sativa
  unsure (1)..(254): unsure at all Xaa locations
  Clone ID: PAT_MRT4530_82404C.1.pep
MEGGGEGAESAAVASAAAAEVEVKNPRCFMDVSIGGEIEGRIVIELYASVVPRTAENFRALCTGEKGVGAVTGKHLHYKGSCFHRVIKGFMVQGGDITAGDGTGGESIYGLKFEDENFVLKHERKGMLSMANSGPNTNGSQFFITTTRTPHLDGKHVVFGRVIKGMGVVRSVEHAPVGEADRPTSDVEIVDCGELPEGADDGVVNFFNDGDTYPDWPNDLDEKPMEVSWWMDAVESAKAFGNNNXKKQDYKAAL

SEQ ID NO: 185517 - protein, 435 aa, Oryza sativa
  Clone ID: PAT_MRT4530_82405C.1.pep
MEGGGEGAESAAVASAAAAEVEVKNPRCFMDVSIGGEIEGRIVIELYASVVPRTAENFRALCTGEKGVGAVTGKHLHYKDFDADFINMHSETFGRLVQKLDMGYQFLWHFTLKIFHVQGSCFHRVIKGFMVQGGDITAGDGTGGESIYGLKFEDENFVLKHERKGMLSMANSGPNTNGSQFFITTTRTPHLDGKHVVFGRVIKGMGVVRSVEHAPVGEADRPTSDVEIVDCGELPEGADDGVVNFFNDGDTYPDWPNDLDEKPMEVSWWMDAVESAKAFGNNNFKACKLKLGDLKGALLDADFALRESEGNAKAFFRQGQAHIALNDIDAAVESFKHALELEPSDGGIKRELAAAKKKIADRRNQERKAFARMFQPSGKSDKDNEVILKCQSLSFLPPLISYPGFQHLSCKGYNKGVCAANAKDADSLSRYKEKK

SEQ ID NO: 185518 - protein, 128 aa, Oryza sativa
  Clone ID: PAT_MRT4530_82406C.1.pep
EKEDIDEEKSSALRKTKSIILTNSSACKLKLGDLKGALLDADFALRESEGNAKAFFRQGQAHIALNDIDAAVESFKHALELEPSDGGIKRELAAAKKKIADRRNQERKAFARMFQPSGKSDKDNEESK

SEQ ID NO: 185519 - protein, 52 aa, Oryza sativa
  unsure (1)..(52): unsure at all Xaa locations
  Clone ID: PAT_MRT4530_82407C.1.pep
PXXKXQTGEAATPRAKPTTGPPISNXPDDPTSEQATKXTRXTRSAKIIFSTT

SEQ ID NO: 185520 - protein, 356 aa, Oryza sativa
  Clone ID: PAT_MRT4530_82408C.1.pep
MESPPTAAAAAAAAERPSEAAALRALVDRVRAGEVEAAREVRRLTRSSSRHRRKLAAAVEPLVAMLRSPAPDAGEAALLALLNLAVRDERNKTKIVDAGALEPLLGYLQSSDLNLQEYATAALLTLSASSTTKPIISASGAIPLLVKVLKEGNSQAKNDSVMALYNLSTVTDNLQTILSVQPIPSLIELLKGGKRSSKTADKCCALLESLLSFDQGRAALISEEGGVLTIVEVLEEGSLQGREHAVGALLTMCESDRNKYRDIILNEGAIPGLLELTVHGTPKSRVKAHVLLDLLRNSPYSRSKLPADTLENIVSNIASQIDGEDRGGKAKKMLAEMVKVSMEQSLRHLQRRASFA

SEQ ID NO: 185521 - protein, 133 aa, Oryza sativa
  Clone ID: PAT_MRT4530_82409C.1.pep
LELLKTAIEKAGYTGMVVIGMDVAASEFYSDKDQTYDLNSKEENHDGSQKISGDSLKNVYKCFGSEYPIVAIEDPFDQDDWVHYAKMTEEIGEHVQIVGDDLLVTNPTRVAMAITEKSCSALLLKDNQIGSVT

SEQ ID NO: 185522 - protein, 211 aa, Oryza sativa
  unsure (1)..(211): unsure at all Xaa locations
  Clone ID: PAT_MRT4530_8240C.1.pep
SAPHFYILCCHFIEHLVGVALTLPPQPVSPRATAAGRPTHLRRLPSRRTSTAAQAAAQAASCRRPRTXVACRRRRPXSQCRRHHVPPVVATATPPAAAATACRRQRAIARARCPRMLPMQTLPQPVVAVVGGWGRRWAAATCWPCRRAARPRPATAALRRYRSPPPPASGRACAPRALPVVVLRRPAAAAAAACRRRRYRRCVKKHAMWSR

SEQ ID NO: 185523 - protein, 745 aa, Oryza sativa
  Clone ID: PAT_MRT4530_82410C.1.pep
MEPSPYGGVGGKIRRRPASRAAATPYERPPAAAAARRLAAAAAAAAAEAEDAYPPQGGGGGGGWVSRLVDPASRLIAGGAARLFSTVFRKRLDPAPAPAPPKSTPPGSNNEPNQGLPESTQTGSKPILEKGKNPTGASDNKALSEVEHLLMRKTFTRKVFFILIFLKWVEFDRLTDLLRARTVESDLSAPADNLDNKNEARNTMDGIGGSTSHGMAADHSIAADDPVCGASSPAELAKQYMNSRYSKENRPNSLRSQVLLKNKAEASNIAYDRRRPGGPFVQELSQFSNENSELPVNGYVTPGLHGRSAIYRMSCSPFFKGPSSSNDINMSPFSSSQTRANSLVSGCRQVLKRRGAELENELGSIGPIRRIRQKSNMMSTFRDARSSPRGNFLPSRTIGSDLTDGGSPIRDSPSSKRLLLGTGQSVEPAEARRNDEDGKISSDNVLAASPQSNKMAEKIFEQLNIIVPSPKEKLSLPQFAAGNASCSMSKQPVRQGNEPNGTSDPSSSQKFQPMDSVKHSLDPELNGSPSSKDKLRKDGSSKLLSHSFKDLGNKDIRSDNVALSSVAATTSSKPGFKMAVFEDLPEFDDDQEAPIPSKNSMGKTEVKTTDKKIDLKKEQKVEPILFKQKVESNSVQKAVSSPVSEKPIASALKDARPLGLFSPNDPENRATHDVPSDNNNGFKFPHVPSGTLLESSVSQLPLASNKDDKLISASSSIFGLKQSSTPDSEQTNTADVKTEARLGER

SEQ ID NO: 185524 - protein, 93 aa, Oryza sativa
  Clone ID: PAT_MRT4530_82411C.1.pep
KIKTIHKPRACGTCMFKASSIELISFYWKLEQRLLSIKILCQLWTRSRLNTQVFFLFSLLFILIYYSFHFFISFYLILLILFNYYLYFIFSFF

SEQ ID NO: 185525 - protein, 61 aa, Oryza sativa
  unsure (1)..(61): unsure at all Xaa locations
  Clone ID: PAT_MRT4530_82412C.1.pep
QQRKNEGPAATKNIXDCALLAIAGCSASAQFDVLGQSYRQYXLQAPVLLQXHXLXPYNEGG

SEQ ID NO: 185526 - protein, 61 aa, Oryza sativa
  Clone ID: PAT_MRT4530_82413C.1.pep
ILYGLKNGDINAEVKGLDGDTLDVSRVPVNQEVKERRGTDRVYECISPNKSGSGLIQLILS

SEQ ID NO: 185527 - protein, 277 aa, Oryza sativa
  Clone ID: PAT_MRT4530_82414C.1.pep
MAYLLEPDFLPPYTIFWMEDGMPELMGMLLDRKFYFYSSINTHQGFPNRRGQGYRAPAEVTTVFILPYPRGKPGNRDNLTVTGGKGHLRVSFHPRPGPGYVQGPDPIDPRETDKGNNGCAGQWGVTGARTAMANGFDGSLHCPSLHRFEEKDYLVVDYESHFRPPNQQQLDRLPQILYWCDYVAGQKWDRTARRRIFPQMQPPKARASRASDQRRVASPLSKSENDGDAAAEGGDSRWFVLAGEFRRAPQADGGRRWNRVGVSASGDMQQKPAVAKG

SEQ ID NO: 185528 - protein, 989 aa, Oryza sativa
  Clone ID: PAT_MRT4530_82415C.1.pep
MRRGKGGRNGLLPSSLRIISSCLKTVSSNAGSVASTVRSAGASVAASIAPQAEDEKDQVLWAGFDKLELHPSSFKHVLLVGYSNGFQVLDVEDAANVCELVSKRDGPVTFLQMQPTPVYSDGTEGFRTSHPMLLVVAGDETNGSGMVQGGRLSALIRDNSSETPNGNCISTPTVVRFYSLKSHSYVHVLRFRSAVYIVRCSPRIVAVALAAQVYCFDAVTLENKFSVLTYPLQGAPGINIGYGPMAVGPRWLAYASNSPLLSSTGRLSPQNLTPSPGVSPSTSPSSGSLVARYAMESSKQIAAGIINLGDMGYKTLSKYCQEFLPDGSGSPLSSSPGRRSGKLPSSVHPLEADNAGMVVIKDFISKEIISQFRAHTSPISALCFDPSGTLLVTASVHGHNINVFRIMPTVIANSSGSIRYDWTASHVHLYKLYRGMTAAVIQDISFSHFSQWISIVSSRGTCHIFTLSPFGGDASLLPQNSHSDGLPLAPCQSRPWWSKPSFLMDHQLHPAPSTVTNSVVSRIKNSSSGWLNTVSNVAASASGKLSVPSGAVTAVFHNSNYEGSLPVPSKANAMEHLLVYSPSGHVIQHELLPSGSESSDSSPIVGPGSLQIQDDELHVTAEPTQWWDVCRRTNWPERDENIANIVFHNQRNSMMAMDASDCDSEHSDSVPSDGISGKEMMRSRERSSWYLSNAEIFFYVIDQPPAKSGESLSSSGGEIEIEKLPLHEVELRRRELLPVFKQFHYSEQNFSDRNLAIGRFQNALTYIDKDNGAHGSKAGFPISGFYSDMRKMQNMNGLEGQLLLGPITNDLQPMEKCNSVQSPKVANFTALHNVDNESMNHVSTATGATTSVTTVDTLPSTIRPLSSYSLLDGSLDDGLPSPASNVSFRPQITNNSSVSNGTMTDISNGCLTSINSGQNEASDSHNSVEFTQYFQEGYCKISELDDCRELTEAVTDADSSSSHCEREKPEEDGDNDDMLGAVFAFSEEG

SEQ ID NO: 185529 - protein, 399 aa, Oryza sativa
  Clone ID: PAT_MRT4530_82416C.1.pep
MAESGWQWLLPELLEEIAGRLVTEADHVHVHQVCAHWRASTALPSATRRPWLVAAIRPWRRMSPVGAYSVWHLDGVGHVDLRGASPPAGVPRCCGMPRGWLALTDDDELPTRAAGALGSHLRRGGRAPAAALRPPGLPLRGRVVEPHDATEAELLHLQDRERRLPRREADLRRLAAAPRRLRPQLHRRRDDATGAAGVQVQWLPSFAEVYKPPAAEWTAPAERWQLEFGEKVTDLGGYSVFLGRGEGFAVHAQDFPLIRGNCVYYARNDILYSLMSCREFHVLRNIMRGKELAAAGPILGCVSRGPSSLPQGVVSSDEDYFLNNSIASTVFTEKRKTELHQLLSSQINSYVGTLDFVSCDTNQAKFWMIETYSTFLFEKRNILSIKSRKNKLASCGCRN

SEQ ID NO: 185530 - protein, 85 aa, Oryza sativa
  Clone ID: PAT_MRT4530_82417C.1.pep
ALLDAIWVKPVADFSLPSVSSCLYSSRQITHLSCPDHPANDYCERLLHHTAEIFSSARQCSHWLCVLPKAEVLIAPCHHVQSHVQ

SEQ ID NO: 185531 - protein, 480 aa, Oryza sativa
  Clone ID: PAT_MRT4530_82418C.1.pep
MAMGARLCSSSIIVVVVVLIVATAAEAMRCPGTTSVYRRPKKKAADMVDMPLDADVFAEPAGRNAPQQVHITLGDQTGTAMTVSWVTMEEAGNSTVLYGLAMDKLDMAADATVTTYTYYNYTSGFIHHCTPLGTQYGVKYYYAMGFGFTVRSFWFTTPPRPGPDVAFRLGLIGDIGQTFDSNATLTHYEASGGDAVLFMGDLSYADKYPLHDNNRWDTWGRFSERSVAYQPWIWVAGNHEIDYAPELGETKPFKPFTHRYPTPHLASASPEPYWYSVKLASVHIIVLSSYSAFAKYTPQWKWLEAELGRVNRSETPWLIMASHSPWYNSNNFHYMEGESMRAQLEKMAVDARVDLVFAGHVHAYERSFRVSNIRYNITDGLCTPVRDRRAPVYVTIGDGGNIEGLADEMTWPQPPYSAFREDSFGHAVLDIKNRTHAYYAWYRNDDGAKVAADAVWFTNRFHMPNHDDSTPTPTKRHYYG

SEQ ID NO: 185532 - protein, 71 aa, Oryza sativa
  Clone ID: PAT_MRT4530_82419C.1.pep
SLHMGLCDVDGNHLFLVDVAAAGAADLADVVPRVARHRQATTPAGFGSTGPKSGIDGEAQGHSVLHDLHAH

SEQ ID NO: 185533 - protein, 208 aa, Oryza sativa
  Clone ID: PAT_MRT4530_8241C.1.pep
MSIRFDPMESRSSSSSRSVVMMCCVLMLMIAAAAHAGEQEAEECASPMSIEEACRGASETHHAVAYDHCVASLTADPRSSSSEARSLHGLAMLATRMAIDHATSTVCKMDDLAELEPEDSSSPSDARARFEHCLEQYGGAADLLRDALDNLKVRIYGTAMEQLSAALGAAESCEDAWKGDEGNIPIAAHDREYGRMAHIAIGFTHAAA

SEQ ID NO: 185534 - protein, 762 aa, Oryza sativa
  unsure (1)..(762): unsure at all Xaa locations
  Clone ID: PAT_MRT4530_82420C.1.pep
MLADYHLRMDSRSPKIPRRSPDSKDKDSDRNRGRDAKNDWDSSRAYGSETDCKEERCDSNKRKGSXMGEDVGDDSRSVDRSHETEVHVLRDDRQDKAVEIKDILHDGVGQSDYGQRQLDLDSERRNGTGDNSRVDVLRDDKLDSGRDRNWSDRTREPEGSKDYVRNRQWQDSKEANDSEWKNAHERLDGGSFHGRAGYRRDSRGRSESIRGSSTYGGRYDSSDSIEIRPNNNLDFGREGSVSGRRYDVGAHRDATPGTNGDKSANPEADQSGSTSTISQFPQHGPKGDRSSRGRGRPNSRDSQRVGGTLPIMPPPFGPLGLPPGPMQHIGPNIPHSPGPXLLPGVFVPPFPGPLVWPGARGVDVNMLSVPPNLPIPPVAAEHRFAPSMGAGPGHNIHLNQIGSGIGAPTNVSGLSFHQLGTQSREMAHDKPPAGGGWTPHRNSGPTRKAPSRGEQNDYSQNFVDTGMRPQNFIRELDLTSVAEDYPKLRELIQRKDEIVANSASPPMYYKCDLRQHVLSPEFFGTKFDVILVDPPWEEYVHRAPGITDHIEYWNAEEIMNLKIEAIADTPSFVFLWVGDGVGLEQGRQCLKKWGFRRCEDVCWVKTNKKSATPSLRHDSHTILQHSKEHCLMGIKGTVRRSTDGHVIHANIDTDIIIAEEPTDGSTKKPEDMYRIIEHFALGKRRLELFGEDHNIRPGWLTLGKGLSYSNFNKEAYIKNFADKDGKVWQGGGGRNPPPEAPHLVVTTPEIEGLRPKSPPQKN

SEQ ID NO: 185535 - protein, 299 aa, Oryza sativa
  Clone ID: PAT_MRT4530_82421C.1.pep
MRPAVSRAAFASVLLAPRAVGVAARCASSSSSAASPSVAAATYDHASFIKEVAATDPPEHLSSLLNVLQARGEKLVSPGAKRGLIPLVVPLAESPAGMYTFRMEMPVVEVRNHGLWLLAKNVNQYIHRVLVEADINGYADDLWSAVGDTGKKLYTKGDFKESQMADLDAYLLKKVSALITGEFYTRDQFPGFGRPFVFNAEILKRLSLCSYATDEHEAAELAGWEDEQIEFIREKVSEEGKREDLKKGKAPEQVVLDEAAFLMDLASVDGNWDDVVDRIAGCYREAGLDDIAKFIAYRE

SEQ ID NO: 185536 - protein, 77 aa, Oryza sativa
  Clone ID: PAT_MRT4530_82422C.1.pep
MWLIPRRGIEFPRLEEKIAERSTVAAARVWESGRRRSEERDTRLGLPLGIYTPDPRKFRSVPDWGDRNFRPDRTERS

SEQ ID NO: 185537 - protein, 238 aa, Oryza sativa
  Clone ID: PAT_MRT4530_82423C.1.pep
MATTAAWAVVMLLLLPWPCARIRQGNLYGHVTGRMLMWILGNPIKLEGMENLNTRGIFICNHASPLDIFLVMWLAPTGTVGIAEKEIIWYPLFGQLYVLANHLRIHRSNPAAAIESMKEVARAVTKNNLSLILFPEDTRSKTGRLLPFKKGFVHTALQTRLPIVPMVVTGTHLAWRKNSLRVRPAPLTVKVLPPIETDGWVEERIDEYVEMVHSLYADSLPDSQKPLEPVNTGKKKMS

SEQ ID NO: 185538 - protein, 62 aa, Oryza sativa
  unsure (1)..(62): unsure at all Xaa locations
  Clone ID: PAT_MRT4530_82424C.1.pep
SGFGKAFWNGSVGFPVGAPLRGDIRSYRAXGVGLFKALAPDPRVEFCHFPVGGGIPLFCCVK

SEQ ID NO: 185539 - protein, 58 aa, Oryza sativa
  Clone ID: PAT_MRT4530_82425C.1.pep
MEPFGQPLVANLAKVQVEKLLVRLRSLLKRSILFFGGCVDKRLEDVIEVHVIAPDWAT

SEQ ID NO: 185540 - protein, 179 aa, Oryza sativa
  unsure (1)..(179): unsure at all Xaa locations
  Clone ID: PAT_MRT4530_82426C.1.pep
NDFLLLSVNPKSEQGQFESVPLINEMGPANNCSXEIDYKHFIYIHPNIALWLADAPQSMLEGMGELAKNVARDLHNIYWNIHQKIYVRITNLAVYDQVRNIKLIHMNTQNRFGGVXTRTSGAPSELQQVKFRLPPXGIVLGPFFQNXYTEVKAGSCPECQSKRPFTMNVERTMSRNYQK

SEQ ID NO: 185541 - protein, 330 aa, Oryza sativa
  unsure (1)..(330): unsure at all Xaa locations
  Clone ID: PAT_MRT4530_82427C.1.pep
MAVYIAREATKLWRKVCAEIAVELQLLFEKWRLLLAGLVFQYIHGLAARGVHYLHRPGPLLQDLGFMALPELGQDKGYVSESVFTFIFISFLLWSFHPFIYHSKRFYTVLLWRRVLAFLVASQFLRIITFYSTQLPGPNYHCREGSKMATLPPPHNVLEVLLINFPRGVLFGXCGDLIFSSHMIFTLVFVRTYHKYGSKRLIKILAWLMAIIQSLLIIASRKHYSVDVVXVAWYTVNLVVFFIDNKLPGESARRQRMLGFLCMMTGFSGASAPAFCLSAMAICSRMNETEPGAIAPALLWTAKESESQLSSLPATFLRLPLQFCTLVSNL

SEQ ID NO: 185542 - protein, 72 aa, Oryza sativa
  Clone ID: PAT_MRT4530_82428C.1.pep
CYSDGDGPNCGAAPAWRVRTLSRTALIKPCMNLPLPRRFRRTHTPEQQLDYMKLNDSQPLLLSIWTTAISDP

SEQ ID NO: 185543 - protein, 115 aa, Oryza sativa
  unsure (1)..(115): unsure at all Xaa locations
  Clone ID: PAT_MRT4530_82429C.1.pep
MAWRMKLQHLKDITDQFSPGRELGKGGFGVVYKITIATVELQSICCCSRIGIXCCLSTKLMGILANGKPIAVKRLQVMPGIQDRQFNNEVHHQVGLKHQNTVQLIGYCDERPDGT

SEQ ID NO: 185544 - protein, 173 aa, Oryza sativa
  unsure (1)..(173): unsure at all Xaa locations
  Clone ID: PAT_MRT4530_8242C.1.pep
LPPQPVSPRATAAGRPTHLRRLPSRRTSTAAQAAAQAASCRRPRTXVACRRRRPXSQCRRHHVPPVVATATPPAAAATACRRQRAIARARCPRMLPMQTLPQPVVAVVGGWGRRWAAATCWPCRRAARPRPATAALRRYRSPPPPASGRASSSANSTPKKGESGPFGTTPAAG

SEQ ID NO: 185545 - protein, 312 aa, Oryza sativa
  Clone ID: PAT_MRT4530_82430C.1.pep
MEGENNASPHPPSLESRSKLRGRRGTSTRSSSNPTVSLEVVPLEKVSEDEDDDNSFDHRDDMSESLPTVDGGSGSQKGDDEFDDGGSKAKKAKTGGKKAGVTVSPKCKIARGKRAECWKHFKVINVPSKKERGVMVTKAKCGATTTLNRHLAGCTQYQNKLTKAKAQGTLNFGPEDDNSLIVNPTEYNHEHTRELIAKMIIAHEYSFRMVEHKWFNILMKWMNEWKIEDKVTTITLDNATNNDTAVTNLKAKLLARKNSVFDPSYIHIRCAAHIVNLVVNDGLQPIDNLISCLRNTVKYFKRSPSRMYKFVE

SEQ ID NO: 185546 - protein, 750 aa, Oryza sativa
  Clone ID: PAT_MRT4530_82431C.1.pep
MEGENNASPHPPSLESRSKLRGRRGTSTRSSSNPTVSLEVVPLEKVSEDEDDDNSFNHRDDMSESLPTVDGGSGSQKGDDEFDDGGSKAKKAKTGGKKAGVTVSPKCKIARGKRAECWKHFKVINVPSKKERGVMVAKAKCGATTTLNRHLAGCTQYQNKLTKAKAQGTLNFGPEDDNSLIVNPTEYNHEHTRELIAKMIIAHEYSFRMVEHKWFNILMKWMNGNYEFIGRKSIKNECMRVYESEKNQLKKSLKEAESISLTTDLWTSNQNLQYMCLVAHYIDENWVMQCRVLNFIEVDPPHTGIVIAQAVFECMVEWKIEDKVTTITLDNATNNDTAVTNLKAKLLARKNSVFDPSYFHIRCAAHIVNLVVNDGLQPIDNLISCLRNTVKYFKRSPSRMYKFVEVCNNYSVKVGRGLALDVKTRWNSTYKMLDTCIDYKDAFGYYKEVDTSYVWKPSDSDWVSFGKIRPILGTMAEASTAFSGSLYPTANCFYPYIVKVKRALIEAQKSEDTYLRSMGAAMLDKFDKYWEEKNNVMVIATILDPRFKMRYIKWCFAQIFDPIRCEIEINDINQELERLYNKYEILHRQKMGENGTNRQSTSASVDTTSSMASIASDFQSFLQSTVTESSKSELLIYLDEANEAIDNKHFNLLRYWNVNCHRFPVVSSLAKRFLTVPVSSVSSECTFSTAGRVLDDYRSSLKPATVQALVCASSWIRGPYDDNNHPLLVIGDGEDDVESIEFPKCVVASN

SEQ ID NO: 185547 - protein, 121 aa, Oryza sativa
  Clone ID: PAT_MRT4530_82432C.1.pep
MASARDLAVASISAAVGAAAAAAALRFLSSYGASSAKQRSPPTPCAEHLAVNGCAAERPPVQSPFDPAKREGYISWDDYFMAIAFLSAKRSKDPNRQGRSSVELTGGERWRREQGHIGPEP

SEQ ID NO: 185548 - protein, 493 aa, Oryza sativa
  Clone ID: PAT_MRT4530_82433C.1.pep
MPPPPPHSPPLPPHLLRHLDGRALSTPLLDPLIRAASASASAPHHAFSLFLLLLRSALRPSHLTFPFLARAAARLATPRLARAVHAQPLRRGLLPHDLHVSNSLVHMYAACALPGLARRLFDEIPRPNHVSWNALLDGYAKCRDLPAARRVFARMPQRDVVSWSAMIDGCVKCGEHREALAVFEMMEATAARHDGVRANDVTMVSVLGACAHLGDLVRGRKMHRYLEEHGFPLNIRLATSLVDMYAKCGAIVEALEVFQAVPVENTDVLIWNAVIGGLAVHGMSRESLQMFQKMEHAGVVPDEITYLSLLSACVHGGLVDEAWSFFRSLEAQGLRPHVEHYACLVDVLGRAGRLEEAYGVVKSMPMKPSVSVLGALLNACHLHGWVELGEAVGRQLVHLQPDHDGRYIGLSNIYAVARRWQEAKKARKVMEERGVKKVPGFSEIDVGRGICRFIAQDKTHPGSAEIYALLKLIAMDMKMKDDVTVPDYTCMYC

SEQ ID NO: 185549 - protein, 46 aa, Oryza sativa
  Clone ID: PAT_MRT4530_82434C.1.pep
MKMAKTACVIMARDAENGIEDGNKALLDVAEIVQMCGRNAIFIAYN

SEQ ID NO: 185550 - protein, 274 aa, Oryza sativa
  unsure (1)..(274): unsure at all Xaa locations
  Clone ID: PAT_MRT4530_82435C.1.pep
MTDGADMALASLGSGVSTAAGLVFPRQVCGDAHAREQKPKRPNKTSSKDSNASNHLAQVGERRPAVEWQACSASVSMDVALSGTVSSCHPGTVSXRAVARVVGCRGEVDPPTRRHNTESGDVWSSSEXVADVVAPLLVVLGDGVKGRACGTRPCPAVAVVPTRGNATGSGRQPLGAAGRDSCPVSRCLSPATFGCCCPSPAVHRPSTPLSPFPRRRPCMPIGLREYSRGSPSKLRRRQCPRGAGGTPPPAHQAMVGAGSNVAAVRVVKTAVAGS

SEQ ID NO: 185551 - protein, 303 aa, Oryza sativa
  Clone ID: PAT_MRT4530_82436C.1.pep
MSLPVAEVAGIAAACVALLAAVAALWCAARRMARRRGRNSDETGSSDPSTLVEWGKGGRSSSAPEHQGARQFSLDELAQATKSFSEANLVGLGSFGLVYKGLLLDGSVVAIKKRIGAPRQEFAEEVRKLSEINHRNIVTLIGYCQEGGLQMLVYEYLPNGSVSRHLYDTGKSSMTRLEFKQRLSIAIGAAKGLNHLHTLVPPLIHKDFKTSNVLVDENFIAKVADAGLVRLLRGYEDVSPSHGFSSSVYQDPEVQSVLQFSESSDVYSFGVFLLELITGREAACLISPDSRESLAQWVISIDI

SEQ ID NO: 185552 - protein, 115 aa, Oryza sativa
  unsure (1)..(115): unsure at all Xaa locations
  Clone ID: PAT_MRT4530_82437C.1.pep
CIXIVATPXWXPATFQLINNQVMQQQCCXQLRLVAQXSHYQAISIVQAIVQQLQLQXQFSGVXLIQXLXQXQTLLXFXLXPSICGXYPXYYXGSQVXXPLVGGVWLLNEPIISSY

SEQ ID NO: 185553 - protein, 196 aa, Oryza sativa
  Clone ID: PAT_MRT4530_82438C.1.pep
MATAAASSSAPPPPPQPAEPAADPPAKEEPQNTTADAAAPVSDAGAAVAAEEGETVILDAAAGEGDAEGEEEGECGFCLFMKGGGCREEFVGWEKCVEDAEKAGDDVVERCYEVTAALHKCMEAHAEYYHPILSAERAMAADLEAAKADQAAEASSDAAASSSQQQQPPPTEEEAAGEKKQAEEEAVVPEKQDVAA

SEQ ID NO: 185554 - protein, 251 aa, Oryza sativa
  unsure (1)..(251): unsure at all Xaa locations
  Clone ID: PAT_MRT4530_82439C.1.pep
CRGAAAAAPGEGRRRRGDAHVAAAAAALPRPPFGRIWEGGGRPGSRCRRTGAPPRPHAPPPPPSRGLPSAGSGREEGGRGAAAAAPGRRRVRTRHRRRPPAAYLRPDLGGEAGEPXHRTGSPPRPHAPPPPPSRGLPPAGSGRGGXEPRSRSRSRPPPASLRPDLGGEAREPPPSPHRVAAASAAASAAGGGREGRGWGAEKPDFRRRTTNFTPIYIFVGGHLTPRLMSACEKKTPTLEKKYFFSSAVFDT

SEQ ID NO: 185555 - protein, 145 aa, Oryza sativa
  unsure (1)..(145): unsure at all Xaa locations
  Clone ID: PAT_MRT4530_8243C.1.pep
EPGCLSASVLWAXGDLTKMNTLQALCHALAHGSIQXGEAPIFVCARSNLCDDGLMERFRGYLKGASEXHHSDSXPHIKYGRGPYDSXKXFERLNKGISXCEHSDHSTCPHRLLYWAWTSSVYPAFCTTIITYRVRHSGWTRVIVE

SEQ ID NO: 185556 - protein, 54 aa, Oryza sativa
  Clone ID: PAT_MRT4530_82440C.1.pep
CLVWLEKLIDTQKVGPDWVPWGIVGGETLYLKAAGFTGKTLSDYLFTYTLYFQF

SEQ ID NO: 185557 - protein, 63 aa, Oryza sativa
  Clone ID: PAT_MRT4530_82441C.1.pep
SSFSARFLSDEIDFTFFLMIMLYVQMFFFQFLGILTYSRFSRETILSIIAVCDSKDSSNLFTD

SEQ ID NO: 185558 - protein, 546 aa, Oryza sativa
  Clone ID: PAT_MRT4530_82442C.1.pep
MVRERVNAQDTGDVDKFGPLRSVIPYSCVLVDLCNVEARLFADDATGVRPITDRSFLSSTRQFSMLHVCPSSYNDFLAMVAMKPGMYLAGADGVGAPQPSGGRNESGPTPRGDRGRGGLITLGPDPPPRGGQATRLEESLISGHGGCQPQPIRDIPVRPSFPPLSLSPSHAGALAEAAALLTMGGVTSTIAARFAFFPPTPPSYTVVADAATGRLAIPEISRPPARRRRRDGGGDASASGAAPAEDEDGTEVVRLRTRRGNEIVGVHVRHERASATLLYSHGNAADLGQMYGLFVELSRRLRINLFGYDYSGYGRSTGKPTECNTYADIEAAYNCLKEKYGVADEDIILYGQSVGSGPTIDLASRLPNLRGVVLHSPILSGLRVLYPVKRTYWFDIYKNIDKIGLVNCPVLVIHGTSDDVVDCSHGKQLWELCKVKYSPLWLTGGGHCNLELYPDYIKHLKKFVSSLGKKSSKPDLKEITMKEGASSKDSEPASSEKPQEAPKCSQISRKSLDSRVGKSKTVDVPEKPRMSSDDVDKFRRRRCLVW

SEQ ID NO: 185559 - protein, 58 aa, Oryza sativa
  Clone ID: PAT_MRT4530_82443C.1.pep
ISNTLISGHTSGLKRTPDLLISKSSRKTDKKKASRRKITFPYQMAHEIHYKTDLYQPD

SEQ ID NO: 185560 - protein, 145 aa, Oryza sativa
  Clone ID: PAT_MRT4530_82444C.1.pep
MINPKRLVHLAKKWQHMAALGRRRLTITGATKEGNLRCSSAIADKGHCIIYTADGERFGVPLTYLSTTVFGELLRLSEDEFGFTGEEKITLPCEAAVMEYVMCLLRRKPSEEVEQAVVSSVVMPCNYKSSTSMVSVNLSQSLAIF

SEQ ID NO: 185561 - protein, 46 aa, Oryza sativa
  Clone ID: PAT_MRT4530_82445C.1.pep
TCFCKPVVLVFISVVSPFTHPVKYMYCYCPMGPPACFTGAKCMHSS

SEQ ID NO: 185562 - protein, 41 aa, Oryza sativa
  Clone ID: PAT_MRT4530_82446C.1.pep
VDGVRGGVNATKAAESATGVGLVFATRPKQSYELEEAIGGS

SEQ ID NO: 185563 - protein, 800 aa, Oryza sativa
  Clone ID: PAT_MRT4530_82447C.1.pep
MRQPQLRAATSRPLSWRSNCTAAAASASQPSEPLSAHFTNGRPLSRAPAVVRDLSSVLRAILAASPSSHSRAYPLLKSAAFDARLAPDALVDAVLSAVGGPGSRQATALLSRLLASLCRAGRAGAAAAAYASMEARGVTPDAKSRTDLLAVTARSASAADALALLAEMRGKGRPLDAWMFDVVMRACFKEGMYDDAVRLFDEMPASEIEPDQRVCSVAIASLCKLRDANRALLVLRKMQDAGFVPWDFTFNSVVDVLVKGGRMEEALHIKDELLATGKKMSVVLATTLMHGYCLQREVRKALDIFEETLRDGLVPTDVTYTVLIRGCTEEGMPEKAYELCRQMRDHGLLPSTNEFNMVIKGLLNDKLWKDAVSLFKEMADSGIPDAFTYNILIHWLCQRRKIREALNLWEKMNETGVKPYIVTYHSLLLCYCVNGCMDEAVKLYTEMPGKGFTPNVVTYTTLMKGHINKAAFDKAYALLAEMKQNGVSCNDYTYNTLINGLCVVGRVCEVGEMLKRFETEGFVPTAMTYNSIINGFIKAGMMGSAFAVYQQMCAKGIPPNIVTYTSFIDGYCKTSCCDLALKMLNDVRCKGLRPDIAAYNSLIFGFCQEGNMSHALQVLVLMLKDGLLPNISVYNSFITGYKNLKMMEEALRLYEKMIKEGIDLDTATYTTLIDGFSKDGNVTFALKLYSEMVAKGNIPDHITFTALTHGLCRNGDIDDARKLLDEMNRLDIRPNVLMYNMLINGYLRNGKLQEAFRLHDEMLERKIMPDDTTYDILVGMKSLGSDSPIDAENPNLSSTG

SEQ ID NO: 185564 - protein, 907 aa, Oryza sativa
  Clone ID: PAT_MRT4530_82448C.1.pep
MAGSSSSKEIVDAVEKWMAFPTSGGGGATAGLEIVAEDAPSGSSGAHQQQAWRPVAPATAGRDSGGTGSGKSSVDGGVGRASHDSLPRVSQELKDALSSLQQTFVVSDATRPDCPIIYASEGFFTMTGYSPREVVGRNCRFLQGPDTDAAEVAKIRDAVKHGRSFCGRLLNYRKDGAPFWNLLTVTPIRDDNGKVIKFIGMQVEVSKYTEGLSDKRMRPNELPVSLIRYDERQKDKAMSSMTEVVQTVKQPRGARAPADAALLTPPKMSDADKMAAMSPVVAPGTPSGGGGGAGSFKSPLWDLKKEESRLSRLASGRKSGRSSLMGFKIGKRSSVGSREAPAVVEEPAPAPPPAPEVVERTDSWERAEREKDIRQGIDLATTLERIEKNFVITDPRIPDNPIIFASDSFLELTEYTREEILGRNCRFLQGPETDQGTVDKIREAIREQKEITVQLINYTKSGKKFWNLFHLQPMRDQKGELQYFIGVQLDGSDHVEPLRNRLSENTEIQSAKLVKATAENVDDAVRELPDANLRPEDLWAIHSMRVSPKPHKRNNPSWIAIEKATNLGEKIGLKHFKPVKPLGCGDTGSVHLVELQGSGELFAMKAMDKSVMLNRNKVHRACIEREIYALLDHPFLPTLYTSFQTPTHVCLITDFCPGGELFAVLDRQPMKIFREECARFYAAEVVIGLEYLHCLGIIYRDLKPENILLQADGHIVLTDFDLSFLTTSKPHVIKNSTSLKRRRSQEFLPPTFVSEPSTPSNSFVGTEEYIAPEVITGAGHTSAIDWWALGILLYEMLYGRTPFRGKNRKKTFYNILHKDLTFPSSIPVSLAAKQLIHGLLQRDPSNRIGSNAGANDIKQHSFFQDINWPLIRCMSPPELDVPLKLIGKETQPKAKPDEDVPLNLDTF

SEQ ID NO: 185565 - protein, 215 aa, Oryza sativa
  Clone ID: PAT_MRT4530_82449C.1.pep
MDKAGGNQGGKVLKKGKKKHAKDELDRQKQAEKKRRRLEKALANSAAIISELEKKRQQKREEQQRLDDEGAAIAEAVALHVLIDEDSEEPCHLMLNNLRICNHWEDFVGFGFAPDSQGVDAYPSGKPTSVSHAYVPQLRWTNWGMSQTFSSWEQLTDCEAPLYQEALAQSDIHPGPIAIVSPLQKRREDPFTIQGEAVAAASSATESESGQWNQQ

SEQ ID NO: 185566 - protein, 106 aa, Oryza sativa
  Clone ID: PAT_MRT4530_8244C.1.pep
ESTRLVEITAGAPPVGFLHHPRKKAPPCRSPSFCRGKGVHGFSTRLKLRLEEKKKLRTLTSLAHPAFFLVLSSSSFFNLVRSSICFTVYFCCSDLDDNVMSQIFDS

SEQ ID NO: 185567 - protein, 943 aa, Oryza sativa
  unsure (1)..(943): unsure at all Xaa locations
  Clone ID: PAT_MRT4530_82450C.1.pep
MAGSSSSKEIVDAVEKWMAFPTSGGGGATAGLEFVAEDAPIGSSGAHQQQAWRPVAPATAGRDSGGTGSGKSSVDGGVGRASHDSLPRVSQELKDALSSLQQTXSVVSDATRPDGPSSYASEGXVTRTGDSPREGGSAATAAVRQGPDTDAAEGAQESATPVKHGRSFCGRLLNYRKDGAPFWNLLTVTPIRDDNGKVIKFIGMQVEVSKYTEGLSDKRMRPNELPVSLIRYDGEHRRRRRGILCFLDVSLILLSYQCRHWRVWSAERQKDKAMSSMTEVVQTVKQPRGARAPADAALLTPPKMSDADKMAAMSPVVAPGTPSGGGGGAGSFKSPLWDLKKEESRLSRLASGRKSGRSSLMGFKIGKRSSVGSREAPAVVEEPAPAPPPAPEVVERTDSWERAEREKDIRQGIDLATTLERIEKNFVITDPRIPDNPIIFASDSFLELTEYTREEILGRNCRFLQGPETDQGTVDKIREAIREQKEITVQLINYTKSGKKFWNLFHLQPMRDQKGELQYFIGVQLDGSDHVEPLRNRLSENTEIQSAKLVKATAENVDDAVRELPDANLRPEDLWAIHSMRVSPKPHKRNNPSWIAIEKATNLGEKIGLKHFKPVKPLGCGDTGSVHLVELQGSGELFAMKAMDKSVMLNRNKVHRACIEREIYALLDHPFLPTLYTSFQTPTHVCLITDFCPGGELFAVLDRQPMKIFREECARFYAAEVVIGLEYLHCLGIIYRDLKPENILLQADGHIVLTDFDLSFLTTSKPHVIKNSTSLKRRRSQEFLPPTFVSEPSTPSNSFVGTEEYIAPEVITGAGHTSAIDWWALGILLYEMLYGRTPFRGKNRKKTFYNILHKDLTFPSSIPVSLAAKQLIHGLLQRDPSNRIGSNAGANDIKQHSFFQDINWPLIRCMSPPELDVPLKLIGKETQPKAKPDEDVPLNLDTF

SEQ ID NO: 185568 - protein, 52 aa, Oryza sativa
  unsure (1)..(52): unsure at all Xaa locations
  Clone ID: PAT_MRT4530_82451C.1.pep
NSCHFLIHLRFNLFXQELAKTVAKLAEEGKVLLSFTFHCFLLKHSFYIFIVI

SEQ ID NO: 185569 - protein, 35 aa, Oryza sativa
  Clone ID: PAT_MRT4530_82452C.1.pep
ILSIFMIVLAIVSNVVAVYSDAYSMFHRKSSPSIA

SEQ ID NO: 185570 - protein, 124 aa, Oryza sativa
  unsure (1)..(124): unsure at all Xaa locations
  Clone ID: PAT_MRT4530_82453C.1.pep
KGRGYHDGXGTGIWGGKCSAAQKKARPPGVASLRPTRGKKGKRPLGVPWGASVAPTGGIGSTKRPAVSAKKGDGLTGENGGSSEFVGAVRVKPYPPDGFPCFFAEGRMGGPTAPLACQPSATRW

SEQ ID NO: 185571 - protein, 186 aa, Oryza sativa
  Clone ID: PAT_MRT4530_82454C.1.pep
MTNGCRQGDEEDAPAPSGLVTGVLPWNRRRNRASRRVIYGNDDPRLVTVPRLLRHANMTGDPASQGELAAASQARCRSASHWHAAAQTHHPSTTHHTIDNDDDDDDASGQKPRHVTRGTVSDISSSYCPASPPPLVMSEYREGILVLPRGSRGARGTGLLLLPLPLPRHRKDVRIRWRRVEARATP

SEQ ID NO: 185572 - protein, 143 aa, Oryza sativa
  Clone ID: PAT_MRT4530_82455C.1.pep
MEIERTTDGRTEKIVNPPFKSGSPPTNRYVLTQVAIASTAAQAWQQICAMFTTQTEAQSLNIRLILINAQKGNMSVSQYYGKMKALRDEIATSRKPLDEEDLLAYILDGLNEDFEPVVSAIVARNETVTMSEVCSQLLNFETR

SEQ ID NO: 185573 - protein, 68 aa, Oryza sativa
  unsure (1)..(68): unsure at all Xaa locations
  Clone ID: PAT_MRT4530_82456C.1.pep
TVFKVMIGVAVITADASVLLKEGSMFXWIEXSEFGNMAFWSWVLACMVIVFLWLWNITKDTMKEFDWF

SEQ ID NO: 185574 - protein, 68 aa, Oryza sativa
  unsure (1)..(68): unsure at all Xaa locations
  Clone ID: PAT_MRT4530_82457C.1.pep
QTTTSCSTGKAXPAVQQQHIFATEYSSSPTLSFLVSIIFTHRNAYSFYFFLAMYPNYFSIIHGIRNVW

SEQ ID NO: 185575 - protein, 242 aa, Oryza sativa
  unsure (1)..(242): unsure at all Xaa locations
  Clone ID: PAT_MRT4530_82458C.1.pep
YTAPPGEKVSGTIAFDDLXRKKAPICYGFTRAXFADALKPHKFTDMHFTRWHIRVTHWLMAMKCFWVSTSNQKKFEEVTTIFVGCILSIHCNCLVGVYMYMTETKELRDVMNIKFGAIDASNDLYVLAQFHDIRMVDNHSVIEXLVTYRPYMVAKEFEYLKCVLSDKFRSSRGFHARRQRSFSTRGRGDRAPLFLAHYPPPAGATAGADFGPFSAAGTELDLGLRRRRGGLPFRQTHCLTHI

SEQ ID NO: 185576 - protein, 86 aa, Oryza sativa
  unsure (1)..(86): unsure at all Xaa locations
  Clone ID: PAT_MRT4530_82459C.1.pep
PFEPITXMPFXMXERFLGVKPLXXVSXVFCTYLQGTFLQNKTPATSNLRLQXQXSYLHRTENLXTFPLEIYLWYRXTXVFIWTXTG

SEQ ID NO: 185577 - protein, 53 aa, Oryza sativa
  Clone ID: PAT_MRT4530_8245C.1.pep
HGMRTRASSGPLYFAPSFFFFFGKLIKSLLQKHYLLLHLLSAHNTNSIIIWSH

SEQ ID NO: 185578 - protein, 77 aa, Oryza sativa
  Clone ID: PAT_MRT4530_82460C.1.pep
PAHSFFYTCSHECNKPRTRKTTAKETKKLKKKLSKQKKQSCNNVRNTFFLITVHHNALPFCWGMLQLNDAPTLYKLL

SEQ ID NO: 185579 - protein, 274 aa, Oryza sativa
  unsure (1)..(274): unsure at all Xaa locations
  Clone ID: PAT_MRT4530_82461C.1.pep
MVGLGYHGPDPSRDVPCLGRVKMSCRGPGLRASGVMAIYKAWDPCEPHMSGVHVTLSLSYLLSLPHLSLSLLCKLAGARREGGAATAAGGGGVRARRLLRFLHLLVPLGRRGLSICGSNAVAAPALPADDDIDSAAPREEEEEETGTARAAGASSSGGSGSRSGSYPPFKRGRDELVDSLSKFADETRPSKRPAAKHRTRATEVHNLSEEEGIGSRADAFVGARDDTSAPTSAERDEEAEKVEKPPRSRAASAGGRRGAALSPRXRAACRCREV

SEQ ID NO: 185580 - protein, 94 aa, Oryza sativa
  Clone ID: PAT_MRT4530_82462C.1.pep
GRARSPAGTRRRASAPPPSRSSSGGSGCRSSSPSLAAPAPAPVPAPPAPPCRSRRPPPPPRLSVRRRMRPMPRRKPPRRRSPQRSRPRSRRSLR

SEQ ID NO: 185581 - protein, 65 aa, Oryza sativa
  Clone ID: PAT_MRT4530_82463C.1.pep
MAELHRPCPPSHRPDPPPASRDQVSRSIACGNPTTPSPWIHCLAPDPSTDVCMAGLGLRYSDLVN

SEQ ID NO: 185582 - protein, 99 aa, Oryza sativa
  Clone ID: PAT_MRT4530_82464C.1.pep
MGKRRLPPLRSKKNSQQKRRMPPLYTAAARPPQEGWSIRERVNFRIAIGRFGQDWPRVAQFISTKSTGQICVYAEEYFLKRHTHSPVKNKRILIISSGC

SEQ ID NO: 185583 - protein, 133 aa, Oryza sativa
  unsure (1)..(133): unsure at all Xaa locations
  Clone ID: PAT_MRT4530_82465C.1.pep
QEREPCLREREAWDDVTYTYGDMDYNHNAHRRTVADCINATNGTSGAFDVSTNGILDCALERSEYWRVCHEKGILPGVLGXRPSRAETFIENDDTHYTQGDWRLHYGMVLQGYVYLLTHPCTPAIFYDHILLH

SEQ ID NO: 185584 - protein, 558 aa, Oryza sativa
  Clone ID: PAT_MRT4530_82466C.1.pep
MAPAPPPSTHSTAPFATPEVRSVAARRPRPAAASISARLRDVARRRKDRPRRCRAQVAPRGGDRISALSDDVLLLILRRLATRAALATAMLSKRWARLLRWLDTLDFMVGEILPPRYRRCIQLHQAAGFAAYPVDVKVLVASIKRHERLAMRNIAASINSLLDADGSDECAGQARRRARVLRVEFFATHYTDLMNRLITKALDAWEVEDLEVFAKPAYWSEWSLPPIVHRFPHHGLCIEPHKSRLRSLKLGGCIIPPLQGFHALTKMTLQDLRNSVAKASYEDVFKSCPQLQVLHLKSCRWADRGILVIDFPKSGIKQLIVEFCSAIALHSLGMLESIAIRETWVRYKHCSFSHLMHMNLNLRHGYRNRLRDLCIGWDLNIQQFLGFTKNITNLVLRFTGYGRWFVPSCPSLLLANLRRLLIADVPSSWDVSWPRLLLEAAPCLESLHIHIIPWDDDSFDEIIWQPSTLQHEELKELVVIGFEGTERQIYFVNFVMEVSTTLQLVALFRYGHVQEMGRWDWKIVRQQHHWNDEEKAQILNQFADRDSCSITPVQVVVE

SEQ ID NO: 185585 - protein, 64 aa, Oryza sativa
  Clone ID: PAT_MRT4530_82467C.1.pep
MGLVAMVNVFNATVNVVDAALHHSISSINPEILSGHRNIAYGSVHMHGLGTIPPARKTKQFISA

SEQ ID NO: 185586 - protein, 115 aa, Oryza sativa
  Clone ID: PAT_MRT4530_82468C.1.pep
MGQRDGVGQSPAACVAILRTLSGLLQLRLQFDDLGPPASCFSLVHQHLPLCRLAFAPLPLILDCEHIHTIKKASIKTNRPNMKSGATRLKNKTTAHDDVAHRHPALCHAIKDLPG

SEQ ID NO: 185587 - protein, 38 aa, Oryza sativa
  Clone ID: PAT_MRT4530_82469C.1.pep
QQCSSYLMVSILIMVDKLRLIACQVLHLRIDSVLRIDS

SEQ ID NO: 185588 - protein, 225 aa, Oryza sativa
  Clone ID: PAT_MRT4530_8246C.1.pep
MASLRPDLGGEAGEPPPPHRERAAAGGEPPMLPPPPPSSPGPPSGRIWEGRLGNHVAAAGPHKVTCENKCSQAPLRWSAVVPPHLDPMAVGLPGVDPARSATQQRGPAAVAPPCARLRLSLPHSPCLPPPPLAPAPPIDRPSTAASLPNSPPPHPPTAHPLLVSAPPVHRPAPPLHHPVSLNTSTATPTAGPYSAIPQLLPVPTEVQEKSSFSVEVVSAIVCLHI

SEQ ID NO: 185589 - protein, 73 aa, Oryza sativa
  Clone ID: PAT_MRT4530_82470C.1.pep
ADPDQAAFAEEEKRREEEDDAGDGDGDGWVPPHVYLARRQARSSVVEGVGRTLKGRDASRVRDAVWSRTGFDG

SEQ ID NO: 185590 - protein, 124 aa, Oryza sativa
  Clone ID: PAT_MRT4530_82471C.1.pep
MVAKIKRQIGGLSLLAKLGLLLLALLLLLAAILLLVFLLPRHHRRPLPPGSPPVNASDPDNIVAFDFSPFLILYKSGRVHRMDGTDRVPAGVDEATGVTSKDVVIDRSTGVGARMYLPPAKGAG

SEQ ID NO: 185591 - protein, 111 aa, Oryza sativa
  Clone ID: PAT_MRT4530_82472C.1.pep
HGTTYTWIRVNMLKVINEMNELLQGSVTMLSMQVNAQRSRLLQLTVNHSNILAWYYFLAAAFIRDIRLDPESPKPSKPTSLVPKSRYRVLNRVITLHVRAKWATFFRIIKP

SEQ ID NO: 185592 - protein, 1019 aa, Oryza sativa
  unsure (1)..(1019): unsure at all Xaa locations
  Clone ID: PAT_MRT4530_82473C.1.pep
MQRIDATSVEAAVESLIPYLEDTSSAAHKSIYFDGWDGLGASAVLRAIAENPAPSLRKKFDRIIHVDCSRWKKRRQLQRAIADQLKLPQHVMDLFDRQDEEDDFSGVEESSRAEVTDIGKEIYQTIKDLSCLLIFHNGSDDTVDTSKLGFPLYDWSDNKVLWTFRGRLRLNPKIADNVDSSHLNIYSHYYYHFYSFESLNDLLPREAEEITQYSGELHLDGTKAAECCLYLLSLNYRGGHIMDYNWATHACNYWVCDGIITVQEEKGGGSLQEDQAWELAAALHQEIRLEDYSSNRVPGFGHYLDTPPNRWVLVTQESDMKDKPTLETTSLFIAFQSVVLLPDDMFHQANKVQVLRLCNCAFNFSSPPFHCCHNLRFLGLDKCQDHRTQEAGEDKSNTSSALEFFQRLWVLDICYIDWELPFPTESTREQQMAMNIREVHINKGRIWRRNFAWRRLKNLRKLRVIEPTHPWGNKGEIDEFADMLKLEILDLSKNTMIQVLPSLCGASSLKTLILDDCVVLEQVGPQGLPPSLESFSFASREGNKAKISSISLAGCSSLVNFTLRGPLQNLRGLDLSGTMIKMLDLRDVQDSCIGQIILLRCEKLCTILWPEKGFPNLSMLHIDSLVCHVETEQQQAYATVMDLRFVQSLVLRSNNKFCWNCNKTHINICISSTPKDATPKKKTMXLLQRSKSSWLTSTHANSXTIQPVVCYKDVNLAMISAIELEGSSAPRHEPLDIHVEIGEGISYANVVSEQALSAVSFMMNKAKSLHVHDNFSITSVNPKHVILTEDKEITWYCLKRCHIERCHKLNTVFSTDYIKYRFQTLEAFSAAELMMANCIWSRGRTFPGWNSNMFAKLRSIHFAYGPRLTFVLPLSWPTPYSHLPSLETLHIVYCSELRQIFPVEAVALREQPRGVLRFPKLKHIHLHDVPKLHQICEISRMVAPVLETIRVRGCWALKRIPAINGSLRGQDSCPIVDCEKDWWEKLEWEGMNVGHDPSLFEPRHSMYYKKALPRCSLLR

SEQ ID NO: 185593 - protein, 108 aa, Oryza sativa
  unsure (1)..(108): unsure at all Xaa locations
  Clone ID: PAT_MRT4530_82474C.1.pep
PWAPPLLRPGVLDQENXFGLPDLEGRPQIFKIPPPPMNCERDIRFEPVPRLCPNSPGAAIRSVCPEAGMYAIRAPKKTVPKKDFLDPVKKVIKGFQKFSATPKYMVFN

SEQ ID NO: 185594 - protein, 33 aa, Oryza sativa
  Clone ID: PAT_MRT4530_82475C.1.pep
MVPIAISGPAQGDLLRAHEYKTHCLSFDKSDGF

SEQ ID NO: 185595 - protein, 217 aa, Oryza sativa
  unsure (1)..(217): unsure at all Xaa locations
  Clone ID: PAT_MRT4530_82476C.1.pep
ITISTCFINYLRYHYPKYNNRRNLPWVNLIWSSYYGNRVPHLLFSFVLSPNSFVKQSLSAPLEDNFYLPLSQEALQEFQVLQAQLQHFNLEQEKDIWTFIXGTLKYSSQKFYALIFCTLQPPQQYIWLWNSKVTSKVKVFGWLLLMNRLNTKFMLHHKHCTPPNCDLCCVLCPSQLVEDLQHMFFQCPFSISYWNSMGISWNSTLSLKKYIILQATA

SEQ ID NO: 185596 - protein, 88 aa, Oryza sativa
  Clone ID: PAT_MRT4530_82477C.1.pep
MPRSSMDNGVLAVAQVQATDTSANLVLVVSRRCSSLPTSLSSATTHGEEDGSGNGATNGEKNKGGKATRMAETDGDDDDDDYDCAPAA

SEQ ID NO: 185597 - protein, 84 aa, Oryza sativa
  Clone ID: PAT_MRT4530_82478C.1.pep
GSAVHSMRGSSVIGSMSPFNSNYVTHVRCICVAEPDPSFFGNNCRDERNVNTTYFVVWFIPKHHRSIFSGIAPGNAQRADRALQ

SEQ ID NO: 185598 - protein, 192 aa, Oryza sativa
  unsure (1)..(192): unsure at all Xaa locations
  Clone ID: PAT_MRT4530_82479C.1.pep
NFLQELRAQHNIATPYHPYTSAETSNKQIKNVLKKTVHEIGKAWKHKLPDALWAYRIVYKTPIGMSSYHVIYGKTCHXPVELEHRVHWAIWTCNMDLGQAGCHRQIXLSEPEEWRDKAYHNAKMYKEQTKRWHDRRMKIKEFEPGNKVLMFNSRVKLFDRGKLWSKXLGPYTVVDTSPHGAVMLRDDENNVF

SEQ ID NO: 185599 - protein, 49 aa, Oryza sativa
  Clone ID: PAT_MRT4530_8247C.1.pep
QLTSVGSPRTRRASAPAAVLVRTMMRSMCLVMAHNLWRTCLRLANNDIN

SEQ ID NO: 185600 - protein, 82 aa, Oryza sativa
  Clone ID: PAT_MRT4530_82480C.1.pep
STRLLEDLHHHFRGNWLRFRGRNNDTLQHISNSTTIEKKVKEALSFHLCAFWNMVFVILEQPGYFYVISNCEERPQFRFETI

SEQ ID NO: 185601 - protein, 59 aa, Oryza sativa
  Clone ID: PAT_MRT4530_82481C.1.pep
PPDPCGDSCRRRIRAGVGRRSLDPACRRRAAAAAALPMPVVAVGTQSGGEERRGRGKRD

SEQ ID NO: 185602 - protein, 1044 aa, Oryza sativa
  unsure (1)..(1044): unsure at all Xaa locations
  Clone ID: PAT_MRT4530_82482C.1.pep
MARGSALLDGSVLPPSRIVSERHAGLPRRFMPESATGREIVMLGEGRPAPDYPGRSVFFLPFAMAGLVPPFSSFFMDVLDFYDLQMAHLTPNAVMTLAIFAHLCEMFIGVRPSLRLFRWFFTVQSVSPPSVVGGCYFQPRGPVLNRYIPCALRKKWDDWKSDWFYTPLANEARLRLPSQPPAQVSSWRAPVDLGDDYDAVLDRLAGLRSQGLTGAMVYGDYLRRRIAPLQRRARGAWEYTGSEDYMRTHQGVRWDWAPEDFKIVVQRVLNLSSVEASLIPQGILPLCSDPDRASILTIMMGVGASEEETPKGHDGAGESRRGEQSTPGGGRASGPRVGGSGSSRPADAQGKRKLGGTPPPSPPRGGGAVRASSRHPEGAAPTSQPEGERKKKRLRKMGETEPSRGNLISPPRWSFNRPPRSDVPSRSSRHPKSGQSEAEDPAAAEERRRESDRREAADRLREAEEAAREAARARHAEDTAREEVARARQAEEAAKEEAARARQAEAMASSEAAHDKAAGASLGPTPSGDAQATASGAARDEAAGGSPGPTSPGDVQDQSGPGDIPEPSASSGGPSRVAFSPRRLFSSSSVAPLSAEPLLQALAAANTAVLDGFSAQVEALRAERAELEAAWARVEEGRRSVDVMVEVGRKAHRRHVSELEARKAALAEIAREVEEEREAALIATTAMIEAQDTLRLQHGSWEAELKKKLDAAQGVLDTAAARERRATEIEAASRRREEALEARAMALEEHAGAVERGLADREAAAAIRETTLAVHEAACAEEESALRLREDALAERERALEEAEAAAQRLADSLFLREAALAEQARRNLESVRAERAALEQRAADLEVREKELDARARISGAAAGESDLAARLAAAELTVADMQCALDSSAGEAEALRLAGEIGPGMLWDAVSRLDRAGRQAGLWKGQSMTHPTNLEGLAPHLTKMAWALQQLPEELEKTIKSSSRDLAQGAVELVLASYQARDPNFSPWMALEEFPPGTEDDARXAGPGCRRPHRPQFRGVGPSARVRPQLRRGGRRQRCRRP

SEQ ID NO: 185603 - protein, 1340 aa, Oryza sativa
  Clone ID: PAT_MRT4530_82483C.1.pep
MGGLFKTATSPERRTNLGEPLTRARYDLSRLPQPHIHLTRRKRANGISGSVGARNEGANFSSSGAMARGSALLDGSVLPPSRIVSEKQAGLPRRFMPESATGREIVMLGEGRPAPDYPGRSVFFLPFAMAGLVPPFSSFFMDVLEFYDLQMAHLTPNAVMTLGIFAHLCEMFIGVRPSLRLFRWFFTVQSVSPPSVVGGCYFLPRGPVLNRYIPCVLRKKWDDWKSDWFYTPLADEAHLRLPSQPPAQASSWRAPVDLGDGYDAVLDRLAGLRSQGLTGAMVYGDYLRRRIAPLQRRARAAWEYTGSEDYMRTHQGVRWDWAPEDFKILVQRVLNLNSVEASLIPHGILPLFSDPDRASILTIMTAVGASEEQAPKGHDGAGGSRRGDQSTPGGGRASGPRVGGSGSNRPTDARGKRKLGGTPPPSPPRGGGAVRASSRRPEGAAPTSQPEGERKKKRLRKMGETEPSRGNLISPPRWSFNRPPRSDIPSRSSHHPKSGQSEAEDPAAAEARRRESDRREAADRLREAEEAAREAARARQAEDTAREEAARARQGEEAAREEAARVRQAEEAAREEAARVRRAEAMAASEAVHDEATDASLGPTPSGDAQDQTGPGVARDEAGASIGGPSRAASSSRQLFPTPSAAPLSAEPLLQALAAANTAVLDGFNAQVEALQAERAELDAAWARVEEGRRSVEAMVEAGRKAHRRHVSDLEARKTALAEIAREVEEERGAALIATTEASREGAPEGGLAGTADGRGTRPRPDGHRRRPPARRSGTRERGGKGEANGTVFGSPRSTATTGTAAEAEEGGGAVRDGEDDGAPAVGGRSEGADEVDGNTAKPMEVTPSGEEVRSDGGGEPELVGDGGERGKRREHESDGCILESIWDVTTTTEPQTKSYPLDMWKYGSALQQRPEDRVVLGRDRFDYGSGTFASIRTFRMKLSPEKCTFGLPSGKLLGFMVSHRGIQANPEKINVILNMKPPSSWKDVQKLTGCMAALSRKLSHYFQGHSDTVDTSFPLGDILHNREANGRIAKWALELMSLDLSFKLRTSIKSQALVDFVAKWTECQEDTPAEKTEYWTMHFDGSKRLSGIGAGVVLISPTRERLSYVLWIHFSASHNVAEYEALLHGLRITISLGIRRLIVHGNSQLVVNHVMKEWSCLDDNMTAYLQEVRKLEDKFDGLELPHVLQHNNEAADRLANFGSKREAAPSDVFVEHLYEPTVPRKEIIEATDTQETHLPAQELQTIPLSWPFVVCGLDMAGPFKKVVGGYTHLFVAVDKFSKWIEAKPVITITADMARDFFINIVHRFGVPNRIITDNGTQFIGGVFKDFCEDFGIKIC

SEQ ID NO: 185604 - protein, 70 aa, Oryza sativa
  unsure (1)..(70): unsure at all Xaa locations
  Clone ID: PAT_MRT4530_82484C.1.pep
LRIVMLXTFEKXHDLRXTXXIPRIPPRSXPQSRAHXQWRATDXRXXXXXEDAXDXVIXCHALRLSGXRXS

SEQ ID NO: 185605 - protein, 1026 aa, Oryza sativa
  Clone ID: PAT_MRT4530_82485C.1.pep
MARGSAPLDGSVLPPSRIVSERQAGLPRRFMPESATGREVVALGEGRPAPHYPGRSVFFLSFAMAGLVPPFSSFFMDVLELYDLQMAHLTPNAVMTLAIFAHLCEMFIGVRPSLRLFRWFFTVQPVSPPSVVGGCYFQPQGPVLNRYIPCVLRKKWDDWKSDWFYTPLADEARLRLPSQPPAQASSWRAPVDLGDGYDAVLDRLAGLRSQGLTGAMVYGDYLRRRIAPLQRRARGAWEYTGSEDYMRTHQGVKWDWVPEDFKMVIQRVLNLSSVEASLIPQGVLPLCSDPERANILTVMQAVGASGERAPRGHDGAGVSRRGEQSTPGGGHASGPRDGSSRPADARGKRKQEARSRRAPPRHSKSGQSEAGETATAEARRREADRREAADRLREAEEAAQEAIRARQAEEAAREEARLRRAEESVREAEAARARQAACQAPDPTPPEATMTSEATHDEAAGAPLGPDPSGDAQDEPASGDVPESGTSIGGPSRAAPSPRQLSPMPSAAPLSAEPLLQALAAANTTVLDGLSAQMEVLQAERAELDAAWARVEEGRRSVEAMVEAGRKAHRRHTSELEARRRELAEIAREVEEERETALIATAVLNEARDDLRLQYGSRAAELGKKLDAARGRGRTPWGMRDASTELRFSTGWITILKSSEARDDLRLQYGSQAAELGKKLDAARGVLDAAAARERRAAENEAASRRREEALEARATALEERARAKERDLADREAAVAIREAILAAHEAACAEEEFALRLREDALTERERALEEAEAAAQRLADSLSLRETAREEQARRNLEGARAERAALDQRAAELEARAKELDARARSGGAAAGDGDLVARLAAAEHTIAELQGALDSSTGEVEALRLAGEVGPGMLRDAVSRLDRAGRQAGLWGGRTAKYAANQGGLAQRLSEMAGTLQRLPEELEETIKSSSRDLARGAVELVLASYQTRDPDFSPWVALDEFPPGTEDGARAQVRDAADHIVHSFEGMAPRLAFALDSDEEGGDGGADDSDDEACGPGASK

SEQ ID NO: 185606 - protein, 1316 aa, Oryza sativa
  Clone ID: PAT_MRT4530_82486C.1.pep
MKPGIYLTGTNVPSPGANTPALARDECLEALILMGWGEAVMARGSAPLDGSVLPPSRIVSERQAGLPRRFMPESATGREIVSLGERCPAPRYSGWSVFFLPFAMAGLVPPFSSFFMDVMEFYDLQMAHLIPNAVMTLAIFAHLCEMFIGVRPSLRLFRWFFTVQPVSPPSVVGGCYFQPRGPVLNRYIPCVLRKKWDDWKSDWFYTPLADEARLRLPSQPPAQASSWRAPAGPPATLADGWGPPVIPHLAPRPPLARALAPPPSRISPPPAVPARIKEGGIIPHDSLSLSPRFSLSLSLRFARIRSRKPRRRNQWRPDPPRRFPSPPAAFPHSQPYLSHSRALLLRFRRSPLALPVGIALAPSHLLSAVAAELRFAAVVAPDLLPTRRHLLRLRRVPVDLVRASVSPADCRSAVVLVVPSRAAAFLRFGRRSRRRRRPGRPLPRVRLTHGTHGAGRRQPRAPAPRPYKDRSSGLCCKALPYFHMSSGANEGYTSCGPVVEMSWQRVGALLLGAQSCLPVPGVPAVGRIGYDAVLDRLAGLRSQGLTGAMVFGDYLRRRIAPLQRRARGAWEYTGSEDCMRTHQGVRWDWAPEDFKIVVQRVLNLSSVEASLIPQGVLPLCSDPDRASILTIMQVVGALEERAPRGHDGAGGSRRGEQSTPGGGRASGPRDGGPGSGRPADARGKRKQEGTPPPSPPRGGGAARASSRRPEGATPTSQPEGERKKKRLRKMGGTEPSRGNLISPPRWSFNRPPRSEIPLRPSCQFKSGQSEAENAATTEARRRESDRREAADRLREAEEAAQVAVRARQAEEAAREEARLRQAEAATTSEAARDEAAGASLGPTPSGDAQDKPGPGDIPESGTSIGGPSRAASSPRRLFPTPSVAPLSAEPLLQALAVANTTVLDGLSAQVEALQAERAELDAAWARVEEGRRSVEAMVEVGRKAHRRHVSKLEARRKVLGEIAKEVEEERGAALIATTVMNEAQDTLRLQYGSWEAELGKKLDAARGVLDAAATRERRAAETEVASRRREEALEARAMALEERACAVERDLADREAAVAIREATLTAHEAACAKEESALCLREDALTERERALEEAEAVAQRLADSLSLREAAQEEQARRNLESARAERAALNQRAAELEAQARELDARARSGGAATGDSDLAARLAAAEHTIADLQGALDSSTGEVEALCLAGEIGPSMLRDAVSRLDRAGRQAGLWGGRTVKYAANQGGLAQRLSEMAGTLQRLPEELEGTIKASSRDLARGAVELVRDAADHIVHSFEDSAPRLVFALNSDEEDDDGGVGDSGDEAGDPGASE

SEQ ID NO: 185607 - protein, 104 aa, Oryza sativa
  Clone ID: PAT_MRT4530_82487C.1.pep
RARCCWAHSWCWGGVRGSSSTRSTSWRPGRRRSAPPTPPCPPPCGRGARSSSPSPPRPPRPSPRPASASSTGRSSRPPRPRPRSQEQMLRRNHLLLHELFSSVP

SEQ ID NO: 185608 - protein, 1491 aa, Oryza sativa
  Clone ID: PAT_MRT4530_82488C.1.pep
MSCQAVVDVLAVRFDALGPPGGSLLYRMSTGLQVELGDIGPVAPDFYLNELAKPIATSDVEVVIVLGVRTERQGVIDNASPPVVKKLSSLQVSLVFSAPTKTLASSSRSFLRRSPAAMDLDKSTSTSASLKKLQEDGALPSRGTMEREAGGTEPQPVLGRMVAIEDFILCGFLPPPSEFLLLVLNFYGLSLLHLKPNSVAFLSIFSHLCEAYIGVEPFLDLFRFYYELRWMKPKKIEDSDPVFIVPEEQPDKISSWTAKSTLTPSLQSFIDIIDDLRVRGLSGYEVAADFIDRRIQPLQARAHPAFDYSGPEDATRVSPRGLDSATVECRVSQLMISGPTTASNVPVPLCEKGAAEREAANYVATSLKEKVAKEASDAAAAAATTSDGNVPKKGRKFSSVIRHRRKTPTPSASDASPPPPRRQRLVTLGEKAARAKAVQDGSRGTSSASPAVASTDVVVVPRSHEATPSGLASDLVAGRGPPAAVLTWEELQVEMGRLLEAGARSISREITEARAADGAWGSSPGDRAGPPLPVRPGALSEPEMTSDKQSTRFLPCSPAFPVDAHFNLHLMASDFLAMPALKSGMNLTGTDIPTTGVSTPAPTRDESQETLIIPTGRGEAGSGRSNSSSPVPYPRRTRSLSSSSSAGVMARGSAPLDGSVLPPSRIVSERQAGLPRRFMPESATGREVVALGEGRPAPHYPGRSVFFLSFAMAGLVPPFSTFFMDILEFYDLQMAHLTPNAIMTLAIFAHLCEMFIGVRPSLRLFRWFFTVQPVSPPTVVGGCYFQPRGPVLNRYIPCVLRKKWDDWKSDWFYTPLADEARLRLPSQPPAQASSWRAAVDLGDGYDAVLDRLAGLRSQGLTGAMVFGDYLRRRIAPLQRRARGAWEYTGSEDYMRTHQGCKWDWVPEDFKMVVQRVLNLSSVEASLIPQGVLPLCCDPDRANILTIMQAVGASGERAPRGHDGAGGSRRGEQSTPGGGRASGPRDGGPGGSRPADARGKRKQEGTPPPSPPRGGGAVRASSRRPEGAVPTPQPEEERKKKRLRKMGGTEPCRGNLISPPRWSFNRPPRRFVSAPTAAVFILPSPKASFHSPVSFCLLVFLLPQRDPVAPPPPRHSKSGRSEAKETATAEARRREADRREAADRLREAEEAAQEAVRVRQAEETAREEARLRRAEESVREAEAAHARQAACQAPDPTPPAATTTSEATHDEAAGAPLGPDPSGDARDEPASGDAPESGTSIGGPSRVAPTPRRLSPLPSAAPLSAEPLLQALAAANTTVLDGLSAQMEVLQAERAELDAAWARVEEGRRSVEAMVEAGRKAHRRHASELEARRRDLAEIAREVEEERETALIATAVFNEARDDLRLQYGSRAAELEKKLDAARGVLDAAAAREQRAAENEAASRRREEALEGRATALEERARALDAKERELADLEAAVATREATLAAHEAACAEEESTLRSSPRPGARLGSGPLLAILAGPGHRGQDRARAC

SEQ ID NO: 185609 - protein, 1040 aa, Oryza sativa
  unsure (1)..(1040): unsure at all Xaa locations
  Clone ID: PAT_MRT4530_82489C.1.pep
MARGSAPLDGSVLPPSRIVSERQAGLPRRFMPESATGQEVVALGEGRPAPHYPGRSVFFLSFAMAGLVPPFSSFFMDVLELYDLQMAHLTPNAVMTLAIFAHLCEMFIGVRPSLRLFRWFFTVQPVSPPSVVGGCYFQPRGPVLNRYIPCVLRKKWDDWKSDWFYTPLADEARLRLPSQPPAQASSWRAPVDLGDGYDAVLDRLAGLRSQGLTGAMVYGDYLRRRIAPLQRRARGAWEYTGSEDYMRTHQGVKWDWVPEDFKVVIQRVLNLSSVEASLIPQGVLPLCSDPERANILTIMQAVGASGERAPRGHDGAGGSRRGEQSTPGGSRASGPRDGGPGGSRPADARGKRKQEDTPSPSPPRGGGVVRASSRRPEGAVPTSXPEGERKKKRLRKIGGTEPCRGKLISPPRWSFSRPPRSEIPSRPSRHSKSGRSEAEETATAEARRREADRREAANRLREAEEAAQEAVRARQAEETAREEAKLRRAEESVREAEAARARQAACQAPDPTPPEATTTSEVTHDEAAGAPPGLDPSGDAQDEPASGDVPESGTSIGGPSRTAPTPRRLSPLPSAAPLSAEPLLQALAAANTTVLDGLSAQMEVLQAERAELDAAWARVEEGRRSVEAMVEAGRKAHRRHTSELEARRRELAEIAREVEEERETALIATAVLNEARDDLRLQYGSRAAELGKKLDAARGVLDAAAARERRAAENEAASRRREEALEARATALEERARAKERDLADREAAVAIREATLAAHEAACAEEESALRLREDALTELERALEEAEAAAQRLADSLSLREAAREEQARRNLEGARAERAALDQRAAELEARAKELDARARSGGAAAGDGDLVARLAAAEHTIAELQGALDSSAGEVEALRLAGEVGPGMLRDAVSRLDRAGRQAGLWGGRTAKYAANXGGLAQRLSEMAGTLQRLPEELEETIKSSSRDLARGAVELVLASYQARDPDFSPWAALDEFPPGTEDGARAXVRDAADHIVHSFEGTAPRLAFALDSDEEGGDGGADDSDDEACGPGTSK

SEQ ID NO: 185610 - protein, 41 aa, Oryza sativa
  Clone ID: PAT_MRT4530_8248C.1.pep
MEGSAISLEYSIILPHLFFGRGQGREAVEGRRRGLILDPEI

SEQ ID NO: 185611 - protein, 103 aa, Oryza sativa
  Clone ID: PAT_MRT4530_82490C.1.pep
MAAGRQLYQPVLATPATAPAAPLPTLLRPRRLPPHPPLPPPSPALDLSSPSPLLHTAAYLPPSPPPPLAAAVMQGWLDQKGMPSPAPSPPPRPIASAPSRSAP

SEQ ID NO: 185612 - protein, 1972 aa, Oryza sativa
  unsure (1)..(1972): unsure at all Xaa locations
  Clone ID: PAT_MRT4530_82491C.1.pep
MGFVSGIDDFAFPPGQAFRFGSLNFITNDFGKISLLDSDSNQSGRDQVPVPFGIPNSAEAYSKIISPESASNHSDEIQSTLPRPDQDDGSYPSILMKLPDDLAAVFTVKTSPTRRSRRAPASAPIRSRSREVGVILQPLGTVSTEELDGYLSSPGVSSRPTEILDYDDFGYHYDHGDLDNFDDSYKDNYTPLFFGVFMADNETEEQRQAREADQDRARQEAERRRLEEERQRQERERLQREQQDRERIAKEAEDRRQRALESGWQARELIGQQDVDGIAVFRTPQQNAVAAITLLDTLLKEDALNQADHVVNILNQTKTMIAASVPANSASTRTPTGSRVPHLRSQDYHQPSLSIAGAESSRRSRGHDERSVRSPPERYRERRIERPHSPHRRRPIDLRDTINQRRTARGHHSPDRYDDNVDGVAAFTSDLRRVDWPAGFKPTGIKKYDGTTNPESWLTVYGLAIRAAGGDSKAMTNYLPVALADSAWSWLHGLPRDTIGSWAELRDHFIANFQGTFERPGTHFDLYNIVQKSGESLRDYIRRFSEQRNKISDITDDVIIAAFTKGIRHEDLVDKFGRKPPKTVKQMFEKANEYAKAEDAITTSKQSGTTWKPKKDTPTAGGSGSKNHKDRKRKLEELVATTSPSSRQRSRVNTFDKIMNSQCPHHPNSNHVAKDCFVYKQFAEQYVKNARKPSDGDQGTSKKKDDEDDAPTGFQDHRKELNHIFGGPLAYESKRKQKLTEREINAVQPSTPQYLRWSEITIKFNRSDHPDRVVHPGRYPLVLDPVVRNVKLRRTLIDGGSALNILFAKTLDDMQIPRTELKPSNAPFHGVIPGLSAIPLXQITLPVTFGTRENFRTENVCFEVADFETAYHAILGRPALAKFMAVPYYTYIMMKMPGPRGVISQRSDIKQAVTCDKESCEMAQTHETTLAREEIRLAATTESVLITFLQNNKDIFAWKPSDMPGIPREVIEHSLLVNEDAKPIKQXLRRFAQDRKDAIKEELTKLLVAGFIKEVLHLDWLANPVLVRKKTGXWRMCVDYTDLNKSCPKDPFGLPHIDQIRLKESDCLKTSFITPFGAYCYITMPFGLKNAGATYQRMIQRCFSTQIGRNVEAYVDDVVVKTKQKDDLIVDLEETFTSIRAFKMKLNPEKCIFGVPSGKLLGFMVSQRGIQANPEKINAILNMKPPSSQKDVQKLTGCMAALSRFVSRLGKRGMPFFKLLKKTDNFQWGPEAQKAFEDFKKLLTTPPVLASPHPQEPLLLYVLATSQVVSAVLVVEREEEGHVQKVXRPIYFVSEVLADSKTRYPQVQKLLYGVLITVRKLSHYFQSHPVTVVTSFPLGDILHNREANGRIAKWALELMSLDISFKPRTSIKSQALADFLAEWTECQEDMPEEKMEYWTMYFDGSKRLTGTGAGVVLISPTGERLSYVLWIHFSASHNVAEYKALLHGQRIAISLGIRRLIVCGDSQMVVNQVMKEWSCLDDNMTAYRQEVRKLENKFDGLELTHVLRHNNEAADRLANFGSKREAAPSDVFVEHLYEPTVPRKETVEAMDIQGISMIEADWREPFIKFLSKQELPQDKNEAERISRRSRLYIIHETELYKKSLSGILQRCVSLEEGIXLLKDIHFGICGNHAAARTIVGKAYRQGFFWPTAVSDADKIVRTCEGCQFFARQIHLPAQELQTIPLSWPFAVWGIDMVGPFKRAVGGYTHLFVAIDKFSKWIEAKPVITITADKARDFFINIVHRFGVPNRIITDNGTQFTGGAFKDFCEDFGIKICYASVAHPMSNGQVERANGMILQGIKARVFDRLRPYASKWVDQLPSVLWSLRTTPSXATDQSPFFLVYGAEAMLPSEVEFESLRFRNFNEEGYEEGRVDDINRLEEAREAVLIQSTRYLQGLRRYHNRNVRSRAFLVGDLVLRKIQTTRDRHKLSLLWEEPFIIAEVTRPGSYRLKREDSTLINNSWNIEHLRRFYA

SEQ ID NO: 185613 - protein, 1050 aa, Oryza sativa
  Clone ID: PAT_MRT4530_82492C.1.pep
MARGSALLDGSVLPPSRIVNERHAGLPRRFMPESATGREIVMLGEGRPAPDYPGRSIFFLPFAMAGLVPPFSHFFMDVLEFYDLQMAHLTPNAVMTLAIFAHLCEMFIGVRPSLQLFRWFFTVQSVSPPSVVGGCYFQPRGPVLNRYIPCVLRKKWDDWKSDWFYTPLADEARLRLPSQPPAQVSSWRAPVDLGEEYDAVLDRLAGLRSQGLTGAMVYGDYLRRRIAPLQRRARSAWEYTGPEDYMRTHQGARWDWAPEDFKIVVQRVLNLSSAEASRLPQEILPLCIDPDRVSILTIMLGVGASEERAPKGHDGAGESRRGKKSAPGGGRASGPRVGGSGSSRPADAPGKRKLGGTPPPSPPRGGGAVRTSGRRPEGAAPTSQPEGERKKKRLRKMGETEPARGNLISPPRWSFNRPPRSDVPSHSSRRPKSGQSEAEDPAAAEERRRESDRREAAARLREAEEAAREAARVRQAEEAAREEAARARQAEEAAQEEAARARQAEAAAAAGASLGPTPSGGPQATSSEAARDEAAGASPGPTSPGDAQDQTGPGDIPELSVSSGGPSRVAFSPRRLFSSSSVAPVSAEPIMQALAAANTAVLDGFSAQVEALRAERAELEAAWARVEEGRRSVDAMVEVGRKAHRRHISELEARKAALAEIAREVEEEREAALVATTAMVEAQDTLRLQHASWEAELKSKLDAAQGVLDSAAARERRATEAEAASRRREEALEARAMALEEHAGAVERGLMDREAATALREATLAAHEAACAEEESALRLREDALAERERALEEAEATTRRLADSLSLREAAQEEQARRNLESVRAERAALEQRAANLEAREKELAAGARIGGAAAGESDLAARLAAAEHTVADMQRALDSSTGEAEALRLAGEIGPGMLWDAVSRMKRAGRQAGLWGGQTTVPPTNLEGLAPHLNRMAWVLERLPEELEKTIKASSRDLARGAVELVLASYQARDPNFSPWMALEEFPPGTEDEARARVGDAADHIVNGFEGSAPRLAFAPSSDEEGDTSSEDGGGDEAGDPLPVRPGA

SEQ ID NO: 185614 - protein, 213 aa, Oryza sativa
  unsure (1)..(213): unsure at all Xaa locations
  Clone ID: PAT_MRT4530_82493C.1.pep
RNAYEEYKVFQDDVSRISLNTMTDKWTFLWGNDLYSSQKFYKLSFWCIQPPVTMPWIWSCKVYMKIKVFAWLLFLDRVNTRALLEKKRCKPPNVPIYCALCTTGIRETRDHLLFQCPFACLGWNSIGFSWXLRRNFIXMIQTRRNSGLQHMCFMKIFLVACWLLWKQRNDLIFQNIQPSLNRWKSSLREELSLHLPRLRLVSRPFLKSWLDNL

SEQ ID NO: 185615 - protein, 1047 aa, Oryza sativa
  Clone ID: PAT_MRT4530_82494C.1.pep
MARGSALLDGSVLPPSRIVNERHAGLPRRFMPESATGREIVMLGEGRPAPDYPGRSIFFLPFAMAGLVPPFSHFFMDVLEFYDLQMAHLTPNAVMTLAIFAHLCEMFIGVRPSLQLFRWFFTVQSVSPPSVVGGCYFQPRGPVLNRYIPCVLRKKWDDWKSDWFYTPLANEARLRLPSQPPAQVSSWRAPVDLGEEYDAVLDRLAGLRSQGLTGAMVYGDYLHRRIAPLQRRARSAWEYTGPEDYMRTHQGARWDWAPEDFKIVVQRVLNLSSAEASRLPQEILPLCSDPDRVSILTIMMGVGASEERAPKGHDGAGVRRRGEQPAPGGGRASGPRVGGSGSSRPADAQGKRKLGGTPPPSPPRGGGAARASSRRPEGAAPTSQPEGVRKKKRLRKTGETEPCRGNLISPPKWSFNRPPRSDVPSHSSRHPKSGQSEAEDPAAAEERRRESDRREAAARLREAEDAAREAARVRQAEEAAREEAARARQAEEAAREEAARARQAEATAAAGASLGPTPSGGPQVTSSEAARDEAAGASPGPTSPGDAQDQTGPGDIPEPSASSGGPSRVAFSPRRLFSSSSVAPVSAEPIMQALAAANTAVLDGFSAQVEALRAERAELEAAWARVEEGRRSVDAMVEVGRKAHRRHISELEARKAALAEIAREVEEEREAALVATTAMIEAQDSLRLQHGSWEAELKNKLDAAQGVLDAAAAREQRATEAEAALRRREEALEARAMALEEHAGAVERGLTGREAAAGLREATLVAHEAACAEEESALRLREDALAERERALEEAEATTQRLANSLSLREAAQEEQARRNLECVRAERAALEQRAANLEAREKELAARAPIGGAAAGESDLAARLAAAEHTVAEMQRALDSSTGEAEALRLAGEIGPDMLWDAVSRMKRAGRQAGLWGGQSSVPPTNLEGLAPHLNRMAWVLEQLPEELEKTIKSSSRDLARGAVELVLASYQARDPNFSPWMALEEFPPGTEDDARARVRDAADHIVNGFEGSAPRLAFAPSSDEEGDASGEDDDGDEAGDPGASE

SEQ ID NO: 185616 - protein, 1015 aa, Oryza sativa
  Clone ID: PAT_MRT4530_82495C.1.pep
MARGSAPLDGSVLPPSRIVSERQAGLPRRFMPESATGREIVSLGEGCPAPRYPGRSVFFLPFAMAGLVPPFSSFFMDVLEFYDLQMAHLTPNAVMTLAIFAHLCEMFIGVRPSLRLFRWFFTVQPVSPPSVVGGCYFQPRGPVLNRYIPCVLRKKWDDWKSDWFYTPLADEARLRLPSQPPAQASNWRAPVDLGDGYDAVLDRLAGLRSQGLTGAMVFGDYLRRRIAPLQRRARGAWEYTGSEDCMRTHQGVRWDWAPEDFKIVVQRVLNLSSMEASLIPQGVLPLCSDPDRASILTIMQAVGASEERAPRGHDGAGGSRRGEQSTPGGGRAYGPRDGGPGSGRPADARGKRKQEGTPPPSPPRGGGAARASSRRPEGATPTSQPEGERKKKRLRKMGGTEPSRGNLISPPRWSFNRPPRSEIPSRPSRHSKSGQSEAEDPATTEARRRESDRREAADRLREAEEAAQVAVRARQAEEAAREEARLRQAEAATTSEAARDEAAGASLGPTPSGDAQDKPGPGDIPESGTSIGGPSRAASSPRRLFPTPSVAPLSAEPLLQALAVANTTVLDGLSAQVEALQAERAELDAAWARVEEGRRSVEAMVEVGRKAHRRHVSELEARRKVLGEIAKEVEEERGAALIATTVMNEAQDTLRLQYGSWEAELGKKLDAARGVLDAAAARERRAAETEVASRRREEALEARAMALEERACAVERDLADREAAVAIREVTLAVHEAACAEEESALRLREDALTERERALEEAEAAAQRLADSLSLREAAQEEQARRNLESARAERAALNQRAAELEAQARELDARARSGGAATGDSDLAARLAAAEHTIADLQGALDSSTGEVEALRLAGEIGPSMLRDAVSRLDRAGRQAGLWGGRTVKYAANQGGLAQRLSEMARTLQRLPEELEGTIKSSSRDLARGAVELVLASYQARDPDFSPWTALDEFPPGTEDGARAQVRDAADHIVHSFEGSAPRLAFALSSDEEGDDGGVGDSGDEAGDPGASE

SEQ ID NO: 185617 - protein, 46 aa, Oryza sativa
  Clone ID: PAT_MRT4530_82496C.1.pep
SLLTRKHKGSICILEFHCSTLVIRLNSTQIPIKYKTNNDIHFNEEN

SEQ ID NO: 185618 - protein, 195 aa, Oryza sativa
  Clone ID: PAT_MRT4530_82497C.1.pep
MVEEPSATLRAIGGPAKIRDGDILAPGVGDGEGSSAPPSSCDMAWIAIDVATVGERGRGKKRWGDEDHADMARHDTHWPGRPMPPPVRANGLMRSVCSCRSLGVGHRSPISLARGSKVTRGLPADGGGGSPAAVTTRRRRRGDDKAAVETGDEAAAMTMREQEGLPPRRCQRRGTGTRRPQSVSPPWTAACGGGI

SEQ ID NO: 185619 - protein, 96 aa, Oryza sativa
  unsure (1)..(96): unsure at all Xaa locations
  Clone ID: PAT_MRT4530_82498C.1.pep
FPSAPDKNGYGYLSDRIXFGYGYEYGYFLLDTNTNMVSGVPSDTDNNSVIRKICFRIRVRSYSILIHIRDNPYLFPYSSYPYSFSYPVKNMKTNMV

SEQ ID NO: 185620 - protein, 497 aa, Oryza sativa
  Clone ID: PAT_MRT4530_82499C.1.pep
MEVAAGARGGGAGGGGGGPAPFLLKTYEMVDDPSTDAVVSWSDASDASFVVWNHPEFAARLLPAYFKHSNFSSFIRQLNTYISLLENDSSTMFCLTTKKLVLQGFRKIDPERWEFANEYFIKGQKHLLKNIHRRKPIHSHSHPPGALPDNERAIFEDEIERLSREKSNLQADLWKSKQQQSGTMNQIEDLERRVLGMEQRQTKMIAFLQQASKNPQFVNKLVKMAEASSIFTDAFNKKRRLPGLDYSIENTETTSFYDDHSSTSKQETGNLLNQHFSDKLRLGLCPAMTESNIITLSTQSSNEDNRSPHGKHPECDMMGRECLPLVPQMMELSDTGTSICPSKSSCFAPPISDEGLLTCHLSLTLASCSMDVDKSQGLNANGTTIDNPTEAATATMEKDDTIDRSFDDNQKKSADSRTADATTPRADARVASEAPAAPAAVVNDKFWEQFLTERPGCSETEEASSGLRTDTSREQMENRQAYDHSRNDREDVEQLKL

SEQ ID NO: 185621 - protein, 269 aa, Oryza sativa
  Clone ID: PAT_MRT4530_8249C.1.pep
MANPVVPCPSAAAYGPGGCDGVGCSSSHNVWAHRVRHNGGVYRLCSSCVLLGHRDAFCSVCLDVFPGDAPFQDDFYNPIVSCSCCGVEPVAAAHLACLTDPSYFVCPACAAAAEGRTFTYAPSSGAPHALAERVLLVAARLAHESVARAAAAAREQAERLIREAAAARKRARDMVDVACRVLEAEARDAKEQAAAPPSPVLTKKTTPKNSAANRSSDKPLKINSIQKPALAFAAAAAAAAAAASSTPLSTPSPAGERKPMKQGRVLIAV

SEQ ID NO: 185622 - protein, 648 aa, Oryza sativa
  Clone ID: PAT_MRT4530_824C.1.pep
MPPVSSSTSRPASLPSSPHRPALRPGSLQRLLRPPDPSDDDGAAPTAPRSSRGGGRVLLQVTNITPALSGANPFSGHHGFYLRLSDSARSCYVSLHADHDDLILTNGLHIGQVIEVEHLVPSVPAPVLRHFRVLPGRYPCIQQEPADDAAAGGAAAEIKEVVSERPRRSSPTPPIPGERRARQAGGGGSPSSISYRHRSRSISNLSEAGAAARRSGAAVLGKLRKVSVTSIDGTSTDDDDEESDVSSLSSARRNWDFTGGVKDRRPVAPRRRGNSVSPSKSGPNSTITQNDDPMESVRRKAEKAFNVLSKRASAKMTRESSNCTVATPQSAAASSSIKWCESNVMWSTLSSSLLKHGKEAVKQRDMALQAVLDGLLEASTTEKLIKCLSTYSELQSDKEENPKELIDRFLKFSQELDHAIFIAQSQTKIRHVKACGSNSTSSASTKAALKAALDRKQSAILWIREAIEADLSPFSSHTRPTESPKLSLAESKPMTPLFCCSKPKCNCSKRSSRKASDGSSQGSNMSAAMDLAVALRSECNCWFLKYIDKFLDDIESETMYAPCDSQVAGLLQQLKRVDDWLNRVALHERMLSVDRTNKDIMFSEEEESDACERVRRKIYGALLRHVQYAAMALEGLNGVIDEEKDERK

SEQ ID NO: 185623 - protein, 126 aa, Oryza sativa
  unsure (1)..(126): unsure at all Xaa locations
  Clone ID: PAT_MRT4530_82500C.1.pep
FPSAPDKNGYGXLSDRIILGXFGYRYEYGYFLPDTNTNMVPGFPSDTDNNSDIRKIYFRIRVRSYSILIRIRDNPYLFSYSSYPYSFSYPVKKYENEYGINIIRPYPLRFHPYLTPHPQPPSHPPT

SEQ ID NO: 185624 - protein, 106 aa, Oryza sativa
  unsure (1)..(106): unsure at all Xaa locations
  Clone ID: PAT_MRT4530_82501C.1.pep
FPSALDKNEYGYLSDRIILGXFGYGYEYGYFLSDTNTNMVSGFPSDTDNNSDIRKNCFRIRVRSYSILICIRDSPYLFPYSSYPYLFPYPKKNMKTNMHDSIGLIS

SEQ ID NO: 185625 - protein, 97 aa, Oryza sativa
  unsure (1)..(97): unsure at all Xaa locations
  Clone ID: PAT_MRT4530_82502C.1.pep
FPLAPDKNGYGYLSDRIILGYFGYEYEYFLPDTNTNMVSGFPSDTDNNSDIRKNCFRIRVRXYSILIRIRDNPYLFPYSSYPYSFSYPVKNMKTNMV

SEQ ID NO: 185626 - protein, 132 aa, Oryza sativa
  unsure (1)..(132): unsure at all Xaa locations
  Clone ID: PAT_MRT4530_82503C.1.pep
SWVTPSTERIISIRYGXKRIRIPFGSDNSRIVRIRIFSLGYEYEYSXGFPSDTDNNSDIRKICFRIRVRSYSIFIRIRDSPYLFPYSSYPYSFPYPAKNMKTNMHVRYTTQRSGTQMRERLARTRTTRSTRD

SEQ ID NO: 185627 - protein, 221 aa, Oryza sativa
  unsure (1)..(221): unsure at all Xaa locations
  Clone ID: PAT_MRT4530_82504C.1.pep
NMNHKITNTTTMKQNHHKSPGPTKGKNCKRKKNLLKHSSQRGNRGWRSAVLTATRDRARRRRVHRRSARSNCRLLLRPTPEEGMEEEAVAAAMRRGDXGWSLVGRQERLPPPIHPPSPSPPPAQSCSNCSSRSRPPHLLRCLPTPLSADCKGHDAAAAPAACCSLEDEDTAPAARXRRRFAGAAPQGRGRHRSLAQSSPLAACMRSYLHRRDRSSSSFPAA

SEQ ID NO: 185628 - protein, 133 aa, Oryza sativa
  unsure (1)..(133): unsure at all Xaa locations
  Clone ID: PAT_MRT4530_82505C.1.pep
SLLICLANIFNSISGICLTRTVGMKTEQIVSVRSGQKRIRISFGSDNSRIVRIRIRIRIFPPGYEYGYGIXFPSDMDNNSDIRKNCFRIVSDXYSILIRIRDNPYLFPYSRYPYSFSYLVKNMKTNMIRALSV

SEQ ID NO: 185629 - protein, 95 aa, Oryza sativa
  Clone ID: PAT_MRT4530_82506C.1.pep
RPPCSEPRVPSPIFAPKTFFSVFPPFLSRFPWVSPLLGFFGRNFASPFAVNFRFFPAPWGPCFRPKKKKKKKKKKKKKKKKKKKKKKKKKKKKKK

SEQ ID NO: 185630 - protein, 107 aa, Oryza sativa
  unsure (1)..(107): unsure at all Xaa locations
  Clone ID: PAT_MRT4530_82507C.1.pep
YRLIIGMKTERIVSVRSGEKRIRIPFRSDNSRIVLIRIFFAGYVYEYGIXFPSDTDNNSDIQKNCFRIRVRSYSILIRIRDNPYLFPYSSYPYSFLYPVKNMKTNTV

SEQ ID NO: 185631 - protein, 982 aa, Oryza sativa
  Clone ID: PAT_MRT4530_82508C.1.pep
MSWRLPWRSLVMILSVLQPMIYMSCGCLVEERAALMDIRASLIQANSTLVPRSWGQTEDCCSWERVRCDSSKRRVYQLNLSSMSIADDFFSWELNITVFSAFRDLQFLDLSQNKLISPSFDGLLGLTKLRFLYFGAFENLTNLQELNLSSNKFEGSIPKSLFSLPHLKVLDLCGNDFIKGGFPVPPEPVLLEVVNLCNTAMNGTLPASAFENLRNLRALNLSKMDWSFNKFHGGLPASLFSLPHLKVLDLSGNFFEGGIPINSSSFPVSLEVLNLNNNNMNGTLPTEQAIENLGNLRELHLSLNRFAGNIPRSLFSLPHIELLDLSGNLLEGPIPISSSSNLPAFIKSLRFSHNNLSGKFSFSWLKNLTKLEAVVLSDNANLAVDVNIPGWVPQFQLKELALSGCDLDKSIITEPHFLRTQHHLEVLDLSNNNLPGSMHDWLFTEGARHYKLDLGNNSLTGSLESTWYTQNFLKYINVSMNRVAGQLPDNINSIFPNLLVLDFSNNEIYGHIPIELCQIRQLRYLDLSNNSISGEVPACLFTDHAVLESLKVSKNKLGGLIFGGMDNMSDSLSYLYLDSNKYEGSIPQNLSAKNLFVMDLHDNKLSGKLDISFWDLPMLVGLNLADNTLTGEIQPYLCNWTSISLLDLSNNNLTGSLPNCSMALQVNFLNLSNNSLSGDIPYALFNTSELIVMDIRHNRFTGNLNWVQNNLGIDILSLGGNDFEGEISPDICNLQYLRIIDFSHNKLSGSVPACIGNILFGDVHDHDILQIFYVEPFIELYDSHLMSTYYYYLSGFAFSTKGSLYIYGVNLFDLMTGIDLSANMFDGEIPWQLGNLSHIKSLNLSYNFFTGQIPATFSGMKEIESLDLSHNDLSGPIPWQLTQLSSLGAFSVAYNNLSGCIPNYGQLASFSMESYVGNNNLYNTSQGSWCSPSGHVPKEDVEERYDDPVLYIVSAASFVLAFCATVAFSFCHSYGRSAILKM

SEQ ID NO: 185632 - protein, 99 aa, Oryza sativa
  unsure (1)..(99): unsure at all Xaa locations
  Clone ID: PAT_MRT4530_82509C.1.pep
FLSAPEENENGYLSDRIFLGXFGYGYEYGYFLPDANTNMVSGFPSDTDNNSDVRKNCFRIRVRSYSILICIRDNPYLFPYSSYPYSFPYPAKNMKTNMV

SEQ ID NO: 185633 - protein, 148 aa, Oryza sativa
  unsure (1)..(148): unsure at all Xaa locations
  Clone ID: PAT_MRT4530_8250C.1.pep
MRKEKIPHQAPFAIQAAQLLGRAIGAGLFAITPAGACFWIANKGFIGVSADELSGRCIGLQGLHTYWIYWXIIVISYYHQPIAFILVFTSSVRIYIGHMADSSKPSCYRLDQTDWHARISPRFGPAQELSRSPRLVCVFRVSRDLLHF

SEQ ID NO: 185634 - protein, 197 aa, Oryza sativa
  Clone ID: PAT_MRT4530_82510C.1.pep
MPKPYKIRTTKLGWRGGELRRERGLPDVRFREPEVPPQLRYRRRQVLRVPRHRAPEIRGAGRGGGCRLARPASRRRAEGGVGGFVGWGKASELGKEGRAVGSGSGKWRRWTTAVVGRADVARSVPGPLVASPSSSVLAGDRPFRAHRRPRGIRDVDGYNEEQRLGDVTYGSRRTSSTDEKARNNKFYGVLDQEEIMI

SEQ ID NO: 185635 - protein, 463 aa, Oryza sativa
  Clone ID: PAT_MRT4530_82511C.1.pep
MAVTGGGRPAVRQQAARGKQMQRTFNNVKITLICGFITLLVLRGTVGINLLTYGVGGGGGSDAVAAAEEARVVEDIERILREIRSDTDDDDDDEEEEPLGVDASTTTTTNSTTTTATAARRRSSNHTYTLGPKVTRWNAKRRQWLSRNPGFPSRDARGKPRILLVTGSQPAPCDDAAGDHYLLKATKNKIDYCRIHGIEIVHSMAHLDRELAGYWAKLPLLRRLMLSHPEVEWVWWMDSDALFTDMAFELPLARYDTSNLVIHGYPELLFAKRSWIALNTGSFLLRNCQWSLELLDAWAPMGPKGRVRDEAGKVLTASLTGRPAFEADDQSALIHILLTQKERWMEKVYVEDKYFLHGFWAGLVDKYEEMMERHHPGLGDERWPFVTHFVGCKPCGGYGDYPRERCLGGMERAFNFADNQVLRLYGFRHRSLASARVRRVANRTDNPLVNKEAALKMDAKIES

SEQ ID NO: 185636 - protein, 100 aa, Oryza sativa
  Clone ID: PAT_MRT4530_82512C.1.pep
FLSAPDKNGYGYLSDRIILGYFGYGYEYGYFLPDTNTNMISGFSSDTDNNSDIRKICFRIRVRSYSILIRIRDNPYLFLYSSYPYSFLYPVKKNTKTNMA

SEQ ID NO: 185637 - protein, 145 aa, Oryza sativa
  Clone ID: PAT_MRT4530_82513C.1.pep
MAGVTFCRAEGAPAPPVSSPSLPRRRRGVGFGGKGKGGDGRESERIEAVAVLPSSRVVVFPSCSCRRREPADVAPPATVAAPPPSSLPPRLPASRRFALLRKREEEKEGDGVDYADMWAAGSCRLHWGCGNPAGVRGPEGPRGVD

SEQ ID NO: 185638 - protein, 69 aa, Oryza sativa
  unsure (1)..(69): unsure at all Xaa locations
  Clone ID: PAT_MRT4530_82514C.1.pep
FFFFFFFFFFFFFFLGNPXTXTGXXWESSSTGXCTTKXHDCIPGPHLISPRNKQTKKKQXKNKKLXSPS

SEQ ID NO: 185639 - protein, 198 aa, Oryza sativa
  Clone ID: PAT_MRT4530_82515C.1.pep
MQAVREEEEQVVEEVVRAGAVAEEEEGPEEKEVAMVGEEMAEAEHDEEEAEAGASAKKNRIQVSTNKKPLYFYVNLAKKIIYLTSLNPYGYWMQRYMQNYDEVELSALGMAIGTVVTVAEILKNNGLATEKKILTSTIGTKDESKGRLVRKAKIEILLCKSENFNSIMSSKKSDRPKSAEEEIKLLDRDRQVTVIMEG

SEQ ID NO: 185640 - protein, 48 aa, Oryza sativa
  Clone ID: PAT_MRT4530_82516C.1.pep
ERHSAVFDLAGCRFEEKDYLVVDYESHFRPPNQQQLDRLPQILYWCDY

SEQ ID NO: 185641 - protein, 295 aa, Oryza sativa
  Clone ID: PAT_MRT4530_82517C.1.pep
MTEAAEWNDENTKIICELYAEQVRAGNRPSTHLNSIGYSQVALKFQQRTHLLYTKRQLKNKWDKLRNEYTIWKKLLIRGSGLGWDSTKGTIAADENWWNKTNTELPGAKKFRKAGMKNLDHLRVMFDDIASNGVDHTPVPATSSPSTLESPVNVANLDGLDNDMEDNDDTQLEEESPLNRNKKRPRHANNANKNKSSRTEIALLMQAQLKGMADLAEKAQATFENFTSLVGSLGSSIQYVMTLVQECGARSGSDEHFIATELFVSREQREMFLTLSTAEERLEWLRRKYKAKYGA

SEQ ID NO: 185642 - protein, 202 aa, Oryza sativa
  unsure (1)..(202): unsure at all Xaa locations
  Clone ID: PAT_MRT4530_82518C.1.pep
GTAGTTAVRPAGTRSSSFHGVTRHRWSGKYEAHLWDSSCRMEGRRRKGRQDYAGSYDTEEKXARSYDVAALKYWGQNTKLNFSVSEYERELEDIRDMSREECVTYLRRRSSCFSRGASIYRGVTRRQKDGRWQARIGLVAGTRDIYLGTFKTEEEAAEAYDIAAIEIRGKNAVTNFDRSNYMEKGMHCIEGAGLKLLASKPE

SEQ ID NO: 185643 - protein, 338 aa, Oryza sativa
  Clone ID: PAT_MRT4530_82519C.1.pep
MEEAGDASAAVLDPKLAPLLLFGHGDATSLYSVPARALLPRRVGDGGVDDMMRGHRWWTTAQGWLLMARRGSPCTFLWDPFTGRRVGLPPDHDGTVLAAEGSSHRRRCLLSCCGPMDPASCVVLVIDHADTVLWYCRPGDNHWVKRHQHQYLQPGPPHHEHRGIVILALRQLTAMDGEFYTDLIDHVAVLEFSLEPAFTVTAVDDDDRRPAVYMKRTSIFVESNGELHSILFSHPIGCDRIVAGVGVYRLSMATTQEQRSAWVKVDSLGGRVFFVQIGCFGASLDARTTGLRGNCIYYSGFNGKALCVYDMERGTTAVINPGEHLPYHQSPKILMPTR

SEQ ID NO: 185644 - protein, 183 aa, Oryza sativa
  Clone ID: PAT_MRT4530_8251C.1.pep
RNKREKARRKKKNKDPPTRRARPSEKGKGAATPPGAGGTRKNNPKQAARKHPRRPRPRNKPGKRANEKRPPRGGKRGKQGKRRRDRRTEPTERHGKGETKQPKPRRSEPRARGHHQKKARQGKERHPKRATEETTTPPEKSSAKGNTTRRDREAKAPNTGEAKEKTPNTPHGGGEEGERGEED

SEQ ID NO: 185645 - protein, 1045 aa, Oryza sativa
  Clone ID: PAT_MRT4530_82520C.1.pep
MARGSALLDGSVLPPSRIVSEKQAGLPRRFMPESATGREIVMLGEGRPAPDYPGRSVFFLPFAMAGLVPPFSSFFMDVLEFYDLQMAHLTPNAVMTLGIFAHLCEMFIGVRPSLRLFRWFFTVQSVSPPSVVGGCYFLPRGPVLNRYIPCVLRKKWDDWKSDWFYTPLADEARLRLPSQPPAQASSWRAPVDLGDGYDAVLDRLAGLRSQGLTGAMVYGDYLRRRIAPLQRRARAAWEYTGSEDYMRTHQGVRWDWAPEDFKILVQRVLNLNSVEASLIPHGILPLCSDPDRASILTIMTAVGASEEQAPKGHDGAGGSRRGDQSTPGGGRASGPRVGGSGSNRPTDARGKRKLGGTPPPSPPRGGGAVRASSRRPEGAAPTSQPEGERKKKRLRKMGETEPSRGNLISPPRWSFNRPPRSDIPSRSSHHPKSGQSEAEDPAAAEARRRESDRREAADRLREAEEAAREAARARQAEDTAREEAARARQAEEAAREEAARVRQAEEAAREEAARVRRAEAMAASEAVHDGAADASLGPTPSGDAQDQTGPGVARDDAGASIGGPSRAASSSRQLFPSSSVAPLSAEPLLQALAAANTAVLDGFSAQVEALQAERAELDAAWARVEEGRRSVEAMVEAGRKAHRRHVSDLEARKTALAEIAREVEEERGAALIATTVMIEAQDSLRLQHGNWEAELKKKLDAAQGVLDAAAAREQRATETEAALRRREEALEARAMALEERACVAEKVLADREAAVTSREATLAAHESACAEEESALRLREDALAERERALEEAEAEAQRLADSLSLREAALTEQARRNLESVRAERAALEQRAADLEAREKELDARACIGGAAAGESDLAARLADAEHTVADMQRALDSSAGEAEALRLAGEIGPGMLWDAVSRLDRAGQQAGLWKGQTRTHSTNLEGLAPHLTKMAWALQQLPEELEKTIKSSSRDLAQGAVELVLASYQARDPNFSPWMALEEFPPGTEDDARARVRDAADHIVHSFEGSAPRLTFAPNSDEEGDASGADDVEDEAGDPGASD

SEQ ID NO: 185646 - protein, 287 aa, Oryza sativa
  Clone ID: PAT_MRT4530_82521C.1.pep
MGMANEESPNYQVKKGGRIPPPRSSLIYPFMSMGPAAGEGCGLCGADGGGCCSRHRHDDDGFPFVFPPSACQGIGAPAPPVHEFQFFGNDGGGDDGESVAWLFDDYPPPSPVAAAAGMHHRQPPYDGVVAPPSLFRRNTGAGGLTFDVSLGERPDLDAGLGLGGGGGRHAEAAASATIMSYCGSTFTDAASSMPKEMVAAMADDGESLNPNTVVGAMVEREAKLMRYKEKRKKRCYEKQIRYASRKAYAEMRPRVRGRFAKEPDQEAVAPPSTYVDPSRLELGQWFR

SEQ ID NO: 185647 - protein, 1385 aa, Oryza sativa
  unsure (1)..(1385): unsure at all Xaa locations
  Clone ID: PAT_MRT4530_82522C.1.pep
QPPSTTSWTAXAVKSLAERTRKWEEERRQERREGKSPAAPAGNRRSEAKQKAPAEDIDDGDDGLGFQEPGATIATVDGGACAHVSRRSLKAMKRELLAAAPTHEAMRRARWSEVALTFNQTDHPPCVARGGQIAMVVSPTVCNVKLGRVLIDGGAALNILSPTAFDAIKAPGMVLRPSQPIIGVTPGHTWPLGHIDLPVTFGGSANFRTERVNFDVADLSLPYNAVLGRPAFVKFIAAVHYAYLQMKMPGPGGPISVHGDIKVALACMEQRAEHLAAASKPEGGDERLGTSVPAAPRQRMITCDEVPVKKIRMAREDEEKTAFITPIGTYCYTTMPFGLKNAGPTFQHTTRISLGSQIGHNVEAYVDDLVVKTCNQETLLSDLAETFESLRSTRIKLNPDKCVFGVPAGKLLGFLVSARGIEANPEKIRAIERMCPPSKLRDVQCVTGCMAALSRFITRLGEKALPLFKLIKRSRPFTWTEEAERALTQLKAYLSSPPVLVDPEPNEPLLLYLAATPQVVSAALVVERDEDKPHSTRPHPASTRPGREQGGEAPESNGGPRPPTAGAGPPPACPKVPGAPDPQDGHGATAGRPRLSPSDPEVIGTEAECAPRGLSDEERPGDAAPSEEDRPRRKVQRPVYFVSEALRDAKTQYPQAQKMLYAILMASRKLRHYFQAHRVTVVTSYPLGQILHNREGTGWVVKWAIELSEFDLHFEPRHAVKSQALADFVAEWTPAPEPISVPEASSGPSQLPHTAYWVMQFDGSLSLQGAGAGVTLTSPSGDVLKYLVRLDFRATNNMAEYEGLLAGLRVAAGLGIRRLLVLGDSQLVVNQVSKEYQCSDPQMDAYVRQVRRMERHFDGIELWHVPRRDNTVADELSRLASSRAQTPPGAFEERLAQPSARPDPLGETDASERPPRPVGVQASGPEGSAPSSLRLIAWIAEIQAYLTDKTLPEDREGSERVQRISKRYVLVEGTLYRRAANGVLLKCIPREQGVELLADIHEGECGAHSASRTLVGKAFHQGFYWPTALNDAVDLVRRCRACQFHAKQIHQPAQALQTIPLSWPFAVWGLDILGPFRWAPGGFEYLYVAVDKFTKWPEAYPVVKIDKHSALKFIKGITARFGVPNRIITDNGTQFTSELFGDYCEDMGIKLCFASPAHPRSNGQVERANAEILKGLKTKTFNILKKHGDSWIEELPAVLWANRITPSRATGETPFFLVYGAEAVLPSELTLRSPRATMYCKXDQDQLRRDDLDYLEERRRRAALRAAQYQQSLRRYHQRHVRARSLCVDDLVLRRVQTRAGXSKLSPMWEGPYRVIGVPRPGSVRLATGAALSCETRGTLNTFVASTPEGGGSAKIAKRGPEPSRAPGRGELRGGIGKNPQSGHP

SEQ ID NO: 185648 - protein, 1065 aa, Oryza sativa
  Clone ID: PAT_MRT4530_82523C.1.pep
MARGSAPLDGSVLPPSRIVSERQAGLPRRFMPESATGREIVSLGEGCPAPRYPGRSVFFLPFAMAGLVPPFSSFFMDVLEFYDLQMAHLTPNAVMTLAIFAHLCEMFIGVRPSLRLFRWFFTVQPVSPPSVIGGCYFQPRGPVLNRYIPCVFRKKWDDWKSDWFYTPLADEARLRLPSQPPAQASNWRAPIDLGDGYDAVLDRLAGLRSQGLTGAMVFGDYLRRRIAPLQRRARGAWEYTGSEDCMRTHRGVKWDWAPEDFKIVVQRVLNLSSVEASLIPQGVLPLCSDPDRANILTIMQAVGVSEERAPRGHDGTGGSRRGEQSTPGGGRASGPRDGGPGSGRPADARGKRKQEGTPPPSPPRGGGAARASSRRPEGATPTSQPEGERKKKRLRKMGGTEPSRGNLISPPRWSFNRPPRSEIPSRPSRHSKSGQSEAEDPATTEARRRESDRREAVDRLREAEEAAQVAVRARQAEEAAREEARLRQAEATTSSEATCETDRQEAADRLREAEEAAQVAVRARQAEEAAREEARLRQAEATTTSEAARDEAAGASLGPTPSCDAQDKPGPGDIPESGTSIGGPSRAASSSRRLFPTPSVAPLSAEPLLQALAVANTTVLDGLSAQMEALQAERVELDAAWACVEEGCRSVEAMVEVGRKAHRRHVSELEARRKVLGEIAKEVEEERGAALIATTVMNEAQDTLRLQYGSWEAELGKKLDAARGVLDAAAARERRAAETEVASRRREEALEARAMALEERACAVERDLADREAAVAIREATLTAHEAACAEEESALRLREDALTERERALEEAVAAAQRLADSLSLREAVREEQARRNLEDARAERAALNQRAAELEAREKELDARARSGGAAAGESDLTARLAAAEHTIADLQGALDSSAGEVEALRLAGEVGPGMLRDAVSRLDRAGRQAGLWGGRTAKYAANQGGLAQRLSEIAGTLQQLPEELERTIKSSSRDLARGAVELVLASYQARDPDFSPWTALDEFPPGTEDGARAQVRDAADHIVHSFEGSAPRLAFALNSDEEDDDGGVGDSGDEAGDPGASE

SEQ ID NO: 185649 - protein, 244 aa, Oryza sativa
  unsure (1)..(244): unsure at all Xaa locations
  Clone ID: PAT_MRT4530_82524C.1.pep
MTSAVTSPTAAAARWRRRLERRTLAGERRREDANGGHQDEAGGTANSPATKTTAEGQRTATATRRKRRSSSAXRWRRSSDDLRRRRRGGRGRRRLGEHDGGLPERRRRLKRRRRTAGAAAATAKLGHTALGLFRRREAKAKVATGRGDTGGPFKGAQRRRRRPKAAATAKESXGLERGXTDPKRTRFHELPKRFSQRFQRRKGRGDPGDCFPSNNSAGEGKERPDLEXERRRRRARVSGGGGRR

SEQ ID NO: 185650 - protein, 192 aa, Oryza sativa
  Clone ID: PAT_MRT4530_82525C.1.pep
SFPGSLTHSDVVGTFGYLAPEYFMYGKVTDKVDVYAFGVVLLELLTGRKPISDGSPKGQESLVMWASPILDSGDISDLLDADLDVKHDDAEVKRMALAASLCLRRSARLRPKISQVLSVLRGESEVSLDDLKAEPADCVDDETYPAANVRTHLGLALLDVEDAESISSTEHSNLSPLEEYLRERCSRSSSFD

SEQ ID NO: 185651 - protein, 93 aa, Oryza sativa
  unsure (1)..(93): unsure at all Xaa locations
  Clone ID: PAT_MRT4530_82526C.1.pep
VKLFGHGKLRSKWEGPFNVIDTXLQGAITLRDDSGRKVAASRAHQXAEPGQHPKSLIPFIGSSSNSTYNLTGEPTLANQLIPVEEYTMEGANA

SEQ ID NO: 185652 - protein, 1086 aa, Oryza sativa
  unsure (1)..(1086): unsure at all Xaa locations
  Clone ID: PAT_MRT4530_82527C.1.pep
MARGSALLDGSVLPPSRIVGERQAGLPRRFMPESATGREIVMLGEARPAPDYPGRSIFFLPFAMAGLVPPFSSFFMDVLEFYDLQMAHLTPNAVMTLAIFAHLCEMFIGVRPSLRLFRWFFTVQSVSPPSVVGGCYFQPRGPVLNRYIPCALRKKWDDWKSDWFYTPLANEARLRLPSQPPAPVSSWRAPVDLGDDYDAVLDRLAGLRSQGLTGAMVYGDYLRRRIAPLQRRARSAWEYTGSEDYMRTHRGVRWDWAPDDFKIVVQRVLNLSSVEASLIPQGLLPLCCDPDRASILTIMMGVGASEEVAPKGHDGAGGSRQEESTPGGGRASGPRDGGSGSNRPADARGKRKQGGTPPPSPPRGDGAVRASRRRPEGAAPTSQPETERKKKRLRKTGETEPSRGNLISPPRWSFNRPPRXQVFSYPPCLSSGFFFCFSDVPSRSSRHPKSDQSEAEDPAAAEERRRESDRREAADRLREAEEAAREAARVWQAEDTAREEAARARQAEEAAREEAARARQAEEAIREETARARQAEAMASSEAVHDKTAGASLGPTPSGDAQATTSGAARDKAAGASPGPAPSGDAQDQTGPGDIPELSASSGGPSRVAFSPRRLFSSSSAAPLSAEPLLQALAAANTAVLDGFSAQVEALRAERAELEAAWARVEEGRRSVDAMVEVGRKAHRRHISELEARKAALAEIAREVEEEREAALIATTAMIEAQDSLRLQHGSWEAELKKKLDAAQRVLDAAAAREQRATEAEAASRRREEALEARAMALEDHAGAVEISLADREAAAAIREATLAAHEAACAEEESALRLREDALAERERALEESETATQRLADSLSLRKAAQEEQARRNLECIRAERAALEQRAANLEAREKELDARERSGGAATGESDLVARLAAAEHTVADMQRALDSSTGEAEALRLSGEIGPGMLWDAVSRLDRAGREAGLWKGQTISRSTNLEGLAPHLRRMAWAVQELPEELEKTIKSSSRDLAQGAVELVLASYQARDPGFSPWMALEEFPPGTEDDARARVRDAANHIVQSFEGSAPRLAFAPSSDEEGDASGEDDSGDEAGDPGALE

SEQ ID NO: 185653 - protein, 270 aa, Oryza sativa
  unsure (1)..(270): unsure at all Xaa locations
  Clone ID: PAT_MRT4530_82528C.1.pep
MAAACSFRSVARAPPPLRGLARRGVVHCCSTAPPSGGTSTSSSKLVLEVKERLEREHPGLPTGRNGRDDEEMILWFLKDRKLSVDETVSKLTKAIKWRQDFQVSELSEESVKGLYQTGKAYVHDSFDIYGRPVLVVVASKHFPSLCYWSTQLQKQDPVENEKLCAFLVEKALSRLPLGTENILGIFDLRGFQVENGDLQFLKFLICEHLHRLXSSLHHLLLSEVXFVFQPMWQLVKPLLKQYASLVRFCDVETVRKEYFTEETVPPDFRN

SEQ ID NO: 185654 - protein, 1069 aa, Oryza sativa
  Clone ID: PAT_MRT4530_82529C.1.pep
MARGSALLDGSVLPPSRIVSERQAGLPRRFMPESATGREIVMLGEARPAPDYPGRSIFFLPFAMAGLVPPFSSFFMDVLEFYDLQMAHLTPNAVMTLAIFAHLCEMFIGVRPSLRLFRWFFTVQSVSPPSVVGGCYFQPRGPVLNRYIPCALRKKWDDWKSDWFYTPLANEARLRLPSQPPAPVSSWRAPVDLGDDYDAVLDRLAGLRSQGLTGAMVYGDYLRRRIAPLQRRARAAWEYTGPEDYMRTHQGVRWDWAPEDFKILVQRVLNLNSVEVSLIPHGILPLCSDPDRASILTIMTAVGASEEQAPKGHDSAGGSRRGDQSTPGGGRASGPRVGGSGSNRPTDARGKRKLGGTPPPSPPRGGGAVRASSRRPEGAAPTSQPEGERKKKRLRKMGETEPSRGNLISPPRWSFNRPPRSDVPSRSSRHPKSGQSEAEDPAAAEERRRESDRREAADRLREAEEAARETARARQAEDTAREEAARARQAEEAAREEAARARQAEEAAREEAARARQTEAMASFEAAHDKAAGASLGPTPSGDAQATASGAARDEAAGGSPGPAPSGDAQDQTGPGDIPELSASSGGPSRVAFSPRRLFSSSSAAPLSAEPLLQALAAANTAVLDGFSAQVEALRAERAELEAAWARVEEGRRSVDAMVEVGRKAHRRHISELEARKAALAEIAREVEEEREAALIATTAMIEAQDSLRLQHGSWEAELKKKLDAAQGVLDAAAAREQRATEAEAASRRREEALEARAMALEDHAGAVETSLADREAAAAIREATLAAHEAACAEEESALRLREDALAERERALEESEAATQRLADSLSLREATQEEQARRNLECVRAERAALEQRAANLEAREKELDARERSGGAATGESDLVARLAAAEHTVADMQRALDSSTGEAEALRLSGEIGPGMLWDAVSRLDRAGREAGLWKGQTISRSINLEGLAPHLRRMAWAVQQLPEELEKTIKSSSRDLAQGAVELVLASYQARDPGFSPWMALEEFPPGTEDDARARVRDAANHIVQSFEGSAPRLAFAPSSDEEGDASGEDDGGDEAGDPGALE

SEQ ID NO: 185655 - protein, 700 aa, Oryza sativa
  Clone ID: PAT_MRT4530_8252C.1.pep
MAEERESFESQWAPTDVTENLKEMVEHGVLPAKEIIGWRPACGEAFPTSDMHEVVVFSHFFYGGFSLPTSKLFRGILEFYGISLHHLNPNSIVHIANFIHACEAFLGIRPHFALFRCIFFLKPQPNKSKQCVVGGAGFQLRGTLSQKYFSMPFKTSNKGWHANWFYMQNPKPALPEYSCLPPTYQDTWNSLPIEDEAAQALTLLNRMLKLKEQGLHGEQITRHFIKSWLAPIKERSRTAFEFDGKSDPKREDPESLEFKIMKDRMYKIFSSGIVVDYSHILPMEFSLMKSDPPTAQRRSPRRQPGQTSGGPKIQPSAQSSNPKPTNQTGSRKRKLVLSNDEGDDAEKAGSKEAAGKQPKPANPPKKKTSSRPIPKIRKSSRKPSDIDPSGKDPNPTNKETGSAIADEAGPTEENRPTGSPIIGDKEEILWIRSAEDSRPPILVKWCDDEMQSQGIVINKQKEDEEVALLKRTLTQATRLVNRIHLRNEAKTTTLEKLVPHLGTLEEIRAQLHETRCTIVQAAKITELEKRIKALEKDKGDLAKERDLAIKDVEDRKIKSQAQFDVLITKIKKLEEARDEVANAATPLIQAMFYNNNGPSTIDAVEVFDKLRAAPDTCFKNIMEAGSMGATMALAMTKSLYPKIDIDAIDGFADGTSEEDAVDIINDAQKAADKIAADIVERFQDTNLGQTGSDDEKTESG

SEQ ID NO: 185656 - protein, 1087 aa, Oryza sativa
  Clone ID: PAT_MRT4530_82530C.1.pep
MRRKRANGISGSVGARNEGAKYSSSGAMARGSALLDGSVLPPSRIVSERQAGLSRRFMPESATGREIVTLGEGRPAPDYPGRSVFFLPFAMAGLVPPFSSFFMDVLEFYDLQMAHLTPNAVMTLAIFAHLCEMFIGVRPSLRLFRWFFTVQSVSPPSVVGGCYFQPRGPVLNRYIPCALRKKWDDWKSDWFYTPLADEARLRLPSQPPAQASSWRAPVDLGDGYDAVLDRLAGLRSQGLTGAMVYGDYLRRRIAPLQRRARGAWEYTGSEDFTRTHQGVRWDWAPEDFKILVQRVLNLNSVEAALIPQGILPLCSDPDRASILTIMMAVGASEERAPKGHDGAGGSRRGEQSTPRGGRASGSRDRGPGSSRPADARGKRKQGGTPPPSPPRGGGAARASSRRPEGAAPTSQPEGERKKKRPRKMGETEPSRGNLISPPKWSFNRPPRSEIPSRPSRHSKSGQSEAEDPAAAEALRRESDRREAADRLREAEETARAHQAAQEAARARQAEETAREEAARARQAGEAAREEAGFRQDEAMATSEAARDEAAGASLGPTPSGDAQATTSGAAGDEAAGASLGPTPSGDAQDQTGPGDIPESGTSIGGPSRVASSPRRLFPTPSIAPLNAEPLLQALAAANTTVLDGLSAQVEVLQAERAELDAAWARVEEGRRSVEAMVEVGRKAHRRHVSELETRKKVLAEIAKEVEEERGAALIATTVMNEAQDTLRLQYGSWEAELGKKLDAAQGVLDAAAAREQRAAETEAASRRREEALEARAMALEERACVVERDLADREAAVTIREATLAAHEAACAEEEFTLRLREDALTERERALEGAEAAAQQLAVNLSLREAAQEEQARRNLEGARAERAVLNQRAAELEARAKELDARARSGGTATGESDLAARLAAAERTIADLQGALDSSAGEVEALRLAGEVGPGMLWDAVSRLDRAGRQVGLWRGRTVKYAANQGGLAQRLSKMAGALQRLPEELEKTIKSSSRDLAQGAVELVLASYQARDPNFSPWMALDEFPPGTEDRARAQVRDAADHIVDSFEGSAPRLAFAPNSDEEGNAGGADDSDVEAGDPGASD

SEQ ID NO: 185657 - protein, 280 aa, Oryza sativa
  Clone ID: PAT_MRT4530_82531C.1.pep
MEREISALYEPKRNNEIRIFESSDEMSTDLAEYISQVSEISVKERGYFAIALSGGPLVSFLGKLCEAPYNKTLDWSKWYIFWSDERAVAKNHAESNYRITKEGFLSKVPILNGHVYSINDNATVEDAATDYEFVIRQLVKVRTIGVSESNDCPKFDLILLSMGSDGHVASLFPNHPSLELKDDWITYITDSPQPPPERITFTLPVINSASNIAIVTTGDDKSEAVHLAISDNADGPEAPSSLPARMVQPTDGKLVWFLDKSAASSLDAENDDAFEQHREY

SEQ ID NO: 185658 - protein, 108 aa, Oryza sativa
  Clone ID: PAT_MRT4530_82532C.1.pep
LPALIDPGGGGVPPRGHGPGDSPPAGRPRFWPPDQDGPLSGPPQSVPPPPVSYCPGVPCMLRVVQLWPYGHPPGLFGPPFPIKTRPWGLFPPFKWRYDFTFWGAVGAL

SEQ ID NO: 185659 - protein, 51 aa, Oryza sativa
  Clone ID: PAT_MRT4530_82533C.1.pep
MAHAGLGSGWTCAFANDFDEMKATYPLPEMVQDWMASEVGRFGRSSTSWAN

SEQ ID NO: 185660 - protein, 134 aa, Oryza sativa
  unsure (1)..(134): unsure at all Xaa locations
  Clone ID: PAT_MRT4530_82534C.1.pep
MAVSTSRRGGGVLAAVVTAVAALAMLGGVAWGGNPGFTCGPASAQKGFAFCNAALPAEQRAADLVARLTTAEKVGQLGDQAPGVPRLGIPVYKWWSXEALHGLAISGKGIHFGNGPARTVTSFPQVIHTVVGFD

SEQ ID NO: 185661 - protein, 64 aa, Oryza sativa
  Clone ID: PAT_MRT4530_82535C.1.pep
MCINRHLLDADGEEKKRGPAPNEKEEEGGGHRTMNDAYFLRRLFKDKKKKKEGRLAHERHSQRT

SEQ ID NO: 185662 - protein, 352 aa, Oryza sativa
  Clone ID: PAT_MRT4530_82536C.1.pep
MTQLPYLLLLLSNVLALLSVLQEKGYSVRISQKPYDTYIYIDNFMFGRHVEKQHLINFLLENNIAGPPPVLPIIGGRGVGKRTLVTHVCNDERVSSQFNFILHINGANLGQITENGNLSARTLVIEFFSDVDDNDWKKFYSHVTNLSRENKVIILTTIEKLERFGTVKPMTLNRLVYEEYRYLFKTLAFGSTDPVDHPQLIPIVEEFAELLEGRLIPANILADVLRKNLNVHFWLCKLRQVQITAKKNMTMSGAHPHKLFDQGHPAHFTGYILSPPTIITPNVPQNDLPQLRFGDLLTGHIFPPNGDFKLISWESRIPPYTSFVHTARFCLSLSQDQPESPLSGRKHRRPFS

SEQ ID NO: 185663 - protein, 131 aa, Oryza sativa
  Clone ID: PAT_MRT4530_82537C.1.pep
MEDNVVLVALDFSSQFLLMPATPPSLLGAPPFFWSSLEPAVEPFSGGGEVFVRVCGPVNLLSGLLGLTGGVGAAELGQPMSRATITLNTLALVSKRFYTFERVLGESLVWSSRIGDIDACERRFLLGGVAL

SEQ ID NO: 185664 - protein, 101 aa, Oryza sativa
  unsure (1)..(101): unsure at all Xaa locations
  Clone ID: PAT_MRT4530_82538C.1.pep
LRIIMAHCANAITLRRERVLVVTNSAETAFNAEIEAAQLVITPHHYAIAQMAQREXCAYIACKTNPNSMVRQIARLSSMYAAVRNDVVADAYRIYGDQAQT

SEQ ID NO: 185665 - protein, 47 aa, Oryza sativa
  Clone ID: PAT_MRT4530_82539C.1.pep
EALKNQKLHTQTSCMINIFRTGNVSCEKQQTNGVQIQQSDKLWSNSK

SEQ ID NO: 185666 - protein, 121 aa, Oryza sativa
  unsure (1)..(121): unsure at all Xaa locations
  Clone ID: PAT_MRT4530_8253C.1.pep
FAPPYLSRELTGNRAVIDVASVPAGGMRYGTKFTFRFHTPVAAVEWGXVRVTMYAPRLTTHGYSMNQRLLVLPVAGFSAQGQMYELTVDTPRKPELAPPGYYLVYVVSKDVPSEAAWVKIQ

SEQ ID NO: 185667 - protein, 286 aa, Oryza sativa
  Clone ID: PAT_MRT4530_82540C.1.pep
MDPSGGGGGVGVGGIGGGEQILWDWQAAEQCESNAANHDVSRFMWDCLNQDDDDLLGLLGNQTPLRDCRGFFDIDDFTCKETLDLEESRESKRRRILEYPSESNQSEDGNREISSTLGTSEVSEISLLCTDEPQSFNWDSQNNSNNFGILARRALHIPMIKVVFQETYQFFLSITGTTENDSVTESLLMQETRKLSTLKVSKGTSLVKAKQNLTTTIAYPFTLIKPSWEEGDVITLKDINQRIRAPPKKAPETLGTSAFSGKPVIGKTRIRTDGGRGSITILRTKG

SEQ ID NO: 185668 - protein, 132 aa, Oryza sativa
  unsure (1)..(132): unsure at all Xaa locations
  Clone ID: PAT_MRT4530_82541C.1.pep
ELHRGGGRSRTSGSPGLQEFGTRRSGKLELQYLHEYAGINASVGLNSNPMVNLSGVFGSKELSVGVDVAFDTATSNFTKYNAALSLTNSDLIASLHLNNHGDTLIASYYHLVKHHSDTAVGAXELXHSFFKE

SEQ ID NO: 185669 - protein, 104 aa, Oryza sativa
  Clone ID: PAT_MRT4530_82542C.1.pep
MAASGKSLMLPIELAAVGWHCWLVAAGGLVPVLALSETCRVMQERKGGKKLESPERLANKDGNGSLTYEAVAVTCTEMERKRNVQSSVSISPIGPIQSGINTFH

SEQ ID NO: 185670 - protein, 179 aa, Oryza sativa
  Clone ID: PAT_MRT4530_82543C.1.pep
MELLLRPSPPPPWAIPRRSSGERTKPCRSRSRSRTGTSKQTFPVPLLVGKVGRRPFPVQCSIVRCCLSSTDAIHSTSDDIHEDNGHGHFLMKSTSDLQKVISSCFGKACLLSSVMLVLPPSCFAEPCEPEYSLPNMPLLFAIAMIGATVGGLLARQRRGELKRLNDQLRQINAALRRQA

SEQ ID NO: 185671 - protein, 324 aa, Oryza sativa
  unsure (1)..(324): unsure at all Xaa locations
  Clone ID: PAT_MRT4530_82544C.1.pep
MELLLRPSPPPPWGFXTXSSGERTKPCRSRSRSRTGTSXQTFPVPLLVGKVGRRPFPVQCSIVRCCLSSTDAIHSTSDDIHEDNGHGHFLMKSTSDLQKVISSCFGKACLLSSVMLVLPPSCFAEPCEPEYSLPNMPLLFAIAMIGATVGGLLARQRRGELKRLNDQLRQINAALRRQAKIESYAPSLSYAPVGSKIPESEVIVDPQKDRLISYLRAGKNYLRNQAPDKAFPEFKAAFDLAQSLGDHVEEKKAARGLGASLQRQGKYKEAIKYHSMVLNISKLTGEDAGVTEAYGAIADCYTELGELEKAGKFYDKYIARLEND

SEQ ID NO: 185672 - protein, 88 aa, Oryza sativa
  unsure (1)..(88): unsure at all Xaa locations
  Clone ID: PAT_MRT4530_82545C.1.pep
RRRRPRPPGRXRRLTRPSARXRQRSPCGRSSRRGGRTPARACGCGGRRSRAGRRAGGARRARGARPRAGRPARRRRAPSAPARRTRPC

SEQ ID NO: 185673 - protein, 138 aa, Oryza sativa
  Clone ID: PAT_MRT4530_82546C.1.pep
AKARRKMNWQYNRTEQVVLVISRTDPVRPSVHSFLQMSTGSHTAHVATGPSSSYRFATSRASHAHHHSTQCHPISSQHSAWVARHVANHPGKQAQHAAYARNIFLTPHKRGTSALPLFSRLKNDVTASNPATDWYVPD

SEQ ID NO: 185674 - protein, 86 aa, Oryza sativa
  Clone ID: PAT_MRT4530_82547C.1.pep
LQAAVAPHDRGPPMCKRFRKFSRKVLELNSVEPLGAFDTLEYPNAEHVVVTEALKQVPSLASVPPRGNILVGFKKNYRFPFVWEHK

SEQ ID NO: 185675 - protein, 94 aa, Oryza sativa
  Clone ID: PAT_MRT4530_82548C.1.pep
MSYRFSILLVLIFYGLFLFCIFLFSFFIFMILFYILFIIIFYYFFVYFFLFFFFFFLFFFNFFFFLFFFFFYFFFFFLFFFYFFFIFFFLFYFF

SEQ ID NO: 185676 - protein, 166 aa, Oryza sativa
  Clone ID: PAT_MRT4530_82549C.1.pep
MEFTLSELEENEVDSEFDKQPAPLAWLEGRGGRQRVEIWECHLLDVDEAKVQCFDSLLHNAYVVTSYSSSTVLSSSNSLTVSYPSSLQRDGSNDSRRTSAGGALGKGFFIRHCGIGVEESQLKFELAVACASLLEETLKLALATRRSSAMTSVEEEASGSPQGGAH

SEQ ID NO: 185677 - protein, 738 aa, Oryza sativa
  Clone ID: PAT_MRT4530_8254C.1.pep
MAEERESFESQWAPSDVTEENLKEMVAHGVLPVKEIIGWRAACGEAFPTPDTHEVVVFSHFFYGGFSLPTLKFFKGILEFYRISLHHLNPNSIVHIANFIHACETFLGIKPHFALFRRIFFLKPQPNKSKPCVVGGAGFQLRGTLSQKYFSMPFKTSNKGWHANWFYVQNLEPTLPEYSCLPPTYQDTWNSLPMGDEAAQALTLLNRMLKLKERGLHGEQITRHFIKSRLVPIKERSRTAFEFDGKNDANREDPESLEFKIMKERMYKIFSSGIVVDYSHILPVVPYHAFNPPPPEFSLMKSDPPTTQRRSPRQLPGQASGGPKIQPSAQSSNPKPTDQIGSRKWKLLLSDDEGDDAEKAGNKEAAGKQPKLANPPKKKTSSRPIPKIRKSSRKPSDIDPSGKDPNPTNKETGSATADEAGPTEENRPAGSPVIGDEEEILRIRSAENSRPPILVKWLDDEMQLQGIVINKQKVDEEVALLKRTLTQATRLVNRIHLQNEAKTATLEKLVPHLGTLEATRAQLHETRELARKTEHDLRNRIAELQDTNFELTSSSKVQAAKITEPEKRIKALEKDKGDLTKERDLAIKDVEDRKIKSEAQFDVLITMIKKLEGARDEVANAATPLIPAMFYNNNGPSTIDAVEVFDKLRAAPDTYFKNINEAGSMGASMALAMTKSLYSKIDIDAIDGFVDGTSEEDALDLINDAQKAADKIAADIVERFQDTNLGLTGSDDEKTESS

SEQ ID NO: 185678 - protein, 342 aa, Oryza sativa
  unsure (1)..(342): unsure at all Xaa locations
  Clone ID: PAT_MRT4530_82550C.1.pep
SSKGGGYVLGHTVINQENLTGHWRLYNDYFSKEPTYLDVQFRRRFRMRQPLFLRIMNAIEAHNEYFVQKRNATGILGLSCLQKVTTVSRMLCYGIATDAIDEYVRIGGSTVIESFKRFVVAVDEVYGEEYMRTPNENDKARLLAQGGERGLPGKLGSLDCLHWXWKNYXDRMARLVYKEKEXVPTLVLEAVASHDXWIWYAFFGSPNSHNDINVLPRLPLFAKLAXEHAPKVNFSIKGHDYXYYLTYGIYPSWATLVKSMKLPQGNKRKYFTKAQEAAKKDIEQPFGVLQAHFAITRGPPRFWRRGXLGHVRHACVTPGNSRIEFQAECDRPGRHKRGAGTE

SEQ ID NO: 185679 - protein, 58 aa, Oryza sativa
  Clone ID: PAT_MRT4530_82551C.1.pep
LLSSDFLSVPRVGSIHMGYGHIAINSKSKIRAKDQIGSSNAKYFTMLQTPRSIKGSKD

SEQ ID NO: 185680 - protein, 135 aa, Oryza sativa
  unsure (1)..(135): unsure at all Xaa locations
  Clone ID: PAT_MRT4530_82552C.1.pep
WPIWKXHPPXKLVXLXKFXPXXXXXXXXPXPPXXXXXXXFXSPGGXXSSXXCSXPXXXXXPXXSXXXXGGGGGEPPSXPXXXSXXRXGXXYXXXXXXXEXTPXXPXXXXLXXSPPPLXXXVFXXKXXXXPFPPXX

SEQ ID NO: 185681 - protein, 103 aa, Oryza sativa
  Clone ID: PAT_MRT4530_82553C.1.pep
RKNIYWMVGSTNYTIHSTSHKFYNSIQNLDINSPKKKERGFCPSISKLYYMLKIEGGDRYFRAPSTGQGKKHLYGSRELVITKNNFDGPTKHFILIYGETMFL

SEQ ID NO: 185682 - protein, 147 aa, Oryza sativa
  unsure (1)..(147): unsure at all Xaa locations
  Clone ID: PAT_MRT4530_82554C.1.pep
PCTPVWIHGRRSAWHREAQPMATEAGSMREARAAEMEAGLAREARPXSGGGDLGVRRSCQWVXRGLGHTKAGRQGMPVQGSHMLAELVWWWSIGASAVHSQVWRSVTLSGGRSGANLLLGLCVGDVGMWVVVFFSFXWLRPSRVVIL

SEQ ID NO: 185683 - protein, 913 aa, Oryza sativa
  Clone ID: PAT_MRT4530_82555C.1.pep
METWLGCFYSKEKDLSDRGQWLNVGGEEPVVSYYFSPATGTGTRRRWRLEASAVGLGREETETKLDTMMGVFVPCLQNILGIIYYIRFTWIVGMGGVWQSLVLVAFCGSCTFLTTISLSAIATNGAMKGGGPYYLIGRALGPEVGVSIGLCFFLGNAVAGAMYVLGAVETFLDAVPSAEFFQESVTVVTNTFVNGTAAGNATTISTPNLHDLQVYGIIVTILLCFIVFGGVKIINKVAPAFLIPVLFSILCIYIGVFIAPRPNASKWITGLSITTLKDNWSSDYQRTNNAGVPDPNGALLGLYFPAVTGIMAGSNRSASLKDTQRSIPIGTLHATISTTMMYLLSVFLFGALSTREGLLTDRLLCAAVAWPSPAVVYAGIILSTLGAALQSLTGAPRLLAAIANDDILPVLNYFKAYEGSEPHVATLFTSFICISCVIIGNLDVITPTITMFFLLCYAGVNLSCFLLDLLDAPSWRPRWKLHHWSLSLIGALLCIVIMFMISWTFTVVSLALASLIYYYVSLKGKAGDWGDGFKSAYFQLALRSLRSMGANQVHPKNWYPIPLIFCRPWGKLPEDVPCHPKLADFANCMKKKGRGMSIFVSIIDGDYHESAEDAKTACRQLSAYIDYRRCEGVAEIIVAPSTSIGFRSIVQTMGLGNLKPNIVVMRYPEIWRRENLTQIPSTFVSIINDCITANKAVVIVKGLDEWPNEYQRQYGTIDLYWIVRDGGLMLLLSQLLLTKESFESCKIQVFCIAEEDTEAEELKADVKKFLYDLRMQADVIVVTVKSWEADPDRSGGSKKDDPEVYRSAQSRIRTYISQLKEAAERERRPLMEGGKQVVVDEQKVEKFLYTMLKLNATILRHSRMAVVVLVSLPPPPLNHLAYCYMEYMDLLVENIPRILIVRGYRRDVVTLFT

SEQ ID NO: 185684 - protein, 52 aa, Oryza sativa
  Clone ID: PAT_MRT4530_82556C.1.pep
MDGWMLAFWAESDGHDEESEASAQALEAGMEGGDGGGAEEEEFTSIDIDPRM

SEQ ID NO: 185685 - protein, 169 aa, Oryza sativa
  Clone ID: PAT_MRT4530_82557C.1.pep
MQAFSSVPQQLAILEPYIEGHMNEIRACNPRRPATWISKEQKRKFPECLKEKTCRSVNRLHRLATGPSSLMNSWQCKLSHKDDPCVLAEYVGQVFYVKDPSNERMDITVVGKQHIIGIDNTKDVSDYNQYDDVPLFTDIPNQIKRIETTLDEEKFSSVRKDGAAKIVKH

SEQ ID NO: 185686 - protein, 50 aa, Oryza sativa
  Clone ID: PAT_MRT4530_82558C.1.pep
GFSTLAIVYYDITETVSTIFGKAMLLIFEMCSMMPTKSQVDKHAEAAHAS

SEQ ID NO: 185687 - protein, 518 aa, Oryza sativa
  Clone ID: PAT_MRT4530_82559C.1.pep
MAELPLYLLLLALLVAVPFLCLTRWSLRHGGGGGGRLPPSPWALPVIGHLHHVAGALPHRAMRDLARRHGPLMLLRLCELRVVVACTAEAAREVTKTHDLAFATRPITPTGKVLMADSVGVVFAPYGDGWRTLRRICTLELLSARRVRSFRAVREEEVGRLLRAVAAAAAVAALTTPGATAAVNLSERISAYVADSAVRAVIGSRFKNRAAFLRMLERRMKLLPAQCLPDLFPSSRAAMLVSRMPRRMKRERQEMMDFIDDIFQEHHESRAAAGAEEDLLDVLLRIQSQDKTNPALTNDNIKTVIIDMFVASSETAATSLQWTMSELMRNPRVMRKAQDEVRRALAIAGQDGVTEESLRDLPYLHLVIKESLRLHPPVTMLLPRECRETCRVMGFDVPEGVMVLVNAWAIGRDPAHWDSPEEFAPERFEGVGAADFKGTDFEYIPFGAGRRMCPGMAFGLANMELALAALLYHFDWELPGGMLPGELDMTEALGLTTRRCSDLLLVPALRVPLRDHER

SEQ ID NO: 185688 - protein, 140 aa, Oryza sativa
  Clone ID: PAT_MRT4530_8255C.1.pep
MEKASFESAGKIKKWHYLSFMAVRCRKGTATSDHRHRLLRFPAHPPPPSPRLNTAGKVWADTGGCRHGRDSGGGGIESSYSCVASVLNVLGWHRRRRLDTRNLMDKLVARYPSPRSLATLAVKVKKKDWKLVTVAVHGGD

SEQ ID NO: 185689 - protein, 378 aa, Oryza sativa
  Clone ID: PAT_MRT4530_82560C.1.pep
LTKLASSISPEMAARVILLLILLIACVAVPAAAAFETVYAFGDSFTDTGNTHSTTGPYSFGYVSSPPYGATFFHRSTNRYSDGRLVVDFLADRLALPGFLPPYLSPAAANATHGVNFAVAGATAIEHEFFARNNLSVDITPQSIMTELAWFEAHLRRSPAAARAVGDALFWVGEIGANDYAYSFMAATTIPQDQIRNMAVDRLTTFIEALLKKGAKYIIVQGLPLTGCLPLTMTLARPEDRDNISCAATVNQQSHAHNRRLQASLRRLRRQHPAAVIAYADYYAAHLAVMAAPARYGFTEPFKTCCGAGGGAYNFEIFSTCGSPEVTTACAQPAKYVNWDGVHMTEAMYRVVAGMFFQDGRYCHPPFSTLLARRNKGN

SEQ ID NO: 185690 - protein, 124 aa, Oryza sativa
  Clone ID: PAT_MRT4530_82561C.1.pep
MPVKDGSGGVSSPLGAAARLGTKTRFGGGESPRRIDPSLHGWIRTGRDWQASVEVLAGWLAAVEAAALGRSSAPALHWPDPVPSSISGKGCRIPSVVTSKEALAAGKSARRRATGKTSGRRCQR

SEQ ID NO: 185691 - protein, 212 aa, Oryza sativa
  Clone ID: PAT_MRT4530_82562C.1.pep
MRTLPVSPSPLLFLLRPSQPPSPNLSDEINQRRGNVNRGIGASKVDFAGIKKKGDKGETNLTMATALARPPCVSVEVRLVVMRSTAVSVLTSPLPSLALSERKAAPYAAATREEAMTRTGTRTTQCAIAAMDQVLAHLTAGRSSPCTSSPSRAARGPPPTAPPMLACFRCQDLEKDETWQPEEEQNEREGADGWGPCCFSRGHATYVKVENN

SEQ ID NO: 185692 - protein, 77 aa, Oryza sativa
  unsure (1)..(77): unsure at all Xaa locations
  Clone ID: PAT_MRT4530_82563C.1.pep
FFFFFFCKPQLFSVSEFWSGSYQIHHSIVQSVWQAYVVTIERAKWEKKKKXSLTKWGGRGPFHEDRGRVKLWVGVKP

SEQ ID NO: 185693 - protein, 593 aa, Oryza sativa
  Clone ID: PAT_MRT4530_82564C.1.pep
MPLMLLKLCLRLLPLLLVLVAASHGASNDTYDTSMCLQETTTCGDVSIRYPFYFSDKTGYINGSSNSYCGYPGLAIDCDDGKPILQLNGAEKYKVNYINVGSITNVSLVDKEVVDDSSGCPRVDHNVTFAQGSWLFFPAGMSLDYLVFFLGCSFPNLFLPPENIDPITCSFIGLIGPSYVLPKDQVPPGNWSQFCKTFEVPVVKYQQMDPKGDAWRKGGYGQVLRQGFLLSVNDSRRPPNCTQCEESKGRVFKLKGENETFLKKYRHRRISKGTPRIESFLQRNGTLHPKRYTYTEVKRMTKSFAEKLGHGGFGAVYRGNLSDGRQVAVKMLKDSKGDGEEFINEVASISRTSHVNVVTLLGFCLHRSKRALIYEYMPNGSLERYAFRNNSKGELSLTWEKLFDVAVGIARGLEYLHRGCSTRIVHFDIKPHNILLDQEFCPKISDFGMAKLCANKESIVSIAGARGTIGYIAPEVYSKQFGAISSKSDVYSYGMMILEMVGARERNIEANSESSSHYFPQWIYEHLDEYCISSSEIDGETTELVRKMVVVALWCIQVVPTNRPTMTRVVEMLEGSTSGLELPPKVLLSCSAF

SEQ ID NO: 185694 - protein, 130 aa, Oryza sativa
  unsure (1)..(130): unsure at all Xaa locations
  Clone ID: PAT_MRT4530_82565C.1.pep
MYEIDRHSKEYRSGIANFINVAEKRKRRNNDDMTCDDTTCPCPDCKNEKMXDSRVDIYCHMIRQGFVKGYTCWTKHAEQESINIADAASSGQNQKEDEADMFVPSLLGGEMVDVNHDLLQAILHDVEESA

SEQ ID NO: 185695 - protein, 85 aa, Oryza sativa
  unsure (1)..(85): unsure at all Xaa locations
  Clone ID: PAT_MRT4530_82566C.1.pep
MVGCEHIVLMVVRMTIKDRFTSFGCETLTVPTTSQHGQRLYLLYSMVHCGALDXEVAEISSRGSLGSPCLVXYKGVIMIQERYTA

SEQ ID NO: 185696 - protein, 191 aa, Oryza sativa
  Clone ID: PAT_MRT4530_82567C.1.pep
MAVSMYIAIIMNIQEKHGRAVKHCTFLTLNGIIIWEKHARHVKRYTFLTLHGIIIWARCLSSLSSSIHVNARNVEAMYTAITMVVQEMHARHVKHYNFLMLHGLIIWARAFLPPGLPSSGIAHHGARHSSFRLCRSHTQTRATAAAVGAARPFEEAAMEHGTVEDSSASTFSIAEEEHTLANPARFVLNQE

SEQ ID NO: 185697 - protein, 187 aa, Oryza sativa
  unsure (1)..(187): unsure at all Xaa locations
  Clone ID: PAT_MRT4530_82568C.1.pep
SSCRRRPPPSPTVSQTPDLPPAPITDGLPDIGSAARSCHRRRIXAPMPSHRRRREGSRREREGRGRVPPDPPPPXSPPPTTPPSSPAVVPMVAGRRPPSPPPDRRSPPPQPPPLPSASSPPPPPLLPTAAVAAPSRHRSPPPHPDRRRSPPPPLSSASSPPPPPPPXSPPPSPHRHCRRSRFCVWRI

SEQ ID NO: 185698 - protein, 59 aa, Oryza sativa
  unsure (1)..(59): unsure at all Xaa locations
  Clone ID: PAT_MRT4530_82569C.1.pep
GPCRAGWLTNGSKSIPGATVXVECMHYGAGRESLNAEATTDXMGWFKVEIDQDHQEEIC

SEQ ID NO: 185699 - protein, 66 aa, Oryza sativa
  Clone ID: PAT_MRT4530_8256C.1.pep
SSLDKEASFNMYFAHIYTEIGKEIPMTTGLKVLRRKSRWPALGYARPDDICHKEAKTEPNTKPEEI

SEQ ID NO: 185700 - protein, 55 aa, Oryza sativa
  Clone ID: PAT_MRT4530_82570C.1.pep
MAEENRGNVGINSSFLLTVYLETPQLSDPPASDVVERRPVAGRLGPERIYTSYGM

SEQ ID NO: 185701 - protein, 801 aa, Oryza sativa
  Clone ID: PAT_MRT4530_82571C.1.pep
MVAAMMISPEDVPYEEDVLREPFRLRCWTRYLSAIRSAPLAKRSVIYERALRALPGSYKLWHAYLTELADAARAMPVAHRAHAALNSAFERSLAAGMSRMPRVWHMYFSALLDQRLLTRARRALDRALRSLPVTQHHRMWPLLLRLASLPGCPVPTAIRVLRRHLQFDPAHAEHFIAFLVSAGRWREAADHLAAAVNDDCFVSAKGRTKRQLLLDLCHLLAQHPEEVAGLPVDAILRGSVRRFPDEAGALWTCLAGHYARVGLHGKARDVFEEGVATATTVKDFRLVFEAYLHFENAMIDVELGEHGDAEENTLGQGCWLADRDDGDMALARLERLLERRPELLNRVQLRQNPHDVQAWHARAKLFDEDPARKVATYVEAVKTVDPAKATGKPPPHTLWLAFAKMYEDRGLLDSAREVLRRATQASFKAADHLAAVWCEWAEMELRQHNANRAIELIRQATSEPSLEVRRQVAAGVGETVVQTKLHRSLKLWCFYADLMETHGSPESTCAVYDRMHELGIITPLLVLRHASLLQEHKRFEDAFRVYERGVRTFKYPHDEAIWAAYLTKFVERHGASKPQRVRDLFDDAVRHAPAEKKAAVYMQYARFEEDFGLAKRVLKVYEEAAAAVPGGDKLAVYEAYVARATALFGVLKAREIYHQAILHGGGLPDADARVLCLQFADLEIGLGEAHRARALYVYASGFTDPTAHPDFWRRWNDFEVRHGDECTFREMLRVKRTVAAANAGAGAVAQLAEQVLADDAMEQMDAAVAAPKRPLLACAAQQADHASGFDEECKRRRLVYV

SEQ ID NO: 185702 - protein, 86 aa, Oryza sativa
  Clone ID: PAT_MRT4530_82572C.1.pep
MGAADRGGGGAEWGRWRKPNGGGGADWGRTRWGSGRGGGRRRRRSRCGGTLVSPLPMPLPASPSSVNTDTGRLERSIRSDDKDTRG

SEQ ID NO: 185703 - protein, 91 aa, Oryza sativa
  Clone ID: PAT_MRT4530_82573C.1.pep
DLQATWSHFIQFSVVTHAIFLRLEPFWSSDIKCNIRTAPLQLQIRSTIFVVLFQNISQACKVNYFTFPSVIFPFSTTFTSKHSHCVTNFGL

SEQ ID NO: 185704 - protein, 100 aa, Oryza sativa
  unsure (1)..(100): unsure at all Xaa locations
  Clone ID: PAT_MRT4530_82574C.1.pep
YGLISGLIGSFSMALGSFPCALFLFLFPLFFSLGFVLFDWWRSLRPSLRRPCLFPSFSVFLFFIFIIPSLFFXLSCVVFEVLSLFSGTFAVSSSFARFLF

SEQ ID NO: 185705 - protein, 81 aa, Oryza sativa
  Clone ID: PAT_MRT4530_82575C.1.pep
NPLLPFHDRKNGFPTISSILSKKNPPKSRGIDAVSSCYFPVNPKLNRLRFPSNPHRSLPSSDSLSPPLLELPCPSRRLSPR

SEQ ID NO: 185706 - protein, 40 aa, Oryza sativa
  Clone ID: PAT_MRT4530_82576C.1.pep
MVRKAKVEFDESAPDDFDPKNPYGDPVVMLEYREHLLREM

SEQ ID NO: 185707 - protein, 560 aa, Oryza sativa
  Clone ID: PAT_MRT4530_82577C.1.pep
MMQIFSLKLAEISNFATRAPGAGAIQLYGFMAVRNLLDPLRNYVFNRTRDNPFTIGDVSYPFIQMTGPKRGIAMNARVMIEYDMRIKMGESEQDDLLLVDGAATFSEITNFIPYIYRINGDCGMAVDIRLAHFSRAIEATAQVWYCRARAGPAWHGPFGQVYAGVSGGWADVASAVVMGGWRRSDCRRPASDDHEGTAVASLPSSRKRKAAKDLEEEEEDLQPEEEARPPAPPAKGRSCLPAACHEDGIIPAFVIPGSKHRDGSIYRTDAHYWHGLYHLDDTSEKQDCRPCVTDCQWHIGCSMMQIFSLELAEISNFATGAAGAGAIQLYGFMAARDLLDPLRNYVFNRTRDDPFTIRDVSYPFIQMTGPKRGITMNSRVMIEYDLRIKRGENEQDDLVLIDGAATFSEITNFIPYIYRIHGDCGMAVVNEMWASWELPEGSISAGAVLNCKLYDFCGEERDLSEMDAAHLIREFDITELDKAGSYLKDVLFYMSQKRQYPNRAGPTPLPWGIDSPTNADDTVIFIPYLAVTKFLLYCFEDMSGLKINYDKGKVFAVGLE

SEQ ID NO: 185708 - protein, 81 aa, Oryza sativa
  Clone ID: PAT_MRT4530_82578C.1.pep
MPYRPWPTSPPRLAAWERNKGTTVTRERNNSSGAAGQNWYPAIPISVAMWPLEICPDPTVKIRYRKVVATCKYLNREIKLI

SEQ ID NO: 185709 - protein, 210 aa, Oryza sativa
  unsure (1)..(210): unsure at all Xaa locations
  Clone ID: PAT_MRT4530_82579C.1.pep
MDKVTPSTIVGPSPVAGITVDKSVEFSYEELSNATQGFSIGNKIGQGGFGAVYYAELRGEKAAIKKMDMQATHEFLAELKVLTHVHHLNLVRLIGYCIESSLFLVYEFIENGNLSQHLRGMGYEPLSWAARIQIALDSARGLEYIHEHTVPVYIHRDIKSANILIDKNYRXAKVADFGLTKLTEVGGTSMPTGTRVVGTFGYMPXEYARY

SEQ ID NO: 185710 - protein, 111 aa, Oryza sativa
  unsure (1)..(111): unsure at all Xaa locations
  Clone ID: PAT_MRT4530_8257C.1.pep
MYPPSPPPRRGMRIGGSDTGPGRGCAGRGGGEAHKFGRAPKKRDITKNYEILGVPKTGSXDDLKKADRMAVMKNHPYKGGDPEKFKELAPAYEELSDPGKPETYDQDGENA

SEQ ID NO: 185711 - protein, 254 aa, Oryza sativa
  Clone ID: PAT_MRT4530_82580C.1.pep
MAMSSRLALCLAVVAACAAGGAVADWSPATATFYGGSDGSGTMGGACGYGNLYDQGYGVDNAALSQALFNDGASCGQCYLIVCDTSRAPQWCKAGTAVTVTATNLCPPNWALPSDGGGWCNPPRPHFDMSQPAWEQIGVYQAGIVPVLYQRVRCWRQGGVRFTVAGLNYFELVLITNVAGSGSVASAWIKGTNTGWIQMSRNWGANWQSLAGLAGQALSFAVTTTGGQYLQFQDVAPAWWQFGQTFSTYQQFDY

SEQ ID NO: 185712 - protein, 326 aa, Oryza sativa
  Clone ID: PAT_MRT4530_82581C.1.pep
MELELKLCQCQTGLQIGRDRSNEQADGRLWPTRIVCDSPSYQEKKGNATAINHAAPPAISMPIITGVSLRFSCGGNPPRNLHPWGPVGPGLLGSVQIGAFTDGPPWAACEANYSYIYVPYTLDMDNIRGATCSPAGGRLHDARRRSHPRVGRVCRCRRPRFDRRAHGHPSSTEFLVARGTPLIGIFIITAGMPRHRRLVSSSIPLDGHTTVDGRICFHCRLAFVAVDWCPRLYGWLVTPPLMGVYALTIDCLHRRQPVSSLTWLVRHTTIVGHLHLYRRPPSSPPTGFFASTRLVYSAAIADGDHVLTIGCRQRLSRPKTTLKYIL

SEQ ID NO: 185713 - protein, 151 aa, Oryza sativa
  Clone ID: PAT_MRT4530_82582C.1.pep
MGHFLGRKTSPCRMWAQDDDGDGFNEEKDEHLTIAAPPPFPPSSALPTDLDDVLFFLLSPETHGSREVMRPTAVAAADLPTPWPVVFDGVLPWAATAAAELSICLVNGVSDDVLKRGRGGEALTRFPHEQVAELGMGLADSGVNFVWGRRG

SEQ ID NO: 185714 - protein, 71 aa, Oryza sativa
  Clone ID: PAT_MRT4530_82583C.1.pep
HPASPLRPQPSSSPPVFIGGRPPANATPSSQRPSQLAQRRHQGVARRRDNPQVHPSLPVSSPSTAVPIDDE

SEQ ID NO: 185715 - protein, 56 aa, Oryza sativa
  Clone ID: PAT_MRT4530_82584C.1.pep
KVNGEGGKKFFGEKKNGALENSKGPVEKELKFHPFFYPLGIKSWGYHGKNSKGGKF

SEQ ID NO: 185716 - protein, 248 aa, Oryza sativa
  Clone ID: PAT_MRT4530_82585C.1.pep
MALVPATSDPARGSSGSAFLYPQLTATNYTSWVIRVQAMMEDQGVWEVIEPAAGAAVDPQKDKKAKSHLLQSLPEDLLMQTLKGEFGAMVMEPGETLDQYAGRITTMSVRHSALGSTLSDAAMVKKLFDTVPEKFVNLVTEAVGRLKAYEERVRKKKAAAGGVTTDGQVLLTQAEWEARFKKDGGESSSPQKGKASGEGAKGGQSGRGRGRGRGAGGRGGAARGNSASGSGGGGRDKSHIKCFNCEEY

SEQ ID NO: 185717 - protein, 39 aa, Oryza sativa
  Clone ID: PAT_MRT4530_82586C.1.pep
GSWYWCVFMELLHWHGATSMIHRSASAGDVDELRYLTVG

SEQ ID NO: 185718 - protein, 71 aa, Oryza sativa
  unsure (1)..(71): unsure at all Xaa locations
  Clone ID: PAT_MRT4530_82587C.1.pep
EIDPXQRXPGVXGXXCRSXETSERATXXHXAXSPPFLXIAKPTARVERXMXXRRXXWRRXGWRAXPEXRGG

SEQ ID NO: 185719 - protein, 139 aa, Oryza sativa
  unsure (1)..(139): unsure at all Xaa locations
  Clone ID: PAT_MRT4530_82588C.1.pep
MWLGSSMMSLTSVVGYYEAPSPRRPPXPRDAPPPRPASRRCASRPTRRALPPRGRQPPPRRPGLRVPPPSRRLPPQAAASPRDAPPPRRPEVLPCPAALAPAAASLRAAPAGPPRPTALGLLERRRGEGEEDKVEERKK

SEQ ID NO: 185720 - protein, 1360 aa, Oryza sativa
  Clone ID: PAT_MRT4530_82589C.1.pep
MALVPATSDPARGSSGSAFLYPQLTATNYTSWVIRVQAMMEDQGVWEVIEPAAGAAVDPQKDKKAKSHLLQSLPEDLLMQVAKKRLAKETLKGEFGAMVMEPGETLDQYAGRITTMSVRHSALGSTLSDAAMVKKLFDTVPEKFVNLVTGIEQFYNVDDMPFEEAVGRLKAYEERVRKKKAAAGGVTTDGQVLLTQAEWEARFKKDGGESSSPQKGKASGEGAKGGQSGRGRGRGRGAGGRGGAARGNSASGSGGGGRDKSHIKCFNCEEYGHYSNQCPHPKKKKGEAHLAQTEDAGAALLLAVTENAPVQATQEMFVHEDRVWPNLLLADGGAVAGNVWYLDNGASNHMTGDRKKFRELDESITGSIRFGDASSVQIKGKGSVLFSCKNGDQWLLQDMYYIPSLCCNMVSLGQLTKTGHRVVMDEDVLEVFDKCPWRLVMKVRHTTNRLYRIELNLAYPVSLLSSLDDPAWLWHARLGHVNFQAMKLLVDKGMEVDVPAIVHPNQLCQVCLVAKQIRASFPVVVNYRAEEPLELIHIDLCGPISPATMAGNKIKQWRPSPSFKPLAENVAGRRIKTLRSDRGGEFLSGEFAQVCESAGIQRHLTAPYSPQQNGVVERRNRSVMAMARSLLKGMSVAGRLWGEAVRYAVYILNRLPTKAMGNRTPYEAWMGKKPHLAHLRVFGCTTHAKITTPHLKKLDDRSAPYVYLGVEEGSKVQRLFDPRRGRIHWLGDAGEQVSVEFDVEEIVEPPAGSATSLPGAIPRYQAPSPGNRPGKEPVVVEEEASSPAGTMEASPSLPTTPATPIGEQSTPHSAGEIDTDGAPVRYRHIADIMRDAPRVDLVDDEQDGEALLAEMEELSAYHEAAGHPAWEDAMAMEMDAIECNGTWELTTLPAGHRAIGLKWVYKLKKNTAGEVHHLDVKSAFLNGELEEEVYVAQPEGFVKQGREHLVLRLNKALYELRQAPRAWNIRLDRCPKQLGFERCTQEQAVYTRGTGSGGVIVGVYVDDLIVTGENPVELKMFKEQMMGEFEMSDLGLLSFYLGIEVDQGENGTTLKQTAYARKVLSQFGMLECNSTSIPIDPRMQLNKVADGHPVDATEYRRVISCLRYLLHTRPDLSFAVGVASRFMERPTLMHFKAVKQILIYLKAGNGDMQITGYTDSDLAGDVDDRRSTGGMAFYINGSLVAWSSQKQKTVALSSCEAEFMAATAAACHALWLRALLVEIVGGPTKVVKLFVDNKSSIALMKNPVFHGRSKHIDTRYHFIRECFDGGQVVIEFVRTEEQRADALTKVATVEGISLRLLADANDAVIESEEDRVGSIRVREFSAVNENHRKLAPQISYLLLFSETSQFPVFLFCSVFL

SEQ ID NO: 185721 - protein, 54 aa, Oryza sativa
  Clone ID: PAT_MRT4530_8258C.1.pep
FTHSTGILIRWLSIITHKRLISYVKEKCTLGPYVSHSVFSSTYFSRASCYLFHM

SEQ ID NO: 185722 - protein, 1394 aa, Oryza sativa
  unsure (1)..(1394): unsure at all Xaa locations
  Clone ID: PAT_MRT4530_82590C.1.pep
MALVLATSDPARGSSGSAFLYPQLTATNYTSWVIRVQAMMEDQGVWEAIEPAAGAAVDPRKDKKAKSHLLQSLPEDLLMQVAKKRSAKETLKGKFGAMVMEPGETLDQYAGRITAMSVRHSVLGSTLTDAAMVKKLFDTVPEKFVSLVAGIEQFYNVDDMPFEEAVGRLKAYEERVRKKKAAAGGVTADGQVLLTQAEWEARFKKDGGESSSPQKGKASGEGAKGGQSGRERGRGRGAGGRGGAARGNSASGSGGGGRDKSHIKCFNCEEYGHYSNQCPHPKKKKGEAHLAQTEDAGAVLLLAVTENAPARATQEMVVHEDRVWPKLLLADSGAMAGNVWYLDNGASNHMTGDRKKFRELDESITGSVRFGDASSVQIKGKGSILFSCKNGDQWLLQDVYYIPSLCCNMVSLGQLTETGHRVVMDEDVLEVFDKCPWRLVMKLCQACLVAKQIRASFLVVVNYRAEEPLELIHIDLCGPISPATMAGNKYFVLIVDDFTRWMWVFVIKSKDQAVEAFTKFKPLAENVAGRRIKTLRSDRGGKFLSGEFAQVCESAGIQRHLTAPYSPQQNGVVERRNRSVMVMARSLLKGMSVPGRLWGEAVRHAVYILNRLPTKAMGNRTPYEAWTGKKPHLAHLRVFGCTAHAKITTPHLKKLDDRSAPYVYLGVEEGSKAHRLFDPRRGRIHVSRDVIFEENAVWQWLGDAGEQVSVEFDVEEIVESPAGSATSLPGAVPRYQAPSPGRRLGKEPVVVEEEASSPAGTAEASPSLPTTPATPIGEQSTPHSAGEIDTDGAPVRYRHIADILRDAPRVDLVDDEQDGEALLAETEEPSAYREAAGHSAWEDAMAMEMDAIERNGTWELTTLPAGHRAIGLKWVYKLKKNTAGEVIKHKARLVAKGYVQRQGVDFDEVFAPVARLDTVHHLDVKSAFLNGELEEEEQAVYTWGIGSGGVIVGVYVDDLIVTGENPVELKMFKEQMMGEFEMSDLGLLSFYLGIEVDQGENGTTLKQTAYARKVLSQFGMLECNSTSIPIDPRMQLNKDADGHPVXITGYTDSDXAGDVDDRRSTGGMAFYINGSLVAWSSQKQKTVALSSCEAEFMAATTAACHALWLRALLVEIVGGPAKVVKLFVDNKLAIALMKNPVFHGRSKHIDTRYHFIRECVDGGKVVIEFVRTEEQQADALTKVATVEGISLRLLADANDAVIESEEDRVGSVRYARKVFDRGSSTNTYGVRVVALHADTAAARTIDLPPGCVDRMLGCSNAKSMSELMLVMSRGGAVLSLVMAEREVISVWTLEEEAAAVERWSRQVVIARVAIDRSVEARRLYQTVFFEGFGERSGTVLMRIVNVGLVQLAVATKKAIVVRDSGAGKWWGRSMSRACLHEMNLYSLLQSMKPF

SEQ ID NO: 185723 - protein, 161 aa, Oryza sativa
  Clone ID: PAT_MRT4530_82591C.1.pep
CQIHWQAVDPAFGLPPVDPTAQSLAGAEDSELARRLRGPAVAMGKRLSFMNAYLAEDCNPVRCWVITAAVAFVTLIVLGVGSVDDTPVELPKKLYIGPPSAKTIQLPDGRHLAYKEQGVTADRARFSLIAPHYFLSSRLAGIPGIKPSLLEKFGARLVIIN

SEQ ID NO: 185724 - protein, 63 aa, Oryza sativa
  Clone ID: PAT_MRT4530_82592C.1.pep
PQSDQKFLSSTGASAPAIVNRFAISLKAFFKSFTRSMVTIGNMQPLTGSQGQVRNSCTFVNGS

SEQ ID NO: 185725 - protein, 342 aa, Oryza sativa
  Clone ID: PAT_MRT4530_82593C.1.pep
MANATVVASSWIPLLCLVVVVLSACTAVSSAVECNGDDRAALLRVKAQLGDPVRLSSWRPSTNCCAWEPAVFCSGEPGRVTGLALFSLAGVAAPVPPALGELTGLAVLQIASVRGMSGPIPPSFANLSLLEDLDITGTSISGPVPASYLAGATNLRTLVIADSRLAGPIPPSLAGDHPNLRYLDLSGNFLTGAIPPGLVHGSFRFLILSHNQLTGEIPRCYGDVDTVDLSHNRLTGDPSPHLFGIAAPAAKIDLSWNELAFDMTGVRFPHHLRYLDLSHNRITGKVAKSLMDVRLEHLNVSDNELCGEIPAGRFMAAHGADCYARNRCLCGAPLPPCCDGGL

SEQ ID NO: 185726 - protein, 79 aa, Oryza sativa
  unsure (1)..(79): unsure at all Xaa locations
  Clone ID: PAT_MRT4530_82594C.1.pep
PRRGVQTRCSSASARASXIDTHARLPQGVEQASTLPIKLSQRSPSHTLPLGHDNPIIEEERRLKIKENEPASCIFKTKK

SEQ ID NO: 185727 - protein, 571 aa, Oryza sativa
  Clone ID: PAT_MRT4530_82595C.1.pep
MDLLRFMGIGGVLNGHLVFPATSQLYRYEYPLPARVWVWGWFVPATGALRVWIWDSAHLQADLLGSPVIRPSEPLELQKQLELAAGIWIKAVERALGRGPGDPAAQSLAGAEDSELARRLRGPAAAAGKRLSFMNAYLAEDRDPVRCWVVAAAVAFVTLIVLGVGSVDDTPVELPKKLYIGPPSAKTIQLPDGRHLAYKEQGVTADRARFSLIAPHSFLSSRLAGIPGIKPSLLEEFGARLVTNDQPGFGESDPHPGRDLNSSAHDMLHLAGALRIVDKFWVVGYSAGSIHAWSALRHIPDRVAGAAMFAPMANPYDSKMTKEERRKTWERWSTKRKLMHILARRFPALLPLFYHRSFLSGKQGQPESWLSLSLGKKDVAESVRQGDAQPFVEEAVLQVSDWGFSLSDIQMQKREDLSFFELIKSLFRQAEREWVGFLGPIHIWQGMDDRVVPPSVTEYVRRVVPGATVHKLLDEGHFSYFCFCDECHRQIFSTLFGIPQGPINPVPEPIEVASELTEETTVPDKAKEEEQDISDLIFGGGDEQSDEAPSLMNNVMGVFSSVSRFMRVISK

SEQ ID NO: 185728 - protein, 138 aa, Oryza sativa
  Clone ID: PAT_MRT4530_82596C.1.pep
HASDSILSGVLKVSGFVTSTVLNSKPAQKFFKLMLGEVILASLDGFGKVWDAVEVSGKNVMRTSSVVTTSVVTHRYGDQAGQVTQDYLHASGNALGVAWAVFKIRKALDPKGNLKKSSLASAAAHAVAKESISRQRRK

SEQ ID NO: 185729 - protein, 315 aa, Oryza sativa
  Clone ID: PAT_MRT4530_82597C.1.pep
MGPGSNNSFPAEKRVAVVTGGNKGLGLEICKQLAANGVTVVLTARSEERGAGAAAALRQLGLSEVLFHQFDVSEPSSAAGLADFIKHKFGKLDILVNNAGILGVTFDFGNLDLNKAIEGKSANETLEWLMQHTVETAENAEECLKINYHGNKKTIQALLPLLQSSPDGRIVTVSSVFGQLSFFSGEKLKEELNDFSKLSEERIDELAELFVRDFKDGELESRGWPARADAFAAYKTSKALQHAYTRVLARKHASSSSSPLRVNCVHPGYVKTDMTLGTGELTVEEGAAGPVALALSPPGGATGVFFIQTEPASFV

SEQ ID NO: 185730 - protein, 100 aa, Oryza sativa
  Clone ID: PAT_MRT4530_82598C.1.pep
MWGSRGAHAKSAATNDLLPTSVLVDASVTGLYVVGPSGQQLRPEGPNATVAVSFAIGRACWATVVFGPRPCPPELAPPSLGSKSLQQGAAPASSYENLLL

SEQ ID NO: 185731 - protein, 63 aa, Oryza sativa
  Clone ID: PAT_MRT4530_82599C.1.pep
TTATVAWTSLGGDSYGGGGSQARASRSGGIRASREGSFVLLAAETDYDGNLPSSLRLRLRPPI

SEQ ID NO: 185732 - protein, 86 aa, Oryza sativa
  Clone ID: PAT_MRT4530_8259C.1.pep
VLFRGALMPIFGLNWISAFVTSAIFGILHLGNGRKYSFAIWATFVGVAYGLATIASSSIIVPMASHSINNIIGGLIWRFTNNTERE

SEQ ID NO: 185733 - protein, 65 aa, Oryza sativa
  Clone ID: PAT_MRT4530_825C.1.pep
MAAPASHYTAAPFLTPAGCQHAHRPHTRWDYNADVLLLSYPGPLLLLPGAQDVGGGSAGVPVFSP

SEQ ID NO: 185734 - protein, 243 aa, Oryza sativa
  Clone ID: PAT_MRT4530_82600C.1.pep
ISVFGSRPTTPHGSVRPMPTIANSVLLFVQIDAVASRHGRRRVAAIASQAAGSSDPPRSDGMRVKNKVRSYRLRIFSNKSKQLIMKYKLIYRASSLIKTNMTKSPGSCQTMENTRSLRLIKRNVWNHGHQLQHLNIEILGSPKCKFYAWLVIQNRVWTSDRLVARGWPNNGACPLYRTTNESASHLLVHCRYTRRIWSMTATWVAYHNWIQANGICVRASKTGGKCYPISRVSPRKACEPLPY

SEQ ID NO: 185735 - protein, 70 aa, Oryza sativa
  unsure (1)..(70): unsure at all Xaa locations
  Clone ID: PAT_MRT4530_82601C.1.pep
FSSYVITASSVARSLSGLPPLQTPISPSHVXSRLLTAHHNHXLIISKCDRTSLFVLFKKESALLSSPGHA

SEQ ID NO: 185736 - protein, 67 aa, Oryza sativa
  unsure (1)..(67): unsure at all Xaa locations
  Clone ID: PAT_MRT4530_82602C.1.pep
GGTPXSLQRRDRKPQHKLASPPSNCLXRHNTNLQACHYQCNSCLRTGARSINIMIFRSRSYSNYMQX

SEQ ID NO: 185737 - protein, 515 aa, Oryza sativa
  Clone ID: PAT_MRT4530_82603C.1.pep
MASSGFSWTLPDHPKLPKGKTVALVVLDGWGEANADKYNCIHVAQTPVMDSLKNGAPERWRLVKAHGTAVGLPSEDDMGNSEVGHNALGAGRIFAQGAKLVDLALASGKIYDGEGFNYIKECFDKGTLHLIGLLSDGGVHSRLDQVQLLLKGASERGAKRIRVHILTDGRDVLDGSSVGFVETLESDLSQLRDKGIDARIASGGGRILSLKNAQNDWDVVKRGWDAQVLGEAPYKFQNAVEAVKTLRAETKASDQYLPPFVIVDESGKSVGPVVDGDAVVTFNFRADRMVMLAKALEYADFDKFDRVRVPKIRETVKFGHVTFFWNGNRSGYFDETKEEYVEIPSDIGITFNVKPNMKALEIAEKARDAILSGKFDQVRVNLPNGDMVGHTGDIEATVVACKAADEAVKIILDAIEQVGGIYLVTADHGNAEDMVKRNKSGQPLLDKNGGIQILTSHTLQPVPVAIGGPGLHPGVKFRSDIQTPGLANVAATVMNFHGFEAPADYEPTLIEVVDN

SEQ ID NO: 185738 - protein, 559 aa, Oryza sativa
  Clone ID: PAT_MRT4530_82604C.1.pep
MASSGFSWTLPDHPKLPKGKTVALVVLDGWGEANADKYNCIHVAQTPVMDSLKNGAPERWRLVKAHGTAVGLPSEDDMGNSEVGHNALGAGRIFAQGAKLVDLALASGKIYDGEGFNYIKECFDKGTLHLIGLLSDGGVHSRLDQVQLLLKGASERGAKRIRVHILTDGRDVLDGSSVGFVETLESDLSQLRDKGIDARIASGGGRMYVTMDRYENDWDVVKRGWDAQVLGEAPYKFQNAVEAVKTLRAETKASDQYLPPFVIVDESGKSVGPVVDGDAVVTFNFRADRMVMLAKALEYADFDKFDRVRVPKIRYAGMLQYDGELKLPSHYLVSPPEIERTSGEYLVKNGVRTFACSETVKFGHVTFFWNGNRSGYFDETKEEYVEIPSDIGITFNVKPNMKALEIAEKARDAILSGKFDQVRVNLPNGDMVGHTGDIEATVVACKAADEAVKIILDAIEQVGGIYLVTADHGNAEDMVKRNKSGQPLLDKNGGIQILTSHTLQPVPVAIGGPGLHPGVKFRSDIQTPGLANVAATVMNFHGFEAPADYEPTLIEVVDN

SEQ ID NO: 185739 - protein, 89 aa, Oryza sativa
  unsure (1)..(89): unsure at all Xaa locations
  Clone ID: PAT_MRT4530_82605C.1.pep
XXIHXXFXNISXXDXXLVSSKFXLVXXXXXXVGFXXXXHXPKENWFWXGFRXXSVSLNPTXXYGFAXFISFXQAXGSEIIFXSHXLGXQ

SEQ ID NO: 185740 - protein, 91 aa, Oryza sativa
  Clone ID: PAT_MRT4530_82606C.1.pep
PRIITGLNKVIGGAKAERASWGRGALGWGFPMGFGLGVYGHYRGGASRHSKGEADVLLFKGSLTCLATGIRELFGGKRHLLREQEGRPRHD

SEQ ID NO: 185741 - protein, 70 aa, Oryza sativa
  Clone ID: PAT_MRT4530_82607C.1.pep
TFLGPHPHPKTQTNPRTTPLFRPALNFTLSLSQFFYHCRSRDCWFLGLILWSVASSLGVLIWGGSSSLSQ

SEQ ID NO: 185742 - protein, 82 aa, Oryza sativa
  Clone ID: PAT_MRT4530_82608C.1.pep
HRSQHEVAWRVASAQDRVAQHICETAGSWLSTRGRSPPCAADPPPRWGRGPGPACKLARPPLPCLSIRHRSSAQAHPCIYAR

SEQ ID NO: 185743 - protein, 81 aa, Oryza sativa
  Clone ID: PAT_MRT4530_82609C.1.pep
HGKSSAVMQVSAPGVSARYTDVSAYVGLGLQPECRVFPCARLSSRCIGLVEPAAHWVLAMQYSLLLTEKKRTTRPAAPNDA

SEQ ID NO: 185744 - protein, 295 aa, Oryza sativa
  unsure (1)..(295): unsure at all Xaa locations
  Clone ID: PAT_MRT4530_8260C.1.pep
MAAMLAPAALPPRGLQSKAVGNAESQLLLHGKGCIVADAIIFAAKSNERRRKSQSISQGPTFISEEASSSGSGENPTTSLEVNANDVTTDEKFTVAPRNAVLQACTLTSSLLLAGGLVLREASHFASLNGWPVADPMNLSFNFETWHLELIAGLVIIISSSRYILLQTWPDFRYSSETANRQILTSLETFDYIVVACLPGISEEVLFRGALMPIFGLNXISAFVTSAIFGILHLGNGRKYSFAICCAVTEATFVGVAYGLATIASSSIIVPMASHSINNIIGGLIWRFTNNTERE

SEQ ID NO: 185745 - protein, 146 aa, Oryza sativa
  Clone ID: PAT_MRT4530_82610C.1.pep
YRLASTPAGRPPPCCGAASPPHRPAPTALPDAAPPSRPSAPLPAAAPPPLNADRPPRRRRGPPRCCPPSHQLPLRAGRPPPPVPPRCRTSRRLPPGPLSLQAAGRSRSDPSGAKEEGRTLTFIPLTCLEKYFNNISVLFDFTNTPP

SEQ ID NO: 185746 - protein, 65 aa, Oryza sativa
  Clone ID: PAT_MRT4530_82611C.1.pep
FFFFFFFFFFFFFFFFFFFFFFFFLGKGPMKDKILYTRPKPHNSKFSFEQTVMLDSIGQGGSEIL

SEQ ID NO: 185747 - protein, 104 aa, Oryza sativa
  Clone ID: PAT_MRT4530_82612C.1.pep
HSQVTTFHPHWVFFFLFFSTMEAKLLASAPTKDAHDRISHSLIQDANRTPRKKINKPRYFFSLISFLECMNARTMANEDHHHQSQKPHPRMTSQENPSLSLYTK

SEQ ID NO: 185748 - protein, 270 aa, Oryza sativa
  Clone ID: PAT_MRT4530_82613C.1.pep
MGMRRTPSTVAGGGQPPELDHRSDGGSVARVIPELSRRRQSNLRTAASSWYRAQSPELDATGGGLIYDEKATCGQCSRARPWQRSEQPGGAGRGRGGRGGFNGAGKTPAVEDVALDSSSAPARHTTRVSGYEGNNVEGRRYKGLYPLPPSSPHPLQRLFTDVIFVEMRMIKGASNRTRRIGWFQKGIFLQYSGQPIWHKLADKTIPPHARDRDSRAGRGGAARPGSLVSAWGKAATARAGARRQRRYGSSRRCASKGGAAALRKGDAAHE

SEQ ID NO: 185749 - protein, 239 aa, Oryza sativa
  Clone ID: PAT_MRT4530_82614C.1.pep
MGSAPVIHHLMGEDLRDAHALGTRSQARPERSSQFQTVERRRASHHRDGTGHTCRTPPNTRPERAWLAAVPSIIRPVTYRSQASQARSTPHLMRRGALALPALNSVRWALGSVHLTSLAWRPRGDCREGSGSPTPRARKGRLPPIHGPDPLGGKRHVDVGVRPLLFKLGTPGPTSPTSGVSGEVNLNIRLIIVAVEHQEAAKQRSVYDQFIWWNSKRCNPNPTPAPVALTNASLRHQYL

SEQ ID NO: 185750 - protein, 111 aa, Oryza sativa
  Clone ID: PAT_MRT4530_82615C.1.pep
DVHHSRWWEEYWFAEPRTTLVHYHTPSLTHVRRWANAYGWIRNSDIHRSGKRAFITLCYEPHSWNSALSLHASWDTTAGSWRVRLCLPGPLARDGEPGLMGYFVGRLTGST

SEQ ID NO: 185751 - protein, 671 aa, Oryza sativa
  unsure (1)..(671): unsure at all Xaa locations
  Clone ID: PAT_MRT4530_82616C.1.pep
NADHLQYDPGLRSPITSYDVNEQDAVRRAYILKGPNQCYPHDFPVREIYGKKCHFSFVWFHKXQWLEYNVTKDAGFCIVCYLFGSGTSNFVKDGWRNWNKADTLDKHVGGITSAHNKAQEKYNLFVSGGCLRYLLNQGLAFRGHDESEESSNKGNFIELLKWLAENNKEVDRLVLKNAPGNCILTCSXIQREIIHCCADETTKHIIEELGDDHYAILADECSDLSHKEQLALCVRYIDKLGRVCQRFLGVVHVASTTSATLKKAILTLLSDHHLTPSQICGQGYDGASNMKEKINGLKTLIMIFTQVSHLLNIVGTSCKRHDMLRDVRAQKIMEALELGEIESGIGLNQDMGLARPGDTRXGSHYKTILHIXIGMYPTIHELITLGKDPTQREDWPRIHAMVGAFESFDFVFSAHLMLVILGYKNELCLCLQKRDQDTINAMSLVTLAKERIQKLRSEGWEEFFQRTVVSLCNKHSIQVPTLDEKYVPHGRPPRFYPDQTNDDHFRREVYIGVIDKISQELNSRFDEVNMELLICMSALNPFNSFASYDAXXVLKLAKFYPKDFSPMDLIRLELQLGTFIDNMGKDERFKGLETLAELFIKLVETNKHVLYDWVYLLLKLVLILPVATASVDRVFSALSVVKSKLRNSMCDKLLNNCLIIFIERDIFSQVS

SEQ ID NO: 185752 - protein, 277 aa, Oryza sativa
  Clone ID: PAT_MRT4530_82617C.1.pep
MHKTAQAWFTGGPAAPAASAGESQPSLLADWNSYAASRPDASSSSPLPFDIEAAVRSANDTVSGTFSVVTKGVRELPGSFQSATSSFPSGKALMYFGLFLATGIFFVFIAFALFLPVMVIMPQKFAICFTLGCGLIIASIFALKGPASQFAHMTSMERLPFTGALIGCMVGTIYVSMFLHSYFLSVIFSVLQFFDSMMPIPPTSSLHINNAMKHIGHIFVLSLAYYTISYFPGGSSGLKFISSSLLSSVTSCFGRLRSIRGEKRGPLMTQLYIVSSS

SEQ ID NO: 185753 - protein, 811 aa, Oryza sativa
  Clone ID: PAT_MRT4530_82618C.1.pep
MKRNGDIASLFRKHEAKAKKRADLIDEEAQIEEEEPPLVEPHPVPTPVVEATNEEQDAPPEYDADHLQYDPGLRSPIASYDVNEQDAVRRAYILKGPNQCYAHDFPVREIYGKKRHFNFVWFHKYQWLEYSVAKDAGFCMVCYLFGSGTSNFVTDGWRNWNKADALDKHVGGITSAHNKAQEKYNLFVSGGPSIDNVIVKVSNESEIHYKARLTYSLRCLRYLLNQGLAFRGHDESEESSNRGNFIELLKWLAENNKEVDRLVLKNAPGNCILTCSSIQREIIHCCADETTKRIIEELGDDHYAILADECSDLSHKEQLALCVRYIDKLGRVCERFLGVVHVASTTSAALKKAILTLLSDHHLSPSQIRGQGYDGASNMKGKINGLKTLIMKESPSAYYIHCFAHQLQLVLVSVAKGNDDCVWFFTQVSHLLNIVGTSCKRHDMLRDVRAQKIMEALELGEIESGVGLNQEMGLARPGDTRWGSHYKTILHIIGMYPTIHEVLITLGKDPTQRDDWPRIHAVVGAFESFDFVFSAHLMLVILGYTNELCLCLQKRDQDIVNAMSLVTLAKERMQKLRSEGWEEFFQGTVVSFCNKHSIQVPTLDGKYVPHGRSPRFYPDQTNDDHFRREVYIGVIDKISQELNSRFDEVNMELLICMSALNPFNSFASYDAQQVLKLAKFYPKEFSTMDLIRLEMQLGTFIDDMRRDERFKGLETLAELSIKLVETNKHVLYDWVYLLLKLVLILPVATASVERVFSALSVVKSKLRNSMCDKLLNDCLITFIERDVFSQVSEEDIKKNFMSMKTRRVEKK

SEQ ID NO: 185754 - protein, 127 aa, Oryza sativa
  Clone ID: PAT_MRT4530_82619C.1.pep
MKLIVHPILMDKYPLHAVVPRERRQPLSLQSTLSDFHQSSSIVPEKEKHIKLILPRSSQLLHSRSRRPPRPTTSSGKITRLNALLHAVIEIEVNSDALQQPARADTEHASGHSYCGPLHGVPILKDN

SEQ ID NO: 185755 - protein, 96 aa, Oryza sativa
  unsure (1)..(96): unsure at all Xaa locations
  Clone ID: PAT_MRT4530_8261C.1.pep
RHQMXPKTHQHYNASSHQAHKSGPQATHHTHRHQDQHHWRCTNHHFAIVSGGTIIARVRAVXGLLIARQALWNTAAFGAILKPSIGAMGHFGVHAC

SEQ ID NO: 185756 - protein, 293 aa, Oryza sativa
  Clone ID: PAT_MRT4530_82620C.1.pep
MTTIAARMPFAGPRLRPPCNLTASRPGPRRAGLAVVSAAAGGPLPTVLVTGAGGRTGQIVYKKLKERADQFVGRGLVRTEESKAKIGGAADVFVGDIRDPASIAPAIDGIDALIILTSAVPKMKPGFDPSKGGRPEFYFEDGSYPEQVDWIGQRNQIDAAKSIGVKQVVLVGSMGGTDVNHPLNKLGNANILVWKRKAEQYLADSGLPYTIIRAGGLQDKDGGVRELLVGKDDEILKTETKTITRADVAEVCLQALLFEEARFKAFDLASKPEGEGVPTTDFRALFSQVNSRF

SEQ ID NO: 185757 - protein, 84 aa, Oryza sativa
  Clone ID: PAT_MRT4530_82621C.1.pep
MAVTARRWRMMMAWWRARSDASHNSSAKRRRRGGGAAATTFGEISYGSSTEVVLCSDDGMVAIESLAPRMSRLFRQHETLAWQL

SEQ ID NO: 185758 - protein, 71 aa, Oryza sativa
  Clone ID: PAT_MRT4530_82622C.1.pep
GSTLKNSLPSPFRLALILDLFEARPPFFFFFFFFFFFFFFHADRVPTIVKKEKRIQTHNCQSSTGRWADAG

SEQ ID NO: 185759 - protein, 158 aa, Oryza sativa
  Clone ID: PAT_MRT4530_82623C.1.pep
MIKNRRWRGRRRQAPSSLWWRRRCHRRSRSTVCRQQRCSPPRRPVVAEDVALLAYAYEKKKKKRRGSDGDSGGGDDGDGGGEECSVCLGEMRQGEAAKRLPVCLHVFHEECIDMWLGSHATCPICRSPVDAGAVAARVQRFSRCVFICIYFELDPFVD

SEQ ID NO: 185760 - protein, 57 aa, Oryza sativa
  Clone ID: PAT_MRT4530_82624C.1.pep
NLGYNEFCQPLLSGLYLTALNADLRGAQALNHPTLTRNTLTVGLATTNIQLANYITY

SEQ ID NO: 185761 - protein, 103 aa, Oryza sativa
  Clone ID: PAT_MRT4530_82625C.1.pep
MGGRYLHRSICQRRTSLIRRQPQPLPPSDNMNLFLLMIVPVHLINFIPHSILREGFIFAKSVVLPSFLVIFTSRCLYIDRIDNSKVEYNDNLESTLIGGGLAP

SEQ ID NO: 185762 - protein, 1240 aa, Oryza sativa
  Clone ID: PAT_MRT4530_82626C.1.pep
MAPTAAAAGPSDDGLRKLEYLSLVSKVCSELETHIGVGDKVLAEFITELGRDSASVADFDTKLKANGADLPDYFVRTLLTIIHAILPPPSDSRNPSSASQPAAGGSKFPGLSRPDDPDRARNLRLELERDAEEAAATAAPAPARDDRGHRRDERGRDRGRDDRGRDDGGRDRDYERGGRDHDRSHGRDRDHGRDRDRDRACDGDRQRGRDYGRDRDQDRDHDRDREGERRRDRDKDRGRDIDRDMDRDHRRGRRYDDEEEPEQFGGRKEGALVNSSGEPELYQVYRGRVTRVMDTGCFVRLEDVRGGREGLVHISQMATRRVANAKEMVKRDQEVYVKVVSVKGQKLSLSMRDVDQDTGRDLLPIQRGGDDAPRANPSGGSASGVGVGSGKRLGLSGIMIAEEDEVAPPSRRPLKRMSSPERWEAKQLIASGVLDVRDYPMFDEDGDGMLYQEEGAEEEQEIELNEDEPAFLQGQSRFSIDMSPVKIFKNPEGSLSRAAALQTALIKERREVREQEQRAMLDSIPKDLNRPWEDPMPDTGERHLAQELRGVGLSAYDMPEWKKEAYGKALTFGQRSKLSIQDQRQSLPIYKLKKELIQAVHDNQVLVVIGETGSGKTTQVTQYLAEAGYTTRGKIGCTQPRRVAAMSVAKRVAEEFGCRLGEEVGYAIRFEDCTGPDTVIKYMTDGMLLREILVDENLSQYSVIMLDEAHERTIHTDVLFGLLKQLIKRRSDMRLIVTSATLDAEKFSGYFFNCNIFTIPGRTFPVEILYTKQPESDYLDAALITVLQIHLTEPEGDILLFLTGQEEIDHACQCLYERMKGLGKDVPELIILPVYSALPSEMQSKIFDPAPPGKRKVVVATNIAEASLTIDGIYYVVDPGFAKINVYNSKQGLDSLVITPISQASAKQRAGRAGRTGPGKCYRLYTESAYRNEMSPTTIPEIQRINLGSTVLNMKAMGINDLLSFDFMDPPAPQALISAMEQLYSLGALDEEGLLTKLGRKMAEFPLDPPLSKMLLASVDLGCSDEILTIIAMIQTGNIFYRPREKQAQADQKRAKFFQPEGDHLTLLAVYEAWKAKNFSGPWCFENFVQSRSLRRAQDVRKQLLTIMDRYKLDVVSAGRNFTKIRKAITAGFFFHAARKDPQEGYRTLVENQPVYIHPSSALFQRQPDWVIYHELVMTTKEYMREVTVIDPKWLTELAPRFYKSADPTKMSKRKRQERIEPLYDRYHEPNSWRLSKRRA

SEQ ID NO: 185763 - protein, 47 aa, Oryza sativa
  Clone ID: PAT_MRT4530_82627C.1.pep
GIPFHRTPLPSITRCSLSSHMKGLLVSHHSASLSSHVVPRIHLPLLL

SEQ ID NO: 185764 - protein, 927 aa, Oryza sativa
  Clone ID: PAT_MRT4530_82628C.1.pep
MAAPPKAWKAEYAKSGRSSCKSCRSPIGKDQLRLGKMMWNHASCILRIDTLRWDDQEKIRNYVGSAPATASSAAAISDKCTIEVAKSARTSCRRCGEKIKKGTVRVSSKLEGQGWYHASCFLEMSPAATVENFSGWEILSHEDKRAVLDLVKKDAPSSGQTSSKGSKRKNNQNDIHDCKAPKIIRSISEGTAEDKGKAVVSHDSNANSSDLQEKLKEQSDTLWKLKDELKKHVSTAELRNMLEANGQDTSGPERHLLDRCIIAVAMCQNGPRSYSTTEPVRSKKKWKIPDEMDNGYLTKWFKSQKAKKPERVLPPMSPEKSLCQSTQQNRSFLSEGLDKLRVSIVGQSKDVVDGWKQKLKDAGANFNATVTKDSSCLVLCSELESENAEVKKARRLKIPILREGYLGECIRKNRVLPFDLYKVEAALESSKGGTMTVKVKGRSAVHESSGLQDTGHILEDGKSIYNTTLNMSDLTREDNGSDCYVFRKWGRVGNEKIGGTKLEEMSKIHAIQEFRRLFLEKTGNPWEAWEQKTNFQKQPGKFYPLDIDYGVRQGPKRKDIDKMKSSLPPQLLELMNMLFNIETYRAAMLEFKINMSEMPLGKLSKENIQKGFEALTEIQNLLGNTNNQELAVRESLIVAASNRFFTLIPSIHPHIIQDEDDLMVKVKMLEALQDIEIASKLVGFDSDNDESLDDKYKKLRCAITPLPHDCEDYKLVEKYLLNTHAPTHKVLTCPLFKSFLKEWSLELEEVFSLDRDGEFSKYSRYKNNLHNKMLLWHGSRLTNYVGILSQGLRIAPPEAPVTGYMFGKGLYFADLVSKSAQYCYVDRKNPVGLMLLSEVALGDMYELKKATSMDKPPRGKHSTKGLGKTVPLESEFAKWRDDVVVPCGKPVPASIKTSELMYNEYIVYNTSQVKMQYLLKVRFHHKR

SEQ ID NO: 185765 - protein, 113 aa, Oryza sativa
  unsure (1)..(113): unsure at all Xaa locations
  Clone ID: PAT_MRT4530_82629C.1.pep
MPEVDQVEASGGGRDMAGGGGPGIKVSAAAVLFPWTFLKSENVDTYHRLIREAHRTXSIICLVQELFDGQYFCQAQKLDFFHRAXPYKGNPTLIRFQKLAHELEVVIPVSFFE

SEQ ID NO: 185766 - protein, 104 aa, Oryza sativa
  unsure (1)..(104): unsure at all Xaa locations
  Clone ID: PAT_MRT4530_8262C.1.pep
LNLPVLRGARFDASFFRRVTEWGSLRITLTWFFRRSHYWPFXKLLISSTGAVIFISSHIVRCLKSEGDYIXIASYWKKNEDKTEDMXFCHEFHLVVLRVMDNLP

SEQ ID NO: 185767 - protein, 206 aa, Oryza sativa
  Clone ID: PAT_MRT4530_82630C.1.pep
MPTTTTARGGGGVAPFVAKTYRMVDDPATDGVIAWGRDSNSFVVADPFAFSQTLLPAHFKHSNFSSFVRQLNTYGFRKVDPDRWEFAHVSFLRGQTHLLRRIVRRSSGGGGAKRKEEAGGCGGGGEAAAGDVDEESAVVAMEVARLRREQREIEGRVAAMWRRVQETERRPKQMLAFLVKVVGDPQLVTIFRVLAYISPSSGFLSI

SEQ ID NO: 185768 - protein, 371 aa, Oryza sativa
  Clone ID: PAT_MRT4530_82631C.1.pep
MTNGAGGGGGGGGLGGTRVPTWRERENNRRRERRRRAIAAKIYAGLRAYGNYNLPKHCDNNEVLKALCNEAGWTVEPDGTTYRKVIDKYEHNRVPLTCIQGCKPPQAERPDPIGRSASPSPCSSYQPSPRASYNPSPASSSFPSSGSSSHITIGGNSLIGGVEGSSLIPWLKTLPLSSSYASSSKFPQLHHLYFNGGSISAPVTPPSSSPTRTPRLRTDWENASVQPPWASANYTSLPNSTPPSPGHKIAPDPAWLSGFQISSAGPSSPTYNLVSPNPFGIFKEAIASTSRVCTPGQSGTCSPVMGGMPAHHDVQMVDGAPDDFAFGSSSNGNNESPGLVKAWEGERIHEECASDELELTLGSSKTRADPS

SEQ ID NO: 185769 - protein, 920 aa, Oryza sativa
  Clone ID: PAT_MRT4530_82632C.1.pep
MAAPPKAWKAEYAKSGRSSCKSCRSPIGKDQLRLGKMMWNHASCILRIDTLRWDDQEKIRNYVGSAPATASSAAAISDKCTIEVAKSARTSCRRCGEKIKKGTVRVSSKLEGQGWYHASCFLEMSPAATVENFSGWEILSHEDKRAVLDLVKKDAPSSGQTSSKGSKRKNNQNDIHDCKAPKIIRSISEGTAEDKGKAVVSHDSNANSSDLQEKLKEQSDTLWKLKDELKKHVSTAELRNMLEANGQDTSGPERHLLDRCADGMLFGALGTCPVCSSFLYYHGGQYHCSGYVSEWSKCTYSTTEPVRSKKKWKIPDEMDNGYLTKWFKSQKAKKPERVLPPMSPEKSLCQSTQQNRSFLSEGLDKLRVSIVGQSKDVVDGWKQKLKDAGANFNATVTKDSSCLVLCSELESENAEVKKARRLKIPILREGYLGECIRKNRVLPFDLYKVEAALESSKGGTMTVKVKGRSAVHESSGLQDTGHILEDGKSIYNTTLNMSDLTREDNGSDCYVFRKWGRVGNEKIGGTKLEEMSKIHAIQEFRRLFLEKTGNPWEAWEQKTNFQKQPGKFYPLDIDYGVRQGPKRKDIDKMKSSLPPQLLELMNMLFNIETYRAAMLEFKINMSEMPLGKLSKENIQKGFEALTEIQNLLGNTNNQELAVRESLIVAASNRFFTLIPSIHPHIIQDEDDLMVKVKMLEALQDIEIASKLVGFDSDNDESLDDKYKKLRCAITPLPHDCEDYKLVEKYLLNTHAPTHKAYSTIQTIVSVFFCIGSRLTNYVGILSQGLRIAPPEAPVTGYMFGKGLYFADLVSKSAQYCYVDRKNPVGLMLLSEVALGDMYELKKATSMDKPPRGKHSTKGLGKTVPLESEFAKWRDDVVVPCGKPVPASIKTSELMYNEYIVYNTSQVKMQYLLKVRFHHKR

SEQ ID NO: 185770 - protein, 944 aa, Oryza sativa
  Clone ID: PAT_MRT4530_82633C.1.pep
MAAPPKAWKAEYAKSGRSSCKSCRSPIGKDQLRLGKMMWNHASCILRIDTLRWDDQEKIRNYVGSAPATASSAAAISDKCTIEVAKSARTSCRRCGEKIKKGTVRVSSKLEGQGWYHASCSLEMSPAATVENFSGWEILSHEDKRAVLDLVKKDAPSSGQTSSKGSKRKNNQNDIHDCKAPKIIRSISEGTAEDKGKAVVSHDSNANSSDLQEKLKEQSDTLWKLKDELKKHVSTAELRNMLEANGQDTSGPERHLLDRCADGMLFGALGTCPVCSSFLYYHGGQYHCSGYVSKWSKCTYSTTEPVRSKKKWKIPDEMDNGYLTKWFKSQKAKKPERVLPPMSPEKSLCQSTQQNRSFLSEGLDKLRVSIVGQSKDVVDGWKQKLKDAGANFNATVTKDSSCLVLCSELESENAEVKKARRLKIPILREGYLGECIRKNRVLPFDLYKVEAALESSKGGTMTVKVKGRSAVHESSGLQDTGHILEDGKSIYNTTLNMSDLTREDNGSDCYVFRKWGRVGNEKIGGTKLEEMSKIHAIQEFRRLFLEKTGNPWEAWEQKTNFQKQPGKFYPLDIDYGVRQGPKRKDIDKMKSSLPPQLLELMNMLFNIETYRAAMLEFKINMSEMPLGKLSKENIQKGFEALTEIQNLLGNTNNQELAVRESLIVAASNRFFTLIPSIHPHIIQDEDDLMVKMYFLLPIVTLFRDPIDCNFGAMVQVKMLEALQDIEIASKLVGFDSDNDESLDDKYKKLRCAITPLPHDCEDYKLVEKYLLNTHAPTHKAYSTIQTIVSVFFCIGSRLTNYVGILSQGLRIAPPEAPVTGYMFGKGLYFADLVSKSAQYCYVDRKNPVGLMLLSEVALGDMYELKKATSMDKPPRGKHSTKGLGKTVPLESEFAKWRDDVVVPCGKPVPASIKTSELMYNEYIVYNTSQVKMQYLLKVRFHHKR

SEQ ID NO: 185771 - protein, 95 aa, Oryza sativa
  unsure (1)..(95): unsure at all Xaa locations
  Clone ID: PAT_MRT4530_82634C.1.pep
TKSFLNIVVAVLLLVDNGRNYSDTCQHVRATWYGQTYXSGSSTDRISCGINIINRSSCNGLILCGSDPILRDGRGSNLRLGTEVGVARQITEEGR

SEQ ID NO: 185772 - protein, 117 aa, Oryza sativa
  unsure (1)..(117): unsure at all Xaa locations
  Clone ID: PAT_MRT4530_82635C.1.pep
PDPEIXTPNGXTPLXAWEPPQIYPLTGXHPTMCEGKLEGXNSSLSXTVGEMXLLWFVLRMWMLYXLXFCVAFXREKRCTVXLTLXLGMCXSLEMXEXXLLXXLLPXHRIKKKKKKKK

SEQ ID NO: 185773 - protein, 86 aa, Oryza sativa
  Clone ID: PAT_MRT4530_82636C.1.pep
MDNQHVVDYRVVFLLESALGEIRHSARSLLLASVDIILAPHNLFLLLSDSGAKLAAVNLQHDIHSTPDASLNPITVDLHARPPRRR

SEQ ID NO: 185774 - protein, 118 aa, Oryza sativa
  Clone ID: PAT_MRT4530_82637C.1.pep
MARPHLNPSLPLLKARRTPPSTLTGWGYTAAAPSVIRPVTDRSQIGHKPVRCATRLIKAATTALNALPLHPGFDPPWGEPRTLGGGPDPKLGGGSRRSTPGSTPLGGSHVGLAAASSL

SEQ ID NO: 185775 - protein, 41 aa, Oryza sativa
  Clone ID: PAT_MRT4530_82638C.1.pep
MMPVSIGPATTRSENGVVTTLDGSMSKDPPAEAENGTSTTS

SEQ ID NO: 185776 - protein, 106 aa, Oryza sativa
  Clone ID: PAT_MRT4530_82639C.1.pep
KLTHQAEQSILPHLQELLPHRANLDPQHSSHNVQRWIQPARSGGEKGSSPPASPPPAATSTSPLPAAASPPRALRRTPPLLEAPRRPPMPDPDTARPPSTPPALTP

SEQ ID NO: 185777 - protein, 95 aa, Oryza sativa
  Clone ID: PAT_MRT4530_8263C.1.pep
PDPAMHGVGGGATPSIDAIRCVPPKEDPALQAMRIAADITGLQILRNKHHNLKLRENKYPMAAQVLHNQEEGGRFPRAWARNLLTRQDHLDHPRH

SEQ ID NO: 185778 - protein, 1637 aa, Oryza sativa
  Clone ID: PAT_MRT4530_82640C.1.pep
MASPAGAIGGASPSGRVLGPALDRIIKNAAWRKHSGLVAAAKAALDLLSSSAYASASAPSPPSLLLGLPAAAADACIHALLLALESASPKVADPALDCVAKLLYHRLLVGDLGGGGGDDDSPSSKLLAAVLSCGALADDAMELSTLRVLVAAARCPSVAIRGEGLGQMLKTCYNIYLSSSSGANQLCAKLALAQVLVIVFARVEVDSMDVRVRTVSITDMMDMSDRNLNDSSIVHAAQSFINETMEGSDVPEPGSPVEPAETDGKEDVVMSKIREDGLTLFKNLCKLSMKFSTPDNPEDQVLLRGKVLSLELLKMVIDNAGAFWRTNEKYLGAIKQYLCLSLLKNSALSAMSIYQLLCSIFLGLLSRFRSGLKEEIGIFFPMLVLRVLENVHQPSFLQKMTVLNLLEKICKDSQVIIDVFVNYDCDVDAPNIFERLLAAGMHLFSGLIVNGLLKTALGVPPGSATTLTPAQDQTFRIESVKCLATIIKSMGSWMDQQLKIGEFSPKPSEISLNSIDIPNILVGEDGGAVDYELQTDSGNPDLSDASSLEQRRTYKIELQKGISLFNRKPSKGIDFLIKSKKIGHSPEDVASFLRDTAGLNATMIGDYLGERDEFPIKVMHAYADALNFEGMDFGEAIRYYLRGFRLPGEAQKIDRIMEKFAERYCKCNPNSFTSADTAYVLAYSVIMLNTDAHNTMVKDKMSKSDFIRNNRGIDDGKDLPEHYLSTLYDQIVKNEIKMSADSSVPQSKQPSSVIKLLGLDNIINLVNWKQAEDKALGANDLLIKNIQEKFKAKSGKSESIFHVITDSTILRFMMETQRDAFVTSVAKFTYLHCAADMKQKNVDAVKAIISIAIEDGDYLQDSWEHVLTCLSRFEHLHLLGEGAPTDASFLTVPLVESEDKTQKSSSTTASKRTNALQNPAVMAAVRGGSYDSTTAKNNASPLVTPEQINSFISNINLLDQIGIFELNHIFAHSQRLNSDAIVAFVKALCKVSMTELHSPTEPRIFCLTKIVEIAHYNMNRIRLVWSHIWKVLSDFFVSVGSSENLSVAIFVMDSLRQLAMKFLEREELANYNFQNEFLRPFAVVMQKSNASEVRELVVRCISQMVLSRVNNIKSGWKSVFTVFTAAAADDRKSIVLLAFETMEKIVRDYFPYITETETTTFTDCVKCLITFTSSKFSSDASLNAIAFLRFCAVKLAEEGFVCHEKDTDHQSNNLDVSDGNATLHKDDHVYFWVPLLAGLARLTTDTRPTIRKGAVEVLFDILKDHGHLFSQSFWRNIFESVVYPLFSTGSSTPNGHINLTEDDSWNSETKTVAVKCLVDLYITFFDEMRTELSRVTSVVTNFIRSPYKQSASTGLSVFQRLTEGLESRLSKEEWKEILLCFKDSAMQTFVVFDKIVRMMQDIEIPDRNESYPEVERYSDNDIYNDDEEEANMETTSYAIIKLKNHMAQQLLVVQGIVKLYETHRWSFYAEHMGIILETLSAIASHASEVSEPAVIHFENESYQSYLKLLQALVHDHPSISEDMKIESHIMLVSEKILRKYLKCAGRERSNDSSGRDPALRWKLPLGTAKKEELSARTSLVLHVMQLLGGLERDCFRRNLPLFFPLLTNLIRCEHSSGEVQLALYDIFQSSIGPIIST

SEQ ID NO: 185779 - protein, 577 aa, Oryza sativa
  Clone ID: PAT_MRT4530_82641C.1.pep
MGVLFSCPVDDYDALEESAAAAAAASSESNSGGGKPAAILKALGSGKLLIEGSLSFKRDQQMSPTSLLQVETEISIKPAAADIAAAPRARFAADGGAAAAESPKHEAAAVKLQKVYKSFRTRRQLADCAVLVEQSWWKLLDFALLKRSSVSFFDIEKQETAVSRWSRARTRAAKVGKGLSKDEKAQKLALQHWLEAIDPRHRYGHNLHYYYDTWLHCESKQPFFYWLDVGEGKEINLEGKCSRSKLLSQCIKYLGPKEREDYEVILEDGKFLYKKSRQILDTSCGPRDAKWIFVLSTSKSLYVGQKKKGKFQHSSFLAGGATSAAGRLVVENGTLKAIWPHSGHYRPTEENFEEFKSFLNDNSVDLTDVKMSPAEEDEEFWGSLKRISSESYPKNTATDNSEDQAAEAEETGNSQMPRVSDEPTCAEIDGCDEPAATRRVDSSSAVAAAAENTEAEEEDQEGGGEQAPVPREKILERINSKKGMRSYQLGKQLSFRWTTGAGPRIGCVRDYPSELQLRALEQVNLSPRSAAAASASSRFSSPQRRSFNGAAAPATPREALRPSPLQHGLVATVAAAD

SEQ ID NO: 185780 - protein, 289 aa, Oryza sativa
  Clone ID: PAT_MRT4530_82642C.1.pep
MNMASHVLLHLFLCCTTLRAAAALSFDYDFAAVGRDVAAANLVFMGNASYAGDRINLTRLGTWSTGRVAHRQLVRLWDDGAGGSVTSFTTAFSFAIGRNSTNQADGMAFYVGPPADTLAPDMTGGFLGLIPNTGEASPRTVGVEFDTCRNPWDPQDGVIDHIGVDVNQIVSQNFTALPTLTLAGVMRAEIRYDAAARKMVVNLTANGSNYGVEAAVDLRAAGLPQDAAVGFSAATGELVESHQLLSWSFNSSTVPKLDSFYSKYPPGTPSVNFVECPNPNSVQGFTFTS

SEQ ID NO: 185781 - protein, 54 aa, Oryza sativa
  Clone ID: PAT_MRT4530_82643C.1.pep
FCFSFLFGFFFFFFFFFFFFFFFFFFFFFFFFFFKKKGFRGTPIGVEQNPRPKL

SEQ ID NO: 185782 - protein, 93 aa, Oryza sativa
  Clone ID: PAT_MRT4530_82644C.1.pep
MAVEQPTRQQAAAPAASSGAAEDGGGDDTVVDGGGAALELRSRTRTPPTPPAREGVASFGSSTRKTAVDLGRLLERPYSGEPHAAVASLSPTQ

SEQ ID NO: 185783 - protein, 148 aa, Oryza sativa
  Clone ID: PAT_MRT4530_82645C.1.pep
DAWADAWADAWVQDQATPFGDSPLFFGGPVDMSMFLVRASDNSRLKGFEEVIPGIRFGFRTDLEKAAVLMKSGAIKSQDLRFFVGHAAWDYEQLLSEIRAGYWAVASCSTELISDALTGDPSCLWTEILQLMGGHYSELSQKPKEDNQ

SEQ ID NO: 185784 - protein, 50 aa, Oryza sativa
  unsure (1)..(50): unsure at all Xaa locations
  Clone ID: PAT_MRT4530_82646C.1.pep
KRGDLLKREGRPNIHXFGAAPFKEPNFTSPSFQRNTFFIGPPNSIPLPAF

SEQ ID NO: 185785 - protein, 45 aa, Oryza sativa
  Clone ID: PAT_MRT4530_82647C.1.pep
MDAVYAVLPAAVSPEIVRTKKIQRVPQLSKPVQMRFLDGLDGGLD

SEQ ID NO: 185786 - protein, 284 aa, Oryza sativa
  unsure (1)..(284): unsure at all Xaa locations
  Clone ID: PAT_MRT4530_82648C.1.pep
SVAGFGTSFSFFLSFLHNYSLLFSPLLLPFAPRNAAKLRFACLHATICARHSDRSIDRSMGSSDQXGDRDRRGGSGGGGGGWEAVLRRMRRHHHAHVARRPDRPXSLCNACGIRYRKKRRQELGLDKKQQQEHHPHHHQQQQQQYQRQQQQQQQEDHSDAASSVKDSSSSSSNKSSSLQVISEIVISRSKSDCEGAMEGNCVPLKRLVQQVDFLLSSTGITESCQCVAVSCANQMGLQKAANVLLFLVPIRVLTMENNSCDILHIIRIIGRGCGIESKTRIIDR

SEQ ID NO: 185787 - protein, 238 aa, Oryza sativa
  Clone ID: PAT_MRT4530_82649C.1.pep
MAVKKTMKVVFSLVLLLLPLASTSAVEVKFDFMYFVQQWAPSYCSTAPHECEYEPRLPPNNFTIRGLWPSYEEWRPEYCNISDRLDPGQIQDLVKPLNQSWPSLLRNETNLELWSHEWSKHGTCSNLSQHGYFAAALALDKLKLTNLTKILADGGVVPSDEKTYTLGEISDALAKGTGFSTYLRCSQNELKYGETLLYEVLQCVDRSGEKLVNCTTPYWVTRCLDPDKIKIPAWFYGQ

SEQ ID NO: 185788 - protein, 77 aa, Oryza sativa
  Clone ID: PAT_MRT4530_8264C.1.pep
TRPPRVRRAGDSVGIYVQVGLLGDAIFTCYQHCSIASVITMCSRFIYSKGSLVSCGGFRLLCKPVCCCVNSLISLEG

SEQ ID NO: 185789 - protein, 365 aa, Oryza sativa
  unsure (1)..(365): unsure at all Xaa locations
  Clone ID: PAT_MRT4530_82650C.1.pep
YVNKRLYGLKQAPRAWSSRFASFLLTLSFVEAKSDTSLFIYHRGSDTVYLLLYVDDIVLTASSDALLRWTIRALQSEFSMKDLGSLHHFLGISVSRQSSGLHLSQRQYCLKVLERAGMTDCKPCATPVDTNAKLSAADGAPVHDPTNYRSLAGALQYLIFTRPDISYAVQQVCLHMHDPREPHLAALKRILRYVHGTVDYGLHIRRSSTVDLSAYSDADWAGCPDTRKSTSGYAVFLGDNLVSWSSKRQLIVSRSSAEAEYRVVANAVXWLRQLLHELHTPPSRSTLVYCDNVSAVYLSSNPVQHQRTKHVEIDLHFVRDRVAAGSVRVLHVPTTSQFADIFTKGLPSAIFLEFRSSLNVRSHDV

SEQ ID NO: 185790 - protein, 230 aa, Oryza sativa
  unsure (1)..(230): unsure at all Xaa locations
  Clone ID: PAT_MRT4530_82651C.1.pep
MKDLGSLHHLLGISVSRQSSGLHLSQRQYYLEVLEHAGMADCKPCATPVDTNAKLSATDGAPXDISYAVXQVCLHMHDPREPHMXRGTVDYGLHIRCSSTVDLSAYSDADWAGCPDTRKSTSDYAVFLGDNLVSWSSKRQLTVSCSSAKAEYGAVANAVAETCWLRQLLHELHTPPSRSTLVYCDNVSAVYLSSNPVQHQRTKHVEIDLHFVRDRVAAGSVRVLHVPTTS

SEQ ID NO: 185791 - protein, 920 aa, Oryza sativa
  unsure (1)..(920): unsure at all Xaa locations
  Clone ID: PAT_MRT4530_82652C.1.pep
AGPQWDPRALANAYNTATLTTPPSNEWYMDSGATSHMTSDTGTLSTSQSPTRNTPSHTIVGNSSLLPITSVGHAYLHYPNSSFVLNNVLISPEIIKSLISARRFTCDNWCSVELDPFGLSVKDYPTKIEIVRCNSSCALYPLPADAYSSAASTRAFVASSTNTDLWHRHLGHLGHEALTHLAVTSVIPPPKVTTSLCHASQLGRHVRLPFPTSSSRAKANFDLVHCDLWTSPIPSVSGFKYYLVILDDCSHYVWTFPLRFKSDTFSTLSHFFAFVKTQFATTIHSIQCDNGSHKGYRCLDLTTNKVITSRHVVFDETCCRVESIPSTSSTFPPLSPRKSAPVNPSTTPRRRPTSXPIPPRPASIPPSRAHKKHPRAPLVHFPLFPGPGTLXPRSSPRRSRAPPHSGELRPPFPVTRVAAALLRRHRQLCRRPGKLGHRSISPLHLRSAVATRTTSLRCRPRLQPRRAAASVDADPRRHTMTTRGKHGLHQPVKRYNLSATTLSPVPRTYRAALADPNWRSAMEEEFTALQANRTWDLVPRPNGANVVTGKWIFRYKFQSDGSLDRYKARWVLRGFTQRPGIDFDEIFSPVIKPATVRTVLSLAVSRDWPVHQLDVKNAFLHRTLQETVYCTQPAGFVDPTKPDLVCRLNKSLYGLKQAPRAWYSRFASFLLTLGFVEAKSDTSLFIYRRGSDTVYLLLYVDDIVLTASSDALLRWTIRALQSEFSMKDLGSLHHFLGISISRQSSGLHLSQRQYCLEVLERAGMTDCKPCATPVDTNAKLSAADGAPVRDPTDYRSLSGALXYLTFTRPDISYAVQQVCLHMHDPREPHLAALKCILRYVRGTVDYGLHIAYSDADWMSAYSDADWAGCPDTRKSTSGYGVFLGDNLVSWSSKRQLTVSRSSAEAEYCAVANAVAETCWL

SEQ ID NO: 185792 - protein, 59 aa, Oryza sativa
  Clone ID: PAT_MRT4530_82653C.1.pep
MTNLGIDGNASEARSEEAGAAATGRALGTTLTPSRCCVSEGKAAIIVKLVAGENEALLS

SEQ ID NO: 185793 - protein, 92 aa, Oryza sativa
  Clone ID: PAT_MRT4530_82654C.1.pep
CSSPAAVGHRFWWCFPRSVGERFLWGGFPSVCGRPRGPVLQSGWCSGASALFSVKVPVQFFCPCCSVGCFSFVFRCVECYFCLKETSLLCND

SEQ ID NO: 185794 - protein, 412 aa, Oryza sativa
  Clone ID: PAT_MRT4530_82655C.1.pep
MDQPAPAPEPMLLDAQPPAAVACDKKQQEGEAPYAEGNDAVTGHIISTTIGGKNGEPKRTISYMAERVVGTGSFGIVFQAKCLETGETVAIKKVLQDRRYKNRELQLMRAMDHPNVISLKHCFFSTTSRDELFLNLVMEYVPETLYRVLKHYSNANHRMPLIYVKLYMYQLFRGLAYIHTVPGVCHRDVKPQNVLVDPLTHQVKLCDFGSAKTLVPFFFFFFLNSNMSFRVARYMHGGIYIMECEQNSGSLQVTTTPTLGNYILLLQLGKKKMKENSPIELVEIIKVLGTPTREEIRCMNPNYTEFRFPQIKAHPWHKVFHKRMPPEAIDLASRLLQYSPSLRCTALDACAHPFFDELREPNARLPNGRPFPPLFNFKHEILLANSSQELISRLIPEHVRRQATHNFFNTGS

SEQ ID NO: 185795 - protein, 524 aa, Oryza sativa
  Clone ID: PAT_MRT4530_82656C.1.pep
MENPRPQAPAGTPPMAPLPVPPPIAPIPAPPPRAPAPAPAAAAAVASTSAAGGGGGGGGEADYEVSDDHRAARERHERAVQELLQRRRAFAMAVPTNDSAVRARLRRLGEPVTLFGEREMERRDRLRALMVRLEADGHLDRLLRAQEEEQGAAGAEEEEEQIQYPFFTEGTQELLKARVDIAQYSLPRAKARIERAKRCHDDPDEDPEAEANLVVKQAEDFVLECSEIGDDRPLTGCSFSRDFSMLATSSWSGMIKVWSMPQVTKIATLKGHTERATDVAFSPVDDCLATASADKTAKLWKTDGSLLLSFDGHLDRLARLAFHPSGTLLQQASFDKTWRLWDVSTGKELLLQEGHSRSVYGVSFHPDGSLAASCGLDAYARVWDLRSGRLWGTLMGHVKPVLGVSFSPNGYLVATGSEDNFCRIWDLRTKRMLYSIPAHKSLISHVKFEPQEGYYLATSSYDTKAALWSARDYKPIKSLVAHESKVTSLDISGDGQQIVTVSHDRTIKIWSCRSRAQDNAMELD

SEQ ID NO: 185796 - protein, 168 aa, Oryza sativa
  Clone ID: PAT_MRT4530_82657C.1.pep
MMETSPTLDRLESFVPSLPLPSSGVASLPLLSPLPPVSPAWHKRRCFPSPSLPSPSRLAGIAQRRRDTAKTAATTVPPPLPVGLQQPSLPPGLFVFVGDRSLSTLKIWRRPPNGRVDNDVGGFPWADLVPAASCGRSNGDVDVVDSGEKRRWRRRFLRSEGDKAPVSG

SEQ ID NO: 185797 - protein, 784 aa, Oryza sativa
  unsure (1)..(784): unsure at all Xaa locations
  Clone ID: PAT_MRT4530_82658C.1.pep
MEEEQSPRLAAGEPERKLEDGVTDAEDPGCTGNAAMSSLEQPLLKRSNTLTASHLAMVGAKVSHIESLDYEIIENDLFKHDWRRRSNVEVLQYIFLKWAMAFLVGLLTGVIASLINLAIENISGLKMLHMFLMVKNLPSPYCRYWAGFLYFAGVNFGLTFIAAMLCVVFAPTAAGPGIPEIKAYLNGVDTPNMFGAPQLIXSICAVSSGLDLGKEGPLVHIGACLANLLSQGGSGRXRLRLRWLRYFDNDRDRRDLITCGASSGVCAAFRAPVGGVLFALEEVATWWRSALLWRTFFSTATVVVVLRGFIEVCRNGRCGLFGEGGLILFDVGDVAVRYHAGDLLPVTIVGVLGGVLGALYNHVLHKVLRVYNLINEKGRAAKLALALAVCALTSALLYVTPFAVPCTPCDPAFGGACPTLGKSGNFKRFNCPEGHYNDLATLLHATNVDATRNIFSTGTAGEFRLDSLLIFFAVYCVLGLFTFGIAVPSGLFLPIILMGSAYGRVTALVLSRFARIDHGLYAVLGAAALMSGSMRMTVSLVVIFLELTNNLLLLPITMFVLLIAKTVGDAFNPSIYEIILDLKGLPFLEAKPEPWMKDLTVGELAAAKPRAVALQVVERVSTVVEALRATRHNGFPVLDRPRPGVSELHGLVLRSHLVAALRKRWFLPERRRTEEWEAREMFSSAELADKCGGVDELEISPEEMGMYVDLHPLTNTTPYTVVETMSVAKAVVLFRSVALRHMLIMPKFQGPEISPIVGILTRQDLIAHNILGAFPHLASKRKTH

SEQ ID NO: 185798 - protein, 408 aa, Oryza sativa
  Clone ID: PAT_MRT4530_82659C.1.pep
MATVAGRFGSPPPLPLPRLRRRATFSAGARRSAARGRITSNYLRNCEIPHLIILANTNSSRNFSRMDSCAARASASGAESSSGGGEDESEIIDAMEVKSSSTAASFLAKVALALGVAATATVISLFMRQPSSGPSFSLPQIVDASAPPDAAATIGYTFSLFGKKVIVPEYTPGWVYFWLLMAAGFGLFISEEALNVWVGISLARSLCLDGTWQSLANSFSMNASYIISTVLWVYWGVCISDMVPFYLGKLFRQTRASEDISSKIGIGKEKALSISRAVQKYGNLIGFVERFSVGVRNPTGFLAGALGIPADCYFAGVCCGCLFTLPIQLAVGFFLRERPVVALASVAAAVIESICKFISSPVLHGSPNEKKKRGCCSLFFGLELKAIRHPPHIAIIYLKSRDFRITEM

SEQ ID NO: 185799 - protein, 639 aa, Oryza sativa
  Clone ID: PAT_MRT4530_8265C.1.pep
MGGSGLSSVDARGRSAREGSGGQQRVVKRGRAGDRSREGRKPVARQPANQEQASDHTFTSHEANNDIIHLHQLISTQPHCALVETRKVPKPNSANNACNSCLDDINWEDEIKYDPRLRKQIDEYHHNLRERVQEGLSRNGLMSLEVGLNTNGFHRKERLKLHVGDVGGSHYQAMKKCDDLLQKRQHIDVAFHSVRETELKLSLKQVRGQGYDGASNMRGEFNGLQSLIMREYSSAYYVHCFAHQLQLVLVDIVRKHKDVSDFFTKISILLNVVGGSSKRRDLIRDINVKEMSKALGSGQLQTGTRLNQEQCLQRPGDTRWSSHYKTLKSLVGMFATIVKVLEIVEKDKNDWKIRDQGSNLLEYFQSFDFVFYLHLMLTILTITNSLSLALQRKDQDIVNAMKCVKSTRLNLDELRREKWEKVLDEVSDFCDNYDIVKLEIEDTYIDPKKRRHKSGITNKHYYQVDCFNDVIDWILQELDNRFSETSSQLLICSSAFSPRDSFHDFNLENLMSLAKLYPSDFNSGNLRDLSHQLGLYIADVRDDGRFSNIQTIAELSQIMVETRKHLCYPLVYQLLKLVLVLPVATATVERCFSAMKNVKTYLRNKIGDEYLSDSLICYVEKEEMKKVTNEAVVRRFMKM

SEQ ID NO: 185800 - protein, 777 aa, Oryza sativa
  Clone ID: PAT_MRT4530_82660C.1.pep
MGCKGSKLEQQEAVALCRGRADLLAAAVRHRYALAEAHAALADSLASMSASLHLVLAPAVAAGTAVALPSARKDVDAAAEAAASPPHSSSHINFAPSSGSESGSVSSSPSRRVAAGHEQLYQPSALPFPHYAYGYGYAPEPPFGYPPGSLQLYYARSRPPPPSVAVEQRAPASERVYFGSFEPAQYHPYGGETRRADRAAAPPPSPPRASSWDFFNVFDNYEVYDNYCYDAPGTGATTPAPYTPSRSSREVREEEGIPELEEDDAVVKEVSSEYSAHGSGGARSRRSSIGGVSSSIAEVDEEENPVVDKGVVGGGVARQQTPAHGNVAASVPTPRRAADGADVAGEIKAQFVRAADAVRALAPILEVGRRSYHPRSSVYHVSSRMVSVIALPHSGYGGSDLLDVGGGEKVVGARNLSLTLQKLYIWEKKLYDEVKAEEKMRLLLAKNSKRLKFLDQKGAEAPKIDATRNLVRKLSTKIRIAVRVIAKVSKKINRSTCVVCLSESNCLNSEDILAFHIIFKSSLCQKKSLIAIFYRFVKMWQDKLNCYHIQCQAISEAKNLDSIISGGTSRDLAMELELELIKWIVNFSSWVNEQRSFIKALNGWLALCLNYQQEETADGVPPYSPGRVGAPLVFVICNSWSQAMDRISEKEVITSMQALVSSVRSLWEKQNVEQTEQLIAIREREKWNKILERKTLEINKEADTLNRKLALVPGRQSLLPTAQTYQVHFLEANSVQVSLKRVLEALESYSSNSLRALDETLRHAEEERLSRERAKVS

SEQ ID NO: 185801 - protein, 48 aa, Oryza sativa
  Clone ID: PAT_MRT4530_82661C.1.pep
MAEWEEMESGRGRREKKKDKNPRPTCRPVRPALCGRSDRRTWPVRPCI

SEQ ID NO: 185802 - protein, 51 aa, Oryza sativa
  unsure (1)..(51): unsure at all Xaa locations
  Clone ID: PAT_MRT4530_82662C.1.pep
FFFFFFEANSFLFIHSIRSXSPMTHAHPRXRRNIHCREGAAAPHRWHINTI

SEQ ID NO: 185803 - protein, 279 aa, Oryza sativa
  Clone ID: PAT_MRT4530_82663C.1.pep
MTHLQQQQLVAAAAAAGGMAKQELVDESNNTINSGGSNGSGGEEQRQQSGEEQHQQGAAAPVVIRRPRGRPAGSKNKPKPPVIITRDSASALRAHVLEVASGCDLVDSVATFARRRQVGVCVLSATGAVTNVSVRQPGAGPGAVVNLTGRFDILSLSGSFLPPPAPPSATGLTVYVSGGQGQVVGGTVAGPLIAVGPVVIMAASFGNAAYERLPLEDDEPPQHMAGGGQSSPPPPPLPLPPHQQPILQDHLPHNLMNGIHLPGDAAYGWTNGGGGGGRA

SEQ ID NO: 185804 - protein, 434 aa, Oryza sativa
  Clone ID: PAT_MRT4530_82664C.1.pep
MAASAAASRAQRLSRIFSSSSPSVRPPKPGQVKEAPKPAPTKKAPAPGAEANPNLRRNAIDDIIKGLLRERDPDKLVSGFIAASSTHPRFRARHRVYDVAVSRLATFGRLDGVEAIIDAQKPFLETSKEGFAARLIRLYGHASMASHAAATFHDLPPQLKSTMTFNSLLAAYVEAGEFEALAAAFKEIPVSNPSVVPSVYSYNILLQALCKVPDLSAALDTMTLMEKSGISPDLVTFNTLLNGFYNHGDMDGAEKVWEMITERNMVPDAKNYNAKLRGLVAQGRIEDAVAVVEKMEKDGPKPDTISYNELIRGYCKDGRLEEAKKLFEDMAENGYVANRGTYHTLIPCLVKAGELDYALKCCHEIYGKNLRVDCFVLQEVVTALVTASRVEDATKIVELGWNNSYPRRILNIPHATEKNKEESISEEEEEPENA

SEQ ID NO: 185805 - protein, 64 aa, Oryza sativa
  Clone ID: PAT_MRT4530_82665C.1.pep
MEVATTAFTSLVVAVLSDDGHHGSDLSCARLYVIMTHAGATRNAAKRRQYGLHSLARRLLRCAC

SEQ ID NO: 185806 - protein, 53 aa, Oryza sativa
  Clone ID: PAT_MRT4530_82666C.1.pep
SEISMCIPRMLSCIASFCSPFLYPFFSGAQFILMILRPMTSCKQVRTRFCAKG

SEQ ID NO: 185807 - protein, 425 aa, Oryza sativa
  Clone ID: PAT_MRT4530_82667C.1.pep
MRATTAMPPPPALPVCLLLLLLLLAVPRPAAAAAAAAATRPLLFELRARQVPAGALPRPASKLRFHHNVSLTVSLAVGTPPQNVTMVLDTGSELSWLLCAPGGGGGGGGRSALSFRPRASLTFASVPCGSAQCRSRDLPSPPACDGASKQCRVSLSYADGSSSDGALATEVFTVGQGPPLRAAFGCMATAFDTSPDGVATAGLLGMNRGALSFVSQASTRRFSYCISDRDDAGVLLLGHSDLPFLPLNYTPLYQPAMPLPYFDRVAYSVQLLGIRVGGKPLPIPASVLAPDHTGAGQTMVDSGTQFTFLLGDAYSALKAEFSRQTKPWLPALNDPNFAFQEAFDTCFRVPQGRAPPARLPAVTLLFNGAQMTVAGDRLLYKVPGERRGGDGVWCLTFGNADMVPITAYVIGHHHQMNVWVEYDLE

SEQ ID NO: 185808 - protein, 105 aa, Oryza sativa
  Clone ID: PAT_MRT4530_82668C.1.pep
MVEENGSKPPLPAGGDVLHAATIAHLLPLLVVAVVAPPPLVVAVVAIVTLSLLPAAADRARCRYRRRRCSLPPPPLVLVVTVIALPGCAVGSGGGDAAAAPICQS

SEQ ID NO: 185809 - protein, 50 aa, Oryza sativa
  Clone ID: PAT_MRT4530_82669C.1.pep
VLPPGAPHLPTPYRTRSITARGPHIHLLYTMVCYDHIDPMDQINPINLTV

SEQ ID NO: 185810 - protein, 437 aa, Oryza sativa
  Clone ID: PAT_MRT4530_8266C.1.pep
MPLLCNQPHCALVETREKKDGGYEASVKNGWNGFHRKERLKLHVGDVGGSHYQAMKKCDDLLQKRQHIDVAFHSVRETCKRDYLTRLNGSIDVARMLVKLGLPFLGYDESKESNNRGNFREFRDYTAEQNPSLRKAIERFVGLVHVTETTSAYLKSSIDALFAKLKLTLKQVRGQGYDGASNMRSEFNGLQSLIMRENSSAYYVHCFDHQLQLVPVAIVRKHKGVSDFFTKISILLNVVGGSSKRRDLIRDINVKEIKLDNHFSETSFQLLICSSAFSPRDSFHDFNLENLMSLAKLYPSDFNSGNLRDLSHQLGLYIADVRDDGRFSNIQTIAELSQIMEETRKHLCYPLVYQLLKLVLVLPVATATVERCFSAMKNVKTYLRNKIGDEYLSDSLICYVEKEEMKKVTNEAVVRRFMKMQGRRFDDDRLSNHRRGF

SEQ ID NO: 185811 - protein, 255 aa, Oryza sativa
  unsure (1)..(255): unsure at all Xaa locations
  Clone ID: PAT_MRT4530_82670C.1.pep
MAFNEGMRSTVLITLRQLIATLFLAPIAYFRERKTRPKLTAEILSXLTQWLFFLGLQYTTATFACAFINMTPIFTFIVAXALWVACMKSLPRKDSRIAKKYPALYSGTALMFLLSFLQMAAVALAVDRISLSPWILTTKLQIITVLFVGIVGSGIAFLAMSWCVEQRGPVFTTAFTPLIQIIAAAINVIVLHEQLHLGIVIGSALVIIGLYFVLWGKNKEASSSSSPAKEAVPALRQQYGGHDQETTNDVQMQTV

SEQ ID NO: 185812 - protein, 100 aa, Oryza sativa
  Clone ID: PAT_MRT4530_82671C.1.pep
ILGFSTFFFFFFFFFFIFFTLFFFLPQKIKKNTSRPRVQQSAIKKSLQHPERGAPPRPTNDEARPIQTVSRKGFPEAPAERGPVLPLITHATPMCESTWL

SEQ ID NO: 185813 - protein, 177 aa, Oryza sativa
  unsure (1)..(177): unsure at all Xaa locations
  Clone ID: PAT_MRT4530_82672C.1.pep
VCSPPSPPELRSTRSSPASLGEAPLNPTLATDSRGRVDALTAGNWPLVTSSPFPPLPSAGXTPTDSLRRIRAVGSLPLLLPRHPGVRPVAPHRRKAPRRNCRRPPSIRGRRLRLPPASSRGSHVGATSAPARPRSDRADPAVRMRVGPPHPFHREPRACTASLPRPRACAACSLRTV

SEQ ID NO: 185814 - protein, 100 aa, Oryza sativa
  unsure (1)..(100): unsure at all Xaa locations
  Clone ID: PAT_MRT4530_82673C.1.pep
QXKGEKKRHKTXXNPXTGRETNRXTHPTGAQRXEGXPKAPHPQAXTXXGHTTRKAAXXGNXXGXQXXXNXGXEGPQXRXDTSPKKXXTRPEPPRSTXRTR

SEQ ID NO: 185815 - protein, 702 aa, Oryza sativa
  Clone ID: PAT_MRT4530_82674C.1.pep
MHTVKETELLAAKLDLLMKRLDNHEKRPQGTVKALDLHVTCELARLAFLVPANETGRIPGQPDSSIENVKAITTRGGTNGIAKEASSSGSADKEVQPEKTVPQEYSDTRIHINVPLLDAMQLSTYARYLKDILNNKRPLPTMEVVKLMEQCNNIILHKLPEKKKDPRCPTITCSIGAQQFDQALCDLGANVSVMPKDVFDKLNFTVLAPTPMRLQLADSSVRYPAGIAEDVPVKIRDFFIPVDFVVLDMDTGKETLLILGRPFLSTAGANIDVGMGSQNQVPAKPTEYSSGQSGATQDGQPGEVHAEFPGEGNNDAQEPLMEDAGTTTYTGQEARAVGSEEAVFHTKAKEGVEGKAKVARSITSGDGMRRRLSRLFKGSSSSSRRHDESSTHSSADVSIEDAKAPRRLLNDTDLDLVSDREKQAYYMLSDQEYAHTREYSPELLKKIGMDVEFRAIWKAVGWQRFAMVDEPSSRLLTLQFLCTLKEIEDGISFRFFREEFTLTWKGLSTLLGFHDSCKNYLQKGISGFKKNMFWEDTSGAPICKKPRMNNIHNPTLRLMHKWIAMTLFPRGDLRPIRRDELITMYALTIEESRAGEAYRETRNMTRNERENSSSSTLVQMYEEGWEPTGDAPGWTQTPRHSIGVSNWASASEDRWHAPHDIHWGDNQPSNSSCVPPTLSEWRSSSFLWDLGEITRRMDTLDM

SEQ ID NO: 185816 - protein, 159 aa, Oryza sativa
  unsure (1)..(159): unsure at all Xaa locations
  Clone ID: PAT_MRT4530_82675C.1.pep
QWRGRETGRMGGKEEGRAPGALRAAMSVWKPTLGGQXELALGAHGQIGDRXREDNAGGRKRGKGGRERGLPPXPLWEKEEGSGASRQREEGLCLRPLAACARSGGAEAMTTAMTAGRFGAERRHGRQARAGAAEGDGDGDQAVGHHGTRAWDAMGGAAD

SEQ ID NO: 185817 - protein, 469 aa, Oryza sativa
  unsure (1)..(469): unsure at all Xaa locations
  Clone ID: PAT_MRT4530_82676C.1.pep
RAGRPKTAQARARAGGRREXSGGPGSPRAVPCGTRLSAARLTVWREYAAYARGRGWDAAEVAPTWRLRGSHAGRREVDDVPAANGRRAIAASGGASHGDTGESEHTGWLHRTRGDEPTARIRRRESVGGGLRRRQPAERKGGNGDEVPRGXFPVARASTRLRELDACVGLDGTTPSEASDERVLRSSGGDGGEHTASDGNEEEEGAPGVPFRVHERTGSPGAWRWTAEARQGTGAAVMGGQAGELALRLASKAATGGDAGERGKRXKGEKEGEKGACPFAESGKGGGSGATRQREGRAQPPPLGGLRAEWRGPGDDDGDDGGXFGAARRHGRQARAGXQRVTAAATRRSATRHARAGSNGRRPRGRAXSNGARGRLCERGARARGGXALGAGDSRARARGAWAERRGXRERRSARLSHARAASGGGNAPGGEGARERERERERAPGREGXAGEEMGRAEFGPSNPGEAN

SEQ ID NO: 185818 - protein, 76 aa, Oryza sativa
  unsure (1)..(76): unsure at all Xaa locations
  Clone ID: PAT_MRT4530_82677C.1.pep
ASAXVAXXPYXLRXEXXSPLPWPXPIEXPAAXXXXXTXTXXGWVVXXPEDXRXIGWGGGGGGVWWRWRRRRGEGKA

SEQ ID NO: 185819 - protein, 799 aa, Oryza sativa
  unsure (1)..(799): unsure at all Xaa locations
  Clone ID: PAT_MRT4530_82678C.1.pep
MYMDNNNNGXRPQGGQGWNQPRPYYQGGNNNGNFSNQPSLKDLVFAQAKTTDALSKKLAANDKVLENINVKLDGFAFAFQNQLSFNKMIETQLVQLASLVLANETRRILGQPDSSLENVKAITTRGGKSTRDPSYPNPAGTNGISKEAPSNDSADKEVQPEKTVPQECCDTRLLPFPQRSRKPSVDEQFARFVEVIQKIHINVPLLDAMQVPTYASYLKDILNNKRSLPTTEVIKLTEQCSNXVILHKLLEKKKDPGCPTITCSIGAQQFDQALCDLGASVNIMPKXSSTSSTSRKRSLSFNRGRNNAPXLESKFPREGNNDAXEPLLEDAGKTTHTGQETRAAGXKKPPSAPKLKKVEGEAKDARSITSGDGXKIRKLNWMEFALKFIQALIVSLKFKHLVAYIQVALMKLTGGMRRRLSRLFKGSGSSSSHHDESSTRSSADALMEDAEAPQRLLNDTDLDIVSDRERQAYYMLSDREYAHTREYSQELLKKIGMDIEFCSIWKAVGWQRFAVVDEPGSRLLTSQFLCTLKEIEDGISFRFFREEFTLTWKGLSTLLGFHDSYKINLQKGISGFEKNRFWEDISGAPICKKPRTNDIHNPILRLMHKWIAMTLFPRGDLGPIRGDELIIMFAMTIEESRAGGAYRETRNMARNERESSSSSTPVKMYEVGWEPTGDAPGWTQAPRHNIGVSTWASASDDRWCAPHDIQWGDNQPSRSSGVSPSPSEWRSSFSRWDLGKITRRMDILDMQTGETQGSILIKDPERKPXLGGDISPPTEVVARYEIVNMSCYDSDTNLT

SEQ ID NO: 185820 - protein, 462 aa, Oryza sativa
  unsure (1)..(462): unsure at all Xaa locations
  Clone ID: PAT_MRT4530_82679C.1.pep
FQYMVKYDKTWNTREKGVKQRIAKHKKNVGMIVXWTTGKTQEFEXEIKTQRIFSMRFWGLSPSVKAFKXPVLAINATFLTEKYNGALMTALSTDAESRLLPLAFALVEKENSXSXCLFIELVIRVVIGXTHXVCIIFDRHPGTMNAMRTLILGLLVGHHRWCMRHNNANFHKANADQGQTKELQRICQIDEKXIFERDVKKLRLTVTEMSCTWLEDLLPDKDKXCAYDTNGRRWGYMTTNMAEXFNSVLVSVRKLPATAVVAFIFLKCNEFFVNRYNKAIKRLELGERXSEKVASEIKTQNTKANRHTSNCFDEHTKICEVIERGGITHGGVRYGARLFXKVEGERNTCTFQMSLLYHMSCSHLRLXVHAVDSEAPNHKLHEFLSREVVNTWASHFEPYXSTQWALYDGXADSELEVXTRGKRRLKRFKKEMDXGLGSSRRTPPSXVLQVDAVLVKNRCLLC

SEQ ID NO: 185821 - protein, 679 aa, Oryza sativa
  Clone ID: PAT_MRT4530_8267C.1.pep
MERFYKRKVPEPNSANNACNSCLDDINWEDEIKYDPGLRKQIDEYHPNLRERVRRKYLENGPCQPRTFAFPMTGSRREKKDGGYEAFVKNGWNGFHRKERLKLHHIDVAFHSVRETGKRDYLTRLNGSIDVARMLVKLGLPFRGHDESKEPYNRGNFREFRDYTAEQNPSLRKAIGTKKSDNSLLVAPEIQRDIVKCFAKEVLHAILEEIGHDVFCLLVDESRDVSCKEQMAVVLRYVDKYGIVRERFVGLVHVTETTSAYLKSSIDALFAELKLSLKQVLVAIVRKHKGVSDFFTKISILLNVVGGSSKRRDLIRDINVKEMSKALGCGQLQTRTGLNQEQCLQRPGDTRWSSHYKTLKSLVGMFATIVKVLEIVEKDKNDWKIRDQASNLLEYFQSFDFVFYLHLMLTILTITNSLSLALQRKDQDIVNAMKCVKSTRLNLDELRREKWEKVLDEVSDFCDKYDIVKLEMEDTYIDPKKRRHKSRITNKHYYQVDCFNDVIDWILQELDNRFSETSSQLLICSSAFSPRDSFHDFNLENLMSLAKLYPSDFNSGNLRDLSHQLGLYIADVRDDGRFSNIQTIAELSQIMVETRKHLCYPLVYQLLKLVLVLPVATATVERCFSAMKNVKTYLCNKIGDEYLSDSLICYVEKEEMKKVTNEAVVRRFMKMQGRIFDDD

SEQ ID NO: 185822 - protein, 280 aa, Oryza sativa
  Clone ID: PAT_MRT4530_82680C.1.pep
SNQLDYGLVDPHTSVPQYPLYPVYGYPPSTNVKLDGFASAFQNQLSFNKMIETQLAQLASLVPANESERIPGQPDSSIENIKAITTRGVIQKIHINVPLLDAMQVPTYARYLKDILNNKRPLPTTEHCSNVILHKLPEKKKDPRCPTITCSIGAQQFDQALCDLGASVSVMPKDVFDKLNFTVLAPTPMRLQLADSSVHCPVGIEEDVPVKIWDFFIPVDFVVLDMDTGKETSLILGHPFLSTAGANIDVGMGSIRFHINGKEEKFEFQLRTEQCSMVRI

SEQ ID NO: 185823 - protein, 655 aa, Oryza sativa
  unsure (1)..(655): unsure at all Xaa locations
  Clone ID: PAT_MRT4530_82681C.1.pep
MMRGSHPLIPAGVGPPALVKAKLPFPGVIGVQKSSPVKCPRISPAAPGRTHKGGPHGSLVEEFILXHLARQVGGAFVIFEVLLSAGVVSVAPPLRGRRSILXECRATPGRGQGPPHPHQVSLAXQVFVASLRNVRWPPKFRPSLTEKYDDSVNPXESFQIHMTIIEAMGGDDRVMANFFPMALRGQARGWLMNLLPASRLTLVPPAGYGAWPGSTNHPLMFSRLALVPPAGHGTRPXAQLWTGIAGSRVFXLSHSCESNRPCKRKRDWKEATERKEQTKCVAXGHRLKISSQPKARASESPSGWGEKGAWVLVPAKKEXEIWSTCHLTNRVASTLTTXEKFWSGLTPGATVGDMGPGILAPIYRRVQFRIQILPNQSLRKSLFCLPRGRWAESLSAHLPLPPGALSLSLSLSLSLPLALPARARAPRRAPPPPRSPSPHPWRAPHPRSRPPRAVVLARARVVAARAAPSAPSASPGPAALPRLPAPVAHVAASLQTAPPSSPSSSPRPRHSERKPPRDGGRAPPPSAATPLLPSSFSQRSKGRAPFLSLLFPFSSRRRHPPSALSPIWPRHCHPIKPRRPPSLLLSLSHRLHSIVAASRALFAVAVRRCACRRSRHEQGRGRGLRACPLLPLPRPEAGEITPVPSAHRHCAPPAR

SEQ ID NO: 185824 - protein, 167 aa, Oryza sativa
  unsure (1)..(167): unsure at all Xaa locations
  Clone ID: PAT_MRT4530_82682C.1.pep
MAVTTRYLPHFLWSTQQTKGGVGKWIFDLTEFDLIDESPKAIKGQAIADFIVEHRNDSNSLVDIGPWTLFFDGSAKYEAVLKGLQLLKEVEVDAVEIMGDSLLVTSQLAGEYEWKSDTLMIYNEKCQELMGSFRMVTMKHVSREQNAEANDLAQGXASGYKPMVKDI

SEQ ID NO: 185825 - protein, 464 aa, Oryza sativa
  unsure (1)..(464): unsure at all Xaa locations
  Clone ID: PAT_MRT4530_82683C.1.pep
MSLGIKAPLWDPLVSGSAHRAEGARGARARAGXGRGARARFTVERMRRAHAQPHGLRWNARTGGADRGRPVPTSAELAPTWRLRGCHVGWREVDDNASRNGRRTTAASGGANHGDTGESEHTGWLHETRGDEPTARIRRRKLDGGESRRRQPAGRGEGNGDEVTRGRFPAMRAFMRPQESDTSVGLGGATPSDERVLRNSSGDGGEHTASDGNGASWRSXLAAKTATGGXGGMTPAGGKGEKGGGERGLPLCRFGKKEEGNGGVAAGGRGLGLRPLGACARAGAAEGDGGGDQAVGHSARARGETTGGAAGQRDRATRTAQTTRLGRGTXGRAREQRRAGAVFRERGARQGEEKESEGRGRLARGRGGAEGERAGEGRERWERRQRDRRGGGGSSHRRHSVRCAGGGGGRGSSVRGGKGGERGEXGNRSLEEDEXVGGGLGERKRDKGEREGGRRKKGRRGGTN

SEQ ID NO: 185826 - protein, 244 aa, Oryza sativa
  Clone ID: PAT_MRT4530_82684C.1.pep
MGRPAQDGPSARAGGEERVGRWTGLTVRGPGWDPLVSGSAYRAEGARGARARAGEGRGARARSAEERMRRAHAQPHGSRWNARTGGADRGRPVPTSAELALMWRLRGCHVGWREVDDDAGRNGRRTTAASGGADHGDTGENEHTGWLHETRGDEPTARIRWRKLDGGESRRRQPAGREEGNSDEVTRGRFSAVRAPTRPRESDASVGLGGATPSEAGDERVLRSSSGDGGEHTAGDGNGWGGAG

SEQ ID NO: 185827 - protein, 134 aa, Oryza sativa
  Clone ID: PAT_MRT4530_82685C.1.pep
IFNVNLLCHDHTDRWNPTAKSGAGWAHQGFGRTSDWPGQRSAASLFEAMVSGPHRMRRRLSRLFKGSGSSSSHHDESSTRSSADVSMEDAEALRRLLNDTDLELVSDRERQTYYMLSDQEYAHTREYSPELLKN

SEQ ID NO: 185828 - protein, 724 aa, Oryza sativa
  Clone ID: PAT_MRT4530_82686C.1.pep
MEDGTEDAGAAGCRCGIPERKWRGGLLSLTARQKSLFSLRHATIKYVHSSARNRVDRARPCAQQNATTTTTASPTPHLTSLHHRRACVMNTTSANELMMHRHVQAAPYAAAPQQQGGKQRAPGLPPTPPPPPAAASSHSSHGDVCMDDTARGGLLPPRKAHRRSRSDVPFGYFQPLPPPSPKMEAGGGWALPGCGGAGDVDLLNAYMSLEGMGGADGLNNSDGDSRGSSMRTNGADSSENESEDYVGADSQALLWGGAGGGEAAGKKRRNNAAGEKAARHARSLSMDSLMGKLSFAANGEPAKFSLEFGSGEFTPAEMKRIMADEKLAEMALADPKRSAARSKERRMRYIAELEQKVQILQTEATTLSAQLTLLQRDSSGMATQNNELKFRLQSMEQQAQLRDALNEALTAEVQRLKLAANEVCDTSSSSNLAHQIQLRCQNQMLDLHKQQQQQSPAPPSPSPSLLLNLLAATVPPLDDRADNDEKAVLAPTLSCADLVRGDGSRAAAGGDARGGGGGGRVAGSSPLLSGSGAGGQAPAPGSEAAGARGAGRRWRKAAGTELAEGAAAAAAAVPPRIRASRPDLEGGGSWQRRRWCGDDGGDSWPAAGGDGGLGRIWTPAAVGDDNRGVVTAAAAVGDDGGGRGCGGCRANWRRRWKTWHRAASCSVVEGDSAAAVCGGGGWRRWQRHRWLRLWRRWRRRRRGRSRVRGEDDASEVAGCSAAAT

SEQ ID NO: 185829 - protein, 87 aa, Oryza sativa
  Clone ID: PAT_MRT4530_82687C.1.pep
AQKKRAATGLTKPRLVSPALQAVVGAAEIPRTEALKRLWAYIKQHNLQDPADKKVIVCDEKLKVLFAGQERVGFLEVAKLLNPHFVK

SEQ ID NO: 185830 - protein, 108 aa, Oryza sativa
  Clone ID: PAT_MRT4530_82688C.1.pep
KVISQRITTGSENKNAGPLLIKGMRGPGFGSLEIFHPPIFFFLKRPPPVLAGGKPNFFCSSLEQRGGFFQAIVGTPHGFFEAFFGRGFLYQFFNENAWCFPPFPLRVL

SEQ ID NO: 185831 - protein, 31 aa, Oryza sativa
  Clone ID: PAT_MRT4530_82689C.1.pep
AVGTAAGFMMPQLRPPLLDATTMGMHCNYYY

SEQ ID NO: 185832 - protein, 83 aa, Oryza sativa
  Clone ID: PAT_MRT4530_8268C.1.pep
MCRHRLPLPAHTRHPMRGSTPTAHLRLLLVVAAGLLPLFVAEACNMAGSLLPLAKTPPMPQSPKAPTLIYGVIEREVDWMREK

SEQ ID NO: 185833 - protein, 70 aa, Oryza sativa
  Clone ID: PAT_MRT4530_82690C.1.pep
WVKTSCGQSGLTGCICILHPKVVVATRASTSTTDQDFFSLHFSIWSVLDPLFGGVFILSSIRCWKTWEIK

SEQ ID NO: 185834 - protein, 227 aa, Oryza sativa
  unsure (1)..(227): unsure at all Xaa locations
  Clone ID: PAT_MRT4530_82691C.1.pep
MAPAWVLLDRFVDMFPLDGDEESEDSGGEESIPAGMWSVKPNPQVADPPGISSFPLLISRKAMNQVRHAMVVCASKNLVVFLTGEYYPINYRPGCYLIYDAIHDSLTPVPHVPGPDSLLAIGSGTSVISFGGSGSNAFVLAELLMTDVRKFPEEAALFTWWSTAVVTPSGYTAADWMKEKVTLPPEVRTPTYCFVSXMAFFVGESCLCWVDLLMGILIXTFVPLEIN

SEQ ID NO: 185835 - protein, 220 aa, Oryza sativa
  Clone ID: PAT_MRT4530_82692C.1.pep
MDDDGGAGRDGILAFAHQLARQAAFLLQASNDLLASLLQSTSRGGGGADILSFANQLARQAGAFLQDSNDILASLLQSTSRGASAGAAAASDEAIQALKDVGGGDVDGGGQKLDCAICLNHDDPSASAAAGWKEMPCGHRFHGGCLEKWLRMHGTCPMCRHQMPAAEVVEGAASEVTTSEPLLLIARVRRSGDGGNEEEHYHYYLYEIRVQYSTNVEINP

SEQ ID NO: 185836 - protein, 68 aa, Oryza sativa
  Clone ID: PAT_MRT4530_82693C.1.pep
PELSGKRHRRTFTSSESRRVPRARAVLEHLHRRSPAALGARRHLRTRFVGPPTPWLRMALPSGAPPSL

SEQ ID NO: 185837 - protein, 350 aa, Oryza sativa
  unsure (1)..(350): unsure at all Xaa locations
  Clone ID: PAT_MRT4530_82694C.1.pep
GGRRHGLALRPSFAGRSAWRASWTSRKGGEAEEAAPTSAAGASGPEGAPREPAAARAASAAAPGRRALAPQWSPRPLFTRERKGLRTVAACWNLCRSAGNRRRPPSTPPESPPPPLXFRHDREGDGEMILGVAAVVDADLSSGGGLHNRRGRARWRLQPPTPGCRAEFVDPICTAEIHLRSCCPTPCQIRRCRGASHPSTRPNAWEERGVELVARFLVASTPVAKLAVPSGDRKGTVTKRRGRPEEDRGWSEEEERRGGRWRGDAITTRQKMRRSSSLLPVCTLVLAMLCVASLMGVTEGRRGGGRTNIGGGGGARGSATRTSGSPRGLSGGTWAACAGSSLLAAAAMLL

SEQ ID NO: 185838 - protein, 152 aa, Oryza sativa
  Clone ID: PAT_MRT4530_82695C.1.pep
MTSGVAATPGEMREMAAREERAVEESLLPETADGLRRLVRRSMHRPPPWMPDFVLDDFIKLMCVVQRKERAELLHELLKNGAGIDPLPVLTQKTLILWGDKDQVFPLDLGHRLQRHLGDVSRLEIIKDAGHALQLEGADQVNRFIKSFLLDS

SEQ ID NO: 185839 - protein, 132 aa, Oryza sativa
  Clone ID: PAT_MRT4530_82696C.1.pep
QTATNRTKFIKNSNYFSNLFEFDAVTAVYPLPYPRGKRGNRAVYRGKCNPGYTMRTSIYNIQKYHTWHDFRNPKSKKSPKLEPWQIPKRIGLMTCRFGKSPPSCDVITASAPPCTHPSHRHGLALRPSLSVA

SEQ ID NO: 185840 - protein, 383 aa, Oryza sativa
  Clone ID: PAT_MRT4530_82697C.1.pep
MKQRHATATASALFALLPLSLLLFRLLVLLVRLRLAAFRDAALSLHFLARLRIRPVHLRLPGTDATTVRVWCPAAPSAKPPLLLLHGFGGDSKWTWARNLPALSRHFHVYAPDLLFFGAHSRSASPLRTVAFQARCAAEAMRLLGVDRYDVVGISYGGFVAYRLAAVEGRDRVPRVVVMTSGVAATPGEMREMAAREERAVEESLLPETADGLRRLVRRSMHRPPPWMPDFVLDDFIKNPLSFFLTKNMYIDRFLSNLAGRARVKYRSAIQYSYTCSAGGEWHGHVKCNLYLMCVVQRKERAELLHELLKNGAGIDPLPVLTQKTLILWGDKDQVFPLDLGHRLQRHLGDVSRLEIIKDAGHALQLEGADQVNRFIKSFLLDS

SEQ ID NO: 185841 - protein, 71 aa, Oryza sativa
  Clone ID: PAT_MRT4530_82698C.1.pep
MAIKIPSKMEIGHGRLLVAPLFHTGNDMLRNLCNKKKVKWHTCRRGGREENNDLFNPMGLLTTDGVVIPER

SEQ ID NO: 185842 - protein, 48 aa, Oryza sativa
  unsure (1)..(48): unsure at all Xaa locations
  Clone ID: PAT_MRT4530_82699C.1.pep
INALQQLQNIMHCSFGVXLRWDQRSSPACWFHASDKNLQLSLLXTRGR

SEQ ID NO: 185843 - protein, 136 aa, Oryza sativa
  unsure (1)..(136): unsure at all Xaa locations
  Clone ID: PAT_MRT4530_8269C.1.pep
SITHNREHGYSNSFTLARGPQLYPEDTIHQHVTMSSCAHDEHVTMSSDCDKTLHITSPXDQSHHTSGFALVPNRQRAAPPSCHGESGSRSTEHPGRPNSITLTLASIRQPEESYTTDQAVTHSRLWQALYVLQGFA

SEQ ID NO: 185844 - protein, 77 aa, Oryza sativa
  unsure (1)..(77): unsure at all Xaa locations
  Clone ID: PAT_MRT4530_826C.1.pep
SRHGQDISNTSHRLIVNGRMSADSFPTLNPPRICXHPRXEHEHVVQTLTTCYRRSRVTATIMVLTLLGPIHIFFFFF

SEQ ID NO: 185845 - protein, 206 aa, Oryza sativa
  unsure (1)..(206): unsure at all Xaa locations
  Clone ID: PAT_MRT4530_82700C.1.pep
PLQRCNVPPLPRQAHLYPAXYALRKNFPISHLSQNCSRPIFSPLREIDILVDTCVAHFILTRAHSXKNFPIGHPSQNCSMPSTLNLRVLWRWASGKKITTCWYEYSLNPIKPWAEMSHIHGLSTHTMPCRPASPRRVFFVLIRVHPRRTSRSVTHPETLFCPXLVCTQEEHPDRSPIPKLFFVLTRVHPRRTSRSVTHRETQLLQA

SEQ ID NO: 185846 - protein, 202 aa, Oryza sativa
  Clone ID: PAT_MRT4530_82701C.1.pep
MYCDELKSPNGLMPSVHIAKRMFLGSFENSWPNGHNTYFASYVVYGKLFPSGNRRRYEHAFSSCGGVLYILIQHFFSCDIRRLLLSMLGSADPTHLKRVRLKKPIKGVGHTFDGLQLSCPSKKMWSRLAIDIALHSKIILSLCNGYLINNTFFQRLQDEDELGESMGMPSVQAALHYLPLHCAASRRTMPPLTPFHCAASYR

SEQ ID NO: 185847 - protein, 72 aa, Oryza sativa
  Clone ID: PAT_MRT4530_82702C.1.pep
MTSNETTQPHAMTCAAKAPHAPAGEKPWPQPASRLASPRAAPKRDKQRLACDCEVTHAHTSVTHTKCYCSQP

SEQ ID NO: 185848 - protein, 156 aa, Oryza sativa
  unsure (1)..(156): unsure at all Xaa locations
  Clone ID: PAT_MRT4530_82703C.1.pep
KLIVAGLLLEELLINRIRFIFFSCRITQPVGISHVGRPPSFHDKAFPKPTQVYHMPTRGVPDQQQVRSQTILCQRTPGTFPGPRFWKFIXFTSTDPDVGFSKSFVKLQFYPSCYSDFKFEGDRRYSHRVHEYRGATGWLQGDIVWQLTMEGSNATS

SEQ ID NO: 185849 - protein, 254 aa, Oryza sativa
  Clone ID: PAT_MRT4530_82704C.1.pep
MERRVAFRWGGEALLAPAAAAAFRSVGTTTMDCGGNPNRITGAATDISHKDQDSGRLPSSHLHRQSESWATHGSDKEKEDEEVVQAKNEEVDSFIAAAEKTGPPQQNIDCTAAARRQANNYAKVALEHYNKDENNKIQYRFIKALKSCAIQTNESYGHVNFVASSSDSKEEFFFAEVCYDPKSNGLVPTCMVSLEENNRIGGLLGVGFVGCPDLLNPPVDNDHCYACDDRLKHPKDGTLFKGGHVAATGFYTSY

SEQ ID NO: 185850 - protein, 498 aa, Oryza sativa
  unsure (1)..(498): unsure at all Xaa locations
  Clone ID: PAT_MRT4530_82705C.1.pep
MGRPAQGARTREGRRERAGXPGSPRVVPGGTRLSAARLTVRREHAARXARMRRAHAQPHGSRWNARTGXTDRDRLDPVXAELAPTWRLRGCHAGRREVDDDAGRNGRRTTAASGGANHGDTGEGKHTGXLHRMRGDEPMARIRRRMPDGGELRRRHPAAEEGGNGDEVTRGRFPAARASTRLRESDASVGLGGATPSEAGDERVLRSSGGYGGEHTASDGNGRELALGARVQIGDRAEGXDDAGGXRKKEKRGREKGLASLPLWEKGGGXAGAWRQREEGLCLRPLAACVRRDGAEAMTAGRFGVARRHGRQARQRLTAAATRRLTARTGPRARAGRRGAADRGQLGPVAAKVAPTWRLHGSHVGRREEDDDVGRNGWRMAAASGGAIYSDAGKGERTGRLHRTRGDEPTARIRRRGLDGGGLRRRQPAAREGGNGDGATGDRFGRARASTRLRESVSSVGLDGSSPRKAGDGRLLLSAGGDGGEPTESGSVAWGGAN

SEQ ID NO: 185851 - protein, 152 aa, Oryza sativa
  Clone ID: PAT_MRT4530_82706C.1.pep
PPRRTPAAAWKRKLLGDHIFTWKLRSYLSHEFFSRKGKESSCSGPTRAQKPFSLSTQAQQQQANDGVMAGGGEGHNRPEVASEGNNDACWCTMLDLHLPMKEEKGTRSAALPHAWLDPATLSSSISTASSTQCLRGKRPDPAMTSGGGVGSE

SEQ ID NO: 185852 - protein, 266 aa, Oryza sativa
  unsure (1)..(266): unsure at all Xaa locations
  Clone ID: PAT_MRT4530_82707C.1.pep
MTSKRRGPRERAARPSLTGRPAQEGGLERPKTRARGREERESRWTGLTACGPGWDPLVSGSAHRAEGARGAXARVGEGLGARARFAXTRMRRAHAQPHGSRWNARTGGADRGRPVPTSAELVPTWRLRGSHAGRREVDDDAGRNGRWSTAASGGANHGDTGKSEHTGWLHVTRGDEPTVRIRRRELDGGESRRRQPAAGKGENGDEVTRGQFPAARASTRLRESDASVGLGGTTPSEAGDERXLPSSGGDGGEHTASDGNGRGGAG

SEQ ID NO: 185853 - protein, 274 aa, Oryza sativa
  Clone ID: PAT_MRT4530_82708C.1.pep
MDFDDHDEGDGDEEMPPMPLSSGYDAPMQPGLGGGGGGVPKPGGGVGGGGGGGGGGGGGGARYRECLKNHAVGIGGHAVDGCGEFMASGEEGSIDALRCAACGCHRNFHRKESESPTGVGPAETPAFSPYYRTPAGYLHHQQHQMAAAAAAAAAAAAGGYPQRPLALPSTSHSGRDEGDDMSGMVGPMVIGPMVGMSLGSAGPSGSGSGKKRFRTKFTQEQKDKMLAFAERLGWRIQKHDEAAVQQFCEEVCVKRHVLKVWMHNNKHTLGKKAP

SEQ ID NO: 185854 - protein, 375 aa, Oryza sativa
  unsure (1)..(375): unsure at all Xaa locations
  Clone ID: PAT_MRT4530_82709C.1.pep
RLQPRSRSAPPPARVPEPRHSNRRASRCIPRARAVVADRLVAAAVTLCRACPRLSPVSPLRSKPPRLGFQTDIAALXNPGALPSSFPPNPPRFSSAPLPPPSELCLAXPPFIAKRRESRSTSSLPVASRRRPDRCRRSQCAXPPSPPVLRSTRSSPTSLGVAPPNPTLATDSRSCVDALTAGNWPLVTSSPFPPFLSAGRRRRNPPPTDSLRRIXAVGSLPLFLPRHPGVRPVAPHRRKASRRNRRRPPSIRGRRLRLPPASPCGSHVGDTSAPARPRSDRADPGQPLSCVSIFVHPVRVSTDAFKLKIXVTTWVKLGFYKRLGKPDTWVGACELNEFXKTADRGTYRVYGFPLLHLRTVSLEFHPNIRQVRPHG

SEQ ID NO: 185855 - protein, 475 aa, Oryza sativa
  Clone ID: PAT_MRT4530_8270C.1.pep
MGRGDVGAARGWMRRKGTQQPGIGGRRYFLANCGSRSGGGARWDRAFLTYGLSSREYFLRNLSMDMHSKKNRKKHITMRGFLMHQLLDSSSSDDDDELILAAALIAQHQYDIDNAPRRRGGSVRSSKMKITWGKNAKTNRQPSVAPSKPGLPFGVDSDNDETEKEETRVVTTDCPGTKPSDNAESLKHQGNRLAEEGKYHEALGKWEAALTLMPNNAILHEQKAQILLELGDAWRALTAATRATELDPLWPEGWVTLGRAQLNFGEPDSAILSFDKALAIEPDNNEAKSDRETAARLVKKRGQLHSSGLSANKRRFTVGEDSEKEKDDSQMEDVEKCKEDEEKERDDSQLENVDSIRTFLLQDSTSPEGESVRRMWRKGNKRFGGGGEPAAKRRAAGDDGPSESADDDIVVAQISKNRRVAVRTWNGKVVVDIREFYEKDGKTLPGRKGIQLPMDQWKILRDNIKAIDEAIKENA

SEQ ID NO: 185856 - protein, 423 aa, Oryza sativa
  unsure (1)..(423): unsure at all Xaa locations
  Clone ID: PAT_MRT4530_82710C.1.pep
CARGKNGGSGWPGRLIRSRPRWRRRGSHAGRREVDDDAGRNGRRTTAASGGANHGDTGNSEHTGQLHVTRGGEPTAWIRRRLLDGGGLRRRQPAAGEEGNGDEVTRGRFPAVRASTRLRELDASVGLGGTTPSETGDERVLRSSGGDGGEHTASDGNEEEEGAAEVPFRVLERTGSSGARRRTAEARQSTGRRQWRGDEWERKGREGEDGFKWAAMSVWERGTDMGGQAGELALRLASKAATGGDAGERGKXRKGEKEGEKGGSPLCRIGKRXEGAGATRQGERRARPPSLGGLRAEWRGPGDDDGDDGGRYGAERRHERQARQALTTAATRRSATXRHARTGGNGRRPRWRAHAGSRGXRLHGCRRDRAREKGGGARRGGSRARARGARAGRRRRARAPGREGAGERWAERNSAHRTQGGKL

SEQ ID NO: 185857 - protein, 470 aa, Oryza sativa
  unsure (1)..(470): unsure at all Xaa locations
  Clone ID: PAT_MRT4530_82711C.1.pep
MTVGTAVRTPVGISHVGRPPSFHDKAFRKPTQETVLKCKGGKTVHPILSLKATVDTRTECTNIEAQDVQRWLALLEIWSLILEILALRGAAQRNWSGPADLNGPAGPRRRPRAAQDARARRKERESGGPGSPRAVPGGTRLSAARLTVRREYAAHARGRGRDALAPTWRLRGCHAGRREVDDDPAANGRRAAAASGGANHGDTGKSEHTGRSFVMRGDEPTARIRRRELDGGESRRRQPAGREEGNGGEATRGRFPAVRASTRLRELDASVGLGGATPSEAGDERRFRXSGGDGGEEKEEGAAEVPFRVLERTGSPGARRGTAEARQSTGAAVMGGQGRELAIGGRGQSGDREDDAGEEEKGEKEGGKGGLPLCRFGKKEEGSGATRQRERRARPPPLGGLRAEWRGPGSDDGDDGGRIGAERRHGRQTRQTLTTAATRRSATXRHARAGGNGRRGWAAGPGDADGADDA

SEQ ID NO: 185858 - protein, 83 aa, Oryza sativa
  Clone ID: PAT_MRT4530_82712C.1.pep
RAKHTHTRISTGWLISLSCVLASSSLLAMRSAALSFQDHGHGLQAITGRGGNGGAAAHALPWWAGAGAGAGSQTLLGTGGGEE

SEQ ID NO: 185859 - protein, 428 aa, Oryza sativa
  Clone ID: PAT_MRT4530_82713C.1.pep
MATQEREPERQPHAGRRVALFPLPFQGHLSPMLQLADLLRARGLAVTVLHTRSNAPDPARHRHGPDLAFLPIHEAALPEEATSPGADIVAQLLALNAACEAPFRDALASLLPGVACAVVDGQCHFVLAESLWIIPAGERLDEAVPELEPLRVRDLIRVDGCETEALCGFIARVADAMRDSASGVVVNTFDAIEASELGKIEAELSKPTFAVGPLHKLTTARTAAEQYRHFVRLYGPDRACLAWLDAHPPRSVLYVSLGSVACIDHDMFDEMAWGLAASGVPFLWVNRPGSVRGCMPALPYGVDVSRGKIVPWAPQRDVLAHPAIGGFWTHCGWNSTLESVCEGVPMLARPCFADQTVNARYVTHQWGVGLELGEVFDRDRVAVAVRKLMVGEEGAAMRETARRLKIQANQCVAATLAIDNLVKYICSL

SEQ ID NO: 185860 - protein, 353 aa, Oryza sativa
  Clone ID: PAT_MRT4530_82714C.1.pep
MTIALGRVTKEENDLFDIMDDWLRRDRFVFVGWSGLLLFPCAYFALGGWFTGTTFVTSWYTHGLASSYLEGCNFLTAAVSTPANSLAHSLLLLWGPEAQGDFTRWCQLGGVWPIVAPRGAFALGGFMLRQFELARSVQLRPYNAISFSGPIAVFVSVFLIYPLGQSGWFFAPSFGVAAIFRFILFFQGFHNWTLNPFHMMGVAGVLGAALLCAIHGATVENTLFEDGDGANTFRAFNPTQAEETYSMVTANRFWSQIFGVAFSNKCWLHFFMLFVPVTGLWMSAIGVVGLALNLRAYDFVSQEIRAAEDPEFETFYTKNILLNEGIRAWMAAQDQPHENLIFPEEVLPRGNAL

SEQ ID NO: 185861 - protein, 209 aa, Oryza sativa
  unsure (1)..(209): unsure at all Xaa locations
  Clone ID: PAT_MRT4530_82715C.1.pep
GKKGGLPLCRFGKRRRRGDAAEGKGELXPPSLGGLRAEWRGXRAMTTAMTAGRFGAERRHWRQARAGADDGGDRAVGHSARARGKTTGGAVVXTARLGRQARAGGTGRARATARGERQRGMGRRRARGRSARRYTRTRARGARAGRSGAEXRGARGGSRTREQRASEADGGGRSAXGGGERERARERDGPSGIRPIEPRGGKLNFCGGI

SEQ ID NO: 185862 - protein, 276 aa, Oryza sativa
  Clone ID: PAT_MRT4530_82716C.1.pep
MTIALGRVTKEENDLFDIMDDWLRRDRFVFVGWSGLLLFPCAYFALGGFMLRQFELARSVQLRPYNAISFSGPIVVFVSVFLIYPLGQSGWFFAPSFGVAAIFRFILFFQGFHNWTLNPFHMMGVAGVLGAALLCAIHGATVENTLFEDGDGANTFRAFNPTQAEETYSMVTANRFWSQIFGVAFSNKRWLHFFMLFVPVTGLWMSAIGVVGLALNLRAYDFVSQEIRAAEDPEFETFFTKNILLNEGIRAWMAAQDQPHENLIFPEEVLPRGNAL

SEQ ID NO: 185863 - protein, 377 aa, Oryza sativa
  unsure (1)..(377): unsure at all Xaa locations
  Clone ID: PAT_MRT4530_82717C.1.pep
WAGRPKAAQGTRAREGRREREPVDRAHLAWSRVGPACQRLGSPCGGSTRRGARMGEGXRCTRAVRGGCGCGGPTCSLTARGGTHARGGADRGRLDPALAELAPXWRLRGCHAGRRKVDDDAGRNGRQTTAASDGANHGDTGESEHTGWLHRTRGDEPTARIRRRECVGGGFRRRQPAAREGGNGDEVTRGRFPAARASTRLWESDASVGLGGAVPSEAGDERRFRARAATAASTRRAAASYGRARPESHSASTNAPVPPTRATTNDDGEQSTGGGXQWRGGEWERKGKGEAWVYRGDNVGLGTDLRRSKERASARRSRPKRRQGGGRRMTPAGGKRGKEGENRGACPLPLWEKEEGSGGDATEGGGGSASAPWRLAR

SEQ ID NO: 185864 - protein, 193 aa, Oryza sativa
  unsure (1)..(193): unsure at all Xaa locations
  Clone ID: PAT_MRT4530_82718C.1.pep
MLAACQRSSVRSDGCTAKCTYDSGAGAVAEPERFLSPEKTQQLKFLWSTFQQLQXGSSLFNAIDIILVIGLGMASEACKVNLQNEDKTKLIPYHTGRQKRSCRMNMLQSSSFFWSSWIYYCWTTATLKFRHCDNDNNEDDDAWPCLVPKIKTFNPSYRMFRHMYGVLNMEKKPTTQFAYKLRDESFKPNCTMI

SEQ ID NO: 185865 - protein, 135 aa, Oryza sativa
  Clone ID: PAT_MRT4530_82719C.1.pep
MERGGRTEGGITEMRRGAVTRGRRRGSNLSGLGPGKRKERARPKSPSASLLVPTPSTRATTNGDGEQSTEAAAMARRRKRGRLEGKELGFKGGGNVGLGTDLGRRRGAGATRQREEGRCLRPLAACAQSGGGRAV

SEQ ID NO: 185866 - protein, 172 aa, Oryza sativa
  Clone ID: PAT_MRT4530_8271C.1.pep
MFQNKHYHLALKNVAHTVDGFSVITVAQLHPLYNPLAAKRVIVNKKKKKKWSGSAQTNPDYAQASEIRETNPDYAQGYKVLFADDFPFLLASQVPTINQDNGIPGEEPTEALQALRSDEVLRPSHKNKRRVYFGQNLVCKESLSAKDEGRIIKVGDPVYVLESFPSSDEVPA

SEQ ID NO: 185867 - protein, 207 aa, Oryza sativa
  Clone ID: PAT_MRT4530_82720C.1.pep
MSRTLVQPVGQKRLTNVAVVRLRKHGQRFEIACFPNKVLSWRTRVEKDIDEVLQSHTVYSNVSKGVLAKSKDLLKAFSTDDHTAICLEILDKGELQVSGKEREAQLSSQFHEIATIVMDKTINPETRRPYTITMIERLMHDVHFAVDPNLTSKEQALKVIKKLTEHFPIKRAPLRVRFTAPKSKFASLTEKLEEWNANVIFKDESGS

SEQ ID NO: 185868 - protein, 49 aa, Oryza sativa
  Clone ID: PAT_MRT4530_82721C.1.pep
PGVRGVKLDLHHLVAGRPERPEAEHSPRDRKRHPRLGRGGGRHISEERS

SEQ ID NO: 185869 - protein, 148 aa, Oryza sativa
  Clone ID: PAT_MRT4530_82722C.1.pep
SSKSSHCGSSGSRAVPGGTRLAAARLTVRREFAAYARGRSMRTGKKRRERLAGSADPVAAEVAPTWRLRGSHAGRREVDDDAGRNGRRTTAASGGANHGDTGNSEHTGRLHVTRGGEPTAWIRRRLLDGAGLRRRQPMAGEEGNGDEV

SEQ ID NO: 185870 - protein, 405 aa, Oryza sativa
  Clone ID: PAT_MRT4530_82723C.1.pep
MSRTLVQPVGQKRLTNVAVVRLRKHGQRFEIACFPNKVLSWRTRVEKDIDEVLQSHTVYSNVSKGVLAKSKDLLKAFSTDDHTAICLEILDKGELQVSGKEREAQLSSQFHEIATIVMDKTINPETRRPYTITMIERLMHDVHFAVDPNLTSKEQRNNFVCVVWYLRSHLFNLDLQFFFNHVVYRLQQFCSTFFLQLINLAVTALKVIKKLTEHFPIKRAPLRVRFTAPKSKFASLTEKLEEWNANVISKDESGSQPSVVCEIEPSILRSCEERLKDVQGRVEVLSVSAHAEGGSSVDQYENTEESQSVPAVEIDPVARIGEAMQKQSISSEPENPGQGQGKQQRRCKECDVLVEDKLYREHCKSGWHKHNYTRHKNGLPPLSQEECLVEMELADSKRDLKDYDF

SEQ ID NO: 185871 - protein, 129 aa, Oryza sativa
  Clone ID: PAT_MRT4530_82724C.1.pep
CLRRGEGSKVKTTCRAVKPHSSVPLSKMTTGPLDNRPASLRPSLPDVSVDFKPALSSGHQALNRVGSTQPLLPLQGDIQQGHTPSGIIALGSAQPAACGGRGKMLPKLQAGLWAHVQMLHSSQKAHQIL

SEQ ID NO: 185872 - protein, 50 aa, Oryza sativa
  Clone ID: PAT_MRT4530_82725C.1.pep
QIQKHIMSFCHAHVLCRRLRHGLMHLYVATCHAGILFLPGDGMPCLLLLF

SEQ ID NO: 185873 - protein, 94 aa, Oryza sativa
  Clone ID: PAT_MRT4530_82726C.1.pep
KPEYIHNHSKKHENTGVHVTLHGSEKAAETHAAEMTGLHLLHSCTARTDTLSITAPGQKNSTQSLKIISQRDAPPTPNPTLQKIPNSTREVAAP

SEQ ID NO: 185874 - protein, 115 aa, Oryza sativa
  Clone ID: PAT_MRT4530_82727C.1.pep
MKPWTATVSLLLAAAVAMAAAVAVGEGAANYLVFVDPPPSGVVCTAYQLSILAAALGSEEKAKGAIIYNYKNVVSGFSARLTPSELEAVKKQPQVNRVLPSATLSLMSSNFDGIS

SEQ ID NO: 185875 - protein, 90 aa, Oryza sativa
  Clone ID: PAT_MRT4530_82728C.1.pep
INGHTRIGHTIREVPQEPTHERLHMEQQDGYHVTYTAYCLHAMLKGAIKIPDPHLSDPIAYYPEQQANAGATVESIKTYHTEFVPFHKGT

SEQ ID NO: 185876 - protein, 79 aa, Oryza sativa
  Clone ID: PAT_MRT4530_82729C.1.pep
MAAVARRRGAGESLEGGGDSGRRRRRIDAAQARPNGPTGLFVPGRHKHDPKDGSRPAALRRNSGGDAAAVACGFVVPSR

SEQ ID NO: 185877 - protein, 42 aa, Oryza sativa
  Clone ID: PAT_MRT4530_8272C.1.pep
LAHMMANSAQSLSNKLIDGDLYIYAECCLIYEEDSGQVTDLH

SEQ ID NO: 185878 - protein, 87 aa, Oryza sativa
  Clone ID: PAT_MRT4530_82730C.1.pep
LLSSVHQSRCITLFHSFVFFHVIFYRYQLTSLKNQPQQQALRQVLSPLSSPYYYPTSYCSCLCISPKSHPITDPDSLLTFCYTCCCA

SEQ ID NO: 185879 - protein, 40 aa, Oryza sativa
  Clone ID: PAT_MRT4530_82731C.1.pep
RIRLAVREIERVHKRLHEAVAKRAHKEISSPLSLQSHESP

SEQ ID NO: 185880 - protein, 142 aa, Oryza sativa
  Clone ID: PAT_MRT4530_82732C.1.pep
MAAGGMLCVSSSPTASASVARGRRQRRRSVEVRCSSVAAAGPGGPVEDHYRTLQLPPGATKGEVKRAFRRLALTYHPDVSKESDSGVHFQRINVAYQMVMGNMREAEERLEYWRLKYGLDDEDLDKYRNHLNDEDDDEWFDV

SEQ ID NO: 185881 - protein, 444 aa, Oryza sativa
  Clone ID: PAT_MRT4530_82733C.1.pep
RTAAKVDATVSRAEAEGALPVLGHRDPRGFVLSLSRPRTVVLLVQAGRAVDATIDALVPYLDAGDAIVDGGNEWYQNTERRIEEAAARGILYLGMGVSGGEEGARNGPSLMPGGHIDAYNNIRDILEKAAAQTEDGACVTFVGPGGAGNFVKMVHNGIEYGDMQLIAEAYDVLRRVGGLSNSEIADVFAEWNRGELESFLVEITADIFTVADPLDGSGGGGLVDKILDKTGMKGTGKWTVQQAAELAIAAPTIAASLDGRYLSGLKDERVAAAGVLEAEGMPSGLLETINVDKKMLVDRVRQALYASKICSYAQGMNLLRAKSVEKGWNLNLAELARIWKGGCIIRAKFLDRIKKAYDRNPELANLIVDREFAREMVQRQNAWRWVVARAVEAGISTPGMSASLSYFDTYRCSRLPANLIQAQRDLFGAHTYERIDRPGLNSVL

SEQ ID NO: 185882 - protein, 468 aa, Oryza sativa
  Clone ID: PAT_MRT4530_82734C.1.pep
MGEFLMKISKSRRQVASMSKSKLKLAEGALPVLGHRDPRGFVLSLSRPRTVVLLVQAGRAVDATIDALVPYLDAGDAIVDGGNEWYQNTERRIEEAAARGILYLGMGVSGGEEGARNGPSLMPGGHIDAYNNIRDILEKAAAQTEDGACVTFVGPGGAGNFVKMVHNGIEYGDMQLIAEAYDVLRRVGGLSNSEIADVFAEWNRGELESFLVEITADIFTVADPLDGSGGGGLVDKILDKTGMKGTGKWTVQQAAELAIAAPTIAASLDGRYLSGLKDERVAAAGVLEAEGMPSGLLETINVDKKMLVDRVRQALYASKICSYAQGMNLLRAKSVEKGWNLNLAELARIWKGGCIIRAKFLDRIKKAYDRNPELANLIVDREFAREMVQRQNAWRWVVARAVEAGISTPGMSASLSYFDTYRCSRLPANLIQAQRDLFGAHTYERIDRPGSFHTEWTKLARKSNGAAI

SEQ ID NO: 185883 - protein, 84 aa, Oryza sativa
  unsure (1)..(84): unsure at all Xaa locations
  Clone ID: PAT_MRT4530_82735C.1.pep
QFLPTQLQNDSPPVLTSQPITSVQPIVHQLQLHQFAGVYFDQAQAQAQAMLPLNXPSISGIYPSYNPAXPCSIPTVGGICCVPV

SEQ ID NO: 185884 - protein, 85 aa, Oryza sativa
  Clone ID: PAT_MRT4530_82736C.1.pep
SVRQDALTAILQPHFYQSETKLNASAIFSIIQTSMIYLLTCTWSCSCFRYSMASSSMDALSVCNPQNQHTNTDKFPAQTQQNPSS

SEQ ID NO: 185885 - protein, 88 aa, Oryza sativa
  unsure (1)..(88): unsure at all Xaa locations
  Clone ID: PAT_MRT4530_82737C.1.pep
LSPISMAHGTPGRSGTGLHQLQILKPPFLALYYPLVNKKAHRWRISTSVFILGKITINVGIRLLMIARYGVQIEXGAFEKRTDELLGR

SEQ ID NO: 185886 - protein, 62 aa, Oryza sativa
  Clone ID: PAT_MRT4530_82738C.1.pep
MERRAAPRVERKKRAERRRCLQEEAGQRGEEEGGEVARQGKRGRVGPGLKIPWTKIPLANED

SEQ ID NO: 185887 - protein, 203 aa, Oryza sativa
  Clone ID: PAT_MRT4530_82739C.1.pep
MAINGLRMGWAELVVWPNPRWLHWPLFSSYEREAVASAGGRRIHHGTAADAVATGDYGRDIGGQEARRCNLHRREAVGAASSGSGTPWLRARGDGRLRAGGEEATHPAAAPRPTHADLTTVGRIRHRYGRCDVGSGADPSQVTAVGRRGGGRFGRRSAQMRMARPPPWQARTSMDMEEWRRLPPRCAVVDVRSKLQQKFKLCL

SEQ ID NO: 185888 - protein, 180 aa, Oryza sativa
  Clone ID: PAT_MRT4530_8273C.1.pep
PRPPPPAPAPPPAPPPPPPPGRPGLLVPDLVGVASPPPDLRWLTPGYRNLPPSSSSSPTADWSSRSAPPAVCPLGSSTFLLGKNGGSPGLAFVSWMRTEVHPPWPRSGAGYGGHSGGCSPSRFPRPKGSSCSDGSSPARTPVDVDGRGRLSRQEEILRSFPTPEALQLAESSPCASLFVP

SEQ ID NO: 185889 - protein, 34 aa, Oryza sativa
  Clone ID: PAT_MRT4530_82740C.1.pep
NSVLQDMQIVAVLDVHSFQLHILFFNTTTMMITE

SEQ ID NO: 185890 - protein, 225 aa, Oryza sativa
  Clone ID: PAT_MRT4530_82741C.1.pep
MGGNVGLGTDLRGQGRELAFGGHGQSGDREDDAGEEKKGEKEGEKGGLPICRFGKKEEVSGGDAAEGGGMLPPSLGGLRAEWRGRAMTTAMTAGRFGTERRHWRQARAEADGGGDRAVGHHGTRARLATGGAADGVARLGHARWLAGPSGCAAAGGRAAGPGGADATRHGRQPSGHLNNMQTTSGYPLEGSKSTSGSGHKKGKENVTIARDWALLVDESDVIAID

SEQ ID NO: 185891 - protein, 477 aa, Oryza sativa
  unsure (1)..(477): unsure at all Xaa locations
  Clone ID: PAT_MRT4530_82742C.1.pep
VPDHTVPGSPGVLPDTTPANPHVSRHQGSPACRWHGSPCGASTRRTRTGGEGXRCIGAVRGERGCGGPTRSLTARGGPRPRVVLEGAADRGRLDPVSVELAPTWRLRGCHAGRREVDDDVGRNGRRTTAASGGANHGDTGESEHTGWLHETRGDEPMARIRRRMPDGGGLRRRHPAAEEGENSDEVSGGQFPAARATTRLRESDASVGLGGGTPSEAGDERRFRARAATAASTRRATATVGAAPANYGEATRTTVRXRGAVTRDRRRGSDLSGLGPRKRKKRARPESPSAXLVCTGSFGTHATTNGDGEQGTGGGGRRERGRRGRGRRARHPSLGGLRTEWXGPGDDDGDDGGTRLTAAATGRSATQHARAACNGRRGGAAGPDGADGADGADGATRATTTRARARERRRXGSGSEGSGEEGSARRGRLTRTRVGRAGRERGRDSWGGRGRWAERNSAHXTPGRQTRLLRRNLIWKD

SEQ ID NO: 185892 - protein, 406 aa, Oryza sativa
  unsure (1)..(406): unsure at all Xaa locations
  Clone ID: PAT_MRT4530_82743C.1.pep
VPDHTVPGSPGVLPDTTPANPHVSRHQGSPACQRLGSPCGGSTRRTRAGGGGTRCMCAVRGGXGYGGPTRSLTARGGTRARGGTDRGRLDPVLAELAPTWRLRGCNVGWREVDDDAGRNGRRTTAASGGANHGDTGESEHTGWLHETRGDEPTARIRRRKLDGGESRRRQPTGREKGNGDEVTRGRFPAVRASTRPRESDASVGLSGATPSEAGDERXYGARAATAASKLRATATVGAAPASYGEATRATVRRGAVTRGXGVGVISPAXAGEEEGEGAAEVPFRVLARAGSSDMRNDERRRRNRGRQWRGGGERNGRGKSMGGRLGFKWAAMSVWERGTDIGRSSRRAGAPASGQNGXGGDAGEREKGRKRGRERGACPLPLWEKEEGSGGARQREEGGSASVLGG

SEQ ID NO: 185893 - protein, 114 aa, Oryza sativa
  Clone ID: PAT_MRT4530_82744C.1.pep
MAVAIEAPFHVLAVDDSLPDRKLIERLLKTSSFQVTTVDSGSKALEFLGLHDHEDSPISTQSDQQEVAVNLIITDYCMPGMTGYDLLKKIKESSYLRDIPVVIMSSDNIPSRIN

SEQ ID NO: 185894 - protein, 93 aa, Oryza sativa
  Clone ID: PAT_MRT4530_82745C.1.pep
MSSQPLLQTTPGKRIALPTRVEPKVFFANERTFLSWLNFTVILGALAIGMLNFGDRVAFISAFLFTGVAMCTMVYALVTYHWRAQSIRMKGQA

SEQ ID NO: 185895 - protein, 393 aa, Oryza sativa
  unsure (1)..(393): unsure at all Xaa locations
  Clone ID: PAT_MRT4530_82746C.1.pep
WSSPAPAWSSPASRLRRPAPLPCRACSRSAPQPARVPEPRHSIRRASRCKPRARAXVADRLVVAVVSACPRLSPVSPLRSTPPRRRFQTDIAALKAXGALPLFSSXSPLLPPLSELCLAXPPFIAKRRESRSTSSLPVASRRCPDRCRRSPCARXPSPPELRSTRSSPASLGVAPPNPTLAANSRSRVDALTAGNWSLVTSSPFPPLLSAGCRRRNPPPTDSLRRIQAVGSLPLILPRHPGVRPVAPHRRKAPRRNRRRPPSICGRRLRLPPASPRGSHVGATSAPARPRSGRADPGQPLSCVSIFVHPVRVSTDTFKLKIXKTTWVKLGFYKRLGKPDTWVGACELNEFXKTADRGMYRVYGFPLSHLRTDSLEFHPNIRQVRQSRIHQERK

SEQ ID NO: 185896 - protein, 321 aa, Oryza sativa
  Clone ID: PAT_MRT4530_82747C.1.pep
MSKPSLPWKATRRSNAISYRIISTSRSYSVGRARRHRIHAFRFGKVAGCIAKIWLGKVGSDREIVRSGGFLGWCGNPIRSEDLKPDYILIFNKSDAANWQPLPSVLPEKRNISVQALPSSMAVAIEAPFHVLAVDDSLPDRKLIERLLKTSSFQVTTVDSGSKALEFLGLHDHEDSPISTQSDQQEVGVNLIITDYCMPGMTGYDLLKKIKESSYLRDIPVVIMSSDNIPSRINRCLEEGADEFFLKPVRLSDMSKLKPHILKSRCKEHYQQEQNLQSNSESNNSSNPTSENSSSSTSTNSHKRKAVDEEILPHTIRPRHS

SEQ ID NO: 185897 - protein, 455 aa, Oryza sativa
  unsure (1)..(455): unsure at all Xaa locations
  Clone ID: PAT_MRT4530_82748C.1.pep
GPAGPRRSKAHARGRQGEREPVDRAHLAWSLVGPACRXHGSPCGASTRRTRAGGGGTRCTRAVRGGRGCGGPTRSLTARGGTHARGGADWGRLNPVLAELAPTWRLRGCHAGRREVDDDAGRNGRRTTAASGGANHSDTGESEHTEWLHRTRGDEPTARIRRRELDGGELRRRQPAAGEGGNGDEVTRGRFPAARASTRLWESDASVGLGGAAPSEAGDERRFRARAAMAASTRRAAATVGAAPASYGEATRTTVRVGAVTRGRRRGSNLSGLGPGKRKERARPESPSASLLVPAPPTRATTNGDGEQSTGGGERGRRGRGRRSSASAPWRXRAEWRGRGDDDGDDGGGGLSGAARAGAXARGAERLRGRAAGPGGADGAGAARAATTRLSRTRGQSEGGAXRRGSRARARGARAERRXGGRERERECQGGRGRWAERDSAHRTRGRQNRLLRRN

SEQ ID NO: 185898 - protein, 410 aa, Oryza sativa
  unsure (1)..(410): unsure at all Xaa locations
  Clone ID: PAT_MRT4530_82749C.1.pep
WAGRPKARACGRGGEREPVDRAHHACTRRTRAGGGGTRCTRAVRGGXGCGGPTRSLTARGGTCAREGXDRGRPDPISAELAPTWRLRGXHAGWQEVDDDAGRNGRWTTATSDGANHGDTGESEHTGWLLRTRGDEPTARIRRRELDGGELRRRQLAGREEGKGDEVTRGQFPAVRASTRLRESVASVGLGGATPSEAGDERXYGARAATAASTRRAAATVGVAPASYGEATRATMRWGAVTRGRRRGSNLSGLGPGKRKERARPKSPSASSLVPAPPTRATTNGDGEMGKGGGXGATRQREEGLCLRPLEASTXSGGAEAMTTAMTAGALGHARWLAGPSGCAAAGAAGQRGRAAQTAQARRGRRPRERAREERRGGALGAALAHARVAHGRSGGGGREREREGAGEGGG

SEQ ID NO: 185899 - protein, 308 aa, Oryza sativa
  Clone ID: PAT_MRT4530_8274C.1.pep
MAPGSSIVTDIPESDCVSDGLSEALTGIRLDGDSTCKPWSTSLVTVELSSLTGLNDLLECPVCTNSMRPPILQCPNGHTICSNCKHRVENHCPTCRQELGNIRCLALEKVAESLQLPCKYQSLGCAEIHPYQNKLKHEELCRFRPYSCPYAGSECLIAGDVPMLVSHLINDHKVDLHEGCTFNHRYVKSNPYEVENATWMLTVFKCFGQHFCLHFEAFLLGMAPVYMAFLRFMGEDSEARNFCYSLEVGGNGRKLTWQGIPRSIRDSHKKVRDSFDGLIIHRNMALFFSGGNRQELKLRVTGRIWKEQ

SEQ ID NO: 185900 - protein, 485 aa, Oryza sativa
  Clone ID: PAT_MRT4530_82750C.1.pep
KKAAQSGPRRARAEEGERVRWTGLTTPGPGWDPLVSGSAHRAEGARGAALGCGGPTRSLTARGGTRARGGTDRGRPVPTSAELAPTWRLRGCHVGWREGDDDPAANGQRTATASGGANHGDMGKSEHTGRLFVMRGDEPTARIRRRELDGGESRRQQPAGREEGNGDEATRGRFPAVRASTRFRELDASVGLDGATPSEAGDVRVLRSSSGDGGEHTASDGNGRELALGGRGQSGDREDDAGEEEKGEKEGEKGGLPLCRFRKKEEVNGGDAAEEGGMLPPSLGGLRAEWRGRAMTTAMTAGRFGAERRHWRQARAEADGGGDRAVGHHGTRARLATGGAADGVARLGHARWLVGPSGCVTAGGRAAGPGGADATRHGRQPRGRARERARGAAARERRGKTRLGAGGSCARARAERRGAGRGSRASARRAREGHSARRRALARAARGGAEGEKERGKGRGRGEDGPGGNRPIDPRGGKIDFCGGI

SEQ ID NO: 185901 - protein, 251 aa, Oryza sativa
  Clone ID: PAT_MRT4530_82751C.1.pep
MGESLTEQCRVEVEGPRVAFQVRRQIPGLNPGQAVETTKLEYGRGRGNFRWSGLDMPRILLKERGALGNADTGGAWLSSARATAGVKPEEGEDEAKSSCPLCPGRHTCYNGRDKGSRSREGELTPKTRPQFGLQAATRLHEAGIANVDHPRHISMAYSSCLNRSLKPNKLLLRRIDGAIQVEVRPQWENGAPNNASSQTKNYEITLSFWGTRRLDLAIRGMLGAMIYFTGEVSGSSPGWPSCAREKNRRSI

SEQ ID NO: 185902 - protein, 226 aa, Oryza sativa
  Clone ID: PAT_MRT4530_82752C.1.pep
MDPLVSGSAHRAEGARGARARAGEGRGARARSAEERMRRAHAQPHGSRWNARTGGADRGRPVPTSAELAPTWRLRGCHAGRREVDDDAGRNGRRTTAASGGANHGDTGESEHTGAVKGASWRSAVAAKAATERMTPARKKKGKRREKKGLAPLPDSGKRRGERGDAAEGGGMLPPSLGGLRAEWRGPGGDDGERFGAARRHGRQARAGADDGGNQTVGHSACARGK

SEQ ID NO: 185903 - protein, 510 aa, Oryza sativa
  unsure (1)..(510): unsure at all Xaa locations
  Clone ID: PAT_MRT4530_82753C.1.pep
CYSRYHQINLKESDCLKTSFITPFDAYCYITMPFGFKNAGATYQCMIQRCLQSXLERNVEAYIDDAIIKTMRKDDLIADLEEIFKNIRVFRMKLNSDMCTFRVLSGKLLSFTVSHRGIEANPXNINPICNMQPPSTXKDVQKLIGCMVALSRFVSWLVEQGMPFFKLLKKTXDFQWTLKAQQAYEDFKSILTTPLVLASPMPXEPLLLYVSATSHMVSTFLIVXREEEGHVXKVQRPIYFISEILANSKTLYPQVXKMLYGVLIIVRKLPHYFQSYPVTVVTSFPPGNVLHNREAIGQIAKWVMELMPFDTSFKARTSIKSYMLVNFVAEXMEAKLEAPATKLEYWTMXFDGYLWVLGVGAGVVVISPTRERLRYVLQIHCPTSHDVAKYEALLHGLHXRLIVRGDSXLVVNQVMKDWSCLIDNLTAYLXGSMQIGGGFDGLELSRMLGHNNEDAGMFASFRSLRXHAPTDVFIEHLQEPIVSKTKVLEDNASRQVSMLDNDWRMPFIKF

SEQ ID NO: 185904 - protein, 257 aa, Oryza sativa
  Clone ID: PAT_MRT4530_82754C.1.pep
MPRILLKERGALGNADTGGAWLSSARATAGVKPEEGEDEAKSSCPLCPGRHTCYNGRDKGSRSREGELTPKTRPQFGLQAATRLHEAGIANVDHPRHISMAYSSCLNRSLKPNKLLLRRIDGAIQVEVRPQWENGAPNNASSQTKNYEITLSFWGTRRLDLAIRGMLGINKPLLGLRLPKAGLKKDLRVSRVGPGGSLNAFLFLPIGVISQGLAMVRGRRGRSTLEERRAMIYFTGEVSGSSPGWPSCAREKNRRSI

SEQ ID NO: 185905 - protein, 644 aa, Oryza sativa
  Clone ID: PAT_MRT4530_82755C.1.pep
MLKDVFDKLNFTVLAPTPMRLQLADSSVHYPAGIAEDVPVKIRDFFIPVDYVVLDMDTGKETPLILGRPFLSTAGANIDVGTGSIRFHINGKEEKFEFQPRTEQCSMVRIKYGSNPWNIQEVEVEPPKMDGPVKFMQNFLEKETTMPRNRYWKTPVKPPIPAKKLEQPAQKKTQSAPIPKKVWREKPKTPAPSPPETGFLNFEEISSNEFFRANQNEVFNETSLFHDHTDRWNPMAESGAGWAHCGFGRTGQATVPCHFWQADVSMEDAEAPRRLLNDTDLDLVIDWERQAYYMPSDREYAHTREYSPKLLKMIGMDVEFRTIWKAVGWQRFVVVDEPGFRLLTLQFLCTLKEIEDGISFRFFHKEYTLRWKGLSTLLGFHDTCKIDLQKGISGFEKNRFSEDISGAPICKKPRMNEIHNPTLRLMHKWIAMTLFPRGDQRPIRGDELIIMFAMVRKMKIAPVKCMISRCPCIDENYLVQGHILKHGVDGSLIYFFPGCTNEIPLPNAGYHLYNCHELTIPLQTIEESRVGGAYRETHNMTRNERESSSSSTPVQMYEAGWAAIGDASGWTQAPRHNIGVSTWASASEDRWLAPHDIQWGDNQASSSSGVPSSPSEWHSSSSHWDLGEITRRMDTLDMQTEEIQ

SEQ ID NO: 185906 - protein, 133 aa, Oryza sativa
  Clone ID: PAT_MRT4530_82756C.1.pep
MAYSSCLNRSLKPNKLLLRRIDGAIQVRSHVDLTFYSLVGSGRSGGGTTAPLFSRIHTSLISVWRAISRAQVEVRPQWENGAPNNASSQTKNYEITLSFWGDGGIVPFEPFFHAFPGGLEKAAINRTSLILPS

SEQ ID NO: 185907 - protein, 500 aa, Oryza sativa
  unsure (1)..(500): unsure at all Xaa locations
  Clone ID: PAT_MRT4530_82757C.1.pep
MGRPAQGGGPSARAXGGEEREGRWTGLTVRGPGVDPLVSGSAHRAEGTRDACARAGEGRGACARSAEEXDAAGPRAASRLAVERAHGRGXRGRPVPTSAELAPTWRLRGCHAGRREVDDDAGRNGRRTTAASGGANHGDTGESEHTGXLHETRGDEPTARIRRRLLDGGGLRRRQPAAGEEGNGDEVTRGRFPAVRASTRLRELDASVELGGTTPSEAGDGRVLRSSGGDSGEHTASNGNEEGDECPEXPFHVHERTGSPGAWRWTAEARQSTGAAAMGGQGRELALGGRGQSGDREDDAGEEKKGEKEGEKGXLPLCRFGKKEGGXGDAAEGGGMLPPSLGGLRAEWRGPGGDDGERFGAARRHGRQARXQALTMAATRRSATRHARAGNNGRRPRGRAHANTARGKRLCERGARARGGGALGVGDSRARARGVRAERRGXRRERRSARLSHARASCGRGRERERERERERAREREERAGGEGEMGRARFGPSTSGEAK

SEQ ID NO: 185908 - protein, 337 aa, Oryza sativa
  Clone ID: PAT_MRT4530_82758C.1.pep
MYTLQPRVCISSSRSSISPKAARLSHQKASTGKPYFREIQVHLSSKLGEASNAMNSTYQQLLDSFVDHTFTFKCQPLRPTESNFAPVDEIGEITRVIEIEGEIPADFPEGVYIRNGGNPLYGGLQSVSSIFGQSHNIWVEGEGMLHAVYFCKTEFRKVMKSMSNTSVFEHAGRVYAASEDDVPHEVDLHNLSTLGSWHLGGEWKLPFTAHPKVIPGSKEMVIFGINAVQPFLTVGIISEDGEKLKQKVGLKLDRCTYCHEIGVTGTYNIIIDSPLTLNPTRMLRGAPVLEFEEESYSRIGVMPHYGDADSVIWFYVEPFCTFHLVNCFEEGHEIYLS

SEQ ID NO: 185909 - protein, 387 aa, Oryza sativa
  Clone ID: PAT_MRT4530_82759C.1.pep
MYTLQPRVCISSSRSSISPKAARLSHQKASTGKPYFREIQVHLSSKLGEASNAMNSTYQQLLDSFVDHTFTFKCQPLRPTESNFAPVDEIGEITRVIEIEGEIPADFPEGVYIRNGGNPLYGGLQSVSSIFGQSHNIWVEGEGMLHAVYFCKSNNSTWSISYNNRYVQSETFRIEKERQKPCFLPMTDGNPPAMLIASVLNTLRFRKVMKSMSNTSVFEHAGRVYAASEDDVPHEVDLHNLSTLGSWHLGGEWKLPFTAHPKVIPGSKEMVIFGINAVQPFLTVGIISEDGEKLKQKVGLKLDRCTYCHEIGVTGTYNIIIDSPLTLNPTRMLRGAPVLEFEEESYSRIGVMPHYGDADSVIWFYVEPFCTFHLVNCFEEGHEIYLS

SEQ ID NO: 185910 - protein, 278 aa, Oryza sativa
  Clone ID: PAT_MRT4530_8275C.1.pep
MAGRAATWGRGVGARRGAEKAAARTVSAAVAVVGLAAGGRGRPDSHAGMYIGYTADAAASSSSSSSSSSSSSSEMLRFDTGWPDETPAPSSVAGRRRSAGGDHRQGRGQTEAAAAFIGVRRRPWGRFAAEIRDSTRNGARVWIGTFDSAEAAAMAYDQAALSARGAAAALNFPVERVRESLHALSLGAAGGSPVLALKRRHSKRKRRKKAELLAAAAATAATANATPQTRRISKSTELTTATTDEQKRFVVELEDLGAEYLEELLWLSEINGGSDPAD

SEQ ID NO: 185911 - protein, 133 aa, Oryza sativa
  Clone ID: PAT_MRT4530_82760C.1.pep
MSSATLFSRASPSRVGRVCEVMERTCKKQDNFNRKFYRCLRGQNSGAQCKFFMWQGEYAVWLVKEGVLHAWTDCNAQRTQVEVPDSLNASMGGVNDTIEKMRSELKKAMSTIRVAGIILVTAVVVFVAMNAMK

SEQ ID NO: 185912 - protein, 73 aa, Oryza sativa
  unsure (1)..(73): unsure at all Xaa locations
  Clone ID: PAT_MRT4530_82761C.1.pep
RPPFAVRNXNXRIGHLLRPRRRSTTSTSXXRNHXYPTSLPPVYXGTXXXYXFGXLXYAETKSXYXSNSXSSLT

SEQ ID NO: 185913 - protein, 64 aa, Oryza sativa
  Clone ID: PAT_MRT4530_82762C.1.pep
MGRRAPGGGDDGGFLPFLPGSDGSARAADPASVKVTDGGSVAGNHGGDGGAPRLGWRCRRRRLD

SEQ ID NO: 185914 - protein, 97 aa, Oryza sativa
  Clone ID: PAT_MRT4530_82763C.1.pep
VAAVLVLSSVSAEDCRSAAAIDDPKTTAASTSLPSSIVAVSAAAQISSKLILLLTWQDFIANRLDGESPTSAPCPLAPFFVHSSAEQTAVPRSQRST

SEQ ID NO: 185915 - protein, 45 aa, Oryza sativa
  Clone ID: PAT_MRT4530_82764C.1.pep
YNESRMSRFVVLGCVTSRLVFYGTEGVPGKPSRKMDKPISEQEEI

SEQ ID NO: 185916 - protein, 422 aa, Oryza sativa
  Clone ID: PAT_MRT4530_82765C.1.pep
MAAEEDDDDEEWKVALQQWKSKTYSLSVPLRVVALRGSFPPAWIKDFVEAQGKRLKFSPEFRTNLDVLYSEMSQCLDKGQLKQKSAMAADVVSIGDSWLGYAIRKGLVEPVKNAEEQDWFQSLSNRWKIHLCRNRNGEVDPNGSIWAVPYRWGTVVIAYKKNKFKRHNLKPIQDWGDLWRPELAGKISMVDSPREVIGAVLKHLGSSYNTNDMESEITGGRETVLESLTQLQNQVQLFDSTNYLKSFGVGDVWVAVGWSSDVIPAAKRMSDVAVVVPKSGSSLWADLWAIPSATKFQTDRIGGRTRGPSPLINQWFDFCLQSARSLPFRQDVIPGASPLFLEKPVPEVPQERNKRKPKLETNLVRGAPPLEILEKCEFLEPLSEKALDDYQWLITRMQRPNRGLFGNLLQNISSVLNFKSRV

SEQ ID NO: 185917 - protein, 306 aa, Oryza sativa
  Clone ID: PAT_MRT4530_82766C.1.pep
MGRSFRDSLKVLEADIQHANSLDTCHQIYCLSGQSYLLWPCSAAEFRREYDGACLQMRMSYCPAAHFFLFLVQWTDCNLAGALGLLRILIYKVYADGTTTMSAHERKASIREFYAVIFPSLMQLHEGINEVEDKKQKAICIERYRRRDEDQKMVISEIDDNIEEECGICMEINGKVVLPTCSHAMCIKCYRDWRSRSQSCPFCRDSLKRVNSADLWIYTDNRDIVDIATVRKENLRRLFMYIDKLPTVIPETVFDVYDSHCCRNCGALGVHAAPLVEAWVTGLSFRTLQRAPGMVQLQSENACRSA

SEQ ID NO: 185918 - protein, 181 aa, Oryza sativa
  Clone ID: PAT_MRT4530_82767C.1.pep
ELNWNQDVTNMICSIGNLKHLRYLSLNCYLQELPESVSGFYSLETLVISNLRILRATNFHNLVSLKSLHVYFEFLDGSLDQFCKLDMLDTLCLKRCSNLTYLPLHVGSLINLQRLKLIGIPNIRNLDHASFKYRRNNSITRYQEATFPFLEELELDKLCKLEDWYGIPQSDCPKLQRLTIR

SEQ ID NO: 185919 - protein, 151 aa, Oryza sativa
  Clone ID: PAT_MRT4530_82768C.1.pep
REVALRVPAVGLRRGGCARAAGKKQKAICIERYRRRDEDQKMVISEIDDNIEEECGICMEINGKVVLPTCSHAMCIKCYRDWRSRSQSCPFCRDSLKRVNSADLWIYTDNRDIVDIATVRKENLRRLFMYIDKLPTVIPETVFDVYDSHVK

SEQ ID NO: 185920 - protein, 218 aa, Oryza sativa
  Clone ID: PAT_MRT4530_82769C.1.pep
MRIMLPIFGVALQVLIKWKRLFAIKPLKLMSLSATILAFLPSLVQQIRSPSNLGFLYSLLNSSISFYLFSYQVHEKSILLPLLPASLLALQEPHLYGWLMYFGLFSMYPLICRDHLLLQYIAVLGLFVLIYYSPGGSSKKGMSIPSGAKAVLSLALLCSLLLQVLYLQIEPPKRYPFLFDALMMFICFSQFVILTLYTNYKQWMLNSHSRSVGKKKDL

SEQ ID NO: 185921 - protein, 73 aa, Oryza sativa
  Clone ID: PAT_MRT4530_8276C.1.pep
VCFLTIVTKRHPQLSNFLLVLSSTSSFSISFRVFRWAQQVQTLQPLQQEVIAQKKSCIQIFFPMKRKGDIRIS

SEQ ID NO: 185922 - protein, 39 aa, Oryza sativa
  Clone ID: PAT_MRT4530_82770C.1.pep
ADACDQRRVTGSTDRWPVLIQLMWVLSVSDDLINVGSNV

SEQ ID NO: 185923 - protein, 49 aa, Oryza sativa
  Clone ID: PAT_MRT4530_82771C.1.pep
MGDKGSSREEIAGTRGDMRDGYGNNKERQDADEQKDDAGTLKNILKGWK

SEQ ID NO: 185924 - protein, 97 aa, Oryza sativa
  Clone ID: PAT_MRT4530_82772C.1.pep
PAPRCRRRAAPRPPVACSVQTPPWPCPRPCPPGRHLRCRRRPARCSRGAGSTTSTPRGATSGSSASTASPPARRKRRRWPPTPASPSSSPSAAAPRR

SEQ ID NO: 185925 - protein, 256 aa, Oryza sativa
  unsure (1)..(256): unsure at all Xaa locations
  Clone ID: PAT_MRT4530_82773C.1.pep
RPRVRPRVRPRVPRVRAKLSASESEREWQKLVKKEKKXQKRLEMWDRQKAKLQEDIAECKTKITQVDRELAEINKAIRNMEMKIREDTKAKEENLALAEQEHAKRESAKANAERRLEEIRQKTEVESRCFKDDIKRLEDELARLQKSMGVNHPTVPSTHPPGVADRNSTRAPKQPTNQRPSPASNKQSQAPTQKASRRRDCVICKREEACVILLQCAHQVLCVGCNKRHEEKGVARCPCCNAKVEERIRVFGASSN

SEQ ID NO: 185926 - protein, 107 aa, Oryza sativa
  Clone ID: PAT_MRT4530_82774C.1.pep
MAAVVRWLGGVGKWVCEHQGSVAVGLEAAGNGGTTCVHRVVEAAQEKRTGGKGSRSHQRAPVAILQGKGKEGGLLVSLGRRARRRRAPRLEKVVSDGDVFEELKSAA

SEQ ID NO: 185927 - protein, 764 aa, Oryza sativa
  Clone ID: PAT_MRT4530_82775C.1.pep
MESQRMTWLYDRHHSLKHNKAERQAILSTYRLAKRPNLSSEGMIGESCIVRTNCFSVHLESLDDQTIYEYDVCVTPEVGINRAVIRELVKQQKDSGLGGRLPAYDGRKRLYTSGPLPFDSHRFLVLLDSIEDSPEESRHLRVRDFVVTLKFAAKISLWTLRKFRGGKPNRESRAALRALDVVLKELPTARYTQFAGSFYSPNLGECRQLCKVLESWRGFHQRIQATQMGLQLNIDVSSSVFIKPVPVVDYVAQLLNEDILLDRPLCSTEFLKIKEALEGLKVQINGILFNTYHVQDLVHQAASFPVNFSIQYPSLPCLKVAHFGETIFLPLEVCKIAEGQCHQKQLNAKHMAALLQVARQPPNERDYNILQTVHQNKYQEDPHAKEFGIKIEEKLVSIKSRILPAPWLKFHDSGETTEFLPQLGIWNMMHKKMINGGRVKSWACVNFCWSVREYAARNFCYDLGFMCRESGMVFSVKPVLPLVIAKPGCVESALRTLHDDVMDILRPQGRKLDLLIVILPNNNGSLYGDVKRICETDIGLISQCCLAKHVLKMNKWYLASVALKINAKMGGRNTVLVDALEMRLPHVRDTPTIVFGAHVTHPHPGKANSSSIAAVVASQDWPEVTKYAGLISVQACHQESIQGLFKVQDDPERGTTTSGMIKEHLMSFYRATKRKPGRIIFYRDGVSKGQLPQALMHELGAIKMACASMGPDYNPLVTYVVLQKCRHTRLFADYYNANTHDSTANIRAAPQLAPNPYQLMRPVD

SEQ ID NO: 185928 - protein, 390 aa, Oryza sativa
  unsure (1)..(390): unsure at all Xaa locations
  Clone ID: PAT_MRT4530_82776C.1.pep
PPFRSLAAAPRASFARAPAWSSPASRSAPPPARVPEPRHSIRRPPPPPLQAARACRVADRLVAAAVTLCRASPHLSPVSSRRSKPPRRRFQTDIAALKAPGALPLFSLPSPLLPPSELCLAXPPFIAKRRESRSSSSLPVASRRRPDRYRRSQCAXPPSPPVLRSTRSLPASLGVAPPNPTLATDSRSRVDALTAGNWPLVTSSPFPPFXLSAGCRRRNPPPTDSLRRIQAVGSLPLFLPRHPGVRPVAPHRRKAPRRNRRRPPSIHGRRLRLPPASPRGSHVGATXDATSAPARPRSGRADPGQPLPCVSIFLHPVRVSTDAFKLKIXKTSWVKLGFYKRLGKPDTWVGTCELNEFXKAADRGTYRVYGFPLSHLRTVSLEFHPNIRQV

SEQ ID NO: 185929 - protein, 508 aa, Oryza sativa
  unsure (1)..(508): unsure at all Xaa locations
  Clone ID: PAT_MRT4530_82777C.1.pep
WAGRPKXAAQSARGRGGVRGPVDRAHHARSRGGEGTRYTRAARGECRCGGPTRSLTARGETRARGWADRGRPVPTSAELAPTWRLRGGHVGWREVDDDPAANRRRAAAASGGANHGDTGKSEHTGWLFMMRGDEPTARIRRRLLDGGGLRRRQPAAGEEGNGDEATRGRFPAVRASILLRELDASVGLGGATPSEAGDERRFRARAATAASTRRATPTEEEGEGAAEVPFRVLERTGSSGTHATTNGDGEQGRXNGVEAKTREIGGGGLGFKWAAMSVLERGTDIGRSRRELALGACGQTATGGDAGXGGKRGKEGGKRGAHPFLLWEKGGGEXATRQRERGRCLRPLAACARSGGGRAMTTVMTAGRFGAELTAAATRRSATXARARGKQRAGAARGRACEQRRAGAAAKVRKGXARLGAGDSRARARGARRSGGGRGRTARWLTHARAERRERRRGARRGARAHPRAARGQXGXERRERKRAXGREGAGGEMGRAEFGPSNPGEAK

SEQ ID NO: 185930 - protein, 118 aa, Oryza sativa
  unsure (1)..(118): unsure at all Xaa locations
  Clone ID: PAT_MRT4530_82778C.1.pep
ILNARTVPPSLPAADPPRRAGRSPSRARLTVIVRGLASPRRRLNPTRLVVRFRVPDSRGSSATSPAAXRPCSGGLMQHPHGKDDREHAVAASGEPGVSPLPVADLHLIAAGRWSPVTT

SEQ ID NO: 185931 - protein, 89 aa, Oryza sativa
  Clone ID: PAT_MRT4530_82779C.1.pep
MEPKLGQSCNSGRSQSGEGGQMGNPPSAKDDAEAAARKMEDDFNAFTVSKADDLAKPLKDAGIPYKIHISAVCPSPSAALPSPTRGGGR

SEQ ID NO: 185932 - protein, 336 aa, Oryza sativa
  Clone ID: PAT_MRT4530_8277C.1.pep
MAAACAWDALPEHLQERILSLLPLTALLPVAAASRALRRLLRSRAFHALLTPHRLDAFFLLSPRLAFHPLSRRLLPAPPAASPPVVSSPSHLVTAASLLRLPPLPATSYLLAVVLPIPASSSSSSSCSREFTLVAVTAGARVRSYTLDSADPSPRWDPRGDLPLPFALLGNAAGDRRQLFVLGRGPDAILVFDLATGQWTVLPAAMPLGLTTAHLFVFGGRLFLVGGVERFGVVERVLVWRLEGSEAAAEWTEVGAMPEEVFDELVAGRHGSFWHFQAADRMGIVCLYNAVDGRLVMFDAVDGGWTRLSRVSGLDVEESRRWFGHVVEPRVELLLG

SEQ ID NO: 185933 - protein, 257 aa, Oryza sativa
  unsure (1)..(257): unsure at all Xaa locations
  Clone ID: PAT_MRT4530_82780C.1.pep
MGRPAQXAQARARGRGGEREPVDRAHLAWSRVGPACRXHGSPCGASTRRTRAGGGGTRCTRAVRGGXGCGGPTRSLTACGGTRARGGADRGRLDPALAELAPTWRLRGCHAGRQEVDDDAGRNGRRTTAASGGANHDDTGESEHTGWLHETRGDEPTARIHRRELDGGESRRRQTAAGEGENGDEVTRGRFPAARAPMRLRESDASVGLGGNASGEAGDERRFRARAATVASTWRAAATVGAAPASYGEATHATTRV

SEQ ID NO: 185934 - protein, 503 aa, Oryza sativa
  unsure (1)..(503): unsure at all Xaa locations
  Clone ID: PAT_MRT4530_82781C.1.pep
MGRPAQGGPSARAGGEEREGRWTGLTVRGPGWDPLVSGSAHRAEGARGARARAGEGRGARARSAEERMRRAHAQPHGSRWNARTGGADRGRPVPSSAELAPTWRLRGCHVGWREVDDDAGRNGRRTTAASGGANHGDTGESXHTGWLHETRGDEPTARICRRKLDGGESRRRQPAGREEGNGDEVTRGRFPAARASTRLRESVASVGLGGTTPSEAGDERVLRSSSGDGGEHTASDGNEEEDERGRSPLPRPCSCRLLQHAQRRTATMNRARGRRQWRGGEWERKGTXLAAKTATXEGGRMTPAGGKXGEKGGGERGLSPCLFGKRXGSGGVTAGGRGLGLRPLAACARSGGAEAMTTAMTAGRFGAARRHGRQARDGAAEGDGGGHQAVGHSARARGKQRAARLGTRAGSRGRAAARLQARQGSGTGRRGRRRRRGSGAGSSPGMGRRRARGGGARRGAXRRRGRARGGGEREGEGERERAGGGERERWAERDSAHRPGGGK

SEQ ID NO: 185935 - protein, 72 aa, Oryza sativa
  Clone ID: PAT_MRT4530_82782C.1.pep
MKKNRKKKSFLNTREKVPSKLHYCKGILSIYLKEGTNEDKRKLLLICPSGIYGVNHFDFFSNQTYLNLTKII

SEQ ID NO: 185936 - protein, 306 aa, Oryza sativa
  unsure (1)..(306): unsure at all Xaa locations
  Clone ID: PAT_MRT4530_82783C.1.pep
AELAPTWRLRGCHAGRQEVDDDPAANGRRVAAASGGANHGDTGKSEHTGRLHGTRGDEPTARIRRRLLDGGGLRRRQPAAREEGNGDEATRGRFPAVRPSTRLRELDASVGLGGTTPSEAGDERVRAGRGAVTRGRRRGSNLSGLXAGEEEEEGAAEVLFRVLARAGSSXTRATTIGDCETEGGNGAEAKMREFGGGGLGLKWAAMSVWERGTDIERSRRERALGACSQSGGRRMTPARRKKGKRRGRKGLAPLPIREKRGRGAGASRQRXGGARLRPLAACARSGGGRAMTTAMTGGRLGAERRH

SEQ ID NO: 185937 - protein, 268 aa, Oryza sativa
  Clone ID: PAT_MRT4530_82784C.1.pep
MARNKVKLQRIINDAKRRATFKKRLKGLMKKASELATLCNVDTCLMVYGEGEAQATVVWPSESEVMRVLERFKTLPQLDKYKKMTDLEGFIQERINKFQEQLDKVRRDADESETKLLLIEALEGRRPGLEGITIEQLTSLGWLVDARLNIVNDQLQKLHEQGLLPASISLPTMGVLPYTTAGYTVAQEAPIQRGGWLMGVVRGIGSLGYSLFRGSGRSNTAGPSGDMVQPFNIGAGSSLANQGGCRNNQQEEVVTSVRSGKLNVVAFP

SEQ ID NO: 185938 - protein, 321 aa, Oryza sativa
  Clone ID: PAT_MRT4530_82785C.1.pep
MAAEAWRARFRERVVEAASRMARMERVQGHLAAAQGHLALAAPLLADNAAAAAARDRIQRVLGALGEASSDLAFAMSVMNGAKLLVFSDVIGIEQLGDQYFPEGNAGVVLHDSVEDVEEAFAMVDSCRSHLDAVLLLLDHPRLPGVDGLIQEELAAADGDLQAAIGNAELGTELAVGARQDPHSRSAPQPVRVPEPRHSIRRASRCDPRARAVVADHPVAAAVSPCTCLSPVSSRRSKPPRRHRRRHRLGPATPAQAAKGRRQSLPPPSAASPRSLLLFPKEARGQAPFSLPLFLFPSPPASSSLRPDAVLAASAERQLAP

SEQ ID NO: 185939 - protein, 190 aa, Oryza sativa
  unsure (1)..(190): unsure at all Xaa locations
  Clone ID: PAT_MRT4530_82786C.1.pep
NLCRGDTLYPHDITNPDHPARISKADTGSPYANERGPIPTSGXVPDHTVPGSPRVLPGTTPLNPHVSWHHGSPDXLITQPGASHSTYVVTFALCLDEIPKXRSLSARAGNRTPDFKFQGKCSDARARRPMHRSTTVDKGDLVTCLARNLELDPRNPRTTGLRAPKLHAKRDSSTNGKNKALLLTSKRAIK

SEQ ID NO: 185940 - protein, 377 aa, Oryza sativa
  unsure (1)..(377): unsure at all Xaa locations
  Clone ID: PAT_MRT4530_82787C.1.pep
SRSAPQPARVPEPRHSIRRASRCKPRARAXVADRLVAXVVSACPRLSPVSPPRSTPPRRRFQTNIAALKXPGALPLFSSXSPLLPPPSELCLAXPPFIAKRRESRSSSSLPVTSRRRPDRCRRSPCARXPSPPELRSTRSSPASLGVAPPNPTLATDSRGRVNALTAGNWPLVTSSPFPPLPSAGCRRRNPPPTDSLRXSXAVGSLPLLLPRHPGVRPVAPHRRKAPRRNRRRPPSIRGRRLRLPPASPRGSHVGATXGATSAPARPRSGRADPGQPLPCASVLVHSVRVSTDAFKLKIXITTWVKLGFYKRLGKPDTWVGACELNEFXKTADRGTYRVHGFPLLHLRTVSLEFHPNISQVRPHGWNGTPLAEGDRR

SEQ ID NO: 185941 - protein, 59 aa, Oryza sativa
  unsure (1)..(59): unsure at all Xaa locations
  Clone ID: PAT_MRT4530_82788C.1.pep
SPSPAGAPAPPXPSRCHPAPARARRVEXXXPPPPXPPGXXXPQELWPARHAAPPRPAPP

SEQ ID NO: 185942 - protein, 400 aa, Oryza sativa
  unsure (1)..(400): unsure at all Xaa locations
  Clone ID: PAT_MRT4530_82789C.1.pep
IDVEFRSIWKAVGWXRFAGVDETGSHLLTLQFLCTLKEIEDGISFHFFXKKYTLTWKGLSTLLGFHDSCKIDLQKGISGFEKXNRFWEDILGAPICKKPRNNDIYNPTLRLMHKWIAMTLFPRSDLRPIRGDELIIIFAMVRKIKITPVKCMIRQWLESIKFSAPVECTSLITRIAKGLGVVSDQIAFISATRPRIDEAYLVQGHILKHGADESLVYFFPXCTNEIPLPNAGYHLYNCNELTIPLQTIEESHAGRAYRETRNMTRNERESSSSSTLVQMYEASWEPTGDAPGWTQTPRHSIGVSTXASASEDRWHAPHDIHWGDNQPSRSSGVPPSPSEWHSSSSRWDLGEITRRMDTFDVQTGEIQYNLTEHIAQTREWQQSADAXFTNINIMMQQQHV

SEQ ID NO: 185943 - protein, 249 aa, Oryza sativa
  Clone ID: PAT_MRT4530_8278C.1.pep
MESDTSGGGLNRSMAAINREMTRRGARFDGGRNDWRSNRWVGHFGRVARTFRWSQEGEVAGIAKSLVYGEPGGGLSGQLGVSGEMINSSPGAWRFAHGTNSGWRVIFAKVEFVRVCVEYVFVVGYSLGLGVVIGIRSRLCVLSQPLKAVAKGASVEDQRLPDWPHYGPDPVSSKRNFLCDCRQDFVDLAGSEQAAQTHAVGARLKEGCHINRSLLTLTTVIRELRKAKCGLFVTHRVMPIAKIDVGRSV

SEQ ID NO: 185944 - protein, 255 aa, Oryza sativa
  unsure (1)..(255): unsure at all Xaa locations
  Clone ID: PAT_MRT4530_82790C.1.pep
TTLLTRVTQPVGISHVGRPPSFHDKAFRKPTQVYHMPTRGVPDQQQETILRCKSGKPYTRYVPRSAVLEIHLVRKHRPRCRVFPXVFVKLQFYPSCYSDFKFEGDRRYSHRVHEYRGATGWLQGDMGAAQEKWSGPAKLNGPAGPRRPKLARAREGGEREPVDRADHARSRVGPACQRLGSPXGGSTRRTRAGGEGTRCMRAVRGGRKCGGPTRSLTARGGSRARGGTDRGRPDPVWLSWRRCGAYVAATRAGGR

SEQ ID NO: 185945 - protein, 61 aa, Oryza sativa
  Clone ID: PAT_MRT4530_82791C.1.pep
VIANIQTGGSCSWSRHGLVEGRATVRMLDSHIDSTFLALDGDAHGQWVTVPKKNIGLCDAH

SEQ ID NO: 185946 - protein, 75 aa, Oryza sativa
  Clone ID: PAT_MRT4530_82792C.1.pep
PHLEKCMGKGRKARTKTTRSSTAGRTRNNNGSAASSYSPYSSPAIANRASLPNGVTDGSASVTGEDHSNHILPEP

SEQ ID NO: 185947 - protein, 39 aa, Oryza sativa
  Clone ID: PAT_MRT4530_82793C.1.pep
NARPRRERKKRERERERERESEMMELMRGKRSLWVQNKL

SEQ ID NO: 185948 - protein, 72 aa, Oryza sativa
  Clone ID: PAT_MRT4530_82794C.1.pep
MRDAARPKKSVAEEKSKGERTGDDGVEEEVLAMRSMEVGERSSPSLARPWPAQWLAHVMWTYMAVDPTIFFV

SEQ ID NO: 185949 - protein, 64 aa, Oryza sativa
  unsure (1)..(64): unsure at all Xaa locations
  Clone ID: PAT_MRT4530_82795C.1.pep
VNAADDADDVRPTNPGHSPGIGHAVVNSAXDDADDVRPTNPGHSPGIGHAFVNKIDGPAGKKKL

SEQ ID NO: 185950 - protein, 130 aa, Oryza sativa
  Clone ID: PAT_MRT4530_82796C.1.pep
MDEREFRRMLELFPVVRSRDYCAESGASSKGSTQQSRAQEATRGNKNESSDAKLRDFIEARRAGAVDNSDCWFFKLDFESTIFRQENSVSFLESNRDQLAILVTFARANSHHFTRVELDSAEHSELNNQH

SEQ ID NO: 185951 - protein, 54 aa, Oryza sativa
  Clone ID: PAT_MRT4530_82797C.1.pep
SGTLDPGTRGHLSRLCWFSVHCFVICFLPDDMRCDGELLRVSLNLPLKKGTGVE

SEQ ID NO: 185952 - protein, 77 aa, Oryza sativa
  unsure (1)..(77): unsure at all Xaa locations
  Clone ID: PAT_MRT4530_82798C.1.pep
RNLIPVILHAAAREYARTIANNISDCHKAGKIGDTIPDTVKDTXCPLFNMMITLMVREHLAIAPLLDTHSGEMTRYL

SEQ ID NO: 185953 - protein, 88 aa, Oryza sativa
  unsure (1)..(88): unsure at all Xaa locations
  Clone ID: PAT_MRT4530_82799C.1.pep
MDEREFRRMLELFPVVRSRDYCAESGASSKGSTQQSRAQEATRGNKNESSDQFMKKLKMVAEKKVGATKXAKLFCKTFEEAHKKLVWT

SEQ ID NO: 185954 - protein, 60 aa, Oryza sativa
  Clone ID: PAT_MRT4530_8279C.1.pep
LCAIPRAPRAGLAASRRAHPGRVFLRRAIAARYVLLRRMWRVGVSWRSERPGACMMLFSL

SEQ ID NO: 185955 - protein, 151 aa, Oryza sativa
  unsure (1)..(151): unsure at all Xaa locations
  Clone ID: PAT_MRT4530_827C.1.pep
RTVWEGDRFFVLKELVSPHGYXNMYTRGHYNXSSRSIILSAHRHPLFXGFYLSTDEIWHLTRGCICSVRSPANGXLLRSAGAGNCLVYVGVVXAASVHSTSWIAPVWMIYLSAYLSYVLVSLGLVSQFSSIDCLSLXGFCRYRLNCFTRLD

SEQ ID NO: 185956 - protein, 105 aa, Oryza sativa
  Clone ID: PAT_MRT4530_82800C.1.pep
MDEREFRRMLELFPVVRSRDYCAESGASSKGSTQQSRAQEATRGNKNESSDQFMKKLKMVAEKKVGATKAELFCKTFEEAHKKLVYKELNLDAAQRFLNAYEKRS

SEQ ID NO: 185957 - protein, 146 aa, Oryza sativa
  unsure (1)..(146): unsure at all Xaa locations
  Clone ID: PAT_MRT4530_82801C.1.pep
RRRRRAPVPAAAGAAASTAARSPPSPRRSPPASSPAPRPPPCAPRRPRRPTSAAAAPAPASAPRPXRPRFXSPAAAAADAAAVSARRRPRRLRRRRSPGGWWRAPCRRLAPRRRSRPACSARRAGRRRRRSRQCCRCRSPAPPCPR

SEQ ID NO: 185958 - protein, 124 aa, Oryza sativa
  Clone ID: PAT_MRT4530_82802C.1.pep
PPLGATGKCFNPLGNPPGPGFPFKAQGGPRTIQGALRWISTRGGPGALFPNVFWGVLNSPPGFFFSNWVPGLFLPVFFFHQGFGPFGGLCPSLFPFFRLFRFRKGGGFPWGPYPGVVFLAKFPP

SEQ ID NO: 185959 - protein, 188 aa, Oryza sativa
  unsure (1)..(188): unsure at all Xaa locations
  Clone ID: PAT_MRT4530_82803C.1.pep
MPPKKVAEEKVARCKESEAGVEMAVEEGAEPSVLGAEAGVAPSTSAPTPQPPPSAPAASTGQAPNTVDTAKAAXAQVNTNLEAQAEADMGAMRQNMARLXDMLRQMQEQQQAYEAARQAKVASVPILQYSADIPPKVYPTLLVQPQVRLVXAQVRPPPLGQMSQAMAEGASALQAQLQAFLPGPGPSP

SEQ ID NO: 185960 - protein, 1519 aa, Oryza sativa
  unsure (1)..(1519): unsure at all Xaa locations
  Clone ID: PAT_MRT4530_82804C.1.pep
MAEIIKQRRRRAKDRAGIPQGWRHLGXRLYGEECMAKADGFAITSSTSRRPKRPSQPIKPRGHWASVCQSAHXRPMYLNYTIYPCKCPFHKGNHLSFRQAXASTVGTSEGNHXERMPPKKVAEEKVARCKESEAGVEMAVEEGAEPSVLGAEAGVAPSTSAPTPQPPPSAPAASTGQAPNTVDTAKAAATTRALQTRAEILSTSEVVVPQAASPQQATTSTALTAAQVNTNLEAQAEADMGAMRQNMARLXDMLRQMQEQQQAYEAARQAKVASVPILQYSADIPPKVYLQAPIQALPSQAVQAPAYCAGQRSVATVHPTLLVQPQVRLVXAQVRPPPLGQMSQAMAEGASALQAQLQAFLQXSTNPKXISEATPSVQLEGNTSQGAPSWLPSNLPGPGPSPWSQGPXFDFSNATQAPTIRPQAPTPSFGANQAPNKIAMAWTQPSFDPSMAAHQASPFRAGQPNTMAQLHVQAITSHFATPYPNGPPQQGAVRKTGGETGLPLSGGIKIRPIPPQFKFPPIPRYSGETDPKEFLSIYESTIEAAHGDENTKAKVIHLALDGIARSWYFNLLANSIYSWEQLCDVFVLNFXGTYEKPKPQQHLLGICQRPGESIREYIRCFSQARCHVXDITEAFVINAASAVLLEGELIRKIANKEPQTLEHLLRIIDGYARGEEDTKRRQAIQAEYDKASVAAAQAQAQAQVAESAPLAVRXPQPANQGXSPRPGQAPMTWRKFRNDRVGKAVMAVEEIQALRKEFNAQQASSHQQPVRKKYLNQQISFGPEDAEGVLFPHQDRAILAEVXGFEVQRILVDGGSSXTMGLPILALTQAPXLRGFSGEAVQVLGQAHLVVAFGTGENRGEEQILFDVVDIPYNYNAIFGRATLNKFEAISDHNYLKLKMPGPEGVIVVKGLQHSATSKGDLAVINRAVHNVEAEPHDRVKHVPKPAPHGRVIKVQVDDAYPTRLVSLGGDMGVREAEIILEVLKKNIDIFAWGPDEVGGVSTDLIMHHLAGKPDAKPRKQKLRKMSANRQEAAKAEVQMLCKARVIQEIDHPEWLAFARASCWVFSFLKGVSRRTPKKIDAIQQMNPPSSVREVQKLAGRIAALNRFLSKAAERGLPFFKTLXGAGKFTWAPECQAAFDELKQYLQSTSALVSPALGSELLLYLAASPVAVTAALVQETESGQKPVYFVFETLQGAKIRYIEMEKLAYALVMASRKLQHYFQGHKVTVPSQYLLGEVLRGKEITGRLSKWAAELSPFDLHFVARTAIKSQVLADFVAEWTPTFALEPXPVEQPWVMYSDGSWSHKGAGVAAVLTSPGGVSIQYTARLKFDTTNNTAEYEAILLGLKKAKALGVRCLLIXTDSKLVASHVDKSFEAEEEGMKRYLEAVRSMEKCFAGITVEHLPRGQNEEADALAKSTACGGPHSPDIFFEVLYAPSVPIEILDIMAIDQAELCEDLKDWXTPFVKYLKNGWLPEDEAEAKSQLYCSGVLQPLLRCISFAKGEPDSKPHHQPAESTRRS

SEQ ID NO: 185961 - protein, 95 aa, Oryza sativa
  Clone ID: PAT_MRT4530_82805C.1.pep
MSIFTPYCLCVGPGMRPIVPCRAGPTCRRRGPGTARWPGRAGTGPTLDGPCRAWAGPKRRAMGQAVGPRAFWPSIDRSHLPACGPSFGTTKYLVR

SEQ ID NO: 185962 - protein, 207 aa, Oryza sativa
  unsure (1)..(207): unsure at all Xaa locations
  Clone ID: PAT_MRT4530_82806C.1.pep
LVLQQHGIHNTCPILFFTVCLFLLCDGSLAHQLFCQSTSHWQSSRRGSPRGCRFDRXLQAFEPIRSVRSQADTSEFFHVSNELLQCTGVSDGRRVIEPRGLLLPHYTNDAXLAYMIQGRGITGPTFPACPXETYQQXLQQSGQAQLTDSHSQSHKFKDEHYKIDRFRQGDVIASPAGVAHCRYNDGEVPVAAIYVTDINNEANQLDP

SEQ ID NO: 185963 - protein, 92 aa, Oryza sativa
  Clone ID: PAT_MRT4530_82808C.1.pep
KKTVPRSSGGASCGAISVSSASALLVGLFSPECGPPNIAAFSKLGPKAGWFYRKIGSWSPSKKLELGGPPLDRLLIPSRRKIVCLFLENVYA

SEQ ID NO: 185964 - protein, 250 aa, Oryza sativa
  Clone ID: PAT_MRT4530_82809C.1.pep
ARPSSTDRPAQDGPSARAREGEPVDRAHHAWSRVGPACQRLGSPCGGSMRRTRAGGAGTRCTRAVRGGTDAAGPRAASRLTADHTHGEKRRARLAGSAYPVAAEVAPTWRLRGSHAGRREVDDDPAANGRRATAASGGASHGDTGENEHTGWLHRTRGDEPTARIRRRLLDGGGLRRRQPAAREEGNGDEATRGRFPAVRASTRLRELDASVGLGGTTPSEAGDERVLRSSGGDGGEHTASDGNGRGGAS

SEQ ID NO: 185965 - protein, 107 aa, Oryza sativa
  Clone ID: PAT_MRT4530_8280C.1.pep
FINHSQDKTTKVAPRRGDKKTSPALTGEPPPFAGGRTPPKGEKMAFVQDPREQNEKRIIPPNYPAIPAGQSFFGQGDGLNAETKTRLLGSKKTWRGAPNTKKSGVFG

SEQ ID NO: 185966 - protein, 61 aa, Oryza sativa
  Clone ID: PAT_MRT4530_82810C.1.pep
GFSMVPLYYRDMIVLVAFGGNKKEPSDKVEVLVVLQNEHCFSWRSAPDVEPLLHEDSPPSS

SEQ ID NO: 185967 - protein, 124 aa, Oryza sativa
  unsure (1)..(124): unsure at all Xaa locations
  Clone ID: PAT_MRT4530_82811C.1.pep
GDGRRREGGRLGFKGGNVGXGTDXGRSRRELALGARVQLATGRREDDXRREEKGKRREGKGGSPLSSLGKGGGARGRRGRGRRALPPSLGGLRAEWRGRGDDDGDDGGAVWSGAATRATGVGRR

SEQ ID NO: 185968 - protein, 209 aa, Oryza sativa
  Clone ID: PAT_MRT4530_82812C.1.pep
MRRGAVTRGRRRGSNLSGLGPRKRKKRARPESPSASLLVPAPPTRATTNGDGEQSTGGGGNGVEANGRGRERGELGFKGGNVGLGTDLGRSRRELALRLAAKTATEVTPARGKKEENGEEKGGLPLASLGKGGGERGRRGRGRRALPPSLGGLRAERRGRGDDDGDDGGAVWSGAATRATGAAGADDGGDQAVSHHGTRAREATGGVAV

SEQ ID NO: 185969 - protein, 461 aa, Oryza sativa
  unsure (1)..(461): unsure at all Xaa locations
  Clone ID: PAT_MRT4530_82813C.1.pep
MGRPAQKAAQSGPRRARXREGGEREPVDRAHHARSRVGPACQRLGSPCGGSTRRGTRVGEGXRCTRAVRGGCGCGGPTRSLTARGGTRARGGTDRGRLDPVLAELAPTWRLRGCHAGRREVDDDAGRNGRRTTAASGXANHGDTGKSEHTGWLHVTRGDEPMARIRRRELDGGESRRRQPTAGKGENGDEVTRGQFPAARASTRLRESDAGVGLGGATPSEAGDERRFRARAATAASTRRAAATVGAAPASYGEATRTTVRAGXAVTRGRRRGSNLSGLGPGKRKERARPESPSASLLVPAPPTRATTNGDGEQGKGGGERGRRGRGRRALPPSLGGLRAERRGRGDDDGDDGGTDLSGAARARALACGAGRLRGCRRGRAAGPGGADGTALAHARAARGRSGGRGAGRGSRARARGARAERGKRERESXGGRGRWAERNSAHXTLGRQNRLLRRDSIWKD

SEQ ID NO: 185970 - protein, 942 aa, Oryza sativa
  Clone ID: PAT_MRT4530_82814C.1.pep
MLASDWAELRRARLATSGCYGARAATAASTRRATATEEEEEGAPRVPFRVLARAGSSDTRNDERRRRTEHGRRRQWRGGEWERKGKREGARVYRGRQCRFGNRLWRSRRELALRLAAKTATGGREDDAGGRKRGKRRGRKGLVPLPLREKEEGAGRRGRGRREALPPSLGGLRGSDGAEAMTTAMTAGRFGAARRHGRQARAGAAEGDGGGDQAVGHSARARGKQRAARLGTRAGSRGRAAAGAAEQRGRATRTAQTTRLGRGTTRARARTTACGGRLRERGARQGEEKESEGKGRSARRSRAIVVAAPHPTALPRPPSGRIWEGRGGESPRRTGSRIVIAVHAAAAGGQLASRVMSACENQTSTSRKINQEPALVGVLRSDLSKPLITMAESVVSVDAVDGEQEQQQRLQQEELQLADLPNDALRSILLRLPSEPGYLAVAAAVTKNWRRQVLGSNGSFLRAFRAAHGGVPPLLGFFCNRRNLPCPFFTSTVDAGVVDLSPPAGKQRPFIHDVRHGRVLLDDGEDGQLLVWDPLARRRDIIPTPRCYFTNDDSCGAAIICGCDGLEHVVGASVGGGDCHLAPYRVIVAFNDRPNYRSDEWNHECICTRVWISETKEWSEVYSMRGSCDFDFMPSALVAGAIHWLVGDTNSVLQFNLITKKLALIQTPLDISEFMLFPTKDGKLGFTGVLGSHIIFFHMDIAGDALTTMRTWSIQNVIQVDHFLPPYINILRTRRSLASPWVVDYYVSDSDEGEEEHGVDDDDEPREILPTMQHDNEASGSHSPQWSESWYDEDFDQEKDALIPTVSENGAGKGAAGPNSDATGGRRGAGREARRRRASGTRCDGDKRRDDDAARPGARREASTVTGERRAARQTAAATRRAGGAARGARRDGDGRAARGATGDSGAAAGGDGDGDGSGHEARAAEDEARARDALEHLARNE

SEQ ID NO: 185971 - protein, 58 aa, Oryza sativa
  Clone ID: PAT_MRT4530_82815C.1.pep
IGKETQLPFFQWFSTPIWKSPFCLSAPPKVNFQRALGGPKIPGPPPPELSVATHHFPC

SEQ ID NO: 185972 - protein, 261 aa, Oryza sativa
  unsure (1)..(261): unsure at all Xaa locations
  Clone ID: PAT_MRT4530_82816C.1.pep
EGVHFTHTTLLTRITQSVXISHVGRPXGFHDKAFREPTQVYHMPTRGVPDQQQETVLKCKSGKPYTRYVPRSAVLEIHLVRKHRPRCRVFQVFCKXQFYPSCYSDFKFEGDRRYLHRVHEYRGATGWLQGDMGAAQEKWSGPAELNGPAGPRRPKLARAREGGEREPVDRAHPARSRVGPACQRLGSPCGESTRRTRAGGEGTRCMRAVCGGRRCGGPTRSLTARGGTRARGGTDRGRLDPVXLSWRRRGAYVAATWAGGR

SEQ ID NO: 185973 - protein, 108 aa, Oryza sativa
  unsure (1)..(108): unsure at all Xaa locations
  Clone ID: PAT_MRT4530_82817C.1.pep
MAAALAGGGGVAEEEATGGRGIGAGSAFPKRVEAGGQIRRPAVXKAGEAASAGGQEXRRKRPAVGEEAVVAGSAPHRPDPVAGGGRYSRMESEAATGPAGWLTDDGIL

SEQ ID NO: 185974 - protein, 506 aa, Oryza sativa
  unsure (1)..(506): unsure at all Xaa locations
  Clone ID: PAT_MRT4530_82818C.1.pep
WADRPKARARGRGGEREPVDRAHLAWSRVGPACQRLGSPCGGSTRRGARMGEXTRCTRAVRGGRGCGGPTRSLTARGGPRARXGAANRGRLDPVLAELAPTWRLRGCHAGRREVDEDAGRNGRRTTAASGGVNHGDTGKSEHTGWLHRTRGDEPTARIRRRMPDGGELRRRQPAAGEGGNGDEVTRGRFPAARASTRLRESDASVGLGGAAPSEAGDERRFRARAATAASTRRAAATVGAAPASYREATRTTVRAGAVTRXADGAXSNLSGLGLGKRKERARSESPSASLLVPAPPTCATTNGDGEQSTGGGERGRRGRXGGGALPPSLGSLRVEWRGPGDDDDDDGGGGVERSGDTGDRRGQTRQRLTAAATWRSATTARARGKQRAAXDLSGAARARALACGAERLRGCRRGRAAGPGGAYGAGATRAATTRARAHEQRRAGGERGGGARRGAAHAHARAERRXEGKRERESRGGRGRWAERDSAHPTRGRRNRLLRRDFREGF

SEQ ID NO: 185975 - protein, 712 aa, Oryza sativa
  Clone ID: PAT_MRT4530_82819C.1.pep
MASSTTASSQLALALGIPGLGGLLIPTDAAATTTTTAEGNDLHADASHPVIRLAGAVQHYKWGRRSRGLPSSRASPGEGDDGDERPYAKLWMGTHPTARRGPSALLGRDVAARWGGDLPFLFKVLSVARALSIQAHPDAALARALHALRPATYRDDNHKPEMAVAVTDFRALCGFVSVQELKDVLRTVPEVRELVGKEEAVKLMGAKEHDGGIGVRSYLQSAFTNLMTASKETVSEAVSKLKSRLNIESKVRTLTKKEQLVLSLEMQYPEDVGVLAAFFFNYVKLNPGEALYIGANEPHAYLSGECVECMATSDNVVRAGLTPKYRDVQTLCSMLTYKQNYPEILRGVPVQAYVTRYIPPSEEFEVDRCLLPSGESVTMSPVPGPSIFLVMTGEGKIEADSMLDEGKAKEGDVFFVPAHTEVRILASGPGSMQLYRAGHQTDWHARISPIFGPAQELSRSPRPINIKNITNQEIHPHNKFLSRARRRCRCRRATAEGRVPHGPCRRVARVAAEGRRGRRVGRRAAAKGRAPPVGTAEGKAPPAGPVEGRARAADDGDGEGRRGRRGGGGGDKEDTGGCSTRFPSPFPSPAMRASRRSAVAVAPRASSRRAPLPSPSPRRVAVASPLLPSRHLEPRAAAAALTPPRAAHHCRARARTSRRAPPLPARRVARHVDRPVAARPSPVRLAPRAAAVCRTTRRAPSSVASPVPSPLA

SEQ ID NO: 185976 - protein, 108 aa, Oryza sativa
  Clone ID: PAT_MRT4530_8281C.1.pep
PPCFQTSTQVGKTPGFFGGGRVSGGFWGGGPPKWFCPERPPRGSVCLGAPGGRGKENPDVLFIRKIDHRLDKLFLIWVSNFQFTPRGGQAYYMTHPGVCWQFFLGPPG

SEQ ID NO: 185977 - protein, 152 aa, Oryza sativa
  Clone ID: PAT_MRT4530_82820C.1.pep
ARAWTPPPSPTGCASSSWTTTPPGSRSSRRCSGSVPTKKYRLYLSRLQKQNEERILGAARQDFSHKGTSENLNLRSSFQEQPSNIANGYPHASQNIQTQANMLDSQLEDTKSTVPLPVPDKKRTLASDAADSQNVTSASSLGGGSVFQKHGR

SEQ ID NO: 185978 - protein, 207 aa, Oryza sativa
  Clone ID: PAT_MRT4530_82821C.1.pep
HGSPCGASTRRTRAGGGGTRRTRAVRGGHGCGGPTRSLTARGGTRARGGADRGRPVPTSAELAPTWRLRGCHVGWREVDDDAGRNGRRTTAASGGANHGDTGENEHTGWLHETRGDEPTARIRRRKLDGGESRRRQPAGREEGNGDKVTRGRFPAVRASTRLRESDVSVGLGGATPSEAGDERVLRSSSGDGDEHTASDGNGRGGAG

SEQ ID NO: 185979 - protein, 592 aa, Oryza sativa
  Clone ID: PAT_MRT4530_82822C.1.pep
MASSTTASSQLALALGIPGLGGLLIPTDAAATTTTTAEGNDLHADASHPVLRLAGAVQHYEGGGRSGYSLVARQAGKGDDENERPYAELWMGTHPAAPSSLAATVEFLREWLGRRGPAALLGRDVAARWGGDLPFLFKVLSVARALSIQAHPDAALARALHALRPATYRDDNHKPEMAVAVTDFRALCGFVSVQELKDVLRTVPEVRELVGKEEAVKLMGAKEHDGGIGVRSYLQSAFTNLMTASKETVSEAVSKLKSRLNIESKVRTLTKKEQLVLSLEMQYPEDVGVLAAFFFNYVKLNPGEALYIGANEPHAYLSGECVECMATSDNVVRAGLTPKYRDVQTLCSMLTYKQNYPEILRGVPVQAYVTRYIPPSEEFEVDRCLLPSGESVTMSPVPGPSIFLVMTGEGKIEADSMLDEGKAKEGDVFFVPAHTEVRILASGPGSMQLYRAGHQTDWHARISPIFGPAQELSRSPRPINIKNITNQEIHPHNKFLSRARRRCRCRRATAEGRVPHGPCRRVARVAAEGRRGRRVGRRAAAKGRAPPVGTAEGKAPPAGAVEGRARAADDGDGEGRRGRRGGGGGDKEDTGG

SEQ ID NO: 185980 - protein, 67 aa, Oryza sativa
  Clone ID: PAT_MRT4530_82823C.1.pep
MILAVLFSNSDGNILIERFHGVPAEERLHWRSFLVKLGADNLKGAKNEELLVASHKYLLFPFSSLID

SEQ ID NO: 185981 - protein, 148 aa, Oryza sativa
  unsure (1)..(148): unsure at all Xaa locations
  Clone ID: PAT_MRT4530_82824C.1.pep
GTEANGRXGKGGGLGFKGGNVGLGTDLGRSRRELALRLAAKTATEVTPARGKRRKKGERKGACPLASLGKGGGERGRRGRGGRALPPSLGGLRAERRGRGDDDGDDGGTVWSGAATRATGAAGADGGGDQAVGHHGTRTREATGGAAV

SEQ ID NO: 185982 - protein, 92 aa, Oryza sativa
  Clone ID: PAT_MRT4530_82825C.1.pep
RRVSLVMQPVPASVAPDASASPAGAEHTMLYWYVANATACFQYSWIHSPSSVMAQPCACLCLSQPCMNPAVLSHVAGCRCGYGRQVNEVRLI

SEQ ID NO: 185983 - protein, 460 aa, Oryza sativa
  unsure (1)..(460): unsure at all Xaa locations
  Clone ID: PAT_MRT4530_82826C.1.pep
GPAGPRRPKARARGRGGEREPVDRAHLAWSRVGPACQRLGSPCGGSTRRGARMGEXTRCMRAVRGGRGCGGPTRSLMARGGPRARXGAANRGRLDPVLAELTPTWRLRGCHAGRREVDDDAGRNGRRTTAASGGANHGDTGESEHTGWLHRTRGDEPTARIRRRMPDGGELRRRQPAAGEGGNGDEVTRGRFPAARASTRLRESDASVGLGGAAPSEAGDERRFRARAATAASTRRAAATVGAAPASYGEATRSTVRAGAVTRGRRRGSNLSGLGPGKRKERARSESPSASLLVPAPPTSATTNGDGEQSTGGGXQWRGGEWERKGKGEAWVYRGSLRAEWRGPGDDDGDDGGATTGGAARARALARGAERLRGRAAGPGGADGAGAARAATTRLSRTRGQSEGVALGAALAHARAARGQSGGGRERERERERRGGRGRWAERDSAHRTRGXQNRLLRRN

SEQ ID NO: 185984 - protein, 73 aa, Oryza sativa
  Clone ID: PAT_MRT4530_82827C.1.pep
RMQGIQRKDKVETKYKVICKYNMYHALLTCARHVLMSIQLGNKLPCPFGLGLHAPDMFMHQNERLISLCAAPP

SEQ ID NO: 185985 - protein, 173 aa, Oryza sativa
  Clone ID: PAT_MRT4530_82828C.1.pep
MGATVPTNDQILVPETLLKKRKSQEKARAERSDAVEKKKAANKEKRQVIFKRAEKYVQEYRDAEREKIRLHRVAKSEDSAYVPAEANLIFVVRIKGINKMPPKPRKILQLLRLLQINNGVFVKVTKAITEMLKVVEPWIAYGYPNLKTVKELVYKRGYGKVNKQRTALTDNSI

SEQ ID NO: 185986 - protein, 116 aa, Oryza sativa
  unsure (1)..(116): unsure at all Xaa locations
  Clone ID: PAT_MRT4530_82829C.1.pep
GKKWGFPQFRPSXFVRFKNEGGLPPGGGDVKPLGCQGCPPAGAPGGAFLPPPWINLPLPSVGSENSAPFVWLETRSYTPLLSPGSPRAGGYIAGLEPFLGWPPFFGMYIRGPLGPP

SEQ ID NO: 185987 - protein, 618 aa, Oryza sativa
  Clone ID: PAT_MRT4530_8282C.1.pep
MATMENVIVLVNRIQRACTVLGDHGGGDGTASLPTLWEALPSVAVVGGQSSGKSSVLESIVGRDFLPRGSGIVTRRPLVLQLHKTEDGVQEYAEFLHMPKRRFNDFALVRKEIQDETDRLTGKTKQISPVPIHLSIYSPHVVNLTLIDLPGLTKVAVEGQPESIVQDIENMVRSYVDKPNCIILAISPANQDIATSDAIKLARDVDPTGERTFGVLTKLDLMDKGTNALDVLEGRSYRLQHPWVGIVNRSQADINKNIDMIIARRKEQEFFASSPEYSHLSSRMGSEYLAKLLSQHLEAVIRARIPSITSLINKTIDELESEMDHIGRPIASDAGAQLYLVLELCRAFEKIFREHLDGGRPGGDRIYGVFDNQLPSALRKLPFDRYLSLQNVKRVISEADGYQPHLIAPEQGYRRLIESALNYFRGPAEASVDAVHYVLKELVRKSIGETQELKRFPTLQAELAAACFHALERFREDGRKTTVRLVDMESAYLTVEFFRKLPQEVDKTGTGNPSTPSVDRYADAHFRRIASNVSSYIGMVSDTLKNTIPKAVVHCQVREAKRSLLNYFYTQVGRKDAKQLAQLLDEDPALMERRQQCFKRLELYKSARDEIDAVSWSR

SEQ ID NO: 185988 - protein, 959 aa, Oryza sativa
  Clone ID: PAT_MRT4530_82830C.1.pep
MKITIIGLFQLLLMVCSAVQIICSSLYGNETDKLSLLEFKKAITLDPQQVLISWNDSNHFCSWEGVLCRKKTTNRVISLNLTNQRLVGVISPSLGNLTFLKFLYLDTNSFTGEIPLSLGHLHHLQNLYLSNNTLQGKIPDFTNSSNLKVLLLNGNHLIGQFNNNFPPHLQGLDLSFNNLTGTIPSSLANITELLGVGFMSNNIKGNIPNDFSKFVSIGYLAASQNMLSGRFPQAILNLSTLDVLYLGFNHLSGDLPSNLLDSLPSIEILSLGGNFFQGHIPCSVVNSSNLGLLDISSNNFTGLVPSSIGKPTKLYHLNLQSNQLQAHRKQDWDFMNGLTNCTRLQMISIANNRLQGHLPSSLGNLSSQLGMLHLGGNQISGVLPSDIENLSSLTYFRIDTNEITGVLPEWLGSLKHLQVLGLFNNNFTGFIPPSLSNLSQLCFPQQSSRWTTSCGNAKQLSKLSLASNKLSGDIPNTLGDFESLEYIDLSWNNFTGIIPASIGKITSLEVLKFSHNNLTGPIPSLLGDLHFLEQLDLSFNHLKGEVPMKGIFQNVTALSIGGNEGLCGGSRELHLLACPVISLVSSKHKKSILLKILIPVACLVSLAMVISIFFTWRGKRKRESLSLPSFGTNFPNFSYNNLFKATEGFSSSNLIGKGRYSYVYVGKLFQDNIVAVKVFSLETRGAHKSFMAECNALRNVRHRNLLPILTACSSIDSEGNDFKALVYEFMSQGDLHKFLYTTRDDINLSNLNHITLAQRISIVVDVSDALEYLHHNNQWTIVHCDLKPSNILLDDDMIAHVGDFGLASYKTNSSMPSLGDSNSTSSLAIKGTIGYIAPECSHGGQVSTASDVYSFGVVVLEIFIRRRPTDDMFKDGLSIAKYAEINFPDRILEIVDPQLQLELDGQETPMAVKEKGLHYLHSVLNIGLCCTKMTPSERISMQEAAAKLHGIRDAYLRGN

SEQ ID NO: 185989 - protein, 792 aa, Oryza sativa
  Clone ID: PAT_MRT4530_82831C.1.pep
MVGDGNNPSNDSSNYIVERSQHLASISRSLGEEDLVGVNQNRETLEEWLADDLLERSVITLHGMGGLGKTALAANAYMREKEKFQCHAWVSISQSYCIKDVLKCLITELSRNVKKTNWGNITDMDTGGFREELKRFLKLQKCLIVLDDVWAPEVINDLFGAHVPNLKGSRILVTTRIDDVAQLAFPDRRITLEPLCEKESWELFCRTAFPRETNHECNAELLHLIDQIVSKCKGVPLAIVSIGRLVFVRDKTKEELRRIHDQLDWELINNPSLEHVRNILYLSYIYLPTQLKSCFLYCSLFPEDHLLKRKALIRWWIAEGFISKRGRSTMEEVAEGYLQELVNRNMLQLIDRNSFGRIKSFRMHDIMHELAVDLCRRECFGVAYDEDNRRWEHEDRDERRLVVHKLNKDIDQEISCAHSLRSVITLDNSMISSSSILCLVVDNCRYMSILELSGLPISTVPDAIGDLFNLRHLGLRGSNVKFLPKSIEKLTNLLTLDLFRSSILELPRGIVKLTKLRHLFAEKQTDRHRRLFRWCTGVSIPRGLENLTSLQSLQALEAQDESVRCLGELRQMRGLRLWKVKASLCERLYESLLQMKCLSYLSITASDEDDVLQLDGLNPLPPSLHKLRLSGRLAHTMLGAESPLFQEDAGGRNLYSLRLFWSQLKEDPLPSLSRLLNLTELHFTRAYNGEKLVFLTRWFPKLKVLRLRDLPNLKRMDIQQGAMVSLERLRLINLSSMEEVPLGIEFLMPLKYLSFEEITVVFLLSLRQSRIGGMRWWHTLREENDMEAGVRT

SEQ ID NO: 185990 - protein, 286 aa, Oryza sativa
  unsure (1)..(286): unsure at all Xaa locations
  Clone ID: PAT_MRT4530_82832C.1.pep
MGMEAECDRIKGPWSPEEDEALRRLVERHGARNWTAIGRGIPGRXERRPFTAEEDAAILRAHARLGNRWXAAIARLLPGRTDNAVKNHWNSSLKRKLATATDGGEIDRPCKRVSPGPGSPTGSERSELSHGGCGSGSGGGQVFRPVPRPGGFDAISAADVVRPPRRRDDNDDDGDDDPLTSLSLSLSLPGFHHDSARSHFQELPSPSRSPSPPPSPPAASPSAYPFNADLVSAMQEMIRTEVRNYMAGVGLRAGCGPGAVAESFMPQLVDGVMRAAAERVGVVTRQ

SEQ ID NO: 185991 - protein, 312 aa, Oryza sativa
  Clone ID: PAT_MRT4530_82833C.1.pep
MSSSRKEEEEVDSMGMEAECDRIKGPWSPEEDEALRRLVERHGARNWTAIGRGIPGRSGKSCRLRWCNQLSPQVERRPFTAEEDAAILRAHARLGNRWAAIARLLPGRTDNAVKNHWNSSLKRKLATATDGGEIDRPCKRVSPGPGSPTGSERSELSHGGCGSGSGGGQVFRPVPRPGGFDAISAADVVRPPRRRDDNDDDGDDDPLTSLSLSLSLPGFHHDSARSHFQELPSPSRSPSPPPSAAAASPSAYPFTAEFVSAMQEMIRAEVRKYMASVGVRAGCGHAAGADLHMPQLVEGVMRAAAERVGRMH

SEQ ID NO: 185992 - protein, 169 aa, Oryza sativa
  Clone ID: PAT_MRT4530_82834C.1.pep
FCVFNFFFFFFFFFFFFFFFFFLKKKPPPKIFPPTNQPQIVPMPPPTIIYRPSQPKPTSLPPKPKSPPLKPQVPFFSLKFFNNPPNSPKNPLKPFFNNPLKKRPQFNNNPLPPLIEFCNLVVKSPPILTLFPAQIKGKFFPNPIRDFLKFCHLNQNKTLGPWFVPCFDP

SEQ ID NO: 185993 - protein, 311 aa, Oryza sativa
  unsure (1)..(311): unsure at all Xaa locations
  Clone ID: PAT_MRT4530_82835C.1.pep
MGGGGGVEADCDRIRGPWSPEEDEALRRLVERHGARNWTAIGREIPGRSGKSCRLRWCNQLSPQVERRPFTAEEDATILRAHARLGNRWAAIARLLQGRTDNAVKNHWNXSLKRKLAVATTTTTTTTGAAAAPGVVADAAELVERPCKRFIPTPDSPSGSGSGSDRSDLIHGGGFGQIFRPVARTGAFEPVDCAISRRQXEDPFTSLSLSLPGTDQRFNHDSAHSHFQELPSSPSPPPPPPPAAAASTTQYPFTPEFAAAMQEMIRAEVHKYMASVGVRAGCGDAGGADLHMPQLVEGVMRAAAERVGRMH

SEQ ID NO: 185994 - protein, 120 aa, Oryza sativa
  Clone ID: PAT_MRT4530_82836C.1.pep
MDAEVGDGVPSSSPASTTEVAVKAVPWWRRLPLLSGCGTGRKAVRAASVAAAVLIAAVVLSYYARGDYDEMPSSLFTTTTATRAIHGLIGSCAGVGSVAFASASPVLRRFASSVLNNMSM

SEQ ID NO: 185995 - protein, 84 aa, Oryza sativa
  Clone ID: PAT_MRT4530_82837C.1.pep
KPQPQGARLGVKTVRKLSGFRTYFRKRNLSVGIFRKRKRIRKYFLRNRIRNGKGSFRRNSESVENFLEIFSEFLEIFSKLPEIL

SEQ ID NO: 185996 - protein, 140 aa, Oryza sativa
  Clone ID: PAT_MRT4530_82838C.1.pep
LARRVVLRWGAFLTTFLLRHRAGRRIGEGECPLAIAPTPRVPLPPLALSLSSREGGGTRTGGGGGAGGWRRARSRREAVKRRFVGDDDDELCRRRLEEERGAGGGRPGTVLADEPPPLLPEARSGKPRLDLATPPPLLSH

SEQ ID NO: 185997 - protein, 526 aa, Oryza sativa
  Clone ID: PAT_MRT4530_82839C.1.pep
MAASSSNPTPLLLPPPPPQEPAPLSPPPPLPTPKPIPTVADNFRSLLRSGEALLRFAFRGNSGQLTHRHPPPPRPPPQQQHPHHHNRPAEIMKRLQREKFADMIKHMDGHEQIDRLVALYTSSAKGFHLPELPVRVKVALDAAGALLLVDGDELEQARDRLAKARNTTGLGSRFVFESSTRGGKDTVAAELATGLGAAAAAAAGGRPLELTRLQYCAHVSDLLSMTLVPFGAQCNNFLHGSSLIQSIQSRALSGGPPSYSERHDCGAGVSIKGSRFRASIAELIFGSPGEHGGGGGGGNGDHEVPNRLTTFGKVSYETADDIKLSLSGLWQVRSPASRFSDLGALAVPLGSLKTRRAIAPPPSPPATTHPPPSPDLMVQVPAPPAPPTPMMGIGSTVAVQGSVAAAAAAATAPSSHTVAVMVDCDMYDTLRAEGWVEMETAAAATPARRRGPVARWGVCVSDCPEHELGWGVRIGGTAERNAHRPHVEGFLSFDLGKGGRVQPGLVIAMDGDKRTPALVLRSSWLM

SEQ ID NO: 185998 - protein, 52 aa, Oryza sativa
  Clone ID: PAT_MRT4530_8283C.1.pep
QKDRQFQVPFPSNKTKAWREKRGTSGVSKTKSAEKLTLVAISTDLQRSPHSL

SEQ ID NO: 185999 - protein, 180 aa, Oryza sativa
  Clone ID: PAT_MRT4530_82840C.1.pep
MVARGGQYDGDGYGGGISWSRRWRLPLVPSFSPSWRCLIHSSRHRYSCDHAADRVLEIHCSHSPCNGVETTPATATMTPAAAAATTPATAAITPAALVRTPVGATLPERLRICICLRPCGRAADRVDLHLDFFLPCSAAALDAGEGKARDIEARTLFGPHAIAPHRTPQQSTAGWRLVPH

SEQ ID NO: 186000 - protein, 148 aa, Oryza sativa
  unsure (1)..(148): unsure at all Xaa locations
  Clone ID: PAT_MRT4530_82841C.1.pep
PGXXXXGEXSLLGSLCETXYXHXXXIXIMKRXLXXXXFXXGXXXIPGLYXXXXXVXXXXFLXXXPXLGFXXFXFPFPFXFXNXXXXXFPGXNLXVEKFXXWKXTXQNXXPXEFXYXKLTGVYVAXXFXSFXEXTKKXKAGXICSDLSX

SEQ ID NO: 186001 - protein, 106 aa, Oryza sativa
  Clone ID: PAT_MRT4530_82842C.1.pep
AVGAEAATRGTARRRPARQSARQRGGPRGGGGGRPARRRGRPRGDAGGRAEAAAAVGGRSARHGRGPGNGTGWRSAAAGASPGRQAGKAMARRAAAAAAQCCHCCA

SEQ ID NO: 186002 - protein, 679 aa, Oryza sativa
  Clone ID: PAT_MRT4530_82843C.1.pep
MPRRLATTYSGRIAAARPSPAGPSLTVTVAPTPPPTPLDPRGYPLPRRHLVCAAARILRSHASPSPLLDLADYLRGLRLTLTAAEASEVVKALYGDPPLALAFFRFAAASLPGFRHDAFSYNRILALLFRTRAGPSEALRLVADMERDGVAGNISTINLLVGMGGGGVEMERCLELASKWGLRLSGYTYKCIVQAHLRSREVSKGFQVYEEMRRKGYKLDIFAYNMLLDALAKAGMKIMFDNREWVFHMYMLVDQAFQVFEDMKQKHCVPDAYTYTILIRMSGKAGRTSKFLSFFDEMVSKGCVLNLIAFNTIIEALGKNKMVDKVIFVLSKMVENDCQPNQFTYSITLDILATEGQLHRLNEVLDICSRFMNRSIYSYLVKSLCKSGHASEAHNVFCRMWNSHEKGDRDAFVSMLEVLCNAEKTLEAIDLLHMMPEKGIVTDVGMYNMVFSALGKLKQVSFISNLFDKMKTNGIIPDVFTYNIMISSYGRVGLVDKASELFEVMEASSCKPDVVTYNSLINCLGKHGDLDEAHMLFKEMQEKGYDPDVFTYSILIECFGKSNKVEMACSLFDEMISEGCTPNIVTYNILLDCLERRGKTEEAHKLYETMKQQGLIPDSITYSILERLESRSQRTVRIHVMNASFVSFKVHHITRENSGVILKTFPKVIIRNLTYKVTT

SEQ ID NO: 186003 - protein, 170 aa, Oryza sativa
  Clone ID: PAT_MRT4530_82844C.1.pep
MASHAHCAPAANLSPSPGPCLPLRLRRRDRELPRPARAALQRRHAVGIVRTNRRRGAVACRRRRVRHEEEDEEEYGHNEEMARLERYSEGARDQALLVKARVDDEVEVVLVFKGFSSRLSGRTAADPAMSVLPERAIIQTVDVVRGPFNPTNIEYLEKDLPWDDFKSRLH

SEQ ID NO: 186004 - protein, 301 aa, Oryza sativa
  unsure (1)..(301): unsure at all Xaa locations
  Clone ID: PAT_MRT4530_82845C.1.pep
YPLSLYYLTLPRLPCRLQPRRRSAPQPARVPEPRRSIRRASRCKPRARAXVADRLVAAVVSACPRLSPVSPLHSKPPRLGFQTDIAALXKAPGALPLFSXPIASTPLLLPLCFAVAVRRCARRRNRSSSSLPVASRRRPDRCRRSLCAXPPSPPELRSTRSSPASLGVAPPNPTLASDSRSRVDALAAGNWPLVTSSPFPPFPSAGRRRRNPPPTDSLRRIQAVGSLPLILPRHPGVRPVAPHRRKASRRNRRRPPSIRGRRLRLPPASPRGSHVGATSAPARPRXRADPGQPLPCPLVTI

SEQ ID NO: 186005 - protein, 223 aa, Oryza sativa
  Clone ID: PAT_MRT4530_82846C.1.pep
PQALGLSPPPPPAVEFAAPASASCAASHLPGAVEQVPPSSSSPSCPAATVEQAPTPPVPISPMPSPARAAAVSDLSPRRGWRRMNDALPPNEVRRLSLRPTTPMVAPTWLLSLSSLPCRPTAAVELAPAPLAPSSPTPPPARAAAVGDPSPRAWPATPPPACGSASSPHNFGGGPLMAVVAVALAPPSSSSPCCPTAAAPLLLPAGTCAPLLSRRLPAAHAGS

SEQ ID NO: 186006 - protein, 341 aa, Oryza sativa
  unsure (1)..(341): unsure at all Xaa locations
  Clone ID: PAT_MRT4530_82847C.1.pep
CTLKEIEDGISFRFFHEEFTLTWKGLSTLLSFLDSCKIDIQKGISGFEKNRFWEDISSAPICKKPRTDDIHNPTLRLMHKWIAMTLFPRGDLRPIRGDELIIMFAMVRKIKIAPVKCMIRQWLESIKFSAPVECTSLITWIAKGLGVVSNQIAFISAARPRIDEAYLVQGNILKHGADGSLIYFFPGXTNEIPLPNAGYHLYNCHELTIPLQTIEEYRAGRTYRETRNMTRNERESSSSSTPVQMYEAGWAPTGDAPGWTQATRHSTGVSTXTSASEDRWHAPHDIQWEDNQPSRSRDVPPSPSEWRSSSSRWDLGEITRRIDTLDMQTGEIQYNLTEHIA

SEQ ID NO: 186007 - protein, 47 aa, Oryza sativa
  Clone ID: PAT_MRT4530_82848C.1.pep
ISLSINFAFFGFGQNRVLVIIFMLMYALFALQIFKNGVIKFGLPQFY

SEQ ID NO: 186008 - protein, 445 aa, Oryza sativa
  unsure (1)..(445): unsure at all Xaa locations
  Clone ID: PAT_MRT4530_82849C.1.pep
WARRPKRRPRTRAGGKERGSRWTGLTTRGPGWDPLVSGSAHRAEGARGARARXGEGRGAQARFAVNADAAGPRAASRLAVERAHGRGXRGRPVPSSAELAPTWRLRGCHVGXREVDDDAGRNGRRTTAANGGANHGDTGESEHTGWLHRTRGDEPTARIRRRELDGGESRRQQPAGREEGNGDEATRGRFPAVRASMRLRELDASVGLDGATPSEAGDVRVLRSSSGDGGEHTASDGNDGARRKNGVPFRVLERTGSPGAQRRTAVARQSTGATAMGGQGRELALGGRGQSGDREDDAGEEEKGEKEGEKGGLXPLCRFGKKEEVSGGARLREEGGXPPSLGGXAREWRGRCNYHGNYGGRLGTDRKXWQRRVPKVTGEENGGRAPRNPPRFXNGRRPPQKNRGGIRERKENCWGGVKPNPGGEGLGDKPSPPRGDREKKDPGPP

SEQ ID NO: 186009 - protein, 151 aa, Oryza sativa
  Clone ID: PAT_MRT4530_8284C.1.pep
MESELLGRWAASSATMTQVPPPPTAASTEQPEATEQATSTSYGFGNTGGAMTIAASAASSFLPHSLGADRVSAISRLELVWHTEPLSLPRCSCTVSLVVVATAAASHQRNHLSIRITSDMNGRRRPSGKEKEANQHYRTVSIFNRLLATLW

SEQ ID NO: 186010 - protein, 376 aa, Oryza sativa
  unsure (1)..(376): unsure at all Xaa locations
  Clone ID: PAT_MRT4530_82850C.1.pep
HGSPCGASTRRTRAGGGGTRCTRTIRGGCGXAAGPRAASRLAVERAHGEGLTGVGSTRPSWRLRGAYVAATRAGGRKTKAPAANGPRAAAVSPGRLATMRGDGAYTGMTRENKSERANGLDSPEGVRRRRIAAAAPGGGKRGKRRRGHEGPIPGASDWAELRRARPATSGCYGARAATAVSTRRATATVGAAPASYGEATRATTEGGQGXELALGAHGQIGDRTEGGXTPAGEKGEKEGEKGVCLLAALGKGGGKRGVAAEGGXGSASVPWRLARGVAGPRXDDGDDGGXGLERSGDTGDRRGLARQRVTATATRRSATTARARGXNGRRGGLSGAGGERQRGSEEEGSARRLTRTRARRAGGAEGEGERERERER

SEQ ID NO: 186011 - protein, 488 aa, Oryza sativa
  unsure (1)..(488): unsure at all Xaa locations
  Clone ID: PAT_MRT4530_82851C.1.pep
QGGPRRPNARARGREERESRWTGLTTRGPGWDPLVGDSVHRAERARGARAXMRRAHAQPHGLRWNARTGGADRGRPDPISAELAPTWRLRGCHAGWREVDDDAGRNGRRTTAASGGANHGDTSESKHTGRLHRTRGDEPTARIRRRELVGGELRRRQPMAGEGGNGDEVTRGRFLAARASTRLRESVPYAGLGGNASREAGDERXLPSSGGDGGEHTASDGNGXASWRSALASKSATXGGRMTPAGEKGEXGGRERGLAPCFFXEKEEGSGGVAAEGGGGSXLRPLAACARSGGGRAMTTAMTAGRFGAARRHGRQARAGAAEGDGGGDQAVGHXARARGMQREARRIXAARLGHARWLRGRAAARLQAAGQRDRVTRTARTARHGRQPRRRARERRAGSGNEGAERRARLGAGGSRARARAERRGRVRSARLPRSRXAARGRSGAEGEEGERAREKESERREGGGDGPREIQPIDPGGGKIDFCGGI

SEQ ID NO: 186012 - protein, 802 aa, Oryza sativa
  unsure (1)..(802): unsure at all Xaa locations
  Clone ID: PAT_MRT4530_82852C.1.pep
MYMGNNNGYCPQGGQGWNQPRPYYQGGNNNCNFSNQPSLKDLVFAQAKTTDALSKKLAANEKVLENINVKLDGFASAFQNQLSFNKMIETQLAQVASLVPANETRRIPGQPDPSGENVKVITTRGGKSLXDPPYPNPAGTNGMSKEASSNDSADKEVQPEKTLPQEYYDTRLLPFPQRLRKPSVDEQFARFVEVIQKIHINVPLLEAMQVPTYARYLKDILNNKRPLPTMEVVKLTEHCSNLILHKLPKKKKDPGCPTITYSIVAQQFDQALCDLGASVSIMPKDVSVSTSTGRRKSLSFNRGRNSALWSEXKFPREGNNDSQEPLLEDAGKMPNTGQKARAADSEKAAVRTKTKESVEGEAKDAHSITSGDGXKIRELNQKEFALKFIQALIVSLKFKYLVAYIQVALVKLTGGMRRRLSRLFKGSGSSLSHHDESSTRSSADVSMEGAEAPRRLLNDTDLDLVSDQERQAYYMLSDREYAHTREYSSELLKKIGMDVEFRSIWKAVGWQRFAVVDEPGSRLLTLQFLCTLKEIEDGIFFRFFHKEYTLTWKGLSTLLGFHDSYKIDMQKGISGFEKNRFWEHISGAPICKKHRTNDIHNPTLRLMHKWIAMTLFPRGDLRPIRGDKLIIMFAMTIEESRAGGTYRETCNMTRNELESSSSSTPVQMYEAGWAPTGDAPGWTQAPRHSIGVSTWASASEDRWHAPHDIQWGXDNQPPRSSGVPPSPSEWRSSSSRWDLGEITRRMDTLDMQTGEIQGSILIKDPERKPSLGGGGDIVPPTKVVVRYEIVNKSYYDPDPSST

SEQ ID NO: 186013 - protein, 142 aa, Oryza sativa
  Clone ID: PAT_MRT4530_82853C.1.pep
MANKTLREFAAPSADNMAIGPQVNIGDVDFNLKSSLITMVQASPFCGKSNEDTNAHLQQFLEICSTYNIKGVSPDAVRLRLFPFSLLGRAKQWLYANRAAVNTWDKCSTAFLSKFFPMGKTNALRGRISSFQQTRDESIPEA

SEQ ID NO: 186014 - protein, 93 aa, Oryza sativa
  unsure (1)..(93): unsure at all Xaa locations
  Clone ID: PAT_MRT4530_82854C.1.pep
MGHRGGEPTARIRRRSLDGGGLRRRQPAAEEEGNGDEXSTAVRASTRLRELDASVGLGGTTPSEAGDERVLRSSGGDGGEHTASEGNGWGGAG

SEQ ID NO: 186015 - protein, 48 aa, Oryza sativa
  Clone ID: PAT_MRT4530_82855C.1.pep
RTPPAAAGRLSSGRMSGNRRLGRTNSSSSAYSGPTTRDGCRTQFNSCG

SEQ ID NO: 186016 - protein, 124 aa, Oryza sativa
  unsure (1)..(124): unsure at all Xaa locations
  Clone ID: PAT_MRT4530_82856C.1.pep
MATDGGDRRCKKRRRRPKGGGAWPKATVAVEDDGARAEGGGAHEREGRREERDSSPDERRRPEWRMEAGATADERTADGRRQHLKKGRXGVRDGEDDRDDPXWPAGDGNNGELTGGARESELRR

SEQ ID NO: 186017 - protein, 168 aa, Oryza sativa
  unsure (1)..(168): unsure at all Xaa locations
  Clone ID: PAT_MRT4530_82857C.1.pep
NLCRGGTLYPHDITNPDHPACISKADTGLPYADERDPRPTTGXVPDHIVPGSPGVLPDTTPANPLVSRHQGSPDXLITQPGVSHSTHVVALXICSDVIPXRNRSLKATAQASRPDFKFEGDRRYSHRVHEYRGVTRWLQGNMVACLAQSLHGASRIFEISTIDRKSAT

SEQ ID NO: 186018 - protein, 150 aa, Oryza sativa
  unsure (1)..(150): unsure at all Xaa locations
  Clone ID: PAT_MRT4530_82858C.1.pep
TPPDLDIRDXPRHTASGAYGGRLEGSSAISDLDEFMLEEEDYPVVDYVLINKEQHRFRPIGCRAITCXIRCLNLYKNPCLHLFYLNLAYTLVSTIPIPSKYRSRGTTRRQRRRRPPRGDDDGGKRQQRGQARWIQRGGGEVGRDDDDHPA

SEQ ID NO: 186019 - protein, 190 aa, Oryza sativa
  unsure (1)..(190): unsure at all Xaa locations
  Clone ID: PAT_MRT4530_82859C.1.pep
NLCRGGTLYPHDITNPDHPARISKADTGSPYANERGPRPTPDQVPYHIVPGNPGVLPDTTPLNPHVSWHHGSPDXLVTQPGVSHSTHVVVLVLCSDEIPRKRSLSARAGNCTPEFKFXGDRRYSYRVHDYRGATXGVKGDMVACLARDLELDPRNPRTAGLRAPKLHAKRDNSANGENKALLLTSKRAIR

SEQ ID NO: 186020 - protein, 62 aa, Oryza sativa
  Clone ID: PAT_MRT4530_8285C.1.pep
LKKNDKASSSESFKVLIRGSLKVAFRVRKVPESYMAKNTVVKTIRSFKLSPDKTATGKTNTR

SEQ ID NO: 186021 - protein, 101 aa, Oryza sativa
  Clone ID: PAT_MRT4530_82860C.1.pep
METESLLSLVSNINERRQQERRGRDGIAVVVASAASGDAACRTNFARRQPPNEVMSRSLTKSIKKFPFYQAQAASTVKISSAGSALSPNAAPPNYELKEKE

SEQ ID NO: 186022 - protein, 355 aa, Oryza sativa
  Clone ID: PAT_MRT4530_82861C.1.pep
GPHQAVAQRGGEGGAGRARLGLKADRPTKARRRRGTATDGGDRRCGKRRRRPKGGGAWPKATAAAEDDGSRAEGGGNTQRRGGEELGMERTTATTQNGRPEMETMVSSRGNRSSGAARDRRWAAVAELGCDSAGAVRKGADVAGEVAETAGDVGSDRAWAASWGGRGNGVAWAREERRRWGGSGGCRRGAAAGGRGRPDSKERGKLQGVTRGDDNGGGRQRLGQARRIRCGGERRPRARAPAGEDQRFTAAGGREGEERPCPRAGEGGGRREHREGGGELVKAADRRGATARGDQPEMRQCAPIHRREGEERWPTRRKRAMASASAKAGYVPPSVSHGPPWLLRVSERRDGPHHP

SEQ ID NO: 186023 - protein, 141 aa, Oryza sativa
  unsure (1)..(141): unsure at all Xaa locations
  Clone ID: PAT_MRT4530_82862C.1.pep
VTETSDTDTSXRSHSTPPHTSCTWAFLAHXKYTRGARGVHSVLHXYNFLYVHQLTAKLKSELQKXPLQNSQNQTSPIARIHXYQQPQGWGHMQSLLTNPNNPESGSSPVCGGARGVVILWDNPWAMGVQGQQWQWQTIDSL

SEQ ID NO: 186024 - protein, 55 aa, Oryza sativa
  Clone ID: PAT_MRT4530_82863C.1.pep
KSALLLLPIYIDCWSDKVGTCAYLSQTNGLNLPMHPGSPIHCTTKVTKHSAKPKV

SEQ ID NO: 186025 - protein, 114 aa, Oryza sativa
  Clone ID: PAT_MRT4530_82864C.1.pep
LECSYVLCSSFLVFTSFEKCLKQIIKIIVLFLVIVCSSVVKDRTDAQYFLNSARIVGLFKRHHNPLLQLLAKQHFNPDLTYDLVFIRKRYCAEQLVLHELVNIHSSCDLSYPDI

SEQ ID NO: 186026 - protein, 58 aa, Oryza sativa
  Clone ID: PAT_MRT4530_82865C.1.pep
PGERTMPRTIDRHTRTTRKLFGAPVVNVGTTSRRHRRRRSRQPEAAPERGVPDGDDPG

SEQ ID NO: 186027 - protein, 39 aa, Oryza sativa
  Clone ID: PAT_MRT4530_82866C.1.pep
MLAYLLESPRGASELSAVFGDPGWELFPSARKTKRSINA

SEQ ID NO: 186028 - protein, 66 aa, Oryza sativa
  unsure (1)..(66): unsure at all Xaa locations
  Clone ID: PAT_MRT4530_82867C.1.pep
PTGHHCCQYMTGGXSVVLGRGVTNGAAXITPILAYISHDDDTLAPKVNKVIDNIHLVNXPSGQMLF

SEQ ID NO: 186029 - protein, 75 aa, Oryza sativa
  Clone ID: PAT_MRT4530_82868C.1.pep
PPCHKKFGLVSPYKAFKAFPVEHGGSPGYNILVRPKKGGASCFKNVGLHFFYPIFSFSISPVWKVKCSTQSFVNG

SEQ ID NO: 186030 - protein, 86 aa, Oryza sativa
  Clone ID: PAT_MRT4530_82869C.1.pep
RIHLLLPPLASYLLLQRTAPRRHLELVSLVFIFSHLPLRRFAITSLIFLGKRRRGEERRGLERNVRWGRAREVRTRGREAQLFYPS

SEQ ID NO: 186031 - protein, 122 aa, Oryza sativa
  Clone ID: PAT_MRT4530_8286C.1.pep
IGPERVIQTFESQSWVHSNRLALSEYVKALVKADRLDDSTLLKTLRRGMVCSRGEADRHDRSSELKSAAQATIDGTLETANAPIHMVTSDTGQCEDQIWRTFRRLALAILAIAVIGALMEDR

SEQ ID NO: 186032 - protein, 247 aa, Oryza sativa
  unsure (1)..(247): unsure at all Xaa locations
  Clone ID: PAT_MRT4530_82870C.1.pep
ARGTPPARPPPPPPSPXLPGPPSHSPPRAVVVAPHRRPTSPPPPRSSVAPRHPPRVVTRHRPPSVLPPAPSTTVGVVGPTPQPATPPRSAPSQPXPSPPPPPPSSNSAAALLQHRRGPPPPLCCSPGLQKRWCYVSLSSFLNLNQPGDNPDNMEVNPSATAHSGNSVTSSGRRARGPTRMPSGMYTITAVDEDGNPTSPKSALTPYSNAIGVIARDDIPIKYRHWKKADVDELEWTVPNRYKDLAWE

SEQ ID NO: 186033 - protein, 140 aa, Oryza sativa
  unsure (1)..(140): unsure at all Xaa locations
  Clone ID: PAT_MRT4530_82871C.1.pep
MAAPDVEYRCFGGGLVWATDDRSLKADLCTFGEILESKIMGDRXTARTSGFGFVTXSSEHAMRDAVDVMNGXELDGRDITVYEAHSGRSGGGGGGGYRQLGGSVCYRGRGVYSGERGLGYSQRREGGYGPGGWYGGPRGE

SEQ ID NO: 186034 - protein, 174 aa, Oryza sativa
  Clone ID: PAT_MRT4530_82872C.1.pep
MATQGKQSAATATTTHTVCHQAYPSYNRSAKMPSVPQWWMINDDRATMMTLATGQAGCISRTIFVASMDGHYLSLGCEENGQHEVPPAHFAVSDRRNRGEKIARAKKQKNPRGEGERGDQEFRMRLSFPLVAGAVVIGVISGNVIFGPPLQKYWAEKQQQQQQEGAKEGQTGTT

SEQ ID NO: 186035 - protein, 411 aa, Oryza sativa
  unsure (1)..(411): unsure at all Xaa locations
  Clone ID: PAT_MRT4530_82873C.1.pep
KEGSGSSSSHHDESSARSSANVSMEDAEAPRRLLNDTDLDLVDDQERKAYYMLSDREYAHTREYSPELFGKIGMDVDFRAIWKAVGWQRFAVVDEPGSHLLTLQFLCTLKEIEDGIFFRFFHKQYTLTWKGLSILLGFHDSYKIDLQKVISGFEKNRFCEDISGAPICKKPRTNNIHNPTLRLMHKWIAMTLFPRVQGHILKHGVDGSLIYFFLDCTNEIPLPNVGYHLYNCSELTIPLQTIEESRAGRAYRETRNMGRNKQESSSSSTPVQMYEAGXEPTGDAPGWTQTPHHSIGVSSWASANEDRWHAPHHIQWEDNQPPRSSGVPPSTSECRSSSSRWDLGEITRRMDTLDMQTGEIQYNLTEHIAQTQEWXQTADAQFANFTNMMQQXHDDLQAYFRFXGFNPYQGP

SEQ ID NO: 186036 - protein, 175 aa, Oryza sativa
  unsure (1)..(175): unsure at all Xaa locations
  Clone ID: PAT_MRT4530_82874C.1.pep
NLCRGGTLYPHDITNPGHPARISKADTGLPYADERGPRPTTGXVPDHTVPGSPGVLPDTTPANPHVSRHQGSPDKLVTQPGVSHSTHVVVLVLCLDEIPRXRSLSARAGNRTPDYKFEGVRRYSHRMHEYQDATRWLQGDMVACLARDLELDPRNPRTAGLRAPERARSRVGPAC

SEQ ID NO: 186037 - protein, 133 aa, Oryza sativa
  Clone ID: PAT_MRT4530_82875C.1.pep
MATGRTYLVKSAAVVGDPRGGEDGTQQGKRCSSDLREGRLRSPVSLSCGGAARRAVPETCESVVARDYFVHNVAGLGSVRTKMAALPYRRNGDGGERATAGEAAAAAASAAGVASVASSSSRPASKFQKPAWV

SEQ ID NO: 186038 - protein, 396 aa, Oryza sativa
  Clone ID: PAT_MRT4530_82876C.1.pep
MTEEVVKEVIIVSTPESSKSTSGDFPVNSLENVDVSSVPSDLKRKEKSVPHYLRASTGSCHDSCKFGAHHSPEPKKYWPVRRRRHQDRANAGCGKQGQDEIQTQKGRSRNKDLELKICLVKDGNVHDKPEFIEVKKPPIEMASDNSETSPCVQDQLSSAEESKRVEDGADLPCGDDKFLIPDGNAACFVDGESSEGAVSIELEMPLAIQDSDASDDHIADAISPPECVYKAGEQLLVDDMCDDGSGNECAGSEKKSTQIVMASEKREKSGHGTKSKSLYNVSVKPKVKETSTATRSNASSQKIVRTLDRKASVNSEKQTDRKMTVMNVAKNARVWQKKEEEKISPVKLSRSINLSSKSLLSIKMRAVKKEKPASLVKSNKKVYGAENAVADVKEKT

SEQ ID NO: 186039 - protein, 334 aa, Oryza sativa
  unsure (1)..(334): unsure at all Xaa locations
  Clone ID: PAT_MRT4530_82877C.1.pep
SLRPRAGEEEEDERPESPSASSLVPAPPTXRNDERRRRNRGAATMEWRXWDNERRREGGRXGFKGRQCRXFGNRLWAVKARAGARRSRPNRRQGGGRMTPAGGKXGEKEGEKGGLPXLATLGKGGGERGXAAEGGGLCLRPLAACARSGGAEAMTTAMTAGRCGAERRHGRQARAGADDGGDQAVGHSARARGLQREARRMEWRGSGTRAGCGAEXGCRRGRAAGPGGADATRATTTRARTRTTRGERQRGXQKGGLGSARAAHALARGQSGGGREALGAAAHARADRAEGAEEGRSRVQRAGGAERSGAERRKRRERERERNRASAGREGEMG

SEQ ID NO: 186040 - protein, 316 aa, Oryza sativa
  Clone ID: PAT_MRT4530_82878C.1.pep
MAATSQAHRHHSIAIFFHLQPPPPPPMELPLDKAAARSTPLALPAAGAAAAANQSPASLPLGPPAAASAKPLVAAANPPLLPVVAPAAAAPKSSSGAVEESKEGVEESNKSNVLTIGSIRSTLMKHEDTIIFGLLERSQFCYNPDTYDPNASRIVRFNGSLVEFMVKKTEKMHARMGRYKSPDEHPFFPENLLEVVEPSVEYENVLHPAAANININKRIWDVYFGDLLPRLVKEGSDGNCGSSACWDMLILQDSTKGADYGKYVAEAKFQGAPDTYTPAILNKDSDKLMELLTFAKVEDDVRARVMSKAMTFGQVV

SEQ ID NO: 186041 - protein, 541 aa, Oryza sativa
  Clone ID: PAT_MRT4530_82879C.1.pep
MEDEHMEEEEGLTGAAWAREERRRRRRGRFRRRLPSWGGRLEEGDDLTDWLHKMEKYMRGSRMTLEEKVTFMPFQLTGQADIWWDGVVEEWNPDRGAITWEVFLQQFRAKYYPESFRDKMSNELNNIQQGSKTVDEYEREFNSIVRFVPNVASDEREKARKFSRGLIARYREVMGRNPPTIYLNAVEEARGMEVELQITTAQKNRSGNVTGEEMVFQGSAPPHSIFVMARLFPGQRAVKTGLLWALAEKASKPLLIEDVPVVQDYPDVFPAELPGMPPEHDVEFRIDLVPEEHERHLRMVLGTLRENKFYAKLKKCEFWLPEVAFLGHDFSIIAKPMTMLTHKDVKFQWTDQCEHSFQQLKQSLTARGGTRARGGTDRGRPVPTSAELAPTWRLRGCHVGWREVDDDPAANGRRAAAASSGANHGDAGKSEHTGRLLETRGDEPTAQIRRRKLDGGDNRRGGKRETPTRSRGTDSRRREHLRGYGNPMLASDWAELRRARLATCGCYGARAATAASTRRATATVGAAPANYEESTRATTES

SEQ ID NO: 186042 - protein, 110 aa, Oryza sativa
  Clone ID: PAT_MRT4530_8287C.1.pep
VRAGRGRYVGPRGFVKVRPGAHPDIRAIVRCVFRPRGPYRPAEPLSRGWRAVKHEKSTSSRWPPSGGVRIFLTVAVNRHRSRRRESVNPSSRFGARCVVALVCSGLHPSL

SEQ ID NO: 186043 - protein, 382 aa, Oryza sativa
  Clone ID: PAT_MRT4530_82880C.1.pep
MPGDVATSPAPAPPSASSQQSHHATSARGLLCHAAAGASAGVVAATFVCPLDVIKTRFQVHGWPKLATGTIGGSVIIGSLQQIAQREGFRGMYRGLSPTILALLPNWAVYFTVYEQLKSLLSSNDRSHHLSLGANVIAASCAGGATTIATNPLWVVKTRFQTQGIRAGVIPYKGTLAALKRIAHEEGIRGLYSGLVPALAGISHVAIQFPAYEKIKAYLAERDNTTVEALSFGDVAVASSLAKVAASTLTYPHEVVRSRLQEQGAHSKARYTGVMDCIRKHAMRRYMGLGLWGHGDFGGHLLGIVSFDKDSALYNVHVGMVYGSMLLLLCINSESSCSSKGLFRLGQTHPALRYSPYMVPLRGVVYGVPLPYLDFFLRMKIL

SEQ ID NO: 186044 - protein, 646 aa, Oryza sativa
  unsure (1)..(646): unsure at all Xaa locations
  Clone ID: PAT_MRT4530_82881C.1.pep
MTEEVVKEVIIVSTPESSKSTSGDFPVNSLENVDVSSVPSDLKRKEKSVPHYLRASTGSCHDSCKFGAHHSPEPKKYWPVRRRRHQDRANAGCGKQGQDEIQTQKGRSRNKDLELKICLVKDGNVHDKPEFIEVKKPPIEMASDNSETSPCVQDQLSSAEESKRVEDGADLPCGDDKFLIPDGNAACFVDGESSEGAVSIELEMPLAIQDSDASDDHIADAISPPECVYKAGEQLLVDDMCDDGSGNECAGSEKKSTQIVMASEKREKSGHGTKSKSLYNVSVKPKVKETSTATRSNASSQKIVRTLDRKASGTTIESSNGSKVVRATKFNRDKKFRSTVASNVPKVKEIKVTSPATVMDQSSKPTRQSKLKSLVANDAPSPSVNSEKQTDRKMTVMNVAKNARVWQKKEEEKISPVKLSRSINLSSKSLLSIKMRAVKKEKPASLVKSNKKVYGAENAVADVKEKNLKSASPKVRKVEVSKKESRSQKENSATPRTENTRQPKSSTIPAQSPRKLTFRRGKVLNLQSNSESSSTPRRLRFRPAKTVEDSNRSKESTRGRRKSDSAASSGSKDSGSSKPEVVILRHQDVRDKKKNEQGLLNNVIEETASKLXETRKSKVKALVGAFETVISLQESKVAPVTAAALS

SEQ ID NO: 186045 - protein, 378 aa, Oryza sativa
  unsure (1)..(378): unsure at all Xaa locations
  Clone ID: PAT_MRT4530_82882C.1.pep
SRSAPQPARVPEPRHSIRRASRCKPRARAXVADRLVTAIVSACPRLSPVSPFRSTPPRLGFQNXDLPPFKAPGALPLFFSRCPITSTPLLPPLCFAVAVRRCACRRSRSSSSLPVASRHRPDRCRRLPCXSPPSPPVFRSTRSSPASLGVAPLNPTLATNSRGRVDTLTAGNWPLVTSSPFSPFXLSAGYRRRNPPPTDSLRRIQAVGSLPLILPRHPGVRPVAPHRRKAPRRNRRRPPSIRGRRLRLPPSSPRGSHVGATSAPARPKSGRADPGQPLPCVSIFVHPVRVSTDASKLKIXITTWVKLGFYKRLGKPDTWVGACELNDXSKTADRGTYRVYGFPLLHLRTVSLEFHSNIRQSLSSNCHGVLLSLISNFH

SEQ ID NO: 186046 - protein, 257 aa, Oryza sativa
  unsure (1)..(257): unsure at all Xaa locations
  Clone ID: PAT_MRT4530_82883C.1.pep
PQTDGQTERTNQVLEDMXRSCALDFTKDWERCLPYAEFSYNNSYQASLKMSPNEALFGRRCRTPLMWSXTGERAVFGPDIIKEAEEKVRLIRDRLKVAQSRQKSYADTRRRDLEFNIGDHVYLKVSPLRGTKRFKVKGKLAPRYVGPFPIIARRGEVAYQLALPENISDVHPVFHVSQLKKCLRVPEEQTPLGDIHISSDLTYPEHPVKVLDEAEKRTRTKVWRMYKVXWSNHTEEEATWESQEFLKTEYPHLFNDR

SEQ ID NO: 186047 - protein, 306 aa, Oryza sativa
  Clone ID: PAT_MRT4530_82884C.1.pep
MELPLDKAAARSTPLALPAAGAAAAANQSPASLPLGPPAAASAKPLVAAANPPLLPVVAPAAAAPKSSSGAVEERTEGEAESNKSNVLTIGSIRSTLMKHEDTIIFGLLERSQFCYNPDTYDPNASRIVRFNGSLVEFMVKKTEKMHARGQNNVVTSFQMGRYKSPDEHPFFPENLLEVVEPSVEYENVLHPAAANININKRIWDVYFGDLLPRLVKEGSDGTLQEDSLWQDSDKLMELLTFAKVEDDVRARVMSKAMTFGQVVSEDLENEIKLKIEPELAVELYDKWIMPLTKEVQVQYLLKRLD

SEQ ID NO: 186048 - protein, 298 aa, Oryza sativa
  unsure (1)..(298): unsure at all Xaa locations
  Clone ID: PAT_MRT4530_82885C.1.pep
DTGESEHTRWLHRTRGDEPTARIRRRECVGGGLRRWQPAAREGGNGDEVTRGQFPAARASTWLXESIASVGLGGAMPSKAGDERCFRARAATAASTRRATATARAAPASYGEATRATTRVXGEEMERGGRTGRCSTVRAGAVTRGRRRGSNLSGLGPGKRKERARPESPSASLLVPAPPTRATTNGDGEQSTGAAAMARRRMGEEGKGGGLGLKDGNVGLGTDLGRSRRELALRLAAKTAPGGDAGEREKGGKRGRERGLAPCFFGKRRRGAGASQHREEGSASVPWRLARGVAGPRK

SEQ ID NO: 186049 - protein, 513 aa, Oryza sativa
  unsure (1)..(513): unsure at all Xaa locations
  Clone ID: PAT_MRT4530_82886C.1.pep
MGRPAQKAAQSARXGRGGEREPVGRVHPAWSRVGPACRRLGSPCGASTRRALGFGEGXTRCTRAVRGGRRCGGPTRSLTAHRGPCARGGRRRGRLAGSADPVAAEVAPTWRLRGSHAGRREVDDDAGRNGRRTTAASGGANHGDTGESEHTGWLHETRGDEPTARIHRRECVGGGLWRRQPAGREEGNGDEVMRGRFPAARASTRLRESIPCAGLGGNASREAGDERRFRARAATAASTRRATAAVGVAPASYGEATRATTRRGAVTXADGTXSDLSSLGPGKRKKRARPESPSASLLVPAPPTRATANGGSEQSTGGGDNXSGGERRKRGRLEEGGAWVYRGDNRAEWRGRVDDDGDDGGGDLSGVAWARVLARGAERLRGRAAGLGGADGAGAARAATTRARAREQRRTGSGSEGAEREGSARRGSRARARGARTERRXGERENERERESQGGRGRWAERNSAHRTRGRQNRLLRRDLIWEGFGFGIELDDRSGIRDLILLHHSSLTGLHK

SEQ ID NO: 186050 - protein, 514 aa, Oryza sativa
  unsure (1)..(514): unsure at all Xaa locations
  Clone ID: PAT_MRT4530_82887C.1.pep
VRPTCHTPPTLPLSLLSLFLSLTRTARQGGGAAAARQGGGQAAARRARRRRKRGGSEAGQKKRKERGRGIRLPSGSXGAAREKGAARPSLMGRPAREGGPRRARGRGGERXRWAGSISRGPEWDPLVGGSAHRFGKXEARRTRGSRRTRCAAGPRAASQLTVDHAHGEGGXRERLTGSADLVVPRWHRHGAYMAATRAGWRKTKAPAANGRRAVAVSPGRRATTRGDGVYTGMTRENEREQANGLDSPEGVRRWRIAAAATGGERRGERWRDDXGSIPGGXSIYTTSGLHSLRRIRRKRTEGGRRREALPSSGGDDGEHTVGGGKAWGGAREEGERGGSTGRCTTVRXRGTVTMGRRHGSDLSGIGPGKRRKTMRPKSPSRVLRTHQLSRCLAMNGGGEMGKGGGERXATRQREEGLCLRPLAACARXWRGLGDDDGDDGGXIWSGAARARVLARGAERLRGCRRGRAAGPDDADGAGVARAATTREAAARERRGRARLGAFHAHARSVHGHSG

SEQ ID NO: 186051 - protein, 64 aa, Oryza sativa
  Clone ID: PAT_MRT4530_82888C.1.pep
MRDSGFVTLFRATIFNHAVLFFSSFGDNAKIRLFFTVNFSNRANYILLLFMRHYQANAKMILLR

SEQ ID NO: 186052 - protein, 427 aa, Oryza sativa
  unsure (1)..(427): unsure at all Xaa locations
  Clone ID: PAT_MRT4530_82889C.1.pep
MTSKQKKKKEGGKIDFPRAARARPERKGGSAELNGPAGPRRRPRAAQDARAREGGEREPVDRAHHARSRVGPACQRLGSPCGGSTRRGARVGEGXRCMRAVRGGCGCGGPTRSLTPRGGTRARGGADRGRLDPVLAELAPTWRLSGCHAGRREVDDDAGLNGRRTTAASGGANHGDTGKSEHTGWLHVTRGDEPTARIRRRELDGGESRRRQPAAGEGGNDDEVTRGRFPAARASTWLRESDASVELGGTTPSEAGDXRFRARAATAASTRRATATARAAPANYGEATRTTVRXRGAVTRGRRRGSNLSGLGPGKRKKRARPKSSSASLLVPAPPTRATTIGDGETEGGNGAEAKMREFGGGGLGLXMGGNRGEARAGGDDDGDDGGAVWSGAATQATGATEADGGSDQAVGHHGTRAREAMGGAAI

SEQ ID NO: 186053 - protein, 473 aa, Oryza sativa
  unsure (1)..(473): unsure at all Xaa locations
  Clone ID: PAT_MRT4530_8288C.1.pep
MGEYCGAAPEEDPAMALVTPLPTTTTTTTTAAAAAIKQPHYYGCFDRCSTKQVFDNLHGNISLDPLAREFVDTEEFQRLRDLKQLXPYISGHLARFSQEVMGEYCGAAPEEDPAMALXRRSREELGIDRVDMQTVKLAGLLHDIGHGPFSHLFEHEFLPRVVPGSTWTHENMSALLLDSIVDKHQIDIEADHLKIVMEMIVASSKFTATESXAMNNLRLYQGEELGIDRVDLQTVKLAGLWHDIGHGXSVICLNMSFFLVLFLDQPDLHRTVYTHAKVKAVELMLVDALVEANEYLGIALHAQDPADFWKLDDTIIKSIETAPNDELNKAKGIIQRIRRRELYKFCNEYSVPKDKLEHFKNITAQDIVCSQGDISDSDLLLLLVCISTIPSIKFFKEFLLSQDFGCDEKFPITDERVSHLLPAYNQDRIVRVYAKKHELVEAVSEAFENLQLRMYGEKTQVHDTPRKKRIRFH

SEQ ID NO: 186054 - protein, 153 aa, Oryza sativa
  Clone ID: PAT_MRT4530_82890C.1.pep
MGGNVGLGTDLRGQGRELALGGRGQGGNREDDAGEEEKGEKEGEKGGLPLCRFGKKEEVSGGDAAEGGGMLPPSLGGLRAEWRGRAMTTAMTAGRFGAERRHWRQARAEADGGGNRAAAGQRDRAALTRRDTGGNHAGVRANERGERQRGSRE

SEQ ID NO: 186055 - protein, 117 aa, Oryza sativa
  unsure (1)..(117): unsure at all Xaa locations
  Clone ID: PAT_MRT4530_82891C.1.pep
MLMHDKGEGELLIQKQVWDSRAPSSVTAEKQQDAATEKPKLPNGLNGELKAPAENGTSAGCTYAAKVATNTXSTEKPDLVNATVKASLLDHIPTRSLAGHEEHDCPEELNRLEVPRN

SEQ ID NO: 186056 - protein, 96 aa, Oryza sativa
  Clone ID: PAT_MRT4530_82892C.1.pep
MGWFRAASGLARVALRRNLARAPANPFAGPAPRYFHSTRPRRFAAPVPRAVPLSRLTDSFLDGTSSVYLEELQRAWEADPTSVDESWDNFFRNFVG

SEQ ID NO: 186057 - protein, 51 aa, Oryza sativa
  Clone ID: PAT_MRT4530_82893C.1.pep
GGLCKPRTGVIRHKAIPRYFSTTPSRRATSDTFHRLKAMRGYNYGTPLSKC

SEQ ID NO: 186058 - protein, 116 aa, Oryza sativa
  Clone ID: PAT_MRT4530_82894C.1.pep
WVGGLPVTVAIRRPWLPRASELTCTRRCGGESTHQSCRSNRQLVIQAGEAGDGATPPLTTGKEREPEPGGTYRRGAGAVSPVWGTGVGSEIVEVRGWRQPKGMGVSGRPLVRCCML

SEQ ID NO: 186059 - protein, 61 aa, Oryza sativa
  Clone ID: PAT_MRT4530_82895C.1.pep
TQKIVDPKVGRPFFFFRLVAPKEFQKLPPSGVPRGKIGGSKLGPAGKQFLIVTGHQNFRVL

SEQ ID NO: 186060 - protein, 245 aa, Oryza sativa
  unsure (1)..(245): unsure at all Xaa locations
  Clone ID: PAT_MRT4530_82896C.1.pep
MMSRSASALQVLLVFATVFAATQWATSSAMYCNDLTASVHRPHSVSITEFGAVNDGVTLNTKAFKNAIFYLSSFADKGGAELFVPAGRWLTGSFNLISHLTVSLDADAVIIGSQDSSDWPVIDPLPSYGRGREXLPGKRHRSLIFGSNLTDVIITGANGTIDGQGELWWNWFHNHTLNYTRPPLLELMYSDRVVISNLTFMNAPFWNIHAVYCSQVLVQHLTILAPISSPNTDGIDPDSSSNVCI

SEQ ID NO: 186061 - protein, 66 aa, Oryza sativa
  Clone ID: PAT_MRT4530_82897C.1.pep
SDLLSKCVTQTKSWIRSFSFTSTHVICLCPQPHHPVSSLCITHTVSMLSVLNTLTHLHQKKKKRAP

SEQ ID NO: 186062 - protein, 520 aa, Oryza sativa
  Clone ID: PAT_MRT4530_82898C.1.pep
KNIASFKKTLYIYPFELGIYSISTMFPLFPSSSATFLHNILIRASASSASPRLSFAAFSSLLRCGLVPDRFTLPPLLGWVGKLPAFPRTDAQVQAQTVRHGFLANVFVVNALLAIYVKCGEMESAKRVFDEMPRRNGVSWSTMVGGYAAAGELDVAREMFDRMPAIGRNVVTWNSMVTGFARHGLLPLARKMFDEMPVRNLVSWNAMLRGYSVNSDMDGARELFDVMPEKDVVSWTCMISGYAQAGRYQDTLELFRAMQTESNVQPNEVTMVSVLSACANLTALEEGRWVHAFIDKHKMVLNNEYNLGAALIDMYAKCGRTDIAVKIFNSLDRKNVSAWNALITRLAMNGNARDSVDAFEQMKRTGEKPNDITFVGVLTACSHGGLVDEGRRCFQSMASTCGVQPEVKHYGCMVDMLGRAGLLEEAEELIRSMPMAPDVMVFGALLGACRMHKRFDVAERVQSEIHSLNLNAQQSGCHVLISDIYAAAGKWFDVLEARQVVQRSGIRKWTWCSKVELRQK

SEQ ID NO: 186063 - protein, 567 aa, Oryza sativa
  Clone ID: PAT_MRT4530_82899C.1.pep
MAPPPHLLPLLLGRLVVSGDLRRSPAHLRRIVPLLPSHPHLAAALCAVHFPLFPSSSATFLHNILIRASASSASPRLSFAAFSSLLRCGLVPDRFTLPPLLGSAGKLPAFPRTGAQVHAQAVRRGFLADVFVVNALLAMYGALRDAASMREVFGSCAGVADVVSWNTVIGGYVKCGEMESAKRVFDEMPRRNGVSWSTMVGGYAAAGELDVAREMFDRMPAIGRNVVTWNSMVTGFARHGLLPLARKMFDEMPVRNLVSWNAMLRGYSVNSDMDGARELFDVMPEKDVVSWTCMISGYAQAGRYQDTLELFRAMQTESNVQPNEVTMVSVLSACANLTALEEGRWVHAFIDKHKMVLNNEYNLGAALIDMYAKCGRTDIAVKIFNSLDRKNVSAWNALITRLAMNGNARDSVDAFEQMKRTGEKPNDITFVGVLTACSHGGLVDEGRRCFQSMASTCGVQPEVKHYGCMVDMLGRAGLLEEAEELIRSMPMAPDVMVFGALLGACRMHKRFDVAERVQSEIHSLNLNAQQSGCHVLISDIYAAAGKWFDVLEARQVVQRSGIRKWTR

SEQ ID NO: 186064 - protein, 96 aa, Oryza sativa
  unsure (1)..(96): unsure at all Xaa locations
  Clone ID: PAT_MRT4530_8289C.1.pep
LCLSIVQAIGREVQLQQFSGVYFDQTQAQAQTLLTFNLPSMCGXYPNYYCAPRSIAXVGGCWALILIVRLFNLSLHLHVCLLPLRVLSLSLFSSYL

SEQ ID NO: 186065 - protein, 430 aa, Oryza sativa
  Clone ID: PAT_MRT4530_828C.1.pep
MKKSREGNLKHVKGSLCLVPPLLLAVFFYLQFQTLGLFSPIFRCGGQSAGGGGGDDYVDRLRASATFLPLKDTREWAETWFISTLDDTSEPEGEAKNIVFPSAASAGRLLCMSAPSRRDGTRNAYALAWRDALPGGAELRPGLAYVSETAYDHSNLWHGISALIPFASWHARSGCRARPPRWPLFHHGEVRLGITPWLTSLAKATTGVGMVVETFNASNVPVCFQEAVVFRPIMAGMTRELLLAAFDFMRCKARAQCGVVADVSDPDSAAAAVTRVFKSECARVAGCALTTARSDNLTFCDQVKLMSGTDVLISSHGAQMTNLVFMDRNSSIMEFYPKGWRERAGGGQFVYRWGADRSGMRHEGSWWDPHGEPCPGSPDILSCYKNRQIGHDEAYFAQWAARVFAAAKERKAGGSPASTRRREAPTCQCS

SEQ ID NO: 186066 - protein, 73 aa, Oryza sativa
  Clone ID: PAT_MRT4530_82900C.1.pep
LVLVHYSLTPVMRTHMWPWRSCRVCSDEHVLSRCRSIVFFFYTVNLCYSVVIHDDRSVVLDPFSLPIPNALCS

SEQ ID NO: 186067 - protein, 146 aa, Oryza sativa
  unsure (1)..(146): unsure at all Xaa locations
  Clone ID: PAT_MRT4530_82901C.1.pep
PGRFSPSHGSPLPPRSPLPPDESCGLXPGSIGIIQGRRRPRRRRTDRNGDELRGELPPSPPADQIESNPIESNQXLTKSRQETLIQQQSRARNWGSKSGVRFEGGGSGEESLQIRKSAXIYTXXASASTHEHEHEPKGGRKXKIKN

SEQ ID NO: 186068 - protein, 329 aa, Oryza sativa
  Clone ID: PAT_MRT4530_82902C.1.pep
MREEEMGECGGGEYRCWEELLPDALGLVFRNLPLREVLTVVPRVCKSWSRVVAGPYCWQEIDIEEWRQQQGKPEQLVRMVEMLVARSCGSCRRISVSGLPGDPLFSFIGDHARALRTLEIPRSEISDAAVESVAPRLPNVTFLDISSCTKIGARALEAFGKNCKSLVGLRRVMHPTDVAGKACQRDEARAIACTMPRLRHLEMGYMVIATDAVLDILARCRDLRFLDLRGCWAVDDKFLQERHPGLRVLGPGVDDCFENSYLEECSDYSDDSSIYSWELMEDDDDDYYAVGSDDEAIWDDGQGLENLEVRFYGGGFSESYAGFDWPPSP

SEQ ID NO: 186069 - protein, 387 aa, Oryza sativa
  Clone ID: PAT_MRT4530_82903C.1.pep
MAAFPLPKGTIEAIDRRRRSFLWTGEESYHGSKCLIAWDQVCRSKKQGGLGIKHLQTQNTALLVKMLHRLFTQPSPWASWISKEHQNYPLGSIDLGPHWRSLIALLPLLRKHTKMLPGDGRHINFWHDVWLDGQLSAKFQALYTHTVKLNCLLSSVLHEDFRCFFVPRITPTAQQQMMQLQYLLQNVTLSTEPDEIVCNLKTKNGLISSSELYRSEMATFETWPPWSAIWRSAAPPRVKFFAWLMSKNRLPTRVNLHKKTILPTPTCELCNANLEDTYHIFLRCPMAAAFWNMIQIIPEISSLSDLHNLELSGPLPTFLSSTFFLLCCWRLWNHRNEVVFQNLPPSISRLINSCLQDAKLWAHRFNPSQKSVLPLWTSILSSPLTLL

SEQ ID NO: 186070 - protein, 45 aa, Oryza sativa
  Clone ID: PAT_MRT4530_82904C.1.pep
KSQMAKIKTGINGFGRILSYFSPHLFFYYCIFLFFFSHYFFFTFY

SEQ ID NO: 186071 - protein, 2498 aa, Oryza sativa
  Clone ID: PAT_MRT4530_82905C.1.pep
MVNVGVSFVSLLNAVAWHCQLPLVSYLWEIDGNGMLLAGVELALPSEDMAGQIVSKFFWVCASTQTSDSHEMGAHQAVRFLQARYGFIVHDYNLQMLLSYRRIAASTAPLFGGVNPVVSRGPNGSPNAGIDVEQSVPEQALASDVHVRSQVAFVAGTGPLTQNSITTASRKRTLLDVPRHTAAANREKRRLKRSGSQPDHLLLMLANNAALCPERSYYGGPSHECPYCGAVFWYQERVKRDSAVSQRRIVYNLCCRGGKISLPELKYPPDMLAKLLKFDGDAQSKRFLRQIRSYNSLFAFTSLGADVEKSINNGTAPYVFKINGVVHHRIGSLLPQRGAKPKFAQLYIYDTENETANRINIFDRENSNDEPDPSIVTGLGAMLDQHNDLVKSFRYARDRLNEHGNEQIALRLLGCNAKDEVQYNLPTSGEIAGIIVGDSSNDAYTYDVVVQSSDNRLRQVSALHPSYMALQYPLLFPYGERGFHLGIKYTDFPSIAGTSRRYVTMLEYYRYRFHYRLNKPNPYTCCGRLSDSICVDAYSTVEGSRLKFIHDHQPELRSECVQGIVDAIDHGLESGDSVGKKYVLPSSFTGGRRYMVQNYQDAMAVCRVFGSPDLFVTFTCNSKWQEIYDALVFEPGQVPSDRSDMIVRVFSMKVDEFISDIKEGRTFGPVLAVLYTVEFQKRGLPHIHCIVWRAAADAEFSATAVDSLICAEIPDVFSDPLGYALVDEFMIHGPCGDKNKSCVCMKNGHCSKHFPKGFQEETTMDEFGFTVYRRRNDGRYVVKNGIKLDNRWVVPYNMKLLKKYQAHINVESCNKSNMIKYLFKYITKGGDRTKLYFETTGNTPNKTVDGTVLPPNEIDEYINARFLSTCEAFWRAFEFDIHYRVPAVERLPIHLPNMNFVQYKKGTDLKKLLDSPAAKKTMLTEWFECNKKHPNARTLTYCDFPKQWTWDNSARCWRPRTPVEKIGRIYYVSPAAGELYYLRMLLMTVKGAKSYADVRTFEGTVYPTFRQACESRGLLENDNDWHLLFDEAIVSASSLQLRQLFVTVVMFCSVGNVRSLFDKYWLYFTDDIQHRLRTALSNPAYVVPHDRLLSLLIKELHSAFANSGGNIDDYDLPRSTIHSDDEFGNRMVNEELALDTAALAAHASLMIPRLNSEQQNFFDTIVSRVSESRPGFFFVYGHGGTGKTFLWNVLISKIRSEGNIVLAVASSGVASLLLPRGRTAHSRFKIPIDIDENSICSIKRGTMLAELIQKTSLIIWDEAPMTHRRCFEALDRTLRDLLSEHNPSNSVLPFGGKFVVLGGDFRQILPVIKKGTRNSIVDASITNSPLWQHVVLLKLTVNMRLFQSGLSEGRRHDLEQFARWVLALGDGMLPVSKRIDESEATWIDIPDDLLIRASDDKIYSIVNEVFPCYVHRYTDSSYLASRAIVCPNNSTVDEINDYMVAMIPGEMKEYLSCDTISKTSEHIPDFDILYPTEFLNSINANNFPTHRLALKKGATVMLLRNLNQSLGLCNGTRLLVLSLGHRLLECVILTGSNVGERAFIPRIVLSTTSSKWPFVLQRRQFPVRVCYAMTINKSQGQTLSRVGVYLKKAVFTHGQLYVAVSRSTSRDGLRILIKDDDGACSSKTRNVVYHEVLEAVRLMLCYRVLVQKCFSMFSGSFAMAYSMLSKLELGADNPRICVRVSRLWEFANPNDETQLLHLGLVLIDQEGTSIAAQIYPPCDLQFREIITEGKVYYLEYYRVREWSRRYRPVNNSLSICFTRWTKVEQVADPAADFPLYTYSLTPYGGLRQRVDRKEEFTGDISLSGNSACKWYINVNTPEVNSFKESIQGKYEPIKMIELPAVGAVRTGAEQKSIAQIKDLNPFMFRKNEFMVTVVIKKIDTESSWWYPACDTCKRTAKPYGKSYRIKLSLIAGDDTGDTKFVLFGRTAQRIIGRPVEMLIQNNPAGIEFIPKEITDLLEKEFTWNVAFTENTLSSSTVSFQVNLIVRGPDNPCSSALQSPSASQASSAVPSQALSPGLSHGLSIGQCSAAADPSIGFADPTAGIDSPLAASIKHKKPETEYQSKPPAELPQDEAEDDDNLPLSQIVADDATKHSTSKSYKKRARPSPGIGAAKKLFKDNGDGVADGRIPPYSCLLKQQCVPCSRHGAYNVSHCVVLILFFHHSSALLAESHRLNLKNSCSRKNNSFPTIVSTGMQFDWSAELGVGQPQRPSSYGTNRPLLATKFSRRKQISHMLADIIYTRAVVVKVSGAGNPTTTRISAMISAVCRCQIDDFALLPFRPKMFIAIFMDADLQEELSERAFKKVSFTFKATRLTFEPFKMNLGSTVNPLCQRVILALEGVPPESWNKEAISELMDSCCFVEELYGEHHIQELSIFKLAAWTTDCDLIPKVISWNIETKEGRRGSANISWMHNAALSVVLVHIEKLFDYTDEDSGSDSDGEVLREYEQQRPRVPVVKTFSWVPLKIDLNNGPVEGGTPAIAPRRLPLEVRRRCRLP

SEQ ID NO: 186072 - protein, 1295 aa, Oryza sativa
  Clone ID: PAT_MRT4530_82906C.1.pep
MVNVGVSFVSLLNAVAWHCQLPLVSYLWEIDGNGMLLAGVELALPSEDMAGQIAPLFGGVNPVVSRGPNGSPNAGIDVEQSVPEQALASDVHVRSQVAFVAGTGKRTLLDVPRHTAAANREKRRLKRSGSQPDHLRGAKPKFAQLYIYDTENETANRINIFDRENSNDEPDPSIVTRLGAMLDQHNDLVKSFRYARDRLNEHGNEQIALRLLGCNAKDEVQYNLPTSGEIAGIIVGDSSNDAYTYDVVVQSSDNRLRQVSALHPSYMALQYPLFFPYGERGFHLGIKYTDFPSIAGTSRRYVTMLEYYRYRFHYRLNKPNPYTCCGRLSDSICVDAYSTVEGSRLKFIHDHQPELRSECVQGIADAIDHGLESGDSVGKKYVLPSSFTGGRRYMVQNYQDAMAVCRVFGSPDLFVTFTCNSKWQEIYDALVFEPGQVPMAYSMLSKLELCADNPRICVRVSRLWEFANPNDETQLLHLGLVLIDQEGKYEPIKMIELPAVGAVRTGAEQKSIAQIKDLNPFMFRKNEFMVTVVIKKIDTESSWWYPACDSCKRTAKPYGKSYRFKLSLIAGDDTGDTKFVLFGRTAQRIIGRPVEMLIQNNPAGIEFIPKEITDLLEKEFTWNVAFTENTLSSSTVSFQVNLIVRAADPSIGFADPIAGIDSPLAASIKHKKPETEYQSKPPAELPQEEAEDDDNLPLSQIVADDATKHSTSKSYKKRARPSPGIGAAKKLFKNNGDGAADGRRVHRQLILFFHHSSALLAESHRLNLKNSCSRKNNSFPTIVSTAFCFDVIALPDASFDWSAELGVGQPQRPSSYGTNRPLLATKFSRRKEISHMLADIIYTRAVVVKVSGAGNPTTTRISAMISAVCRCQIDDFALLPFRPKMFIAIFMDADLQEELSERAFKKVSFTFKATRLTFEPFKMNLGSTVNPLCQRVILALEGVPPESWNKEAISELMDSCCFVEELYGEHHIQELSIFKLAAWTTDCDLIPKVISWNIETKEGRRGSANISWMHNATLSVVLVHIEKLFDYTDEDSGSDSDGEVLREYEQQRPRVPVVKTFSWVPLKIDLNNGPVEGGTPAIAPRRLPLERDGGIRAGARSSRWIPSWCGGESPAPARAVGDRRRRWEGPTLSRSHLGGGGTGKEEVAAAPTPTGTGKEEAAAARGGGPDPLSHSHLGGGGGTGKEAAAAPTPTRGASRGGGGGADADAGSEQEDAAAWGGGPDPLSHSHLGGGGGTGKEEAAAAPTPTRGASRGGGGGGTGTRREERRLGRREEGGRGVAPERGTGGGGGAGTR

SEQ ID NO: 186073 - protein, 2111 aa, Oryza sativa
  Clone ID: PAT_MRT4530_82907C.1.pep
MVNVGVSFVSLLNAVAWHCQLPLVSYLWEIDGNGMLLAGVELALPSEDMAGQIVSKFFWVCASTQTSDSHEMGAHQAVRFLQARYGFIVHDYNLQMLLSYRRIAASTAPLFGGVNPVVSRGPNGSPNAGIDVEQSVPEQALASDVHVRSQVAFVAGTGPLTQNSITTASRKRTLLDVPRHTAAANREKRRLKRSGSQPDHLLLMLANNAALCPERSYYGGPSHECPYCGAVFWYQERVKRDSAVSQRRIVYNLCCRGGKISLPELKYPPDMLAKLLKFDGDAQSKRFLRQIRSYNSLFAFTSLGADVEKSINNGTAPYVFKINGVVHHRIGSLLPQRGAKPKFAQLYIYDTENETANRINIFDRENSNDEPDPSIVTGLGAMLDQHNDLVKSFRYARDRLNEHGNEQIALRLLGCNAKDEVQYNLPTSGEIAGIIVGDSSNDAYTYDVVVQSSDNRLRQVSALHPSYMALQYPLLFPYGERGFHLGIKYTDFPSIAGTSRRYVTMLEYYRYRFHYRLNKPNPYTCCGRLSDSICVDAYSTVEGSRLKFIHDHQPELRSECVQGIVDAIDHGLESGDSVGKKYVLPSSFTGGRRYMVQNYQDAMAVCRVFGSPDLFVTFTCNSKWQEIYDALVFEPGQVPSDRSDMIVRVFSMKVDEFISDIKEGRTFGPVLAVLYTVEFQKRGLPHIHCIVWRAAADAEFSATAVDSLICAEIPDVFSDPLGYALVDEFMIHGPCGDKNKSCVCMKNGHCSKHFPKGFQEETTMDEFGFTVYRRRNDGRYVVKNGIKLDNRWVVPYNMKLLKKYQAHINVESCNKSNMIKYLFKYITKGGDRTKLYFETTGNTPNKTVDGTVLPPNEIDEYINARFLSTCEAFWRAFEFDIHYRVPAVERLPIHLPNMNFVQYKKGTDLKKLLDSPAAKKTMLTEWFECNKKHPNARTLTYCDFPKQWTWDNSARCWRPRTPVEKIGRIYYVSPAAGELYYLRMLLMTVKGAKSYADVRTFEGTVYPTFRQACESRGLLENDNDWHLLFDEAIVSASSLQLRQLFVTVVMFCSVGNVRSLFDKYWLYFTDDIQHRLRTALSNPAYVVPHDRLLSLLIKELHSAFANSGGNIDDYDLPRSTIHSDDEFGNRMVNEELALDTAALAAHASLMIPRLNSEQQNFFDTIVSRVSESRPGFFFVYGHGGTGKTFLWNVLISKIRSEGNIVLAVASSGVASLLLPRGRTAHSRFKIPIDIDENSICSIKRGTMLAELIQKTSLIIWDEAPMTHRRCFEALDRTLRDLLSEHNPSNSVLPFGGKFVVLGGDFRQILPVIKKGTRNSIVDASITNSPLWQHVVLLKLTVNMRLFQSGLSEGRRHDLEQFARWVLALGDGMLPVSKRIDESEATWIDIPDDLLIRASDDKIYSIVNEVFPCYVHRYTDSSYLASRAIVCPNNSTVDEINDYMVAMIPGEMKEYLSCDTISKTSEHIPDFDILYPTEFLNSINANNFPTHRLALKKGATVMLLRNLNQSLGLCNGTRLLVLSLGHRLLECVILTGSNVGERAFIPRIVLSTTSSKWPFVLQRRQFPVRVCYAMTINKSQGQTLSRVGVYLKKAVFTHGQLYVAVSRSTSRDGLRILIKDDDGACSSKTRNVVYHEVLEAVRLMLCYRVLVQKCFSMFSGSFAMAYSMLSKLELGADNPRICVRVSRLWEFANPNDETQLLHLGLVLIDQEGTSIAAQIYPPCDLQFREIITEGKVYYLEYYRVREWSRRYRPVNNSLSICFTRWTKVEQVADPAADFPLYTYSLTPYGGLRQRVDRKEEFTDVIGIITEATYLYQQLSLQMDINVNTPEVNSFKESIQGKYEPIKMIELPAVGAVRTGAEQKSIAQIKDLNPFMFRKNEFMVTVVIKKIDTESSWWYPACDTCKRTAKPYGKSYRIKLSLIAGDDTGDTKFVLFGRTAQRIIGRPVEMLIQNNPAGIEFIPKEITDLLEKEFTWNVAFTENTLSSSTVSFQVNLIVRGPDNPCSSALQSPSASQASSAVPSQALSPGLSHGLSIGQCSAAADPSIGFADPTAGIDSPLAASIKHKKPETEYQSKPPAELPQDEAEDDDNLPLSQIVADDATKHSTSKSYKK

SEQ ID NO: 186074 - protein, 311 aa, Oryza sativa
  unsure (1)..(311): unsure at all Xaa locations
  Clone ID: PAT_MRT4530_82908C.1.pep
MSVPLSQTDLPASYKPKPPSPFLPLPFASSPLPPLPCSVSPPPSIAKHRESRSSSSLPEVSRRRPDRCRRSPCARXPSPPEXRKRRSSPASLGVVPPNPTLASDSRNRIDALAAGNXPLVTSSPFPPSPAAGCRRXSSNPRQIRAVGSSPLVTCNRPXARFCPYRRGSLRRSPLSTAVRSGQRRRLPPAGPRGSHVGATSAPAQPRPGRADPGQSLPCASILEHSVRVSTVALKLKIXXTSWVKLGFYKRFGKPDTWVGACELNEISKTADRGTYRVYGFPLLHLRTVSLEFHPNIRQVRSHGWNGTPLAE

SEQ ID NO: 186075 - protein, 91 aa, Oryza sativa
  Clone ID: PAT_MRT4530_82909C.1.pep
MKVLRARLRVGVGTVAALCGWVLFRLVQTGSSGVMQASEVGGTIVEDRVEAGVGDVMQGCGELGGRTVVNVESGLTGRKANCLLAGSCMSD

SEQ ID NO: 186076 - protein, 440 aa, Oryza sativa
  Clone ID: PAT_MRT4530_8290C.1.pep
MESATEKVRRTPSSCLLLRISDICKVRSVGVAPTVREKPKADGSATGESSEDGGAHLKVHPHHVSDHESVSECSSARCEEAFVERLLDAISGLKLSYVNLQQALVPYDPEEITIADERFTSELQETAGLKDLYVNMNKWRNPMYQCYVGSRIQEQQKLAVELQAGMCKRDSEIVCLRAELDELERKNMELEEKIGQSALQKEGSFAIGMGVSTDMFMELFELSTKSIHDFAKLVVRWMKLSRWNLGNLTSPIDNSVVYDKRSHKNYAVEAYFACMMLMGHKEEYLSLDVFDYVMSFSDPFDALMKAPDSCFGRFCREKYLAILPPSMEDSFFGNLDHRSFVENGGHPRTPFYQAFVTMSRYVWASLTVARSLNPRAEMFYVKGGTEFRSKHMECVPSKITKEGDKMQGVSVHGQRKKLLNTSYSYRISRSGLLSHCFVRE

SEQ ID NO: 186077 - protein, 419 aa, Oryza sativa
  unsure (1)..(419): unsure at all Xaa locations
  Clone ID: PAT_MRT4530_82910C.1.pep
SFPRSRSAPQPARVPEPRHSNRCASRCIPRARAVVADRLVAAAVTLCRASPRLSPVSSRRSKPPRLGFQTDIAALKAPGALPLFSXPIASTPLLPPPSELCLAXPPFAAKRRESRSSSSLPVASRRRPDRCRRSQCAXPPSPPVLRSTRSSPASLGVAPLNPTLATDSRSRVDALTARNWPLVTSSPFPPLLSAGCRRRNPLPTGSLRRIQAVGSLPLFLPRHPGVCPVPPHRRKAPRRNRRRPPSIRGRRLRLPPASPRSSHVGXHVGATSAPARPRSDRADPGQSLPCVSIFVHPVRVSTDAFKPKIXKISWVKLGFYKRLGKPDTWVGACELNEFXKTADRGTYRVYGFPLLHLRTVSLEFHPNIRQVSTETLQKYLLKHSNNTTCNIPNNLVKYVLKRHRIPSETSKEHNMQQSK

SEQ ID NO: 186078 - protein, 323 aa, Oryza sativa
  unsure (1)..(323): unsure at all Xaa locations
  Clone ID: PAT_MRT4530_82911C.1.pep
LGRPAQGGPRRACAREGGERXRWTGLTTRGPGWDPLVSGSAHRAEGARGAALGCGGPTRSLTARGGTRARGGTDRGRPVPTSAELAPTWRLRAGRLFVMRGDEPTARIRRRELDGGESRRRQPAGREEGNGDEATRGRFPAVRASTRFRELDASVGLDGATPSEAGDVRVLRSSSGDGGEHTASDGNGRRRGSEWKRKGKGRLGEDDAGEEEKGEKEGEKGGLPLCRFGKKEEVSGGDAAEGGGMLPPSLGGLRAEWRGRVMTTAMTAGRFGAERRHRRQARAEADGGGDRXGGRAAGPGGADATRHGRQPRGRARERARGAV

SEQ ID NO: 186079 - protein, 472 aa, Oryza sativa
  unsure (1)..(472): unsure at all Xaa locations
  Clone ID: PAT_MRT4530_82912C.1.pep
MGRPTQEGGPERARGRGGEREPVDRAHLAWSRVGPACRXHGSPCGTRTRRALGFGGGTRCTRAVRGGRGCGGPTCSLTARGGPRAQGGADRGRLDLVLAELAPTWRLRGCHAGRQEVDDDAGRNGRRTTAASGGANHGDTSESEHTGWLHRTRGDEPTARIRRRELDGGELQRRQPVERKGENGDEVTRGRFPAARASTRLRESVPFAGLGGNASREAGDERRFRARAATAASTRXATATVGAALASYGEATRTTVRAGAVTRADGAKRDRFGLGPRKRKKRARPESPSASSLVPAPPTRATTNGDGEQGKGGGERRRRGRGRRGSASVXGSLRTEWRGRVDDDGDDGGAVWSGAATTTARARGKQRRRGDLSGVARARVLTRGADGAGAARAATVRARGKRQRGSGEGGLGSARXRARARGARPERRXGERERERERDSRGGRGRWAERDSAHRTRGRQNRLLRRDRFGKG

SEQ ID NO: 186080 - protein, 269 aa, Oryza sativa
  unsure (1)..(269): unsure at all Xaa locations
  Clone ID: PAT_MRT4530_82913C.1.pep
LEELLISRIRFIFFSNWGGNYLYRARVKGVHFTHTTLLTRITQPVXGISHVGRPPSFHDKAFPKPTQVYHMPTRGVPDQQQSARFLRRNWVVTREHGITINKGRIKYNKLGADRGRPDPISAELAPTWRLRGCHAGWREVDNDAGRNGRRTTATSGGANHGDTGESEHTGWLLRTRGDEPTARIRRRELDGGELRRRQPAGREEGKGDEVTRGQFPAVRASTRLQESVACVGLGGATPSEAGDERVLRSTGGDGGEHTASGGNGRGGAG

SEQ ID NO: 186081 - protein, 80 aa, Oryza sativa
  Clone ID: PAT_MRT4530_82914C.1.pep
MVTMVDGVMHAEINCTTMQLRRRIGRKICMRVDHGNNYMWDGYEFMQPEEGGPDAGGRRGGAEGRTVARRRPGRRGGGSG

SEQ ID NO: 186082 - protein, 292 aa, Oryza sativa
  unsure (1)..(292): unsure at all Xaa locations
  Clone ID: PAT_MRT4530_82915C.1.pep
HPVNRYQSQETVLVSQGDRISQQQRSLYYRVGVQSCWATDRSRAHNCITKGKRKPGLGPIITGATWELGRNPKTHRSRLAPGRTPHQQDPLHLRQQLGGDYLYRARFYPNCYSDFKFEGDRRYSHXVHEYRGATGWLQGDMAELAPTWRLRGRHAGRREVDDDPAANGRRAAAASGGANHGDTGKSEHTGRLHETRGDEPTAWICRGLLDGGGLRRRQPAAGEEGNGNEATRGRFPAVRASTRLRELDASVGLGGTTPSEAGDERVLRSSGGDGGEHTASDGNGSGRGRAMT

SEQ ID NO: 186083 - protein, 348 aa, Oryza sativa
  unsure (1)..(348): unsure at all Xaa locations
  Clone ID: PAT_MRT4530_82916C.1.pep
RICQRKLDGGESRWRQPVGREEGNSGXATRGRFPAVRASTRFRELDASVGLDGTTPSEAGDERVLRSSSGDGGEHAASDDNGRGEEMERGGRTEGGITEMRRGAVTRGRRRGSNLSGLGPGKRKERARPKSPSASLLVPTPPTRATTNGDGEQSTGAAAMARRRKRGRLEGKELGFKXGGGNVGLGTDLGRRRGAGATRQREEGRCLRPLAACARSGXGRAVTTAMTAGGLERRDNTGDRRVQRLTAAATGRSATRHARAACNGRRPRGRAHANTARGKWQRGSGEGGLVSARAAYAGAAQTGEGKGALGAFFAHARAARGRGGAELSGGGGGAELSGGEEMARGEGE

SEQ ID NO: 186084 - protein, 61 aa, Oryza sativa
  Clone ID: PAT_MRT4530_82917C.1.pep
MARGGGRPANCMEIGLSSQREQLVLTNNFVTPVTKEMDVEEAEKWLREMRKKIRGEDEGRR

SEQ ID NO: 186085 - protein, 583 aa, Oryza sativa
  Clone ID: PAT_MRT4530_82918C.1.pep
MPPPLPHSPPPPAAADALGQILQALLPALLLAAESVKALHARWRAVHGTLLALQTSLAAAPDSAVSHPLFADLVASLLPALRSLQALSARCQDPSLPGGRLRLQSDLDIAASSLSLLLHDLSLLLRSGILYVDPSASSPNAIVLQVPAPAASRADKSLFIRDAFARLQIGGLDLKLKALASLLDLLANDIAAESAHIVATDGDVAALLRLLDASSHSALRDRAAATVAHLATACVASRKVVFDEGGLGPLLRVLDSGSAPATRERAVAAIEAITADVGSAWAVAAYGGVPILINACRPGSGSPVVQALAVAALKNVASIEDVRSALVEEGGLPILVDLLASGTIDAQKGSALCIWSLASLGDHEIQYQIVQAGALLPLLQALHTASGLDLHDTVLRAIHALAVVPAAARTLCSSPLFFAQLTDLMCRGGSILLQQMAADMVAELAPGVSDDTKRCMAPCICMLVKMMETAKPATVQESAGRALLALMTLKFNRKELVRDEKSVTRLLHMLDPRNEEIDKKYPVSVVLALALGGGNGTRRRLADSGICQHLQKLAEAEVPGAKKALQRISGNRLKSLLSRGWNN

SEQ ID NO: 186086 - protein, 711 aa, Oryza sativa
  Clone ID: PAT_MRT4530_82919C.1.pep
MASKTLREFAAPSANNVVVGPQVNIGDVDFDLKSSLITMAQASPFCGKPNEDANAHMQQFLEICSTYTIKGVSPDAVRLRLFPFSLLKRAKQWFYANRAAINTCDKCSTTFLSKFFPMGKTNALRGRISSFQQTRDESIPEAWERLQEYVAACPHHGMDDWLILQNFYNGLTPVSRDHQDAAAGGAFFSKTVQGAVELIEKMVSNMGWSKERFQTHQRGMHIVKEMELLVAKLDLLMKRLDDHDKRLQGTIKALDSHVTCEVCGGTGHSGNDCPKTREEAMYMGNNNNGYRPQGGQGWNSTSLHGNADVRRHAKRRFDKLNFTALASTPMYLQLADSSVRYPTRIAEDVPIKIRDFLIPVDFVEPLLEDAGKITRTGQEIRAAGSEEAVFRIEIKEGVEGKAKDTRSITSGDGWKIHELKRKEEFTLTWKGLSTLLGFHDSCKIDLQRGISGFEKNRFWEDISGAPICKKPRTNNIHNPTLRLVHKWIAMTLFSRSDLRPIRGDELIIMFAMVRKVKISPVKCMIRQWLESIMFSAPVECTSLITRIAKELGVVSDQIAFISAARPHIDEAYLVQGHILKQGADGSLIYFFPSCTNEIPLPNAGYHLYNCHELTIPLQTIEESRAGGTYRETRNMTRNEQESSSSSTPVQMYEAGWAPTGDAPRWTQAPRHSIGVSPWASAGEDRWHAAPLRLPSFHSPLNPRHGSGVWCR

SEQ ID NO: 186087 - protein, 200 aa, Oryza sativa
  Clone ID: PAT_MRT4530_8291C.1.pep
NSPNSVAVAMDRDAGGGGGGGGDPATGGPAEFPGEAKITLRPDFLLLQAAPLQAAARKSKRYAIQQSILYKEHKRQSRHQLRGAQPSTSQKPRHAEAGSKTHVRQSVLYSERKRQPRHERGGTQPPTLLTASEHDSTTVEPSRLKEASPSLSDELRELEEYRKTHTFSSFEDAIHYVLSVHPRTLSGLPVTEDDHHDGEA

SEQ ID NO: 186088 - protein, 114 aa, Oryza sativa
  Clone ID: PAT_MRT4530_82920C.1.pep
MSGSVMMMQRLARQAAHAVTQRARNQTAATARGYHHAGVAAAGGKNVTPAAAAARRHPDVVVTIEEAAGAGPRPSSTSQEDAARRLRWLLYEASFWRGCSVYFAGVAAARVMAR

SEQ ID NO: 186089 - protein, 614 aa, Oryza sativa
  unsure (1)..(614): unsure at all Xaa locations
  Clone ID: PAT_MRT4530_82921C.1.pep
MTGFNLPENFKENPEAFFRSVRPRVAAPQKTLPTEKPAVPAPPIFKTMASKTLREFAAPSADNVAIGPQINMGDMDFNLKSRLITMAQASPFCGKPNEDANAHLQQFLEICSIIFIMDSPRRPATPTSRDHLDAAAGGAFFFKTVQGVVDLTEKMVSNMGWSEERLQTRQRGIHTVKETELLAAKLDLLMKRLDDHEKRPQGTVKALDSHVTCEVCGNTSHSRNDCPETREEAMYMGNNNNGKKLAANDKVLENKNVKLDGFASVFQNQLSFNKMIETQLAELASLVPANEIGRIPGQPDSSIENVKAITTRRGKSTRDPPYPNPAGTTGMSKEAPSSDSADKEVQPEKTVPQEYGDTRLLPFPQRRRPSVDEQFARFIEVIQKIHINVPLLDAMQVPTYARYLKDILNNKRPLPTTEVVKLTKQCSNVILHKLPEKKKDSGCPTITYSIGAQQFDQALCDLGASVSVMPKDVFDKLNFTVLAPTPMRLQLADSSVRYPVGIAEDVPVKIWDFFIPVDFXIKYGPNPQNIQEVEVEPPKTDSLVKFMQNFLKKETTMPRNRYWRTPVKPPIPAKKLEQPAQKKPPSAPKPRKVWREKPKTPAPSPPETGGKTMN

SEQ ID NO: 186090 - protein, 194 aa, Oryza sativa
  unsure (1)..(194): unsure at all Xaa locations
  Clone ID: PAT_MRT4530_82922C.1.pep
MGRRHGSDLFGLGPGKRKKRARPESPSASLLVPAPLTRATMNGDGKQSTGGGGNGVEARDENEGDWRREELGFIGATVSVWERGTDIGRSSRRAGARLAANTTTGGDAGERETGGKEGRKGACXLATLGKGGGSGGDXQREEGLCLRPLEASARSGGVGLMTTAMTVGRFGAGRRHGRQARAGVAEADGGGDQA

SEQ ID NO: 186091 - protein, 40 aa, Oryza sativa
  Clone ID: PAT_MRT4530_82923C.1.pep
VVLALVAAAVQGPCWCQCSATHRAWAAPRHDAIPSTSHVV

SEQ ID NO: 186092 - protein, 198 aa, Oryza sativa
  Clone ID: PAT_MRT4530_82924C.1.pep
MAGARAAVIPVAAPPRTISVSLAASPSSSHPLRPVASSGVSCSQRRLPTAAAARNHPPPSASHGAASRLYVSGLSFRTTEESLRNAFERFGQLTEVNLVMERVAKRPRGFAFLSYASEEESKNAMEGMQGKFLDGRVIFVEVARQRKAAPPAAHCLRMYLTPSKILPSVYPCNLQLQKFGVDAVDLRLPPVGLKTGCK

SEQ ID NO: 186093 - protein, 100 aa, Oryza sativa
  unsure (1)..(100): unsure at all Xaa locations
  Clone ID: PAT_MRT4530_82925C.1.pep
PSLWAXXAXGLQPPGGETTSHVGFFRHSLRSRKSPVQEIRGTGVCLLVDPFSVGLLQKWGAYGVSINTWGYCSRQWHCGTTNHTHTRVWAYTRVGKVGTH

SEQ ID NO: 186094 - protein, 59 aa, Oryza sativa
  unsure (1)..(59): unsure at all Xaa locations
  Clone ID: PAT_MRT4530_82926C.1.pep
MTSHALVRELKSSXSXXLFFFFFKHYNLXSIVIIQNPHPLHHHRXKIISHYHSNIQFFI

SEQ ID NO: 186095 - protein, 186 aa, Oryza sativa
  unsure (1)..(186): unsure at all Xaa locations
  Clone ID: PAT_MRT4530_82927C.1.pep
DAKKTTTLVXELEGKAPMAEARLRQKEEENAELKRKFEGYHVRWLQHEIRLSSLKETIDEQMISLQVAQECVEKRSREMLSLYDRQESSESYVKMSKETSARLAHSSRHYAGIARGTCTEFRQQSQALVESREPWQPSTQGGNSIDDLEKLKSNFCMWKKDYKARLRKAMAAELDLEGRHRSICWI

SEQ ID NO: 186096 - protein, 128 aa, Oryza sativa
  unsure (1)..(128): unsure at all Xaa locations
  Clone ID: PAT_MRT4530_82928C.1.pep
XIELPIGLXXYDPRKDKRFNXSVKXPHIPRPKMKVCMLGXAQHVENADKMGLXYXDVXALQKMNKNXXLVKKLAXKYHAFLASXAXIKHIPRLLGPGLNKAXXFPTLVTHHEXLESXXFDTKGYSEXQ

SEQ ID NO: 186097 - protein, 358 aa, Oryza sativa
  Clone ID: PAT_MRT4530_82929C.1.pep
MKRAVSSIRSRDVAHLAAAATAPSPAAAEAWDGRFRLHKPRGQHLLTNPRVLDAIVRRAALRPGDAVLEVGPGTGNLTVRLLESPAARVSAVEIDPRMVDAVTARVDALGLAHKLTVIRADAVEAEFPEFDVCVANIPYGISSPLIAKLLFGPYRFRAATLLLQKEFARRLVAAPGDSEYNRLAANVRMVADARLLMDVSKRDFVPMPKVDSSLVEIRPRAVEPNVDLAEWLAFTRSCFGQKNKTLGAIFKQKRKVLELFRRSRCAEERCDGNANAGGGSRLIALGGGDDDGDMSDGDSNEGHDGAPSFSEEEVAVFKAKITGALESCELAGKRPSKLSNDELLRLLKLLNEQGVRFQ

SEQ ID NO: 186098 - protein, 314 aa, Oryza sativa
  unsure (1)..(314): unsure at all Xaa locations
  Clone ID: PAT_MRT4530_8292C.1.pep
HGVLQKINYYRSRFFXQGDEYKKKYRLTIXDIICQPKDXGGLRVHNLEIQNKCLLSKWLYKLINEDGVWQDLLKRKYLYNKSITQVDRKQGDSHFWSGLMKVKNIFLSMGSWIVNNGEQIRFWEDKWLGNIAFKDKYPSLYTIIRRSSSVASVMGSIPLNVSFRRALVGQNLAHWHHLYASIVHIQLNNSSDCFIWSYHQNGQFSVRSMYLALINNGYIEKNKFVWKLKIPLKIKXMWYLLKGVVLTKDNLARRNWNDNLSCCFCMKNKTIQHLFIECDEDGEFLNVACHRLETMVVQLFANYGWERAVIRFLG

SEQ ID NO: 186099 - protein, 256 aa, Oryza sativa
  Clone ID: PAT_MRT4530_82930C.1.pep
MADLHPPEPDTNGGSAAAAAAAAAAAAPLGDPAAEASGAQAAAGPPYSKRRRRPSVRLGDIGVHSAAAADVPLPQRRHHKTSSSSHPRPPRRAHPEDALDPLNHSSAAAHRRGQKPAQRRPRTAWIPAAPGTDGYEEEAEHYYDDADQSDSAAAAAARARVSGSRDASGDESDGVADWGLPNGRLPGSMGYGGVKAWLDGLGLSRYAPVFEIHEVDDEVLPLLTLEDLKDMGIGAVGSRRKLYAAIQKLQRSDSVS

SEQ ID NO: 186100 - protein, 325 aa, Oryza sativa
  Clone ID: PAT_MRT4530_82931C.1.pep
MEAIVSAIASDFVNRFISFLMKKCGSQQNLETKMERLQNLLLKVHMIVEEAEGRYITNSKMLLQFKKIVKAMYQGYHVMDIIKHRTLCGSRHEEEFTADTDDENWKKFYASCTHMGRGSKIIVVSRIERISRFGTVRPIHLNSLSHEEYSYLFKVLAFGSTNPEEHPQMVSIANELSVLLGGSFVAVNVFADIFRKNHVHLWLHVLKKYRKMIRKNFSEFKEHPKLLLDKEHHIDITKLASSSSPLHLMPPNCEDNQSKRSLTKVMFSDFIADSVVIPKENFELVTWESRIPPYRKFVNIVSNYDDEMNFHHTEVPHKKRQKLDK

SEQ ID NO: 186101 - protein, 101 aa, Oryza sativa
  unsure (1)..(101): unsure at all Xaa locations
  Clone ID: PAT_MRT4530_82932C.1.pep
TRCSNVRRMALSALNGAAHDNFLAIMVQAAIVGTASADCMNDGSTPVRLAAERYAMHSLQMAQVTENVQAXYKYITGLDARQLAKYPEESDGQDSVDNASG

SEQ ID NO: 186102 - protein, 233 aa, Oryza sativa
  Clone ID: PAT_MRT4530_82933C.1.pep
MERLHNLLLKAHMIVEEAEGRYITNSKMLLQFKKIVETMYQGYHILDIIKHRTLCSSRPEEEVSNSNTLSTRTCYVDPFHTSQSYTIRHDQLQSTLDSLETIVSSMTEFVILLGGCERMSPKPYDTYLYFDNFIENNREMECETFTERRDLFVIEFTADIDDENWKKFYVSCTHMGRGSKIIIISRTERISRFGTVRPIHLNSLPLEEYSYLFKVLAFGSTNPKEHPQLLSSK

SEQ ID NO: 186103 - protein, 76 aa, Oryza sativa
  Clone ID: PAT_MRT4530_82934C.1.pep
MGSGRTNRRVNHGLTAPLEVGGGALGRGSRAAAGQVGPAQVRPNPSQGSQPFKLGFGMDVPDYSLMAIAGQFRQFT

SEQ ID NO: 186104 - protein, 187 aa, Oryza sativa
  Clone ID: PAT_MRT4530_82935C.1.pep
MTASVAAKAAAAVTTTNPVARRRAGGGKAPEQQIRRQGGARGGEDAPRRQIQRRGGAQAIDQAVGRRPAARMVTRRTGGARAVDPAARRNPSGRSSGGEEHGWASGAWATGSLTAVSRPAEFQRGFGYRRAATRRRKKIEADLVWNRVEFGVKLRIGSISYRLENRVIKSTDTPLTHSRLALDLDWN

SEQ ID NO: 186105 - protein, 117 aa, Oryza sativa
  Clone ID: PAT_MRT4530_82936C.1.pep
MTFIVPPPRARRVDDAEAAAALLLEELSIRLMEEGSSAGGHPPPTSCSDHALRYFIRGFTTIVSLVMVAWLIYARYTTDDSELHDPAKLSFLIVLSLSLAAFGFCSTSETELQRLLD

SEQ ID NO: 186106 - protein, 107 aa, Oryza sativa
  unsure (1)..(107): unsure at all Xaa locations
  Clone ID: PAT_MRT4530_82937C.1.pep
MEIQYEFNSDRDPNRSPTGLGGPSDGSYIFVRGVTGGGIASLWEYGEENAREEEGRVGAIDYFLYIDARYFARIPSTSXRPFPLRSASSANCLILVQSPSSSPLSSR

SEQ ID NO: 186107 - protein, 358 aa, Oryza sativa
  Clone ID: PAT_MRT4530_82938C.1.pep
MEMEARGGGGRWYAGGMSTADNIKGLLLALSSSLFIGASFIIKKKGLKKAASSSSALRAGVGGYSYLYEPLWWVGMITMVVGEVANFAAYAFAPAILVTPLGALSIIISAILAHFMLRKKLHIFGILGCILCVVGSTTIVLHAPAEREIESVTEVWDLATEPAFMFYVSVVLAMVAILVCRFVPLYGQTHVMVYIGVCSLVGSISVMSVKALGIALKLTFCGTNQLIYPQTWAFTLVVLSCIVTQMNYLNKALDTFNTAVVSPIYYTMFTSLTILASVIMFKDWDRQNPTQIVTEACGFVTILSGTFLLHKTKDMADGIMRALGVRGEKTSSFRFSKQTDEECEGIPLRSSESFRSPP

SEQ ID NO: 186108 - protein, 147 aa, Oryza sativa
  Clone ID: PAT_MRT4530_82939C.1.pep
MAFCARAGSLPLPKPQPGLGPENRRNPSSFPSLPSHFAALPSAPPSGGGGGALPPSSGSGGAPQQKRRRWRPPPASSDGVSPTTGGVAASSPTTGSAAAFSPTTGGARGGVGGPPVSQRRRRPSPPPDPAGGELRRRLNGDLPFDFF

SEQ ID NO: 186109 - protein, 69 aa, Oryza sativa
  Clone ID: PAT_MRT4530_8293C.1.pep
NMKHVICSIIFLVNEPLVILGLCIHKRNNSPMRPNNRMLAPCEERVLGELLWDRLQLAIQPVSQTLNKC

SEQ ID NO: 186110 - protein, 62 aa, Oryza sativa
  Clone ID: PAT_MRT4530_82940C.1.pep
YSAKSAYMMQFEGTKAKPFKRIVWEPWAPPKCKFFAWLIRRESKPFPFPFCALSLSLSKPCT

SEQ ID NO: 186111 - protein, 461 aa, Oryza sativa
  unsure (1)..(461): unsure at all Xaa locations
  Clone ID: PAT_MRT4530_82941C.1.pep
MAQDVQRWLALLEIWSLILVILALRVFGLRNTRGPGWDPLVSGSAHRAEGARGARARAGEGRGARARSAEERMRRAHAQPHGSQWNARTGGADRGRPFPSSAELATTWRLRGCHVGWREVDDDAGRNGRRTTAASGGANHGDTGNSEHTGWLHRTRGDEPTARIRRREFVGGGLRRRQPAAEEGGNGGEVTRGXFPAARASTRLRESDASVGLGGATPSEAGDERVLRSSSGGGGEHSASDGKGRGGXASYGRNGDRREGGMTPAGSEKGEKGGGERGLSPCLFGEKEEGVGGVAAEGGGSAXLRPLEASARASAAQGDGGGDQAVGHSARARGKQREGAADGVARLGHARWLRGRAAAGAAGQRGRAAQTAQSRRGRRPRGRARERRAGSGSGGAGRRARLGAGGSRARARGRVVERRERGRESAPGKRKGGAGARGGDGPREIRPIDPGGGKLDFCGGI

SEQ ID NO: 186112 - protein, 237 aa, Oryza sativa
  Clone ID: PAT_MRT4530_82942C.1.pep
MADGVELGLHDRGARAEHRKRRNTRRRLPSLDPSDTDWLEVQYINSYGVLMGYMTIAVNGLGFLVVTWTTVVLLGGFVSMLGKKDFWCLTVITLFQGRYYRNFKPCVTYAAQTVPSNRVFNVIMNKQLSNTGFSYLAICRSRAEISAGPSAYITVMKIQAAMLSIVMWLLFAIYLYGLYISAGISLWRLIERDYGGDNLKQSALDVLYTLALLQGVIFGYRETFAIETQELSQPEEG

SEQ ID NO: 186113 - protein, 355 aa, Oryza sativa
  Clone ID: PAT_MRT4530_82943C.1.pep
PFCFYSFSLVHAFVRADAETGQGESINQSIENGAENGKKRIKINTFIFFCFLKGGEGGDQTPNRKLDGASSVRGRSTANSSKHAWWTCPPPPPPPPLSLSQSQSQSHSHSQTHKEKEKEKEKEEEQEEEKPSPSRNASSKYDFVKVKVWLGENADHYYVLSRFLLCRMLTATKIPNHVGIKKALELKKMLVDNSLLDVYQGDLDANLFYLIEKRRNSSDSAYSKEKNPRAEDEGHKDLDLQKNNTTKKDKPAAEPIVVPIVLRMSDFDHKALLEEWTATRASRDNCLPQDHRKLINNLKLIQDYLCSFESQGLTVVDISANSFPQTLDWLHSYLLQCIERGLLAACSESPKQGGS

SEQ ID NO: 186114 - protein, 278 aa, Oryza sativa
  unsure (1)..(278): unsure at all Xaa locations
  Clone ID: PAT_MRT4530_82944C.1.pep
CTRAXRGERGCGGPTCSLTARSGPRARERADXGRLDPISAELAPTWRLRGCHAGRREVDDDAGRNGRRTTAASGRANHGDTGESEHTGWLHRTRGDEPTARIRRRMPDGGELRQRHPAAEEGGNGDEVTWGRFPAARASTWLRESDASVGLGGATPSEASDERRFRARAATAASTRRAAATVGAAPASYGEATRTTVRXRGAVTRVRRRGSNLSGLGPGKRKERARPKSPSASLLVPAPPTCATTNGDGEQSTGGEWERKGKGEARVYRMAMSVWEPT

SEQ ID NO: 186115 - protein, 646 aa, Oryza sativa
  Clone ID: PAT_MRT4530_82945C.1.pep
MKIQAAMLSIVMWLLFAIYLYGLYISAGISLWRLIERDYGGDNLKQSALDVLYTLALLQGVIFGYRETFANFKGSLVDAVSLQYDEPDLGVAVLQYLQEIRSGCAKNPSFAAGRNLVTFAVDLLESKSGDGYVRGLEILGALLRLPIMETSANSGDRRRRRVQLGQLVLIRQQLTASASFGHIVHRLLVTLGPRSPYNRRIRECAATIVLHVAGEILVEQFRRGIHCISSLLDPYGQCCLSHDRRRPAWLPEAYGRSTVLEPYEREWLMETWKSSRGCDQEHDRPDRLSPESDEKDDDHCKDMMFLGMLILGALAVDDVNRTAMANSRGLIAKLIAPVSLDLLHSVGHGAWSKIMSKSLQVMNLLVDAPGEAGTDLRHEMLGNKKAISAMEAILECDQCGEKLQMLAMEILAALAIVDSGKDCASREEFVQMLLCAFSDCSRGIGVRAAAAAEALVMLSSKMEGSAMIIMKANNNSVDNLVKILLDRDNIILFRVATAVILERLCANYTEDDECLQNLKGVMTKAMPKLCVTICDKFTFSYQDLNQQFYATCHGVDKFSVWRKLKEIVETNNDPKVDSLRIAQHTTKMVISMMKNEGSYVDEDLQSLMQSLSLASKTMSDISTALCFSPVVITEERYFKSFVIWAH

SEQ ID NO: 186116 - protein, 471 aa, Oryza sativa
  unsure (1)..(471): unsure at all Xaa locations
  Clone ID: PAT_MRT4530_82946C.1.pep
RAGRPKTAQARARAGGRREXSGGPGSPRAVPGGTRLSAARLTVQREYAAYARGRGWDAIRSRPRWRLRGSHAGRREVDDDPAANGRRAIAASGGASHGDTGEGEHTGWLHRTRGDEPTARIRRRESVGGGLRRWQPAERKGGNGDEVPRGXFPAVRASSRLRELDACVGLGGTTPSEAGDERVLRSSGGDGGEHTASDGNGRGGAGXTTGRLLKLLPKARGRRWSEEEERREAXTVRRRGAVTRGRRRGSKLLRPRADEEEEEGAPGVPFRGEIEGGKGAEAKMRXGKGGGDGATRQRERRARPPPLGGLRAEWRGPGDDDGDDGGXFGAARRHGRQARAGXQRVTAAATRRSATRLARGXNGRRPRGRAHANTARGKRFCEREARARGGALGAGDSCARARGERAERRGXRERRSARLSHTRAASGRDXSGGGGARRGEREREGERERDGPRKREMGRARFGPSTSGEAK

SEQ ID NO: 186117 - protein, 171 aa, Oryza sativa
  unsure (1)..(171): unsure at all Xaa locations
  Clone ID: PAT_MRT4530_82947C.1.pep
MARRRMEEEGEDDAGGEEKGKRGLPLCRFGKEEEGSGGDAAEGGGALPPSLGGLRAEWRGPGDDDGDDDGXFGAERRHWRQARXQALTTAATERSAARVGKQREARWFERRGSGDRRGLAGPGGSAGARATTERALHSSAAITLLSPLHLPLNLSVSLREVKPPSSLALLC

SEQ ID NO: 186118 - protein, 388 aa, Oryza sativa
  Clone ID: PAT_MRT4530_82948C.1.pep
MALLAAAAAARRFFRSLRRFSSYAASGGEEAGGVPAGVVEPESPVRAPPDEQFAAWVARLRPGFTAGDLAEAISSERDPDLALALFRWAALRPGFRHAPASYLAALTAASSGRRPAAAENLVYDVLAGACGPDLRLFNACLRFCCARRRLFPLAFDMFNKMRSLPASAACRPDVETYTLLLTSVVRRVRRPPASMVYLHAVRSLSRQMKASGVVPDTFLLNLIIKAYARCLEVDDALKVFREMPLYGCEANEFTYGYIVKAMFQKGRTDKGMVYFREAREKGFVPTGGVYMTAVSALALEWRFEESRNVLIDMLDCKRKPDMITYRTLMEEMCRAGRAEDAFELLEELKERKRGPLDQRMYSELLDGLHWISQPHQDRVSPCDKRSDD

SEQ ID NO: 186119 - protein, 314 aa, Oryza sativa
  unsure (1)..(314): unsure at all Xaa locations
  Clone ID: PAT_MRT4530_82949C.1.pep
TGRPAQDGPSARAREGGERXPVDRAHHARSRVGPACQRLGSPCGGSTRRTRAGGXGTRCTRALAPTWRLRGGHVGWREVDDDPAANGRRAAAASVGANHGDTGKSEHTGRLHGTRGDEPTARICRGLLDGGGLRRRQPAAGEGENGDEATRGRFPAVRASTRLRELDASVGLGGTTPSEAGDERVLRSSGGDGGEHTASEGNGGDGARRENGERHHREXRGAVTRXADGAGVISPASGRGRGRRGRGRSPLPRPCSCRLFRHAQRRTATANRGAXWRGGEWERKGKRGGLGFIGGGNVGLRTDLRGQGASWRSG

SEQ ID NO: 186120 - protein, 51 aa, Oryza sativa
  Clone ID: PAT_MRT4530_8294C.1.pep
MPSAATAVVLVHLGYGPHPRLPLPPSSPSSSTLAAASAAIVQRIRVQSSSF

SEQ ID NO: 186121 - protein, 470 aa, Oryza sativa
  unsure (1)..(470): unsure at all Xaa locations
  Clone ID: PAT_MRT4530_82950C.1.pep
TGLTTRGPGWDPLVGDTAHRVERARGVRARAGEGRGARARFAEERLRWAHAQPHGSWWNARTGGADRGRPDPISAELAPTWRLRGAYVXCHAGRREEDEGAGRXNGRRAAAVSPGRLATMRGDGAYTGMTRKXRRSEPTAWIRRRESVGGGFRRRQPAESKRXNGDEVTRGQFPAVRTSTRLRESVASVGLGGATPSEAGDERVLRSTGGDGGEHTASGGNGASWRSALASNRRQGGGRMTPAGGRRGKGGRERGLVPFFFGKKEGSGGVAAEGGGLCLRPLAACARAGAAEGDGGGDQTVGHSARARGLQRXGAADGVARLGHARXLRGQAAAGAAGQRGRAAQTRRGRGPRGRARERRAGSGSEGAERRXARLGAGGSRAHARAERRGREALGAAAHARADRAEGAEEGRSARLARSRTQRGRSGAEGEEGERAREKGRERREGGGDGPREIRPIDPRGGKIDFCGGI

SEQ ID NO: 186122 - protein, 400 aa, Oryza sativa
  unsure (1)..(400): unsure at all Xaa locations
  Clone ID: PAT_MRT4530_82951C.1.pep
MDVDFRAIWKAVGWQRFLVVDEPGSRLVTLQFLCTLKEIEDGISFRFFHKEYTLTWKGLSTLFGFHDSCKIDLXKGISGFEKNRFWEGISGAPICKKPRTNDIHNPIVRLMHKWIALSLFPRGDLRPIRGDELIIMFAMVRKIKIAPVKCMIREWLESIRFSAPIECISLITRIAKVLGVVSDQIAFISAARPCIDENYLVHGHILKHGVDGSLIYFYPGCTNEIPLPNAGYHLYNCRELTIPLQTIEESHAVHHPQHPCRLYEAGWEPTGDALGWTQAPRHNIGVSSWASASEDRWHAPHDIXWGDNQPPRSSGVPPCPSEWRSSSSRWDLGEITRRMDTLDVQTGEIQYNLTEHIAQTQEXQQTTNAQFANINNMMQQQHDDLQAYFRFQGFNPYQGP

SEQ ID NO: 186123 - protein, 531 aa, Oryza sativa
  unsure (1)..(531): unsure at all Xaa locations
  Clone ID: PAT_MRT4530_82952C.1.pep
KEKKRGRDYRLFLGRLRRGPRELERTGRVKWVGRPKAAQVRARGREERESAGGPGSPCAIPGGTRLSAAWLTVRREYAAHARGRGRDXGARARFAVDADAAGPRAASRLAVERAHGEGLTGVGSTRSRLSWRRRGAYVAATRAGGRGDEPTARICRRKLDGGESRRRQPAGREEGNGGEATRGRFPAVRASTRFRELDASVGLDGATPSKAGDVXVLRSSSGDGGEHAASDDNGRGEEMERGGRTEGGITEMRRGAVTRGRRRGSNLSGLGPGKRKERARPKSPSASLLVPTPSTRATTNGDGEQSTGAAAMARRRKRGRLEGKELGFKGGGNVGLGTDLGRRRGAGATRQREEGRCLHPLAACARSGGXRAVTTAMTAGGLERRDDTGDRRVKRLTAAATGRSATRHARAACNGRRPRGRAHANTARGKWQXGSGEGGLRSARAAHAHARGRSGGGGALGAALXAHARAARGRGGAELSGGGSGARRGGERAGIKSPPRGERSGGEGEMGREEIGPSTPGGGKIDFCGGI

SEQ ID NO: 186124 - protein, 90 aa, Oryza sativa
  Clone ID: PAT_MRT4530_82953C.1.pep
NKIFLKRFFFSFPFSKRNIWGRTGKKPNTHMVVHRTQGLHDQFAGINKTQQGDHTLLIVQDNKNSLTHTKLNSKYYFGHPHGKKYRWGGL

SEQ ID NO: 186125 - protein, 369 aa, Oryza sativa
  unsure (1)..(369): unsure at all Xaa locations
  Clone ID: PAT_MRT4530_82954C.1.pep
LRGCHAGRREVDGDPAANGRRAAAASGGANHGDTGNSEHTGRLHVTRGGEPTARIHRSLLDGSGLRRRQPVAGEEGNGDEVTRGRFPAVRASTRLRELDASVGLGGITPSEAGDERVRAGRGAVTRGRRRGSDXLRPRAEEEEEEGAPGVPFRVHERTGSPGAWRWTAEARQSTGAAAXGEEANGRGKERRGKTGLNGRQCRFEXRGTDMGGRGGSGATRQRERGSLPPSLGGXRAEWRGPGDDDGDDGGXFGAARRHXXQARLARQRVTAAATRRSATRHARAGSNGRRXGQRDRATRTAQTTRLGRETTRARGAGFASGEXRARDGGARRGSRXARAANGGGERAGVGRERERERERERERERGGDA

SEQ ID NO: 186126 - protein, 234 aa, Oryza sativa
  Clone ID: PAT_MRT4530_82955C.1.pep
TRLHLLPKHIQALLSIQQADTNRRMKLRVKGLGLLLLLVLLALCSTIDVCDARRGKHWRPRSSPSSSLLRNKGKGKKGSSNRQHGSNRPSPKPPLSPPPSPGNGKGYQSPYQPSPSPSPNAPVSPSPVNGSGHASPKSPTPSCGKGNQPPSRPTPTSPQGAVFNVVDFGAKGDGVSDDTKAFEAAWAAACKQGASTVVVPSELEFLVGPISFSGPYCKPNILFQLDGTIVAPTS

SEQ ID NO: 186127 - protein, 165 aa, Oryza sativa
  Clone ID: PAT_MRT4530_82956C.1.pep
SGEIPPALGNLTKLRYLDLASNKLSGSIPSSLGQLSSLSLFNLGHNNLSGLIPNSIWNISSLTVLSVQVNMLSGTIPPNAFDSLPRLQSISMDTNKFEGYIPASLANASNLSFVQLSGNSLRGIVPPKIGRLSNINWLQLSNNLLQAKETKDWNFISALTNCSQL

SEQ ID NO: 186128 - protein, 160 aa, Oryza sativa
  unsure (1)..(160): unsure at all Xaa locations
  Clone ID: PAT_MRT4530_82957C.1.pep
MDRIVHVYYGGRVMKPYVGTHVEFKDMSLKTISFPTHPTLYNXLRSRVKEVLEWIEDXNVEIRFYRRYDVXGHKYILNMLGQLEWXIYFDLVKESRIRACSAATCALVCSSARLNASSSSGSATTTSSPPPPPSSTAAGAGSAPSAWSGSKRRTTASTVG

SEQ ID NO: 186129 - protein, 120 aa, Oryza sativa
  Clone ID: PAT_MRT4530_82958C.1.pep
GSKNLKDLNSHCNIARTRPSRPKGPKISVHIERASTTCFPIPKFSTTRCFNTVPLVNKSQVSTVVPILWLTGMEQTRHVPFYRTASFQPNATQDCLSPVYPSFITMLFLLFLFVFLTRRF

SEQ ID NO: 186130 - protein, 671 aa, Oryza sativa
  unsure (1)..(671): unsure at all Xaa locations
  Clone ID: PAT_MRT4530_82959C.1.pep
MAGKRRRSGAARDPLAERPYRYDHEDRIVRNRSALLDAINGHYAAALDRLPVEEMPALIPRLLKAGLCAGFSDPVSNIVVNTLSYKRLPERKPMVLGRPVDGKTAARRRRSALSRIVADTSDVTWHSPNHSRLRDMRMPLRSLEALVAFLVACFPYLPTWEALQYLRLANADLLAAARLVEEDRNTKAFILASRTTKTALRCAQSXAWQPKPRAFVNRSFSLAARMEQISRPRRSYCSPXLQNKVKQPPFVRTKSLKNIVVDKIYGLYLQVLAKMPREFLQRRYHRGLLKAGHCYGPFMNPAHNIVLNTVWYDTMFPAEEEYSEVAMICSRTLVSTACRSLLGLVAYLRACFPTVSRQQAIRYLLLAEVNLQRAIEMAGQEGHAMKDKFDRGIGFKAAATAAHHPDRDALVNFYLSAFFGPLPLKACGSFDVQLLSLMLSQEPSTSPHCSFETVPVLTEGASRLLSNIKQDFEAEQNFICSKVNAALKKYTQRTKGPEYDLHVICGLNPYVIKSGVSPLHYGDSSCKIRYKSKYSHVNFLASPRGSHSSDTVIPTLFFAECCNDNDITDEPLCWPIMGHPGRCFHCEYEGVKVVHPESQKYHGRDIDFEEMACKSHSNGIVNEDLVSSGESVTYSVGISQEDCIYFDFRRDVKCANFLNAHARMLEQRHCF

SEQ ID NO: 186131 - protein, 81 aa, Oryza sativa
  unsure (1)..(81): unsure at all Xaa locations
  Clone ID: PAT_MRT4530_8295C.1.pep
FFLVRHTYSGLRLHTDTSRFTLYTHPYDFHIPTTPPTDLTVLHTLHTTHTAHGVLSTLHDNPAXTGLTYTFGTLRGVTLTS

SEQ ID NO: 186132 - protein, 126 aa, Oryza sativa
  Clone ID: PAT_MRT4530_82960C.1.pep
STRRVSAPPGNGCCDGAGVPSPTRPSSLLLSAWMRRGLDAPTERLLFPSRGIGSQMRRGPDAPAERLPSRRLGVAERSIRPIDSIGTAVVLGAVQVTFRPSATPPNWEKEESPGVPVEAFLTGGPC

SEQ ID NO: 186133 - protein, 76 aa, Oryza sativa
  Clone ID: PAT_MRT4530_82961C.1.pep
QRLDNTIQKFCCIYFAAIDVSTSNEFHQSCHLRVKCMLSLIFLLNLHAMSAVTMVFFWKFSQGRMTSCWYTMLNDL

SEQ ID NO: 186134 - protein, 138 aa, Oryza sativa
  Clone ID: PAT_MRT4530_82962C.1.pep
MASRTLRTKAASQEYEEERKNRGALDLGRKNKARWIFLCYLPQMRRGPDAPAERLPSRRLGVAERSIRPIDSIGTAVVLGAVQVTFRPSATEIQEKVESPTPNEKSSTDVLGHSPPPNWEKEESPGVPVEAFLTGGPC

SEQ ID NO: 186135 - protein, 61 aa, Oryza sativa
  Clone ID: PAT_MRT4530_82963C.1.pep
LLPTLDKDDVRDCTLPLERVDGLGVGMLNELSYAVLWRMAERQVQLGLSIVVDSPLSRRAH

SEQ ID NO: 186136 - protein, 43 aa, Oryza sativa
  Clone ID: PAT_MRT4530_82964C.1.pep
MEMGMRRMRRVDRWAERLAVLGVFRKRPADLAVNHAEELVAVS

SEQ ID NO: 186137 - protein, 148 aa, Oryza sativa
  Clone ID: PAT_MRT4530_82965C.1.pep
SLSVCVHRVRRGSGRVSGRAWRVKTESVRRARARPLARVRARATRAEGGRRARARARSPSPSVCLNVSEAGGVRGGAPGQRAPLGDNERARARAGADRRAAREGGRAARGESYRGCARERDEQRARAPERARGRARGRESARERARPT

SEQ ID NO: 186138 - protein, 26 aa, Oryza sativa
  unsure (1)..(26): unsure at all Xaa locations
  Clone ID: PAT_MRT4530_82966C.1.pep
PPGAXXEFSXDEYSDFCLFLYXWKVE

SEQ ID NO: 186139 - protein, 127 aa, Oryza sativa
  Clone ID: PAT_MRT4530_82967C.1.pep
ARFCSHKNPDAAWYDKMEACVTPLPEVSDASEVAGGALKKWPQRLTAVPPRISRGSIKGVTSKAFVQDTELWRKRIQHYKGVINQFEQKGRYRNVLDMNAGLGGFAAALASDPLWVMNMVPTVGNSS

SEQ ID NO: 186140 - protein, 837 aa, Oryza sativa
  Clone ID: PAT_MRT4530_82968C.1.pep
MFVVFVIKPNTKPVISAWRKLVMSASVPHRQVQKGIKHFVNDNGLLKSDSADRFAWFTASALVALPMFYTYKMLSAAICFLFLEKNIDKKELGNIDKKELGIKDAYGRMGYIFSRIFYKRLNESRKHYTSPMRDWLPAEPVRELTDQERASQVVFKQILSTPPVKSKRSKVAFMFLTPGTLPFERLWEKFFEGHEGRYTIYVHASREKPEHASPLFIDRDIRSEKVVWGKISMVDAERRLLANALEDVDNQHFVLLSDSCVPLHNFDYVYNYLIGTNISFIDSFYDPGPHGNFRYSKHMLPEVRESDFRKGSQWFSVKRQHALMIIADSLYYTKFKLHCKPGMEDGRNCYADEHYLPTLFHMIDPNGIANWSVTHVDWSEGKWHPKAYRANDVTYELLKNITSIDMSYHITSDSKVKGTDRGVLLPKDGHQEVADVALQLAKYCIDDPVKSPLIFGEWEVVYCSVPTSPGGLYRTPLGRLIFKTDEMAQVVQAPDVVKNKVSFSVFGFDGAVSLKGKLNVLDGKWIQVIFEPPEVKTNEHGYGFLVNPAMKLLLLVYTVFARRFQHFCRQLLVTEHFWIYEHRQISIKRSRLFQTSKCISIADMPPPACSNVLYGDRTCTVEKSPLEKENAFLEKPSCSSPHPRRGGVPSSSRVSRLLDGGVAVELPLWDKRSKYSAQSVRAMPMRVLTVGKKRSRGAQLIVEEYKEKLGYYCDIEDTLIKSNPKLTSDVKVQVEAEDMAMMLQLKPEDFVVVLDENGKDVTSEQVADLVGDAGNTGSSRLTFCIGGPYGFGLQVRERADATIRLSSMVLNHQVALIVLMEQLYRAWTIIKGQKYHH

SEQ ID NO: 186141 - protein, 37 aa, Oryza sativa
  Clone ID: PAT_MRT4530_82969C.1.pep
TMSIESKFHKTRGILARFLQNHRFKEVHPVPPHLATQ

SEQ ID NO: 186142 - protein, 872 aa, Oryza sativa
  Clone ID: PAT_MRT4530_8296C.1.pep
MESTTTPRGNETSELGANDGESSSRNSQPNNIEETNPLPEVSNDDAVLIIGQAIELKDEGTRLFQRRDYEEAAIKFGEAIKLLPKEHNDIAFLHCNAAACYMHMNPEDLDHAIEECNLALEASPKYTKALLKRARCFEALDKLDLACKDVQKVLSLEPSNVTALELSESIKELMEEKDVLLEKQIVSPVAEEPKAILAKDKIKRKVSRKFRNSIVEEEVWEMIHEEDMQEDDEAAEEEKCNGNNHVQNDARPEENDTEQMHIKQNRSSEEKYREETRPKQGQCSRGASNDGKTVLQHSSLNMEEMCVNLKHGKEKHQKHLKEIHVRGSHGQETHPFCSGVDKRQKHIDQIQTNSLGMQEKHTDKFERYANGSREKHFLDRHIGRGEDKQEKRSTLKPTIHGRDKHKNHKDVNKRAMKSVKFVCGDDIRIVVIPEHITLMQLMDIARYKYTPHLKSILLKFMDKEGDLVTITSTEELRWVEELDPLKPVRLYIKEVSPDREITRDLVMPTTSYSKLERNHNSMSECGSSRHGGEKNSYTDDWMVQFARLFKYHVGFDSDAYVDLRDLGMRLYYEAMEETITSEEAQEIFQSAEAKFQEMAALALFNWGNVHMSRAKKRLLLSDDASQESILLQVKNAYEWACAEYVKAGKKFEEAVDVKPDFYEGLIALGQQQFEQAKLSWRYADACKIGMGTEVLELFNHAEDNMEKGIEMWEGIEYLRVKGLSKSKKEKVLLDKLGLNGHLKEFSADEAFEQASNMRSQLNISWGTILYERSVVEFKLGLSSWEESLTEAIEKFKTGGASLPDISVMIKNHCANEKTQEGLSFKIDEIVQAWNEMYDAKKLKNGGSSFRLEPLFRRRPSKLHNILEHIHYT

SEQ ID NO: 186143 - protein, 81 aa, Oryza sativa
  unsure (1)..(81): unsure at all Xaa locations
  Clone ID: PAT_MRT4530_82970C.1.pep
ATKYTQVYILITFGSNKIFIKEISLIKLGHPVVRHPTXTKRLGGRQATVSSDGPRHGRRTAAALDTEQXLCGLVHPWRDTE

SEQ ID NO: 186144 - protein, 143 aa, Oryza sativa
  unsure (1)..(143): unsure at all Xaa locations
  Clone ID: PAT_MRT4530_82971C.1.pep
NLCRGGTLYPDDITNPGHPARISKADTGLPYANERGPRPTTSLVPDHTVPGSPGILPDTTPLNPHVSWHQGSPDXLFTQPGASHSTHVVALXVCLDVIPXRNRSLDATAQVFRPDFKFEGDRRYSHRVHEYRGTTRWLQGNMI

SEQ ID NO: 186145 - protein, 50 aa, Oryza sativa
  Clone ID: PAT_MRT4530_82972C.1.pep
MKHSNTHNRFEQKVEIPCDKIKCDFDLVTPSKGKGDGGFQKPKLNARILF

SEQ ID NO: 186146 - protein, 92 aa, Oryza sativa
  Clone ID: PAT_MRT4530_82973C.1.pep
MRIEGAKTSSRSRRPPAQFRHGLELSLLQLVASPADASSPMKLEILGGGRLQELELEAILARPALNVAQCCVCWCNSRIQGQQAYNELGSKL

SEQ ID NO: 186147 - protein, 244 aa, Oryza sativa
  unsure (1)..(244): unsure at all Xaa locations
  Clone ID: PAT_MRT4530_82974C.1.pep
WEGGEREPVDRAHRAWSRVGPACRRFGSPCGSSTRRARAGGAGTRCTRAVRGGXGCGGPTRSLTARGGTRARGGADRGRLDPVLAELAPTWRLRGCHAGQREVDDDAGRNGRRTTAASGGVNHGDTGESEHTGWLHETRGDEPTARIRRRMPDGGDLRRRQPAEGEGGNGDEVTRGRFPAARASTRLRESDASVGLGGAAPSEAGDERRFRARAATAASTRRAAATVGVAPASYGEATRATTRV

SEQ ID NO: 186148 - protein, 116 aa, Oryza sativa
  Clone ID: PAT_MRT4530_82975C.1.pep
MAQSVTKIQHRKFRLKMQSPDELSQVVLRSMGGQETQDNSTYAGRKSPECARHSYDDRFSRVIVDRTHDQYPKTRESVQAENRGLASSMDRRQNTETEQRFCGAAMAGRREVRNRA

SEQ ID NO: 186149 - protein, 473 aa, Oryza sativa
  unsure (1)..(473): unsure at all Xaa locations
  Clone ID: PAT_MRT4530_82976C.1.pep
MERSGQAKRAGRPKAAQTRARAGGRRERAGGPGSPRAVPGGTRLSAARLTVRREHATHARGRGRDAAELAPTWRLRGCHAGRREVDDDPAANGRGAAAASGGANHGDTGNSEHTGRLHVTRRGEPTARIRRRLLDGGGLRRRQPAAGEEGNGDEVTRGRFPAVRASTRLRELDASVGLGGTTPSEAGDERVLRSSGGDGGEHTASDGNEEEEGAPGVPFRVHERTGSPSAWRWTAEARXSTGAAATGGQAGELALRLASKAATGGDAGXEGEKEEKEGEKGARPFADSGKGGRSGATRQRERGSLPPPLGGXRAEWRGPSNDDGNDGGXFGAARQHGRQARAGXQRVTAAATRRSATRHARAGSNGRRGWAAGPGDADGADDVARAGNHAGARASNGARGRLCERGARARGGGARRGSRTREQRAGGREKRAGVGREREREREREREGGARERXAGKEMGRAEFGPSNPGEAN

SEQ ID NO: 186150 - protein, 248 aa, Oryza sativa
  Clone ID: PAT_MRT4530_82977C.1.pep
RGKSSMYQKVLVWLRTERKTLRRNPRKILCVVLTADSTCNQALQGKDERFHVLSKETTVAIPAIPLTLYMPIMKNPTGDSAGCWPLLLKQFQFHTVLQNPSNNHREVFLIQGPLPGFLPKLYKRGKGPNSLVHATALACGARVVPPEEAASLIKAIESKIRSGGATIAKLPSSSLTPLIPEVASMSSSSEDDEENAPSEPLMASVEHNCHDQSSEEMKLEADPPSELETEAENCSAQPENENNGPTHC

SEQ ID NO: 186151 - protein, 691 aa, Oryza sativa
  Clone ID: PAT_MRT4530_82978C.1.pep
MTGFNLAENFKENPEAFFRSIRPRFIAPQKTLLTKNPAVPAPQTFKTMADKTLREFAAPSTGNVAIGPQINMGDVDFDLKSSLIMMAQACPFCGEPNEDANAHLQQFLEICITYTIKGIKGVSPDAVRLRLFLFFLLGKTKQWFYANRAVVNIWDKCSTAFLSKFFPMGKTNALGGRISSFQLTRVESIPEAWERLQEYVAVCPHHGMDGWLILQNFYNGLTPMSRDHLDAAAEGSFFSKVVRGAVDLIEKMVSNMGWSEERLQTHQRGMCFVKETELLAAKLDLLMKRLDDHDKRPQGTIKALDSHVTCEVCGGTGHSGNDCLETREDAMYMGNNNNGNRPRGVPATETGRIPEQTDSSIENVMAITTRGGTNRVAREAPSSNSADKEVQPEKAVPQEYCDTRLLPFHQRSRKPSVDEQFARFVEVIQKIHINVPLDAMQVVKLTEQCSNVILHKLLEKKKDPGCPTITCSIGAQQFDQVLCDLGASVSVMPKNVFDKLNFTVLAPTPMRLQLADSLVRYPTGIAEDMLVKIWDFFIPVDFVVLDMDNGKETPLILGRPFLSTAGANIDVETRSIRFHINGKKEKFQFQPRTEQCSMVRIKYGPNPQNIQVVEVEPPKMDSLVKFMQNFLEKETTMPTNRYWKILVKLSTLAKKLEQSKPSSTPKPKKVWKEKSKTPTPLPPETGGKSVH

SEQ ID NO: 186152 - protein, 724 aa, Oryza sativa
  Clone ID: PAT_MRT4530_82979C.1.pep
MEGVVTSSVGEPNQDNEPRDSSIELPRVITDMETSAMHDPEAQKLIGHEADTELTPYEGMEFESEDAARDFYSKYARHAGFRIRISRYTRSRRDNSIISRRIVCSKEGFHETRDCENLHVDQKQQARVGTRVGCKAMLMIKKFGPDKWVVTKFIKIHNHGPVPPRKPHAGEHHDCDLMENPHSIEVDPIDEPVEGMEFESEEAAKLFYINYARVNGFRARISRYCRSRRDNSIISRQIVCSKEGFREVRARKDITDGGKTTKRPRMITRVGCKAMIVVKRMNSGKWMVSKFEKEHNHSLLSSRAVPITSNDSSREVIDFAATSNDPNEVKAEGCSTGIQCNSTDSLTVLYNHLCQEAIKFAKEGSVTEEIYHVAMNALKEAAEKVSEVKRSHPTMSQSKHEVMQMETMSASQCSNDDKQKTMTPQLKFLQEPSPSLVLIPTNLLTHSSSNCADNIPLSCDLTINAGEVKHVSESSCLAANRKEDSSQKSQGKDERFHVLSKETTVAIPAIPLTLYMPIMKNPTGDSADKIWILIDCYLPLECSPDIFPFSWNADGQYRLLAAPIEAVPISYRPAEPIQQPHGSFPNSGPLPGFLPKLYKRGKGPNSLVHATALACGARVVPPEEAASLIKAIESKIRSGGATIAKLPSSSLTPLIPEVASMSSSSEDDEENDHSEPLMASVEHNCHDQSSEEMKLEADPPSELETEAENCSAQPENENNGPTHC

SEQ ID NO: 186153 - protein, 606 aa, Oryza sativa
  unsure (1)..(606): unsure at all Xaa locations
  Clone ID: PAT_MRT4530_8297C.1.pep
MREKTIPAQLLETIGANNEKIKKQQSKATVKTLLHKASGFVFQLGDTNHKMGSLKMTGKAPCAALPESSCAYLLQELKMIWDEVGQEENERERILQEIEQECQEVYRRKPEKMTGTLKEQLNSITPALQEMQMRKEARLKQFREVQTEIQRIASEIAGRPENEAITVNQEDLSLKKLEEHQSELQRLKREKSDRLCKVEEYKVLIHNYAKIMGMDPSKILSNVHTSLLDGANDQQTKNISDDILNKLNTMVQQLKEEKNQRMDKLHSLGKALTKLWNILDTNMEERRPYGEIKIYSMTSGSSMLGPGSLTLETIQKIESEVQRLDHLKASKMKELFMIKQTEIKEICKKSHMDMPYQTEMNKIMDVIMSGDVDHDDLLKTMDEYIYKVKEEATSRKEIMDKVEKWMASCDEERWLEEYSRDERRYSISRGAHKHLKRAERARIIVNKIPGLVELLMAKTEIWEQEREKVFLXYDELPLLAMLKDYMLTLKEKEEEKYRQWENKKVQTQLARRHENSFILRPNTSCSRPSSRGFNTSPGSSTIWSSRLPTMVQQPSADNSSAEKDVHIRKVRNRSMQRALGNNRSISISYEDKTPSLSAIKQGVSPI

SEQ ID NO: 186154 - protein, 251 aa, Oryza sativa
  unsure (1)..(251): unsure at all Xaa locations
  Clone ID: PAT_MRT4530_82980C.1.pep
MGRSGRAKWAGRPKAAQARARGRGGERGPVDRAHHAWSRGARGAALGXGGTRCTRAVRGGCGCGGPTRSLTARGGTRAREGXDRDRPDPISAELAPTWRLRGRYAGRREVDDDAGRNGRRTTAASGGVNHGDTGESEYTGWLLRTRGDEPTARIRRRESVGCGLRRRQPAERKGENGDEVTRGQFPAARAPTRLWESVASVGLGGATPSEAGDERRFRARAATAASTRRAAATAGAAPASYGEATRATTEN

SEQ ID NO: 186155 - protein, 190 aa, Oryza sativa
  unsure (1)..(190): unsure at all Xaa locations
  Clone ID: PAT_MRT4530_82981C.1.pep
NLCRGGTLYPHGITNPDHPARISKADTGSPYANERGPRPTTGXVPDHTVPGNPGVLPDTTPLNPHVSWHHGSPVXLVTQPGVSHSTHVVALVLCSDEIPRKRSLSARAENRTPDFKFXGDRQYSCRVHDYRGATRWLQGNMVACLARDLELDPRNLRTVGLRAPKLHAKRNNXTNGENKALLLTSKRAIR

SEQ ID NO: 186156 - protein, 61 aa, Oryza sativa
  Clone ID: PAT_MRT4530_82982C.1.pep
MKLNKGNCKPAALCVCVCVSVSVFCLHNKNVFSPSYVVKAAAVSARPGPGLPSIPGCDLKS

SEQ ID NO: 186157 - protein, 353 aa, Oryza sativa
  unsure (1)..(353): unsure at all Xaa locations
  Clone ID: PAT_MRT4530_82983C.1.pep
MEDAEAPRCLLNDADLDLVDNQERQAYYMLSDREHAHTREYSPELLKKIGMDVDFRAIWKAVGWQRFLVVDEPGSRLVTLQFLCTLKEIEDGISFRFFHKEYTLTWKGLSTLFGFHDSCKIDLXKGISGFEKNRFWEGISGAPICKKPRTNDIHNPIVRLMHKWIALSLFPRGDLRPIRGDELIIMFAMTIEESHAGGVYRDTHNMARNERESSSSSTPVQXYEAGWEPTGDALGWTQAPRHNIGVSSWASASEDRWHAPHDIXWGDNQPPRSSGVPPCPSEWRSSSSRWDLGEITRRMDTLDVQTGEIQDSILTKDPERKPSLGGDISLPTEVTCITLHISLSNCIFAFQLH

SEQ ID NO: 186158 - protein, 270 aa, Oryza sativa
  Clone ID: PAT_MRT4530_82984C.1.pep
MPPPSHFPSIAVTPVWDPHVSSILSLLPSPSLSGKQQQHVVDEQQQQVAGNSTDRAPTPFTVVCTKDSCSAALCPTPKIKSHHRQEIQVQSLICFDDLQSRGCSLLIVRSLALLFELAHDDDSHHADDNHDDDEGGAARKQQLLRAGEPAADGLHHGPALERHRSGGSRHKLRRDGGGDGLAAIAGLGIPWRRSWPSPPSLAGCCCRRRRRSPAAVVRRREMGKGEERGWRKRMELTCGSHIRVTAMDEKCDGSGMGPISKSSSGTQQIS

SEQ ID NO: 186159 - protein, 219 aa, Oryza sativa
  Clone ID: PAT_MRT4530_82985C.1.pep
MEIRLFLGRLGRGPREFAAYARGRGWDAVHARGSRRNGCGGPTRSLTAHRGPCARGKKRRERLAGSADPVAAEVAPTWRLRGSHAGRREVDDDAGRNGRRTTAASGGANHGDTGNSEHTGRLHVTRGGEPTARIRRRLLDGGGLRRRQPAAGEEGNGDEVTRGRFPAVRASTRLRELDASVGLGGTTPSEAGDGRVLRSSGGDDGEHTASDDNGRGGAG

SEQ ID NO: 186160 - protein, 472 aa, Oryza sativa
  Clone ID: PAT_MRT4530_82986C.1.pep
MPRIAALQKTLPTEKPAIPAPPTFKTMANKTLREFAAPSTDNVAIGPQINMEDVDFDLKSSLITMAQASPFCGKPNEDADAHLQQFLEICSTYTIKGVSPDAVRLRLFLFSLLGRAKQWFYANRAAINTWDKCSTAFLSKFFPMGKTNALRGRISSFQQTRDESIPEAWERLQEYVAACPLHGMDNWLILLNFYNGLTLMSRDHLDTAAGGAFFSKTVQGAVDLIEKMVSNMGWSEERLQTHQQGMHIVKETELLAAKLDLLIKRLDDHEKQPQGTVKALDYHITCEVCSNTSHSRNDCPETREEAMYMGNNNNGYRPQGGQRWNQPRPYYQGGNNNGNFSNQSSLKDLVFAQAKTTDALSKKLAANDNILENINVKLDGFASTFQNQLSFNKMIETHLAQLASLVPANESRRVLGQPDSSVENVRVIITRGGKSTRDPPYPNPAGTDGISKEAPSIDSADKEVQPEKTVPQ

SEQ ID NO: 186161 - protein, 135 aa, Oryza sativa
  unsure (1)..(135): unsure at all Xaa locations
  Clone ID: PAT_MRT4530_82987C.1.pep
SRGITTYRRCWTSCGTTAAAGARPETGLEKLRRPLQPCPLVINRDGDGDASGAAYKRTHVDADDPDDTGDSRLFLSPTTTVTTTLGRNHVWRSAFHPGSNLFTXSLVGILFDRTLPDCTTVYDWLYSDETTSCHR

SEQ ID NO: 186162 - protein, 747 aa, Oryza sativa
  Clone ID: PAT_MRT4530_82988C.1.pep
MALFLAVCHAQKFPNGISSRMCIKNPRPGPAGREHHSTGILDGTDEAYSSENPSSDPNSNSGVGKRLTSSGRGAAPTCGPHRSAARGGRSTADRVHGPGRSGAPRGGRTDGPDLPKGRSDSGGSSRPVRAGTAQTGPATMARDGAAHMRQRRTRGSGAGRWPTANDRGGRTAARGSAHPAYNYSGPEDASHLDMKVKMMREPPEPQPVRPSRRRSDRAVDGLTGHYTAVGSRLIGLSGETVERRVGQVMISGPTTASDILVPLCEKGAAERDEAINALPLTDIIGPLADHQVASSLKVKVVKEVSDAATTSGGNVPTKPRKFSSVQSSPREELQVEMGRLLEAGARGIGREIAEARSEAATANARANRLVRELTEAREDLTKMRELVAGNERQRKGLEDRMSELGNNLSEIRGSLRVTYTGLHQLAGECGVKSTIPVNPDEFSLTSSLAELATAMGEIPSKHAARITEETSNGIYTGACHVLACVGLLRPELNLREILDQGAASDTRKEVMEEVGDLGESVLPLFEEDADDEDVQQRGQPESLAIIPVLEFEPHVSPDHVGQPLDIKGGMATTSSDLEGALASQDRHIQYWKTKFEVAELEKTMLAVKKEQAVETLRGREVWFNSYLKSCCTSMARVCRELRIVCGDPEESAAEYISWLNGACAQLDGIGKRIDEALKQECRRSSRYAGGHVLACLQDHRPRLDLKYLHEGFARSRRTPAEIDHLARSMSPLAEKIFQSMDWRWPSW

SEQ ID NO: 186163 - protein, 761 aa, Oryza sativa
  Clone ID: PAT_MRT4530_82989C.1.pep
MEALRFVRGISPAASAAPQPPPPPVAQRHHQQQPSRGVLHAPLLRLWPLGGGGGGGGGGGGGGGGERVGAVGGAVRGEEARSQRAAEAEADERKQGNWVLQMLRVQPQWAEAADAEAAGVTGAAREGGQEALTAGRDGDECCASCGGGDDEGCCGVEEDDESDGKVFDRATFSRLLRKVSLGEAKEFSKMSYLCNIAYMIPKITWGLPEGFDGLVPGLLNAIILLELSVPELYLSIVVFQLVASLELLLLAYGYLFGVPKLLRRYNLRFVTSSVQEKAKTGVDQKQELKTEEGESSDQESEVVENPEPGSNKKKESGLGVNPFGAYHVMSSAASYLHSRAMGVVPFGSRNDGKNDPTIMAIVNGESGEGLTMDEASFVATTNSVTSMVAAKEETRQAVADDLNSSRSCPCEWFICDDDQGSTRYFVVQGSESIASWQANLLFEPVKFEGLDVLVHRGIYEAAKGMYHQMLPYVKSHLRSSGKSATLRFTGHSLGGSLALLVNLMLLMRGAAPASSLLPVITFGAPCIMCGGDHLLRKLGLPRNHVQSVTMHRDIVPRVFSCNYPDHVANILKLANGNFRSHPCLTNQKLLYAPMGEMFILQPDKRLSPHHDLLPPDSGIYHLSDSSSSSGTSLRRLRSAMSTFFNSPHPLEILKDKSAYGPKGAVYRDHDVNSYLRSVRAVVRKEVRRHRETRRGRWRRLLLWWPLGAHGALAGAGVLLDAAVEGGRETARQARAHARLLVVLLVPAKLLVIGAFLVVRLM

SEQ ID NO: 186164 - protein, 118 aa, Oryza sativa
  Clone ID: PAT_MRT4530_8298C.1.pep
MASLSSLMLVTAVAALLVIGSSGTEVTFKIGESSTTSTLELITNVAISEVEIKEKGGSDWRGLKESSANTWKIKSDAPLKGPLSVRFLVKNGGYRIVDDVIPETFKAGSVYKSGIQVQ

SEQ ID NO: 186165 - protein, 162 aa, Oryza sativa
  Clone ID: PAT_MRT4530_82990C.1.pep
MPPPPPPPSSHQIMSASPVPHRVPSPAPIDDEEDKAKRKKTEVEVEGDDEGAKHSKTGLIQRRFKVSQEMLDDLMAHPLKPFVGVCLDDVPEGEQRDRLAADMEAVRKVHAELMHVVAQYKATGEAYMVVEAPEDDDDLAQVDDVQATLEMADRMLRQLLEQ

SEQ ID NO: 186166 - protein, 243 aa, Oryza sativa
  unsure (1)..(243): unsure at all Xaa locations
  Clone ID: PAT_MRT4530_82991C.1.pep
SLRPRAGEEEEDKRPESPSASTNALALPVLGDERRRRDRAREVAAMARTRNGEDWGGGKEEGRAPRFKGRQCRFGNRLWAVKARAGARRSRPNQRQGGGRMTPAGGKGEKEGEKGGSPPASLGKGGGDRGRRGRGRXGLCLRPLAACARSGGAEGLTAAATGRSATTARARGLQREARRFERRGSGTRAWLAAHNMAAQSCRHGRAVRGRVTADGAGAGTVRQTICGRASNASRARFRGWGAR

SEQ ID NO: 186167 - protein, 184 aa, Oryza sativa
  unsure (1)..(184): unsure at all Xaa locations
  Clone ID: PAT_MRT4530_82992C.1.pep
GGNPSKHAARIAEETSNGIYTGACHVLACXIDDEDIQQRGQPESLAVIPVLEFEPHVSPDHVDQPLDIEGRMATTSSDLEGALASQDRRIQYWKTKFEVAELERTMLAVKKEQVVETLRGREVWFNLYLKSCYTSMARVCRELRVVRGDPEESAAGYISWLNGACAQLNGIGKRIDEALKQECR

SEQ ID NO: 186168 - protein, 83 aa, Oryza sativa
  unsure (1)..(83): unsure at all Xaa locations
  Clone ID: PAT_MRT4530_82993C.1.pep
VVXRLGHPRSRRARSLLSNRRMMEYAYVIRAMAAVHQCAHVEHLVSASKWRGRVTTTTALCDLKEACDAFQDIKSIQKGGKET

SEQ ID NO: 186169 - protein, 488 aa, Oryza sativa
  Clone ID: PAT_MRT4530_82994C.1.pep
MAMKNVVRFFFVLIHVSSCLGRSGKMFSPGFVMVTESLPSWPIVSAGISVTASLVLSLFLIFEHLCAYHQPEEQKFLIGLILMVPVYAVQSFFSLLNSNVAFICELMRDCYEAFAMYCFERYLIACLGGEESTIRFMEGRFQFSESSPLLDVDYDYGIVKHPFPLNWFMRNWYLGPDFYHAVKVGIVQYMILKPICAILAIFMQLIGIYGEGKFAWRYGYPYLAIVLNFSQTWALYCLIQFYTATKEKLEPIKPLSKFLTFKSIVFLTWWQGIAVAFLFSTGLFKGHLAQRFQTRIQDYIICLEMGVAAVVHLKVFPAKPYRRGERSVSNVAVMSDYASLGASDPEEEREIDNVAIMQAARPDSRDRRLSFPQSVRDVVLGSGEIMVDDVKYTVSHVVEPVERSFSKINRTLHQISENVKQLEKQKRKAKDDSDVPLEPFSEEFAEAHDNVFGGSVSDSGLARKKYKNTKRAPSSLKPFEFRLGRWFQ

SEQ ID NO: 186170 - protein, 624 aa, Oryza sativa
  Clone ID: PAT_MRT4530_82995C.1.pep
MAAEGNARASGNNGGSQGSGSTSKWREQAAVPAESMTAGGLAGDRVGNATTAGLSGENVERRVGQVMISGPTTASDIPVPLCEKGAAERDEAINALPLTDIIGPLADHQVASSLKVKAVKEVSDAATTSGGNVPIKPRKFSSASDASPPPPRRQRIVTIGEKEARAKAARAKSGRASSASPLVASTDVMPAAGSWEATPSGPVSDPAAGRDLPAAVLTWEELQVEMGRLLEAGARGIGCEIAEARLVRELAKAREDLTKMRELATGNERQRKGLEDRMSELGNNLSEIRGSLRVTYTGLHQLAGVCGVTSTIPANPDEFSLTSSLAELATAMGEIPSKHAARIAEETSNGIYTGACHVLACVRLSRPELDLREILDQGAASDTRKEVMEEIGDLGESVLPLFEEDTDDEDVQQRGQPESLAVIPVFEFEPHVSPDHVDQPLDIEGRMATTSSDIEGALASQDRRIQYWKTKFEVAELERTMLAVTKEQAVETLRGREVWFNSYLKICCTSMARVCKELQVVRGDPEESAAGYISWLNGACAQLDGIDKRIDEALKQECRRSSRYAGGHVLACLRDYRPHLELEHLRECFARSRRTSAEIDHLARSMSPLAEKIFQSMDWRWPSW

SEQ ID NO: 186171 - protein, 337 aa, Oryza sativa
  unsure (1)..(337): unsure at all Xaa locations
  Clone ID: PAT_MRT4530_82996C.1.pep
TYGPILLNFNGLNALSGDDQTGVCVPVGPDKYSLTSSLAELATVMGEIPSKHAARIAEETSNGIYTGACHVLVCVRLSRPELDLREILDQGAASDTRKEVIEEVGNLGESVLPLFEEDADDEDVQQRGQPELLAIIPVLEFEPHVSPDHVDQPLDTEVGMETTSSDLEGALASQDRRIQYXKTKFEVAELERTMLAVKKEQAVETLRGREVWFNSYLKSCCTSMVRVCRELRVVHGDPEDSAAGCISWLNGACAQLDGIDKRIDEALKQECRRSSRYAGGHVLACLRDHRPRLDLEFLREGFARSRRTSAEIDHLARSMSPLAEKIFQSMDWRWPSW

SEQ ID NO: 186172 - protein, 146 aa, Oryza sativa
  Clone ID: PAT_MRT4530_82997C.1.pep
LALPLRPRGIHSAAQAATLPLYDGLRCLADDHNVPILLFMNHPPQGQFFHPPPPRPQIDSTTINYAETVSMHSSEAFCVTRIRSSGCKSTIWIEFGGRVISVSCKGRCWFLYGCYVATFSEKVLQSIFARLYQFIGGAIASLISLP

SEQ ID NO: 186173 - protein, 123 aa, Oryza sativa
  Clone ID: PAT_MRT4530_82998C.1.pep
MASRSKLSGIQRQVLALYRGFLRTARLKSPEERHRIESVVSAEFRENARNIDRKNFVYIEYLLRRGKKQLEQLKDPDITGLSTLEINKQLSGVRSFGYVNSRWISLAPNFIMNQTYDSCMENF

SEQ ID NO: 186174 - protein, 73 aa, Oryza sativa
  Clone ID: PAT_MRT4530_82999C.1.pep
MLVLYPAMKGCKMKSQFGYAKLCTSSIWSQVGRLKLDQTQILSSYSANMWNNMMHCTLLMILINFTYRCLYFI

SEQ ID NO: 186175 - protein, 140 aa, Oryza sativa
  Clone ID: PAT_MRT4530_8299C.1.pep
MEVALGGLVVARPAMKRLRRSPRPSAAAVARAPRLAVRRRRVLKRQELLVSQLHELPPHLPVQPADLAARAAAAADGAYRAVRRVGQALAPGATLDLEGMGMPVTKDGAAGDSGSPGGAVLLTGNVIVWAGTSVLFLYAG

SEQ ID NO: 186176 - protein, 191 aa, Oryza sativa
  Clone ID: PAT_MRT4530_829C.1.pep
MARGENNTGAHGSGNVPPPATAASTAAGTAAASGKQQARGAGAEGQSVVRRLQSELMALMMGGDPGVSAFPEGDNIFSWVGTIAGSAATAYEGTSYRLSLAFPGEYPYKPPKVRFETPCFHPNVDAHGNICLDILQDKWSSAYDVRTILLSIQSLLGEPNNDSPLNTQAAALWPNQDEFRKMVEKLYKPTA

SEQ ID NO: 186177 - protein, 584 aa, Oryza sativa
  Clone ID: PAT_MRT4530_82C.1.pep
MNLNNVGKKGLITDHANMKKQKRKKEKGNRSDWHGSTKDTIPFMGDADFNHADEFGVVDGVACEGTQMAPALLLLCPHQQLMQIQSKCCYYTSSASSTGGGRGQRAWAMVAIWRPPADKGGTAAADEDEGCWLLRIARQRGADRQRWKGSRWRPWAEERQAPFVVELASRSRRRDGLSPVPTTRSSYSLLLTGQEALWQEYRQKVSAWVTESRSLIGSSLARIQAESFCSGRNRNGKGSIKFILRIKDLFVDESHELFLNRHDKFLVCEASKSKSKKTQWNLQCSSIKCNIETIWPWGGISLHLLQNFQDVIFRRDFRGRKNYIIVILILRRSGIICIGALKEIFKPPIFKHERSFRPPVLRIENGNDGSMITIQHGQVINSGIWIIKTPFHICKTSVQPFQNQILTLLLIGPSGPSEAFLDMEESNKNSIVEKFRQHFSSPQFKNIQEQQKQQERGSGTSQSLMPKLDWKKASEKALTLAGCSTVQGPPSQAVHTTTASKQCEKKDKEPNMQSTPEVGTEEMLVHGSTVKKKLVSSTIEDHVSCNSKNVNTVGKVHQMEPIQSVPLVHRVSPSASAHQNRFLT

SEQ ID NO: 186178 - protein, 93 aa, Oryza sativa
  Clone ID: PAT_MRT4530_83000C.1.pep
MASRSKLSGIQRQVLALYRGFLRTARLKSPEERHRIESVVSAEFRENARNIDRKNFVYIEYLLRRGKKQLEQLKDPDITGLSTLEINKASSLH

SEQ ID NO: 186179 - protein, 57 aa, Oryza sativa
  Clone ID: PAT_MRT4530_83001C.1.pep
MPELGATSKQLDQDNVEKKLEQDKDNMMDDMRAKELLNHALLIKERRVSGRPETTHT

SEQ ID NO: 186180 - protein, 963 aa, Oryza sativa
  unsure (1)..(963): unsure at all Xaa locations
  Clone ID: PAT_MRT4530_83002C.1.pep
MEVAPETLDTLSGWFAQSLSPDAAARRAAEQSIESAKCSPGFGLALLGLASSPRHDPQSRLAASVQFKNLLRRRWPKPSPDGGGDDDADHLPPSDCAIIKANLLQLLLTAPPLIQAQLSEALAAAAASDFPARWESLLPSIVSSLGTALSAGDIPATNSLLAAAASLFSRFRNAFDSNTIRLDLKYCLENFAAALLEVFLSTSRRLQAAAPTVTPPESRPVFECLRLCCEIFYSLNSIDLPEFFEDHMREWMTEFRAFLTTSYPPAIEADGAPDALRAAVCDNLQLYMEKYEEEFRGYLKEFVEAVWGLLMAPSVSPSRGQLAVTAIRFLTTVAESVHHALFGSPDAMKQICDSVVIPNLRLRDDDEELFEGNWVEYVRRDAEGSDADTLRRAACRLLRGLAANYREQVAALVSAQVQQMLAAYAADRTNNWKEKDAAIYLVISLMQKPGATGGGTPVVDMESFFTSVIVPELQAPDWESEPMLKATVLRFLKEFKDQIPKATALALLPSVIRFLIHESNVVHSYAATFIENLLIIKDMVPVPSANVITRAPRYVAADINPYAQPIVQNLSKALSFPESYENPYLMKCLMRVLGIANIAGQIVHEITARLVGILMEVCNNPKNPDFNHYLFEALAAVIGRAGEQDPALLPVFEASLFPVLQRILVEDISEFWPYAFQIFAQLVNLSRPPLSQNYMQLFGVLLSNATWDRPPCVPALVRLLRAFLRKIPNELNQEGRLPNILVIFRSLLSRSSTEDSAFYMLNTLVENVSFDIMNPHINEIWSALFTRLQTRQAVKFVNSLVVFMSLVVVKYGPGVLVSSVDAIQPNIFMTILQRFWIPNLKFIKGTVEVKLTSVASTKLICESALLLDGAAAQTWGKLLDSIVALLSRTDQDGAQQDQNDGADADSQRTSGYSVSFVRLQYAGKSEDDLLKXGRFGPIIEQNVDPANKGALIQLCAAYNTNIV

SEQ ID NO: 186181 - protein, 259 aa, Oryza sativa
  Clone ID: PAT_MRT4530_83003C.1.pep
MRLGGGGGGGGFMLGCGCRDAKAVAVAVSATSPCSAATETSTATTATWRRARTHPSASASASTGTLTVPSASSSFLWDDADAEADGEEVDFKRESSATTPSFSGLLRQLNELEQSLRNVKGVDKGGSKEDSKHCPPPPQAPKHRKTKSCDNNDGFTAGKLDGSLAVVKQSEDPRGDFRRSMLNMIVENRIVTGDELRELLHRFLELNAPHHHDAILRAFAEIWDEVFAGPDEPRHGPPRPPPRQRTPPRRRHPLPAWRL

SEQ ID NO: 186182 - protein, 876 aa, Oryza sativa
  Clone ID: PAT_MRT4530_83004C.1.pep
MEVAPETLDTLSGWFAQSLSPDAAARRAAEQSIESAKCSPGFGLALLGLASSPRHDPQSRLAASVQFKNLLRRRWPKPSPDGGGDDDADHLPPSDWAIIKANLLQLLLTAPPLIQAQLSEALAAAAASDFPARWESLLPSIVSSLGTALSAGDIPATNSLLAAAASLFSRFRNAFDSNTIRLDLKYCLENFAAALLEVFLSTSRRLQAAAPTVTPPESRPVFECLRLCCEIFYSLNSIDLPEFFEDHMREWMTEFRAFLTTSYPPAIEADGAPDALRAAVCDNLQLYMEKYEEEFRGYLKEFVEAVWGLLMAPSVSPSRGQLAVTAIRFLTTVAESVHHALFGSPDAMKQICDSVVIPNLRLRDDDEELFEGNWVEYVRRDAEGSDADTLRRAACRLLRGLAANYREQVAALVSAQVQQMLAAYAADRTNNWKEKDAAIYLVISLMQKPGATGGGTPVVDMESFFTSVIVPELQAPDWESEPMLKATVLRFLKEFKDQIPKATALALLPSVIRFLIHESNVVHSYAATFIENLLIIKDMVPVPSANVITRAPRYVAADINPYAQPIVQNLSKALSFPESYENPYLMKCLMRVLGIANIAGQIVHEITARLVGILMEVCNNPKNPDFNHYLFEALAAVIGRAGEQDPALLPVFEASLFPVLQRILVEDISEFWPYAFQIFAQLTRQAVKFVNSLVVFMSLVVVKYGPGVLVSSVDAIQPNIFMTILQRFWIPNLKFIKGTVEVKLTSVASTKLICESALLLDGAAAQTWGKLLDSIVALLSRTDQDGAQQDQNDGADADSQRTSGYSVSFVRLQYAGKSEDDLLKEVNDPKQFLVTSLATLSAQSPGRFGPIIEQNVDPANKGALIQLCAAYNTNIV

SEQ ID NO: 186183 - protein, 534 aa, Oryza sativa
  Clone ID: PAT_MRT4530_83005C.1.pep
SRRQPALAPGNIEDQKESKNHMDTESIQDGDDILLSGGDDDRNGGSIAEIQTTVDLGVAFGSEKLLNLEMLLMEIAHRATEIEPLVLDAESISAESVQRVSEFDLLHCILDSEVKELEKLVDSIEVDIGNGGKMMASDEDPVSEVNSKLRDAAVSLNQMQDLISAIRRQSANFVNVIDPSQDNSGTSEDGGYENGHGSSRSAMPAEEQRNTLQLLNQSIASELDLGKKLHDSESVVEELKLKLHHVEHESYFLEESVEAISERMFAAENASELFLGASKELIGKVNTIQFHLSASIRREGDLKSKLEQSLTESNGSNSTLEKMKQDSEKEVMPTQAQPDSEFLTLQDKIQQLEEWLRESKSGLPLTIASTGENEVGEDEMSTFENIVNDIKMLFSEQKGSDRAGLLEEKLKESETQLLHAKASIEAIVERHSIFKSSMSDMEQVIDDLKEKYLKAETRAENAESKCTLLTDTNLELSEELSFLRGRVDTLENSLCKANQLKMSAAKDIGIKTKTITDLVAKLALERECLHLQPF

SEQ ID NO: 186184 - protein, 837 aa, Oryza sativa
  Clone ID: PAT_MRT4530_83006C.1.pep
TALSAGDIPATNSLLAAAASLFSRFRNAFDSNTIRLDLKYCLENFAAALLEVFLSTSRRLQAAAPTVTPPESRPVFECLRLCCEIFYSLNSIDLPEFFEDHMREWMTEFRAFLTTSYPPAIEADGAPDALRAAVCDNLQLYMEKYEEEFRGYLKEFVEAVWGLLMAPSVSPSRGQLAVTAIRFLTTVAESVHHALFGSPDAMKQICDSVVIPNLRLRDDDEELFEGNWVEYVRRDAEGSDADTLRRAACRLLRGLAANYREQVAALVSAQVQQMLAAYAADRTNNWKEKDAAIYLVISLMQKPGATGGGTPVVDMESFFTSVIVPELQAPDWESEPMLKATVLRFLKEFKDQIPKATALALLPSVIRFLIHESNVVHSYAATFIENLLIIKDMVPVPSANVITRAPRYVAADINPYAQPIVQNLSKALSFPESYENPYLMKCLMRVLGIANIAGQIVHEITARLVGILMEVCNNPKNPDFNHYLFEALAAVIGRAGEQDPALLPVFEASLFPVLQRILVEDISEFWPYAFQIFAQLVNLSRPPLSQNYMQLFGVLLSNATWDRPPCVPALVRLLRAFFRKIPNELNQEGRLPNILVIFRSLLSRSSTEDSAFYMLNTLVENVSFDIMNPHINEIWSALFTRLQTRQAVKFVNSLVVFMSLVVVKYGPGVLVSSVDAIQPNIFMTILQRFWIPNLKFIKGTVEVKLTSVASTKLICESALLLDGAAAQTWGKLLDSIVALLSRTDQDGAQQDQNDGADADSQRTSGYSVSFVRLQYAGKSEDDLLKEVNDPKQFLVTSLATLSAQSPGRFGPIIEQNVDPANKGALIQLCAAYNTNIV

SEQ ID NO: 186185 - protein, 181 aa, Oryza sativa
  unsure (1)..(181): unsure at all Xaa locations
  Clone ID: PAT_MRT4530_83007C.1.pep
KFYKLNFVAIQAPRPLIXIWKTKCAMKIKVFAWLFFWDRLNTRDMLDRRHCAKDDDDLSCVLCNTNQRETRDHLFFNCPFSTTCWQFLGISWNANLEFYQRIALTKWXFNQPGFLEIFFMAAWHIWKQRNGLIFRNFQXPSILERPTFHSWKSLFTNEILLHLCRMKDPLKQSNVNWLQSL

SEQ ID NO: 186186 - protein, 287 aa, Oryza sativa
  unsure (1)..(287): unsure at all Xaa locations
  Clone ID: PAT_MRT4530_83008C.1.pep
MGDHGEVVDVVVCEMENQAVSEMHVVMDLEGTTKRIPPMQTPRARLLRSCGESILAMARGAYRRVEAMRCPVGCVARGASRAAAPVLSPLRLRCLSALAFADRQLLVVQDVAAVLFPAAERVLGRGADDLVLLVESLPARLXTARSTPSRPSSPAPRGCSFSPSVAAATEPTRTMTTASAAPSLXHLVRREGSRVVAPISNGGRGAEAFRRRWARKELESLEVVTADDGGXVAVATPCMATRLPSTAKERRRLRRNAPTHQVAKNAAWSTWRMYSGWRRQLQRSRMP

SEQ ID NO: 186187 - protein, 363 aa, Oryza sativa
  Clone ID: PAT_MRT4530_83009C.1.pep
MSPDATGEAGGGGGGGGDLFAANLKGSLLAVASSAFIGVSFIVKKKGLLRAGAAGSRAGVGGYGYLLEPLWWVGMVTMLVGEIANFIAYMFAPAVLVTPLGALSIIVSAVLAHFTLNEKLQRVGVLGCVLCIVGSTVIILHAPQERTPSSVDEIWHLAIQPDFLCYATAAVAVSLFLMIYCAPRYGQMNIMVYVGICSVIGSLTVMSIKAVGIAIKLTIEGINQAGYFQTWLFAVISITCIAVQLVYLNKALDTFNAAVVSPIYYAMFTTLTILASAIMFKDWSGQSASKIASEICGFLTVLAGTLVLHSTREPDQTLSADLYAPLPPKIYWHIQGNGDIGKQKEDDSLPCDIITVMRQDYFV

SEQ ID NO: 186188 - protein, 1440 aa, Oryza sativa
  Clone ID: PAT_MRT4530_8300C.1.pep
MKRQRSYGDDMDDDRRRFYDRGPPPPPPASRRRPGDYDGDGFDRRKGFGGGGGGGGGFYDHRYRESPSPRGYGGDRAMHRSESFSGFRREFPKGFRSERDRSRRDGGGSSAWRRQSGGWRDSEGLDGYRAAPRRSGASPPTPPLRLPSESSRRFDGARVEKSRKQSFGISEMEEGEVAPDPETKARAAAVDHRKQIEFSGHAKEKGPERGEVKKVESGVRGDLGAHGKGVAGSSAARNAGREEGKIKDSMIAEAGTVTHTRHEKSTSDAAVSTGRGHEVQGQDEAANALNQVGQCVSSSGSHKVPQEETMIRDEAANVVDAIGQSTSSDIQQEAVCEKAAVRDETANAAEEAGQRTSSSVHEEAIHEQATIRNETASDVDEAGQSTSSNIRKDAIQQKATIRDETTNAVDEAGNGTSSSNQEAAIQEKVPVQDETTNAVDESGLGTSSSIHQGLQEEAMALDEAVDAADVVRKVSLCGMHQEALLGKTRDQTANDVDRVECSTSSGLLQVTPQEGMASIDGTANAVEPEKIDSDMLKETIEGELVLDGTADVVGEGNSPSTVKEAMHGKITAEDGCPSSALEIAKKCKQSAITEELVHEKVATSPSQGAPEMKKNEKGTISSKKMSESFEPDASQHVEEALPRDGRENIVALSDTEVPEQEAAAENKTIEKEVKGFCLEANSVGANVFLQPSKECNGDRKEEGTALNLIMGKPSAEDKGKGIAFDVLSKEEDIGVGSSVGRSFDLALQPDIDRTEVLKSSGTVSVKQEDDTPKIGRLDLSLSLSGCLQNPEFKCSVPRSESLDLATCSQMLPSSSFRTNSEGFTGSVSLTNSQTFVHNPSCSLTQQSLDNYEHSVGSKPLFKGVDKLSDSTRWQAQLSNESTKKREPTAVLQNTVKYGNLPDKTFLGVNVQNNGISKDIHRRAGISGVLSPTHSRDSHDSGFEQSRHRRQLTRERSSSSLTRGERQDGQQLVLNGAGVIERIISKIVSEPLHHTGRMLDEMTSNSVTYLREAISDIIADADKRGQVVALQEALKKRSDLNSEMLQRCPRVLLEILVAIRTGLPDFMKKSNSIGTCDLVDIFLYLKCRNLSCKSILPVDDCDCKVCQRKTGFCSSCMCIVCSNFDMASNTCSWVGCDVCLHWCHTDCGLRHSLIRKGGSGSRAYSTNELQFHCAACGHPSEMFGFVKEVFRTCAMQWRMETLVRELQYVERIFSSSDDARGKRVRDFVKQMIIKLENRAYHPEVVKYIMAFFSDDNSNAGSGTSVPLKGIPCNIAERIDGIPSSSRKAPSWLPSVTLEGVPFLEKQGVISTTGSPLTLRKFGGTDFQTVDNKPTVDELDALIRLKQAEANMYQQRANDARKEAETLKHVTMVKHAQIEEHYATQIGELHINELQEQRKRKIEELQVIERTHHRFLSMKTRMEGSIRELLLKMEATKQNFST

SEQ ID NO: 186189 - protein, 174 aa, Oryza sativa
  Clone ID: PAT_MRT4530_83010C.1.pep
MGLVVSAAASCGRLRRSRSRSPPPAVLDPSQSPLSLEREAEPELIRVFRCFDTDGDGLISAAEMREFYGCSVDEAEEMVAAADRDGDGFVSIEELRAVMEGGGLDALRAAFDEYDEDGNGVITAEELRRALRRLNLDGMDLTAEQCAEIVAAVDSDGDGVISFDEFKAMMSKQA

SEQ ID NO: 186190 - protein, 89 aa, Oryza sativa
  unsure (1)..(89): unsure at all Xaa locations
  Clone ID: PAT_MRT4530_83011C.1.pep
FFFFFYRIRXGFQLEVLISLSTNTYNFCAFESSPIILHVHACETTLIFNSRNCIDWQQKHAQASNSTGNRCENHLPIVVSNLGLILIEA

SEQ ID NO: 186191 - protein, 118 aa, Oryza sativa
  unsure (1)..(118): unsure at all Xaa locations
  Clone ID: PAT_MRT4530_83012C.1.pep
SRQGQNGGYIRLPTSVHRHYCHLSDFPSITSPSIITVSYIIYPXIIITNRDHASEPDTYNLRCTMIHHTDRLRNSQALLVQYCKCHQSTCTCYTYNSPXRSRXTHTSXTYIVVTELPS

SEQ ID NO: 186192 - protein, 1037 aa, Oryza sativa
  unsure (1)..(1037): unsure at all Xaa locations
  Clone ID: PAT_MRT4530_83013C.1.pep
MAKGGRAFIQSNLGKYCSPNHSLPXKGNDNVGANLMSESFTFAYLSDKVVTPMNKFFKHPNGNIIEEFGIVQDVPVCFEDREAILDYHVFEIRDFDILIGLPFEQLLINTPRLDSLKITLGGNEFSVPFSRTRIALTDPLPEIESADEVTAVPPHESLEALLEDEVSDFIKEEADPGETLDLPIMEPPPQPPLELKPLPXGLRYTFLHNDREAPIIISDKLSEDETQCLLTVLEKHRSVVGYSLHDLRGINHALCTPRIPIDPESTPYREPQQWLNNTMREVVKKEVLKLLHAGIIYPVPYSEWVSPVQVVPKKGGMTVVANAQNEHIPQRTVTGWRMCIDYKATKKDHFPLSFIDEMLEQLANHSFFCFLAGYSRYHQIPIHPEDQSKTAFTCPYGTYAYRRMSFELCNALASFQRCMMSIFSDMIKDIMEVFMDDYVYGKTFGHCLQNLDKVLXRCQEKDLFRSYLVGAKVIVYTDHAALKYLLTKKDAKPRLLRWILLLQEFDLKIKDKKGVENSVADHLSRLQITDTHEXPINDFLRDDMLMTVRDSNPWFANIVNYMVSKYIPPGENQRKLKYESRCHIWDEPYLYRVCSDDLLRRCVPTDEGLKIIEXCHASPYCGHYGAFHTQAKFWQSGFFWPTMYEDSKEFVRRCTSCQRQGGITARDAMHLTYNLQVEIFDVWGIDFMGPFLKSRNCEYILVAVDYVSMVISDGGSHFIDKTFRHLLREMGAKHNVATPYHPQTCGQAEILNKQIKNILQKTVNKMATRWKDRLPDALWAYRTAYKTPIGMFRYHIVYGKSCRLPVELEHRAYWAIRNWNMDFYGAGEWRKMXIAELEEWREKAYHNAKIYKERTKCWHDKRIKIKKFKPGDKVLMFNSRVKLFGHRKLRSKWEGPFDVIDTSSHGAITLRNDSGNIFKVRRLFQDDQKAALPPAEHYVGTLFTKAGDEVLHKYVTPTATPSTPKEERFCIMGVRTPSGGYGKGLLRPLTATEKEGAAESRIPPPMKVKRHLTRLLSVYLHHGIVLEQKFRRQLVQA

SEQ ID NO: 186193 - protein, 102 aa, Oryza sativa
  unsure (1)..(102): unsure at all Xaa locations
  Clone ID: PAT_MRT4530_83014C.1.pep
LRPTAGGGEVRPALNRRSTPPQPAAPSAPSLRRSIAIPTSKLNRLRXSLVLPLIPGLAQPCKPSILPANKIRVLLDPVPVRGGIRGHANATVFEGGLGPGSV

SEQ ID NO: 186194 - protein, 214 aa, Oryza sativa
  unsure (1)..(214): unsure at all Xaa locations
  Clone ID: PAT_MRT4530_83015C.1.pep
MQEQPINDFLRDDMLMTVRDSNPWYANIVNYMVSKYIPXGKIISISSTYRSMSSTPLRTGQSHSATXSGDEVLHKYTTPTATPSTPKEERFCIMGVRIPSGRYGKGLLRPLTASENEGATESRSPPPMKVKHHLTPPPIVRAPSKIQEDEVKSPEPSVHKLTAQVKKLRKENIELRDRNTELGVELAEIRNNVGTLSRSLCAKIKRAFIEMEGE

SEQ ID NO: 186195 - protein, 138 aa, Oryza sativa
  Clone ID: PAT_MRT4530_83016C.1.pep
MNWQSLHNLLFCHENRQNGNYDSQRKKKGLIKKLLDEVSKPHILYRKCIYLSPRPNLESIHRKILKEEFRVLKHPPPRPSIQCITYANYLSYFWANNNNTQETLGIKKGSVNEWVRCHNNDLPYTEDTTTSIIIVMLH

SEQ ID NO: 186196 - protein, 65 aa, Oryza sativa
  Clone ID: PAT_MRT4530_83017C.1.pep
MECQNLTLAAGDVVAGQTVHRSVRPPSARSDRLRLWRLCIATKNQTNATDQWGRSDRPYHASQTG

SEQ ID NO: 186197 - protein, 87 aa, Oryza sativa
  Clone ID: PAT_MRT4530_83018C.1.pep
HHSFPLPASNSASPVDLRASLLFGLNSSFVSNEICSAEAPSMPPVRSAPVAPPPPPPPPQQKKPAVPVSRPWPMSFTPHPPPPPPPP

SEQ ID NO: 186198 - protein, 45 aa, Oryza sativa
  unsure (1)..(45): unsure at all Xaa locations
  Clone ID: PAT_MRT4530_83019C.1.pep
CNIHLNAPRGNISXIKWLGNTKYKSNFGRFCVYXRLKRSKQNQGI

SEQ ID NO: 186199 - protein, 140 aa, Oryza sativa
  unsure (1)..(140): unsure at all Xaa locations
  Clone ID: PAT_MRT4530_8301C.1.pep
MVSFYLDSTFLPLLATTMASPLHACLLLALLFLALAFFHPGGVAWALSSSGGHGAAAIPGPRGVLLAFAGPNPHRALASLAASTRGATRLMAFSVGLTQFVVASHPDTAREILAGAAFADRPVXEAPRSHVHRAWGCPHG

SEQ ID NO: 186200 - protein, 98 aa, Oryza sativa
  Clone ID: PAT_MRT4530_83020C.1.pep
SGEARSFLSSDGGERGPPPLSPPPPPPSPQLRPAFAPVFSIAAAITGYGREGEGGRPQSTAANTHAAPSATQAVAPSGSDLAHDGPLSATYLFPSILS

SEQ ID NO: 186201 - protein, 210 aa, Oryza sativa
  unsure (1)..(210): unsure at all Xaa locations
  Clone ID: PAT_MRT4530_83021C.1.pep
CHQRRPAPTGGPHMSVAQGRRPTMDRDHRGGPPPTHISLSRPGGHVVAWPRHDDARXGLADHGAAAARGHRWPQPTAPNGGERPEDSGTHGXDNGSPYEAAAGKEGGGENERREEGPRERDAMGNVVEGDWSRRSGGRGAARYSRADGGGARLEVVRDGGKRRLEAAGGGGARIGGGSGAPVVVEKKRAVAGVRQGAVKPMVVVAQRSGG

SEQ ID NO: 186202 - protein, 68 aa, Oryza sativa
  Clone ID: PAT_MRT4530_83022C.1.pep
LFVWSTYVATRVNLDGGAAYPRWYLDDNVISFCNFDRSFASEHGVILLTTSTCKRSTYVAAVHSSHLN

SEQ ID NO: 186203 - protein, 95 aa, Oryza sativa
  unsure (1)..(95): unsure at all Xaa locations
  Clone ID: PAT_MRT4530_83023C.1.pep
MSSAPSLRKRSSSSPAISMSSTSSSPSSSSSSSMDGVRSSAVWERPDDEMAGGSSNIFPSLNLATSVDXVTATTEGIPSLLQQRLMTVEEESFNR

SEQ ID NO: 186204 - protein, 108 aa, Oryza sativa
  unsure (1)..(108): unsure at all Xaa locations
  Clone ID: PAT_MRT4530_83024C.1.pep
EYNRRRARGNTNNNSSSGTNGLTPNTTGDGWKPGRNPILHFTSSSTSQGVHFTHTALLTRITQPVXRTATYGDLEAFMTRQFESRHRFTICQREGSQTNTRLEGFGLV

SEQ ID NO: 186205 - protein, 250 aa, Oryza sativa
  Clone ID: PAT_MRT4530_83025C.1.pep
MVMAMEKKRFPTLAQVAKMASLLLLFLLLPLVPSSLRQPYLYLLFNALVVALGVEAGFLAAISSGPRDDKLLPKPAAAAAALRLSHSNRPGEVDVAAAATNGRHHHVNGSSSSSAVIVAASPSLTPKAAALEAAAGSRDVVVIAGGAMPAAAAAKKSKKMRRCPSRASLFFIGGGDGEDVVVHEEEEGCWTKGGGGGGGEQMMSKQELFTKAEAFIGNFYKQLKMQREESWKKLQDLYHHHHHHYKTTAL

SEQ ID NO: 186206 - protein, 101 aa, Oryza sativa
  Clone ID: PAT_MRT4530_83026C.1.pep
MARPRGKSAVRRLISLRPEGKTTEYTSLPFEGWGVGESALMQPLSPDLAAAAVGRTPPPPAPNAERRPPAPVPPDAASSLAGLRAAGRRLPSPAPPDEQRG

SEQ ID NO: 186207 - protein, 106 aa, Oryza sativa
  unsure (1)..(106): unsure at all Xaa locations
  Clone ID: PAT_MRT4530_83027C.1.pep
SAPAQKTNKKYSSIPCSDRERQCSSIFLRFSQQCLRHTSIFTLDDVLKSKRKHLTVGIFRPDHHQQHPGSALRPWTCRCQYYSRITSTPQAQPXVAENVXYRALKT

SEQ ID NO: 186208 - protein, 76 aa, Oryza sativa
  Clone ID: PAT_MRT4530_83028C.1.pep
GGKRRRRGATGRRPTATLRQGAAVVGGGSAAGGAGGRAAALGGRRRGRAAVRPHWALARRPREAGSQRSRAAGNRQ

SEQ ID NO: 186209 - protein, 451 aa, Oryza sativa
  unsure (1)..(451): unsure at all Xaa locations
  Clone ID: PAT_MRT4530_83029C.1.pep
MPTGRRLSMILLLLLLGLASGDKILFQGFNWESWRQSGGWYNLLMGKVDDIVAAGVTHVWLPPPSHSVSTQDAIQRXRYMPGRLYDLDASRYGTSMELKSLISALHGKGIQAIADVVINHRCADYKDSRGIYCIFEGGTPDGRLDWGPHMICRDDTQFSDGTGNLDTGADFAAAPDIDHLNGVVQRELTDWLLWLKSDEVGFDAWRLDFARGYSPEVAKVYIEGTTPVGLAVAELWDSMAYGGDGKPEYNQDAHRQALVDWVDRVGGTASAGMVFDFTTKGIMNTAVEGELWRLIDQQGKAPGVIGWWPAKAVTFVDNHDTGSTQQMWPFPSDKVMQGYAYILTHPGNPCIFYDHFFDWGLKEQIAALVAVRQRNGVTATSSLKIMLHDADAYVAEIDGKVVMKIGSRYDVSSLIPPGFHLRPWPYAVWEKTPPPPPPPPIIAPLPAHRSD

SEQ ID NO: 186210 - protein, 106 aa, Oryza sativa
  unsure (1)..(106): unsure at all Xaa locations
  Clone ID: PAT_MRT4530_8302C.1.pep
RTGDQGSGGRPTDGDGDDEGTAADCGLTTATMLRRFPTVTKRRTRTATTWRPXRRPSRVTATSGTAAAHGWSDGGDGGVRAHGARAFQNVLAEDSNGEKVEEIPEI

SEQ ID NO: 186211 - protein, 480 aa, Oryza sativa
  Clone ID: PAT_MRT4530_83030C.1.pep
MATGRRLSMILLLLLLGLASGDKILFQGFNWESWRQSGGWYNLLMGKVDDIVAAGVTHVWLPPPSHSVSTQDAIQSILYPFHFGYSKYILTQGLFGITLASEAPASGYMPGRLYDLDASRYGTSMELKSLISALHGKGIQAIADVVINHRCADYKDSRGIYCIFEGGTPDGRLDWGPHMICRDDTQFSDGTGNLDTGADFAAAPDIDHLNGVVQRELTDWLLWLKSDEVGFDAWRLDFARGYSPEVAKVYIEGTTPVGLAVAELWDSMAYGGDGKPEYNQDAHRQALVDWVDRVGGTASAGMVFDFTTKGIMNTAVEGELWRLIDQQGKAPGVIGWWPAKAVTFVDNHDTGSTQQMWPFPSDKVMQGYAYILTHPGNPCIFYDHFFDWGLKEQIAALVAVRQRNGVTATSSLKIMLHDADAYVAEIDGKVVMKIGSRYDVSSLIPPGFHLAAHGNGYAVWEKIAAAAAAADHRTSSSASL

SEQ ID NO: 186212 - protein, 131 aa, Oryza sativa
  unsure (1)..(131): unsure at all Xaa locations
  Clone ID: PAT_MRT4530_83031C.1.pep
LGRSEGGIDPHTNLGRIITFTSFVQCSFLPLPSKFLSLLLDFYDLHLLYLNPISIAFXSIFTHLCEMYLGVQPFLDLFRYFYEARWMESSRVYGCNGLRLRDGMKGEYIPFKCMFSRKKWRNKWFFLHVDD

SEQ ID NO: 186213 - protein, 42 aa, Oryza sativa
  Clone ID: PAT_MRT4530_83032C.1.pep
GDHGTRNACRVTNGLIKKRTANCLLINQGGTNDQIKQDQVKH

SEQ ID NO: 186214 - protein, 387 aa, Oryza sativa
  unsure (1)..(387): unsure at all Xaa locations
  Clone ID: PAT_MRT4530_83033C.1.pep
MPKEISMPEVSEDISVPEVPKEILVPVVPEEISVPEVPMEISVPQSDVQLLATVSTDIEVIPGLEWDGTEPEIFEDPNHVKDLEVEEPPVNDKATDKSEVSRVLRSHNSKSKDDQKEKFMVSAFRGGKEHAKLREDDPKKAAELAGXKKYFATDDYLEKYQHRKAIWPDFALEDTYREASTRXAQLKDKTPEEIAEYKKGLHKQKMITVAHDHYICLINYPKHGIVTVLDPLNYRHESYKEFLTILKYAYNYYKFKGGEHIRTREKLLVHTYWPCHKQPRSTALCGYYACEFLRVNGRYTVNAKDLPRIEHRTSFDDTDIANIQRDLCHFIHHECYHVDGKFFDPEGGRSLFSQAARLAPFRLGKLTSNADLQPASELWAAGGPAKG

SEQ ID NO: 186215 - protein, 1308 aa, Oryza sativa
  Clone ID: PAT_MRT4530_83034C.1.pep
MDLTKDGNFRVAQGGLQALSAAAVLAGDHFKIHLNALVPAAVERLGDGKQPVRDAARQLLVTLMEVSSPTIIVERAGSYAWTHKSWRVREEFVRTVATAVGLFASTELPLQRVLLSPVLQLLNDLNQSVRDAAISCIEEMYRNMGSQFHEELQRHNLPSYMLKDINSRLDKIEPKARSSDGARMQYKVIERSRSLADATCTQGDSDITEKPVEPIRVHSEKELLREMEKIASALDPEKDWSIRIAAMQRIEALVYGGAIDYPSFLTLLKQLVPPLSAQLSDRRSSIVKQVLFKLVVITVLVIAESADNCIKTILRNCKVSRILPLIADTAKNDRSAILRARCSEYAILILEYWADAPEIQRASDIYEDLIKCCVADAMSEVRATARSCYRMFTKTWPERSRRLFMSFDPAVQRIINDEDGGLQKRYPSPSLREKGVQLSHASSHASGTHLAGYSTSAIVAMDKSAAISSESSLSSRSLLSQSKKIGRTAERSIESVLSSSKQKVSAIESLLKGNSILLDSSLPSINNTRNGGSRLVDTVNPHVANKERSRSPYLSSLSSESISGSSLPYARSSSGRSPYGSTMEESNDTWSTRRMPQMQMDRHYLDMTYRDASHRNLHNHQVPHFQRPLRKQVASRTSASSRHSFDDGHISSNDMSRYTDGPTSISDALSGGLSASSDWVARVTAFNFIQTLLHQGQKGIQEVMQNFEKVMKLFFRYLDDPHHKVAQAAFSTLADIIPACKKQFESYVERILPYVFSRLIDPKELVRQPCSSTLEVVGRTYPIDTLLPALVRSLDEQRSPKAKLAVLEFANKSFSRYKVDSEGYSNSGFLKLWLSKLAPLIHEKNAKLKETSISGIIAVYSHFDSTAVLNFILNLSIEEQNLVRRALKQYTPRIEVDLVNYLQSKKERSRPKSYDQVDFGNSSEDGYALTPKSSYAFGRFSASSLDNASGKKMNMVHGSIFLDISTGRTSSDVSIDNVKQCFKPEAEVLATSRESKNIARTVVEAARSWTDYPGKSDATIDDENSTGTPRLEFGRLAVSDGRGAVISTSVEDAQEGNPLVELSSVKITPHTSNGPSIPQLIHQISNVSEVTSLDKREALQQLVTASTNNDNSIWTKYFNQILTTILEVLDDSDSSIRELSLSLVAEMLHNQKDPMEESIEIVLEKLLHVTKDVVAKVSNEANQCLNVVLAKYDPFRCLAVIVPLLVSDDEKMLVVCTNCLTKLVGRLSEEELMTQLPSFLPALFDAFNNQSPDVRKTVVFCLVDIYIMLGKAFVPYLEGLNSTQLRLVTIYANRISQARSGAPIDANH

SEQ ID NO: 186216 - protein, 303 aa, Oryza sativa
  Clone ID: PAT_MRT4530_83035C.1.pep
MATSRKLARVDIAELKQRLVKRLGRQRAGQYFAHLTRLLNLKLTKVEFDKLCYATIGRENIALHNALIRGIISNALSGVPPPSRQAVTGQSGTTTAPSGQCVGIALQSARNVGAVVDSGDGDFARERAVAGKVLSVEDGEEVEQVRSAPCVQSRSPITAPLGISTTPTYGARTWRLDDPMVSCYDSHHLLDTGSLFKGLQRRLESDGIGVSVQGVEVLNRGLDEFLRRLIKPCMELSRSRSSGRRVTKGNAMFAARMNGLQQANHGHCTTLQDFAVAMESDPHLLGTNWPTQLEKIQATSFGE

SEQ ID NO: 186217 - protein, 158 aa, Oryza sativa
  Clone ID: PAT_MRT4530_83036C.1.pep
VVFFFFFFFFFFVFFFFFFSPKPPPLPEETQSTPKKKRHKRPTNNACNNGGGGGPKRGTGSLTLGPPALEDKLFYLAPGNAYPHTPTGGRTTTPGNSTNHSLHAHVRTTPASPRGGGAARPMHVLQGVRRRGASLPGEALTRGPFGPPVPGRGPPPPP

SEQ ID NO: 186218 - protein, 52 aa, Oryza sativa
  Clone ID: PAT_MRT4530_83037C.1.pep
LLHLFYQRLHAAVLWARPSFTSTTTALFHTEDSYPYLMDEGTCRRCSIYWDY

SEQ ID NO: 186219 - protein, 59 aa, Oryza sativa
  Clone ID: PAT_MRT4530_83038C.1.pep
MANTNPNPHRFLCADHVVHQGGVMRIPRVDLIAATKLPKHHKQKMVRWGDLRGDSKTAG

SEQ ID NO: 186220 - protein, 392 aa, Oryza sativa
  unsure (1)..(392): unsure at all Xaa locations
  Clone ID: PAT_MRT4530_83039C.1.pep
SPEHGATVFGQGGAHRSEEGHERRRASGSDSPEEDRRRRIAATHAGGEXKRGKRRRGDKDSTQGGGSISGSRGFCFRRRIGWRSTEEGXRRRRPLGAVREERCWRRGGSRGEVVATAGRRGTERARPRKGGRQRGRKDDECVHTLLATAXAAPSLTRPTPRLTRPLAQRGSEEAVAEGRGRAAGGRQQWRGWFERGEDETRGEGAGFIGEEERSXGGGKPTLAVKGARLVFTGGCGGFVGSAKAATVWMRWAAKAVDRTAENRTAGAGGLARAGAVKVGAASWRWHLRLCLQALAAKEWRRGVVAWEGKRERRTVGRGGFTMPVWEKGGGRGSALPLGFGWTRVERLGHALQSLRQAAGPSGSTTQALTAAATGRLRGAGAAGLTAATTGRV

SEQ ID NO: 186221 - protein, 361 aa, Oryza sativa
  unsure (1)..(361): unsure at all Xaa locations
  Clone ID: PAT_MRT4530_8303C.1.pep
GRRRAGAEPVVGGGGGPRTTVAGDGGGGRPGERGHAVGGVLLLGGGARGRAVGHRRHRGLLLLVVGARSPPLPDRRIWRLTSGYRRRALAATRWRALAATAGDAAAGAGGGGPPDSRDRTDHDRATADGHDDVSGDVTSGGGSGGSGVHARRRTTARGHERRAPARRERRGELTDDQRKGGGVLRLDDDGDAPAVFSDGEGADEDGDATATTMATFPSDGDDCGTRSHEARALPATRDEGDGGDGGWKAAAKAHGDRRREGKLRXRRKETDPYRTRIHGFPXDLDDXFQKRKGRGDLGKHFPSIDFTGEGKARWDPPVSXARLARAAAAADWADLGRGERDKVLGRLSAQSQKRLLKTFFN

SEQ ID NO: 186222 - protein, 74 aa, Oryza sativa
  Clone ID: PAT_MRT4530_83040C.1.pep
YLDFRHTHYYKSDTYMRCNWLSPRGPKLSLTNPLDFIMTDIRLVDCHWRDFRCLKQCGSSQQWHQLSVRRNPKG

SEQ ID NO: 186223 - protein, 249 aa, Oryza sativa
  unsure (1)..(249): unsure at all Xaa locations
  Clone ID: PAT_MRT4530_83041C.1.pep
QCRRLAWPRRHYRQLLEAAVDASPPRCSSTLSGAGNRIPDSQRYSHHLELNPCRPSAVSPFFLTAGVRRRNPPSSIFLRRIRATGSPPLVPLFTPVCSPLAEDRRAATEAPRQRHLGEDRVKAGPLPPLSLSXARSTESPRAACTASTVSRATDKRAPLGTPQVRKSNKLRKSISSQPLIRLTPFHFQXFCKIVIYLMVLLQYGLGPNLLSVWDPSRWHMATLCRLSKCLVMKTLGSPDMAXSHGLGDP

SEQ ID NO: 186224 - protein, 81 aa, Oryza sativa
  Clone ID: PAT_MRT4530_83042C.1.pep
VKHVEVVPFIIYVICYMCVDACRGGRLKRSEGRARRAKSKVLCTTVPRHTICMVSCIYMCRINYKYKGGKVLHSSKYIKDI

SEQ ID NO: 186225 - protein, 125 aa, Oryza sativa
  Clone ID: PAT_MRT4530_83043C.1.pep
SGAPCWTRRRRRRPARAACGRSPTTRSGGSTARSAWSGSWCSTGSASPTAAPTRSASPASSATSRPASRRGACPCRASWRAGAAAPAAASCTRSAARSCSTSTARSRGTTAMAAAAAATAAHGAR

SEQ ID NO: 186226 - protein, 184 aa, Oryza sativa
  Clone ID: PAT_MRT4530_83044C.1.pep
MFKIQRIWHTILLAITWNIWKCQNNKAFNNTDEFDRCLRQCCINELLLWSHRCPLRLKPHLALYNPVPTINIKKGLSHGTNFKCASISITIVVASIMFRTPMEQQPATGVLITRNFTTRIITIRHKPVNRDWPRIPTADAEPPSPRAVPGQRQQHPARGMRRHGWGETRGGDGGGGGGGGERGH

SEQ ID NO: 186227 - protein, 306 aa, Oryza sativa
  unsure (1)..(306): unsure at all Xaa locations
  Clone ID: PAT_MRT4530_83045C.1.pep
LTGRCLTRSSWAGGPGWRPRWHGRERGEEPGRRSDGSRRAAESGERWQSGASGGHRKREGVTEVPSTGSDMGERRDGGRRRRPCGGGMGGMARGEEERSVXRRETDIGGQGSSAGVHGRQRRFRGQSEGGDGVDALGGXRRWIERRKIEPRERXISAGWRGQALAAKERRHGVVAWEGKREGRTVERGDFTMXRLGKRRWERECSAFGIWMDAGGAAWARAAELAAGSGAERQHDAGANGGGDRAVARRRRGRADQRRWRVXAATAGSGVGARETRARETERASDGSLSLSARMRATHVRGGGDDG

SEQ ID NO: 186228 - protein, 459 aa, Oryza sativa
  unsure (1)..(459): unsure at all Xaa locations
  Clone ID: PAT_MRT4530_83046C.1.pep
TSSGGSGATREDRHDSAELMGRPARRGGPRGRGESXEREGRWAESTLRGPEWGPLVSGAAHRFGXGVAHGLVHRVDRRMAGPRAAVRLSVDRAHXRERGGSGPALTRXHRGGADVAPPWHATQAGERRKKEAGRDGRRAAGVSPEHGATVFGQGGAHRSEEGHERRRASGSDSPEEDRRRRIAATHAGGXEKRGKRRRGDKDSTQGGGSISGSRGFCFRRRIGWRSTEEGXRRRRPLGADGNGGEAMPGDGIAMEWFXGGPREESRRGGRDGGAARNREGAAEKRREAARPNSAPGAXRRRRSSRPRPPGGTARARSPPRRGPRCGRRRRRRRTRGGSRRRRGTGRTPASTPCRPRSRXRPISSSVSGRTRPARDDDDDGGXPAWSPGSAPAGTAPDSRQYLWSXGGRGRGRASARCRSRCRSRTSGGRRRRGGAPSAASSTGRPRRGRGRMGGGPTSC

SEQ ID NO: 186229 - protein, 51 aa, Oryza sativa
  Clone ID: PAT_MRT4530_83047C.1.pep
MATVAGVVDDGGRSPSSIRHSSGFLRGNREDFAKLIDYSQKLGENGLFEKV

SEQ ID NO: 186230 - protein, 105 aa, Oryza sativa
  Clone ID: PAT_MRT4530_83048C.1.pep
MSSSFLQRSGCMTPPPEQPPPPARRHGTGTLPAATRASMWPTTQATQNAWGQPSETRNRMEPRISSCRYCSRSSSCAADADADAAALAMGGGRRVLGANSSARRN

SEQ ID NO: 186231 - protein, 71 aa, Oryza sativa
  Clone ID: PAT_MRT4530_83049C.1.pep
GTPIPSPPFGPTVTSSTLPSQSRAGRPARGVGSPTASAHGEGGGGEASFSTRPPPVGPIPTALAPPPSPSS

SEQ ID NO: 186232 - protein, 80 aa, Oryza sativa
  Clone ID: PAT_MRT4530_8304C.1.pep
LALNCLNNLLVLQSFCVKDGSSQFSFAIPYSQPTVTPLWLYESNLINLTDCPSVTLCGKLLVYLLQSLSGVTYFVPNSTG

SEQ ID NO: 186233 - protein, 244 aa, Oryza sativa
  Clone ID: PAT_MRT4530_83050C.1.pep
MASAAASASASAAQELDREQYLQELIRGSMLDPPSSSSSRAGRVRPLTDDEIGRFYCEVCMEWKLVFDRFRVSDGCPHAFCVACVVGHIEARVAAGSVPVPCLLAGGGGCSGGGVMHPERCKKLLDIDVFDRWCVALCERAVGPARARCPYRDCGEMAALEGEAAAAALPLRAAASKASCPTCSRAFCLQCEEPWDDRHGGGGGGDGGARCALTQLAKGREWRRCPSCRAMIDKIDGCKRMTCR

SEQ ID NO: 186234 - protein, 79 aa, Oryza sativa
  Clone ID: PAT_MRT4530_83051C.1.pep
MPRGGRSDAIAGGSKKQDDCEYEKDAVVTSGRRQRASLIVLHMIPGTDHMDSMTGPLRERDAPGRLLHMPPAAAGFAGD

SEQ ID NO: 186235 - protein, 315 aa, Oryza sativa
  unsure (1)..(315): unsure at all Xaa locations
  Clone ID: PAT_MRT4530_83052C.1.pep
WDGREEVSHRIGFAGKRPEAADCGDARWRRXKRGNGGGATRIKFKVVGVSPGFKEFISGVGWGRATPWRSGDERRPPGASGDGDKPMAGDGIARERFGETLGSSRTVSVRVVDELGPDDGARLRAAAETEQRRGARRIVRQEEEYGGGAHRRGRSGVGDAEGVVTRRAAPSLTRPTPRLTRPLAQRGSEEAVAGRAASGWQQWRGWFERGEDETRGEGAGFIGEEERSVWRRETDIGGQASSAGAALAVKERQVVTAAVVGEKGKKGREKSLAPLPLWEEGERENEGEEHELCLLVLEGCGMGASGPSDDSGDDG

SEQ ID NO: 186236 - protein, 882 aa, Oryza sativa
  Clone ID: PAT_MRT4530_83053C.1.pep
MAEAVLLALTKISDALADEITKELIVKLSEKVNNLKDLDEKIEQMRKQLTTMNNVILQMGMIYLTDEVVKGWIGEVRKVAYRVEDVMDKYLNYSMQMAEEWFLKKYFIKGSHYVLVFTQIADEVVKIEKEIKQVIELKDQWLHPSQLVSDPLTEMGRQRSRDSFPELVKDEDLVGIEDSRRLLTEWLYADELDSKVITVSGMGGLGKTTLVTNVYEREKINFSAHAWMVVSQTYTVDALLRKLLRKVGYTEPPLSCNIDKMDVHDLKEEIKRMLKGKKCLIVPDDVWDQEAYFQIRDAFQNDQGSRVIITMRKNHVAALASSTCHLDLQPLSDIHSFDLFCRMAFYNIKDHECPTELMKFAKSIVERCQGLPLAIASIGCLLSSRSRSHYVWNQSYNQLRSELSKNNHVRAILNMSYHDLSGDLRNCFLYCSLFPEDYPLSRESLVRLWIAEGFVLKKENNTPEAVAEGNLMELICRNMLQVTKYDELGRVNTCRMHDIMRDLAFSAAKEEKFGSANDFGTMVEIDKDVRRLSSYRWKDGTAPRLNLPRLRTLVSLEAISSSPDMLSSILYGSSYLTVLELQDSEITQVPATIGNLCNLRYIGLRRTKVKSLPGSVEKLSNLQTLDIRQTHIESLPQGITKIKKLRHLLADRYADEKHSEFRFFIGMQAPKDMSNLKELQTLETMEASKDLAKQLKELIQLQSERLCFEAFKPISTQLHRLIIRGKWATGTMDCPIFRTHGTCVKYLALSWCDLGDDPLRMLALLHLPNLTHLRLSNMHNAKKLVLYAENFFRLKSLVLKDMPHVNQINIIGGSLSCIEALYILALPNLDKVPLGIESILSLKKLWLLGLHMDFRKQWNNSGMHQKMQHIPEVCIYVNCVCC

SEQ ID NO: 186237 - protein, 240 aa, Oryza sativa
  Clone ID: PAT_MRT4530_83054C.1.pep
FSCTSLLCVYLNRDLIIKLLACFDLAEKKKKGKKASPYRLQRVNSTIKFSNFSQAVQPMPSCNRRHTTILPFSIHLFEEGLWPMLAPHLPQAPCPSSSSSVSCSSVMLVAIKGTMAASQVDMIKPMYLNVSISYDVKVLNKERLPKYARRMLIGSTAPICTYNECRGCRFKCTAEQVPVDANDPMNSAYHYKCVCHRQNVPCLRIAPLFLVYEQTSIELSARIALELSAGSSGTSGLQLC

SEQ ID NO: 186238 - protein, 190 aa, Oryza sativa
  Clone ID: PAT_MRT4530_83055C.1.pep
PFLWLPARWLVFAVFLCTFFCSCTLLTPGTFSSPAKGIFRGSLASTPPFSAFVRVLGYNIGPPTTTPSVPELSRRRPRRMSSCPWTPWTCARTSPTPSLPPPPLHGTHHHLDGREVDSASAVHAEKRSRCRHAEAEEESARRGGGFGEAGGAPWKEEQRRRFVIISRFPFWGVFSFERNGWVGPETAVPD

SEQ ID NO: 186239 - protein, 37 aa, Oryza sativa
  unsure (1)..(37): unsure at all Xaa locations
  Clone ID: PAT_MRT4530_83056C.1.pep
PXQHAEILYHNLTTSLGRVYKLHMNITHHSISIARNR

SEQ ID NO: 186240 - protein, 280 aa, Oryza sativa
  Clone ID: PAT_MRT4530_83057C.1.pep
MAAAAAAAASASSSSSSSSSAESVPLPTTTLPIDKAAAVGGGGDRAVDCGVCAICLDKIALQETALVKGCDHAYCVTCILRWASYKQTPQCPQCKHPFDFLSVHRSLDGCIHDYMFEESVCLLLRATWFEPLIVEAHEEALDEEELYHIYQYDDGVEDDLDEEAYYMSRSPSIRIGNRRWGDNGYVRGGRKEARPVSRQSLNDTDAGPSRTPKKKDVSASGSGSVSKEVAGRRAKRALKREAADKAAAEKHLKHLQRLGLRKAPEATAEATPEVEPQLNE

SEQ ID NO: 186241 - protein, 79 aa, Oryza sativa
  Clone ID: PAT_MRT4530_83058C.1.pep
LPGVRPPTASVRALFSLQSVITHLRPHQLSGLPCPRERRVTTRLDRLVQNVHPPVSAIAQLSTTSARSVRCTIKNNSVS

SEQ ID NO: 186242 - protein, 433 aa, Oryza sativa
  unsure (1)..(433): unsure at all Xaa locations
  Clone ID: PAT_MRT4530_83059C.1.pep
MPASPKEAQSRAGAGVRMISSEELRAHASRDDLWISISGDVYDVTAWVPHHPGGDIPLLTLAGQDATDAFCRYHPPWGRPLLXKLSFGGLFERVGPTPEXQVAGMLLLLCAALYCVLACASAWAHLLAGGLIGFIWIQSGWMGHDSGHHRITGHAALDRLLQVLSGNCLTGLSIAWWKCNHNTHHIACNSLDHDPDLQHMPLFAVSSKLFGLWSYFYQRTLVFDAASKFLISYQHWTFYPVMCFARINLLIQSAVFLLSSRKVPQRGLEIAGVAAFWVWYPMVVSCLPNWWERVAFVVASFVITGIQHVQFCLNHFSSEVYVGPPKGNDWFEKQTAGTLDIQCSPWMDWFHGGLQFQIEHHLFPRLPRCHLRKVSPFVRDLCKKHGLPYAAASFWQANVLTWKTLRAAALQARKATSGAAPKNLVWEAVNTHG

SEQ ID NO: 186243 - protein, 161 aa, Oryza sativa
  Clone ID: PAT_MRT4530_8305C.1.pep
RRRRCSGGFQRWRRGGRGRRRDGDHDGGLPERRRRLERRRRTAGAAASTAARGLTRLRLYRRRETKARVATGSGGLGDPFKGVGRLRRRPTATGDGEGKLRLGGKRPIRIELESTDFQSDLEDDSKREKVEEISGNISPQLISPEKERRGRIWKETTARLG

SEQ ID NO: 186244 - protein, 466 aa, Oryza sativa
  Clone ID: PAT_MRT4530_83060C.1.pep
MPPAIPTATMPASPKEAQSRAGAGVRMISSEELRAHASRDDLWISISGDVYDVTAWVPHHPGGDIPLLTLAGQDATDAFAAYHPPSARPLLGRFLVGRLEDYTVSPASADFRRLLAQLSSAGLFERVGPTPKVQVAGMLLLLCAALYCVLACASAWAHLLAGGLIGFIWIQSGWMGHDSGHHRITGHAALDRLLQVLSGNCLTGLSIAWWKCNHNTHHIACNSLDHDPDLQHMPLFAVSSKLFGLWSYFYQRTLVFDAASKFLISYQHWTFYPVMCFARINLLIQSAVFLLSSRKVPQRGLEIAGVAAFWVWYPMVVSCLPNWWERVAFVVASFVITGIQHVQFCLNHFSSEVYVGPPKGNDWFEKQTAGTLDIQCSPWMDWFHGGLQFQIEHHLFPRLPRCHLRKVSPFVRDLCKKHGLPYAAASFWQANVLTWKTLRAAALQARKATSGAAPKNLVWEAVNTHG

SEQ ID NO: 186245 - protein, 157 aa, Oryza sativa
  Clone ID: PAT_MRT4530_83061C.1.pep
TTTWWLRSSCGCRRRASSGAAPSAGAGAASPPPTTSSPPTPAAGRCSSSATRGPTTSRCATTNSWSPPPRSPPSQPSTTGRHGVPAISAAQPLAASSSTGTTSGSTLPPSTSTGRPASTACCATGRAPTTSSPPAPARRGGSAPSPTSNAGLAPSPP

SEQ ID NO: 186246 - protein, 57 aa, Oryza sativa
  Clone ID: PAT_MRT4530_83062C.1.pep
GTGGNRPALLGGNRYCVSAPLRLRPALICASSSIFPAADHCGPAAQRHGGPSTLRGL

SEQ ID NO: 186247 - protein, 72 aa, Oryza sativa
  Clone ID: PAT_MRT4530_83063C.1.pep
MAKLAMCFFICAVFLLVVTTPGLPRLAGSVPLGRRWLQDSAVVVSGGRLTPAITAAYNGTKRLSPANLRVHV

SEQ ID NO: 186248 - protein, 47 aa, Oryza sativa
  Clone ID: PAT_MRT4530_83064C.1.pep
SLAHLYNFGRWTSIRITILRCRIDFLHSYIYNVSYISRYPNYELFFV

SEQ ID NO: 186249 - protein, 52 aa, Oryza sativa
  Clone ID: PAT_MRT4530_83065C.1.pep
QVITKKRRKNIKTKKIIRFNLLPSSLKILSYLNLNLNLSEGTERRLPSPPAR

SEQ ID NO: 186250 - protein, 455 aa, Oryza sativa
  Clone ID: PAT_MRT4530_83066C.1.pep
MARLPPLAVASGALLLLFVSVSPCRAAAGGGPSSVVLPVSKDDATQQYVTMFRQRTPQVPVKAVLDLAGTMLWVDCDAGYVSSSYAGVRCGAKPCRLLKNAGCAITCLDAVSAGCLNDTCSEFPKNTATSVSTAGNIITDVLSLPTTFRPAPGPLATAPAFLFTCGHTFLTQGLADGATGMVSLSRARFALPTQLADTFGFSRKFALCLPPASAAGVVVFGDAPYTFQPGVDLSKSLIYTPLLVNPVSTAPYGRKDKTTKYFIGETTIQLKGRVWREKSTDYFIGLTGIKVNGHTVPVNATLLAIDKKGVGGTKLSTVSPYTVLERSIHQAVTDAFAKEMAAIPRAPAVEPFKLCYDGRKVGSTRVGPAVPTIELVLQSTGASWVVFGANSMVATKGGALCLGVVDAGTEPQTSVVIGGHMMEDNLLEFDLEASRLGFSSYLPSRQTTCNNFRLG

SEQ ID NO: 186251 - protein, 420 aa, Oryza sativa
  Clone ID: PAT_MRT4530_83067C.1.pep
VAQKLPDRRQEGQEGQGRRPAAGAAVAGAAVCQGEAAVELPEAAGAGHHQHVVALLLRRARRLAGAGGGEARPPLTSPRRTRPPRPRRSRIQAAFRSYLARKALCALRGMVKLQAMVRGQLVRRQASTTLRRMQALVAAQRRARAERLCLLDDDKDKHARSPRPPTTTSRRSSPQHHRSRKPLEVVDRGSEENVRVVEVDNGGGGGGAARGCGRRSTCGAAAAAAKGELYQKVSPTPSALTEASARTMSGRLDDYSFSAAASEASGRHHSVPAAAVAGGDHAAALQQLFPKNYMSNTESSRAKARSQSAPRQRHDQPISAAASPSPSPSCGEWTTTPGDRRRRASLDPRDLAAPASAAGVGVGARMERCASQARASASASAACPWAVRMDRSTASLAGGSDGGSSAATAVTAATAARVTS

SEQ ID NO: 186252 - protein, 1738 aa, Oryza sativa
  Clone ID: PAT_MRT4530_83068C.1.pep
MREEGLQWSITVVYGPQLEAEKIEFLAELETLQPTMKPAWMVIGDFNFIYKISDKNNDRLNRRMIQRFSGLLDKIQVKELHLPGRRFTWAGDGTNPTQTKIDRAFITTDWDFMFGEAHLFPLSSTCSDHAPLFLVGKEKRSKPPQFRFEAFWLKIPGFLEVVQESWHRSIFATNPLAVFRIKLCRLACDLKRWNKSQVGDIALQFAVATVVIFQLDVAQESRSLSDKERLLISNLKSRVLGLAVLNKIKIRQRSRLTWIKEGDVNSKFFYLKANSRRRKNFIQSLQTPTGIAVTNQDKEEELYRFYKERLGTNFQRSLLHRTKKQSLFIKVDIAKAFDTVCWPYLLDVLQQFGFCTQWLNWISNLVATSSQILVNGAPGQQIFHARGLRQVSGLHTNGAKTEIFPIRCEEVDLASLLQAFPGIVKSFPCKYLGLPLHYRKLRKIDFLPLIEKIGERLPTWKGRFFTSSGRETLVKTVLSSMPIHHLSSLHMPKWVFKRIDRFRRSFLWKGEDPDHTNPGSCLVNWKTVCRPKRIGGLGVPDLERFSRILRLRWLWFQWKDEDKPWVGMKVPCDDTDRRLFQAATTNVLGDGKKMNFWHDHWLQGKCPKDIAPLCFRLAKRKQSWEVYGKKFNYHKVLIIFPRIGLLWVATQMLGLRGSASKDRDRGRRGGDEASPGHGSPWTPSSSASSPRSPFAGGGGGRPLRLVYCDERGRFRMDPEAVAALQLVKGPVGVVSVCGRARQGKSFILNQLLGRSSGFQVASTHRPCTKGLWMWSAPIKRTALDGTEYSLLLLDTEGIDAYDQTRFKTRQQFVLNEFKGTYSIQIFSLAVLLSSMFIYNQMGGIDEAALDRLSLVTEMTKHIRVRANGGKSTASELGQFSPIFIWLLRDFYLDLVENDRKITPRDYLEIALRPLEGRGKDISSKNEIRESIRALFPDRECFTLVRPLNSENELQRLDQIPIEKLRPEFQAGLDELTRFILERTRPKQVAGTVMTGPVLAGVTQSFLDAINNGAVPTISSSWQSVEEAECRRAYDSAAEVYLSAFDRTKQAEEDALRDAHEAALRKALEAYGTVAVGTGTSRMHYEKVLSNFCRKTFQEYKRNAFLEADKQCSNMIQIMERKLRAACSAPGVKVSNVIQTPMVMVNDICHHPAQLPCDTPKYLEGPILDLCLKLVNEAESERTSFALKYRSNEDQLELLKRQLEANEAHKSEYLKRYEAAISEKQRVSEDHSAHLANLRTKCSTLDERCLSLSKELDLVRHECTDWRVKYEQYVTQQKAEQDGFISQLATLESRYSSAEGKLGAAREQAAAAQDEATEWRDKYETAAAQAKAALERLASVQEQINKIAHERESGIRAEFASHLEEKEEEMKRLVAKIRHAESEESVLAERLQVAESKAQSHNKETAALKDEIRELTGKLEFLRDRAVSFEKQARMLEQEKNHLQEKFLSECKKYDEAEERYKAAEREAKRATELSDVARTEAVTAQKEKDEAQRLSMEKLAVIERIQRQVDRLEQEKVNLLDEVQKMHKSETDALSKVALLESRVAEREKEIEELMIQSNEQRSSTVHVLESLLSTERAARAEANKRAEALSLQLQSTQSKLDVLHQELTSVRLVETALDSKLRTTTHGKRLRENEVGMESVQDMDIDRPERSRKRSKSNTSPLKHFQSEDGGSVHMGEDSVTVSTDTKDGNPDGYKKLTIAKLKEELTKHGFGAQLLELKNPNKKDILALYKKLVLGK

SEQ ID NO: 186253 - protein, 51 aa, Oryza sativa
  Clone ID: PAT_MRT4530_83069C.1.pep
GEGGIGHHRNRWPAPAAARGLGRPLLVCSMVVEVAASVGVQFSVVANHRAE

SEQ ID NO: 186254 - protein, 50 aa, Oryza sativa
  Clone ID: PAT_MRT4530_8306C.1.pep
RDSFLKCINIMTLCDTEPRTARISMSGLSRAYCWTHPPVRSATYSYVRRC

SEQ ID NO: 186255 - protein, 100 aa, Oryza sativa
  Clone ID: PAT_MRT4530_83070C.1.pep
TSGGGGQSLLSCLWGRVETAPTGLAKPAATMEKETTPAPVKKAEIAMTSSPSCAANMTAIPAGIQSTHADNYLRVQGQKWCNLLTDRASTYVHSSAGGGS

SEQ ID NO: 186256 - protein, 85 aa, Oryza sativa
  Clone ID: PAT_MRT4530_83071C.1.pep
MGWESGPFGAWICGKFACGEASFKQDIDKGSVNGSQRSKNQGKNSTKGNRKIRLEESKDLILGWIPQEREEHLKNAVKINNVGPK

SEQ ID NO: 186257 - protein, 110 aa, Oryza sativa
  Clone ID: PAT_MRT4530_83073C.1.pep
SNAADDPCTALGLVAEAAAASTKRPSRKQARSHSSEEDFAGERLAASPLEEVVQDGARVRRRRPLPPWLLSLVSSWGHPLLSFVSPGGGGTPSSSTSSGMNLYHPEEISE

SEQ ID NO: 186258 - protein, 96 aa, Oryza sativa
  unsure (1)..(96): unsure at all Xaa locations
  Clone ID: PAT_MRT4530_83075C.1.pep
GSYATRLVLTCPPTSYSMFXKGLCPDAYSYAKDDQTSTFTCPAGTNHRVDFCPPTSGVTAGDDDGVRGHRLPQLSCRICAAAAVVLLPPQATASRG

SEQ ID NO: 186259 - protein, 112 aa, Oryza sativa
  unsure (1)..(112): unsure at all Xaa locations
  Clone ID: PAT_MRT4530_83076C.1.pep
VVFMLSAVLSFSKTWXEVSGSSAXKDVAKQLKXXXKMVMPGHRESNXQKELNRYIPTAAAFGGVCIGALTVLADFMGAIGSGTGILLAVTIIYQYFETFEKERATELGFFGF

SEQ ID NO: 186260 - protein, 328 aa, Oryza sativa
  Clone ID: PAT_MRT4530_83077C.1.pep
MGSATRIVRMALHAFFSHYHPAASAAALLALPFSAAALVSRSPALLQLAAPPRAILLLQPALSRRLRRVFVAAGFPPASQLLFLLNHRLSQSIVSFLATLPLAMSFLLLAKAYAVHAVVAARGRGARRCVGGAAPSMASLVRASYPAMARTQLASFGALLSAHAAVFAALLAAFNAAEALRLGSDGRAVLALSAAGVIVYSVALANAAAVCNLATVVAAAEGGRGGARAVLRAVLLVRGDAATAVAVALPATLATAAVEGLFQLRIARPYAVTGELTSSMVCEGFLIAYIYSIICVLDTVITCMVYQTCKMSHSCDLLELEEKGDLAA

SEQ ID NO: 186261 - protein, 73 aa, Oryza sativa
  Clone ID: PAT_MRT4530_83078C.1.pep
MAPGATVGDMGPGGCRKSSLVYEGMTGLPPVSGGRRRWAPLKDRPMLSFQQKARVDPPPRWAERSKENLVKIH

SEQ ID NO: 186262 - protein, 30 aa, Oryza sativa
  Clone ID: PAT_MRT4530_83079C.1.pep
WRRLWSKNGVRRRVVRSALPGQRCLRPRGQ

SEQ ID NO: 186263 - protein, 76 aa, Oryza sativa
  Clone ID: PAT_MRT4530_8307C.1.pep
MAAKAISSPVPVEWYPTLAVLMVSVGLMLTASFFIYEATSSRRSRSLAKEITTAAVASVFLGFGSLFVLLASGVYV

SEQ ID NO: 186264 - protein, 138 aa, Oryza sativa
  unsure (1)..(138): unsure at all Xaa locations
  Clone ID: PAT_MRT4530_83080C.1.pep
ATMAEYHHQDQVVYTPGPICQPVLGYPMYPLPCCLALVKRQCVGRGTGGGADHVRRDCCRQFCGVDDSWCKCXAISHMLRGMYRELGAHDVGHPMSDVIRDCRRGYLKRASESLPAICHVYIHNGIRGVCYWLSRSVY

SEQ ID NO: 186265 - protein, 63 aa, Oryza sativa
  Clone ID: PAT_MRT4530_83081C.1.pep
FLLYFQKRTNSKTDSNMDLYFQKRKNLKTDPYTDNVPKYHKKHFENHELQLGVRSSQISMRVF

SEQ ID NO: 186266 - protein, 144 aa, Oryza sativa
  unsure (1)..(144): unsure at all Xaa locations
  Clone ID: PAT_MRT4530_83082C.1.pep
MLRPLLQPARRTPKTHRSSPSPRSSARHTTCSTGRLVDDYADYHRDPKRPRGEAAADDPEPVSDGDFGASLHSKLNLDDVAALQAQFAETTIDLMVKAKXWFPVGDDSEPVDDPGGGAGVPLVRRRQGVAPPRPALGRPPLEPV

SEQ ID NO: 186267 - protein, 42 aa, Oryza sativa
  unsure (1)..(42): unsure at all Xaa locations
  Clone ID: PAT_MRT4530_83083C.1.pep
APPPAXXXLGXXXGVXGVPGALVLGXFSXERLPVGXAXVKGG

SEQ ID NO: 186268 - protein, 189 aa, Oryza sativa
  Clone ID: PAT_MRT4530_83084C.1.pep
MAEDYDVWKKVAQPYVIPEQIDTIALKTYFNNNCKARNILLSEIFCTDFYRVSHLKTANEIWSALKNFRQGTTNIKELRRDLFKKEYIKCASSSNSIVLALIHAMSDEQLEQFEDEDLALAANKISQAMNNVRYRKKYGPAHCFECGGLDHIHSHCPKLGRGKKEDNGEEKTKDNKPKSMFVGISYDHR

SEQ ID NO: 186269 - protein, 676 aa, Oryza sativa
  Clone ID: PAT_MRT4530_83085C.1.pep
MANKFTTKPHVFDGSDFAYWCDKMQSYIMAEDYDVWQKVSQPHVIPEQIDTIALKTEFNNNCRARNILLSGISRSDFDRVSQHKTANEIWNALKNIHQRTTNIKELCRDLLKKEYIKFEMKPGEALDDYLGRFNKILSDLRSVDSAYDMKVTSLQESVDMSTLTLDSLYTKIKTHQMNILSRKVDSKSSALVSSATSLDVGASSSNSTVLALIHSMSDEQLKQFEEDLALAANKISRAMNNLGRGKKEDNGGEKTKDNNPKSTFKGKKTKENLKKMFDQVLLMRKTHTGLEDLLNFSAVYAAFEPLTNVDGESEDEDKGKNISGVCFMARGESNSECEDNDLKQQHGVLDCSTCTPNKMKLKDALGHVEYMEEIVKINEVLSSPKCRKSKGFCKVNDKFELKNVALVEDLKYNLLLVSQIVDENFEVHFKKTGSKVFDSCGDFVLNISRYGRVFKADFENLVSPVKTCLVAKFKKDVMLWHRGLGHADFDHLTRLSGLDLVCGWAKLKKDLDLICTPCRHAKIVVSSHAPIDSMMTDAPGQLLHMDTVGPARVQSVGGKLYVLVIVDDFSRYSWVFFMATKDETFQYFHDLYLRLDLEFPGSLKRIRSDNGGGFKNASFEQFCNEKGLEHDFSSPRVPQQNGVVERKNRSLVEMARTILDEYHTPRKFWAEAVNTS

SEQ ID NO: 186270 - protein, 634 aa, Oryza sativa
  unsure (1)..(634): unsure at all Xaa locations
  Clone ID: PAT_MRT4530_83086C.1.pep
RLISVRPRSVEFEARNILLSEIFCTDFYRVSHLKTANEIWSALKNFRQGTTNIKELRRDLFKKEYIKCEMKPGEALDDYLGRFNKILSDLXYVDFAXDINYTQSEDFRHFLNGLDMSIWEIKVTSIQESVDMSTLTLDSLYTXLKTHEMNILSHKVDSKSSALVSSSTSLDVGASSSNSIVLALIHAMSDEQLEQFEDEDLALAANKISQAMNNVRYRKKYGPAHCFECGGLDHIHSHCPKLGRGKKEDNGEEKTKDNKPKSDHRQCSKGRRLXENLKKMFDQVYAAFEPLSDVDGESEDEEKGKNISGVCFMARGESDSECEDNEVRSFDEVILIXSAKNKKCEKMYRKQEFIIESLNSEISRLKYLIPNDDECKNYELLMHEISKIRDVIVTHDFKNRSALALGFVLHTRTLNELFLIKKLLKKYQIAFHASLMFNMICAKKVKXEHGVLDCSTCTLNKMKLKDALGHVKYMEDIVKTHEVLSCPKCRKSKGVMGDCENYVILXKVSYLKSSLKRXFFDGKKQLNMILDQSKVTSYNRALVATKENVWIVDSGCSRNMAGESIIFGDAFTSAVLATGLVKVNDKFELKNVALVEDLKYNLLSVSXIVDENFEVHFKKTGSKVFDSCGDSVLN

SEQ ID NO: 186271 - protein, 77 aa, Oryza sativa
  unsure (1)..(77): unsure at all Xaa locations
  Clone ID: PAT_MRT4530_83087C.1.pep
EKWFRWLALNHKVXGIYKEIGAPHFWPPIAQVFPGFPKRDFXRAAANLPGFFKVGIPHWTSGVCHWVGYPKTPKNGP

SEQ ID NO: 186272 - protein, 110 aa, Oryza sativa
  unsure (1)..(110): unsure at all Xaa locations
  Clone ID: PAT_MRT4530_83088C.1.pep
HLTCTDITGTFGYLAPEYFSHGKVNEKIDVYAFGVVILEIISGRRPIRTGCSKGQESLVXWAKPLLSSGEIKQLVDPFLGNDYDCDEMERMTLAASLCTRTSFHFRPEMS

SEQ ID NO: 186273 - protein, 36 aa, Oryza sativa
  unsure (1)..(36): unsure at all Xaa locations
  Clone ID: PAT_MRT4530_83089C.1.pep
XPVTEGRFXRGRTVSLRTAAHAESMTHRTSSVHITM

SEQ ID NO: 186274 - protein, 66 aa, Oryza sativa
  Clone ID: PAT_MRT4530_8308C.1.pep
WFLNFGGFFFFLYFFCFIFFNSNRQTLQLKKGDLRFHPNAGRIKKNYWNSYFKGAWDSGTCTLDRV

SEQ ID NO: 186275 - protein, 489 aa, Oryza sativa
  unsure (1)..(489): unsure at all Xaa locations
  Clone ID: PAT_MRT4530_83090C.1.pep
MASSAVGAAVAAVAVLLLLAPGAEPIGLWLPPPTGGGGRLGGAAAPGRFHVSFTFDNAIPMFMSRTHNVHETFGPHKKAIGTSADHRQFKQRYYEFLDYYRDPKGPIFLYICGESSCNGIPNSYLAVMAKKFGAAVVSPEHRYYGKSSPFESLTTENLRFMSSKQRLIDLAALNLSSITLIYGYQNVKSKDPTMSHCWAVDGXSYLLITCSSYQPYVQKAMSTRQCSCHLXTSMXTQIIRTVGCSKHSHGTKHYPQDCGNNXLKHYYGDDLCHLSITLQVALXSPILQKITMICKMLLNYVQDKLSSVASYDQEYLKNTTPPPAESAYRLWWYQVCSEVAYFQVAPKNDSVRSAKIDTRYHLDLCRNVFGEGVYPDVFMTNLYYGGTRIAGSKIVFANGSQDPWRHASKQKSSKELPSYLIECSNCGHCSDLSGCPQAPSHIEGDSSNCSSPEAVNKVRKQIVDHIDLWLSECQEQGCSQAPPFCRRLP

SEQ ID NO: 186276 - protein, 92 aa, Oryza sativa
  Clone ID: PAT_MRT4530_83091C.1.pep
MREQEASAPCSGDVDFACLKPPRRLRIPVAGLLEHFKLIGCFDNSSVEFMTVAARGLVFFNVLVVSTEIVTVGWYSGKDQRKLPLNCYFRTG

SEQ ID NO: 186277 - protein, 212 aa, Oryza sativa
  Clone ID: PAT_MRT4530_83092C.1.pep
MDNFFAPVFTMGKYYTQGDKVLMPLAIQVHHAVCDGFHVGRMLNELQQYCDEWQGGAWHDRFPDWKAGSERNAINGAGVGGGPATASGGGGGSGTARAQRAKLATAAALRGGAKEEAGGRSDGLGWFVRAQGGWRREDSARDRPAAAVKQSDGDEKGKRTDSEERMADGGAWLPAAARTAARRGRGKERCDRGDKSREEASSSPTGEARRRW

SEQ ID NO: 186278 - protein, 88 aa, Oryza sativa
  unsure (1)..(88): unsure at all Xaa locations
  Clone ID: PAT_MRT4530_83093C.1.pep
QGPPCAVLXXPXPGAAPPAGSRPAPGRPXGGPAXAPAPPGPQSASAAAGSAPPPARPPXADIVPAAPRPRPXVAPPVPRRPPFRSGEP

SEQ ID NO: 186279 - protein, 425 aa, Oryza sativa
  unsure (1)..(425): unsure at all Xaa locations
  Clone ID: PAT_MRT4530_83094C.1.pep
MPRGLPRKRKREGEGGRARPDRTAYGGATAPASGSEPEGGDGAGGKRRRRRRGRRRASDGVRRRRRERHGAGAEGEASDCGGASGRSEGARGGAQPCARRRRKGRHGAGAKEEAGGRSDGLGWFVXSSRWVAARGFGAGPTGGGGETERRRREGEENRQRGEDGRWRRVVARGGKNSSTAREGKGEREDGAAQWRRRDVLGRGGDGQRRRSRRCSVPRSMRPRGWIGAQGVVFIGEDRXEGACELALGXRPQAASTLSWVTRKRRRRGCVGRRRRWIGRSELNAGRGRVGTGERARSRWGRRGAAAASAALPLEQEAKELRQGARYPGREKAKGGGKGXLCSFRFGRKGMRTSRASRFWMHAAWGAGPGGHGGRRGKRRPRVAMAAPRRPATCVGTRESKAAAGILGGVGGKRRRERERERERER

SEQ ID NO: 186280 - protein, 155 aa, Oryza sativa
  Clone ID: PAT_MRT4530_83095C.1.pep
MDNFFAPVFTMGKYYTQGDKVLMPLAIQVHHAVCDGFHVGRMLNELQQYCDEWQGGARLPQLGLSLPQRIPCPLEDGEFVPPLVPDPSQIFKIKNPQEDVSAADLGANRNLSMKILHPQSKIVQIRRHYSTILKSDIQPHAARRLSVAERLNPPM

SEQ ID NO: 186281 - protein, 227 aa, Oryza sativa
  Clone ID: PAT_MRT4530_83096C.1.pep
MAAASQLLATATCLLALLLAAGWMVAAADARRLLDDVEYTGTAMPPAPAMAPVAEPGMDVHGGRMMLAEGRGLLAANPWVSFTSFDLNVANMDNFFAPVFTMGKYYTQGDKVLMPLAIQVHHAVCDGFHVGRMLNELQQYCDEWQGGAWHDRFPDWKAGSERNAINAGWKLWPFAHLVTYGLVPVEQRLLWVDCVELIWVTILSTYSNEKSEARNSEDASTSNASNV

SEQ ID NO: 186282 - protein, 108 aa, Oryza sativa
  unsure (1)..(108): unsure at all Xaa locations
  Clone ID: PAT_MRT4530_83097C.1.pep
QKMDQPQVYSSXFIVHTKINPVRCIPELDKICFFDKNKKNTNMTKNHLVYKFKKVTKTKYKYDKNTYFEKFKNHLLQAITNCIKAKIKKGTEFVSLSSSVKTRYQQAK

SEQ ID NO: 186283 - protein, 511 aa, Oryza sativa
  Clone ID: PAT_MRT4530_83098C.1.pep
MAAKAPLVLRLCLFLCISLSLLLLSSPQRVTSLSLDADVDDHYYHYDGDEDDDNYYHDDDDDVFSGRPVRRIYDGDDDENYYRNDEVDFSSRPARRLYDGGAVMPEKYNVLNGNSSNSSSGSAFCRLLSLQILDLSNNKLTGKLPDCWWNLQSLQFMDLSHNRFSGEIPAVNTSYNCSLESVHLAGNGFTGVFPSALKGCQTLVTLDIGNNNFFGGIPPWIGKGLSSLKILSLRSNNFTGEIPSELSHLSQLQLLDMTNNSLTGSIPTSFGNLTSMKNPKIVSSAGSLDGSTYQDRIDIIWKGQEIIFQKTLQLMTGIDLSGNSLSECIPDELTNLQGLRFLNLSRNNLSCGIPENIGSLKNLESLDLSSNEISGAIPPSLAGISTLSTLNLSYNHLSGKIPTGNQLQTFTDPSIYSHNSGLCGPPLNISCTNASVASDERDCRTCEDQYFYYCVMAGVVFGFWLWFGMLLSIGTWRYAIFGFVDGMQCKVMQKVSSVDKFLSRGNTDQYL

SEQ ID NO: 186284 - protein, 98 aa, Oryza sativa
  Clone ID: PAT_MRT4530_83099C.1.pep
YNNRKGDEKGVPRPSADESVTLRDGRGGGRRGRGGKAEAQLLRGRRLPHPAQVNPSPPSLSLSVLSPRGGGGGSFLGFRFTGAALPPPPPPRTLQVPA

SEQ ID NO: 186285 - protein, 87 aa, Oryza sativa
  Clone ID: PAT_MRT4530_8309C.1.pep
RLLFFFFFLLLDVFFFVFGAPTFFLKTLTHGKPTVPIGDQPFSKSAEDSSRENTKACGENLVVTGENFLKSGEHLYAMLTPRSRQTI

SEQ ID NO: 186286 - protein, 39 aa, Oryza sativa
  Clone ID: PAT_MRT4530_830C.1.pep
LFIKNQSYGYLPHLHEAVLDDGAGQCHARIPFPDGLKYR

SEQ ID NO: 186287 - protein, 619 aa, Oryza sativa
  unsure (1)..(619): unsure at all Xaa locations
  Clone ID: PAT_MRT4530_83100C.1.pep
MSTSASPSATPSAECAEHLSNLVAIPSLSHEHQYFLGPIDNSDPSEFIIAETNRIPFRLANPNLGHWKNTLMSWPSLEKTAPEKSWPVWYKRVSANKQVHWDELGIGQALALTLANSAKDEPLMASTACFWSNTLNAFLFNQGPMTPTLLDIAMITGLDGEWKQHIFHQPASMYMTDLFPDDIPQXDIEYALGLIPNGGGLAPPXVGYHAPRTSSLLQGQLGEPADAGRKRKTKASAVDPLALAPKKKAKKKKSKPTDDLPTLDPSIKQALDEEAIEDVDQVAAELSDIVEKTPSASPKQTPPTPAAPAHFSRVLADLFSFDIKDYFNEEAEEETTSKTLAPLDEDVKRTLEDISHRLESSLDNLVDDCGSIRARFVEIQALVPDDLANTISPAVYLEQHQFKLENAKQRIADRREKNDIEATIQANRQLVHEEKAKLDQLSVGPVQSNIDRLEARKIDLIAQLEECNAELDLEKQKVRRGTRVRTASRTHADGVGGGGEDGGVGRDAHGGEDSRTHGAAARTHADRGRTAARTTACTARTAARTEVKLQDLPVVLASCCVLHNICETCGEELEPELRYELVDDETSPETPLRSEAAEHDSDNITHNLLYRGFAGTTFF

SEQ ID NO: 186288 - protein, 841 aa, Oryza sativa
  Clone ID: PAT_MRT4530_83101C.1.pep
MPSSASLFAAPSAEYAEHLSNLVAIPSLSQENHYFLGPVGNLDPTEFIIGETNRIPFRLANLVLGHWKNTFKSWPSLEKTSPEKSWITWYKRMSTSKKVNWDEIGIGQALDLTIANSAKDEPLMAAATYFWSNTINAFLFNQGPMTPTLIDITMITGLDVTSSANPMTYMGQGSITPREHVAFLLMWLEKFLFCGSSCGPTTNWQFVAEALESKKQFPLGKILLGYLYQVLNNATAKIAVGSVVGAGGPWWLLQTWLNLMVMKFVNRPSVTEAKFPRLEPIIEDDGEECTHHRCTSYGEYASTPADAGAKLSAELLKDWFYSFYEGFRKKSRIWFPYEDSALLEHPSDFRFKDINHERYQKSKEVFSAAISPCILPVGIHQGRNIQVSYEFYHPMSAAKQLGMGQLPIGLFFADKIQCRGEISLALMMDRLLNLQGPPLGSIENIELATFRSRSFDIWRGEWKLHLFHQSTSMYMTDLFLDIIPQTTEFSPPHQSNSGRDIEYAPGLIPNGGRPSPPVIGYHAPKTSSLLQGLIREPADAGKKRKTRASAVDTLAPTPKKKAKSKKTKPTDDQPALDPSVEQALDEEEIREDPPPPPPPSPVQQPSSARTPSATGSHLVEEEEQPAAPTILALADLFSFDIKDYFDETEEETTSKDKAPLDDTVMKTLKDISLWLESSLDNLVADCSSIRARFAEIQALIPDELANIITPAVYLEQHQFKLEKAKQHQLEARKIDLIAELEECNAELDLEKQKLADLSSVVKEQKSRLRSAIKNVADMTKSLKVIPGTDAQRHPSHRRSRSNQATGFVGYLALSVSMTLCVIDSRNFCNRLRNSGSLFNSS

SEQ ID NO: 186289 - protein, 47 aa, Oryza sativa
  Clone ID: PAT_MRT4530_83102C.1.pep
ANMPKPGVVFSGPKVADPEKPREKGFMVYSLGKPLYAWVKNKPPVAK

SEQ ID NO: 186290 - protein, 293 aa, Oryza sativa
  Clone ID: PAT_MRT4530_83103C.1.pep
MATDVAATEPEVAAEEAAAAAPETTATAGDSKPAKEAKAKKAAAPRKARSTATHPPYAEMISEAIATLKERTGSSQYAIGKFLEDKHKDHLPSNFRKQLLVQIKKLVAAGKLTKVKNSYKLPPTRAPAAAKPKAKPAAAAKPKPKPKAAAKPKAAAKPKAKAPAKSKAAAKPKAAAKPAAKPKAAAKPKSPAKPAAKPKAAPKAKAKPAAKPKAKAAPKPKAAVVTKTKATSAPARRPAKAAKTSAKDTPSKKAAPAAKKPAAAAKKAPAKKAAPAKKAAAPARKVPARKAKK

SEQ ID NO: 186291 - protein, 39 aa, Oryza sativa
  Clone ID: PAT_MRT4530_83104C.1.pep
YQPAQQKYLPESTGGERDTPSASTEIHREKLGKNPVAAR

SEQ ID NO: 186292 - protein, 69 aa, Oryza sativa
  Clone ID: PAT_MRT4530_83105C.1.pep
LIKWLLEVKAPRIVYVSCNPATCARDLDYLCHGVEEKDLKGCYELKTVIPVDMFPHTPHIECICVLELC

SEQ ID NO: 186293 - protein, 173 aa, Oryza sativa
  unsure (1)..(173): unsure at all Xaa locations
  Clone ID: PAT_MRT4530_83106C.1.pep
GSPGCRNRTRVLLMDKQLGKXLCYXQFPQRFDGSXHDRYANRNTVFFDIHMKGLDGIQGPVYVGTGTVFNRQALYGYDPPRAEKRPKMTXCDCWPSWCCCCCCFGGGKRGKSHKNKKGGGGGEGGGLDEPXRGLLGFYKKRSKKDKLGGGAASLAGGKKGYRKHQRGFELEEI

SEQ ID NO: 186294 - protein, 1078 aa, Oryza sativa
  Clone ID: PAT_MRT4530_83107C.1.pep
MDTASVTGGEHKGKEKTCRVCGEEVAAREDGKPFVACAECGFPVCKPCYEYERSEGTQCCPQCNTRYKRHKGCPRVEGDEDDGGDMDDFEEEFQIKSPTKQKPPHEPVNFDVYSENGEQPAQKWRPGGPALSSFTGSVAGKDLEQEREMEGGMEWKDRIDKWKTKQEKRGKLNRDDSDDDDDKNDDEYMLLAEARQPLWRKVPIPSSKINPYRIVIVLRLVVLCFFLKFRITTPAMDAVPLWLASVICELWFALSWILDQLPKWSPVTRETYLDRLALRYERDGEPCRLAPIDFFVSTVDPLKEPPIITANTVLSILAVDYPVDRVSCYVSDDGASMLLFDTLSETAEFARRWVPFCKKFTIEPRAPEFYFSQKIDYLKDKVQPTFVKERRAMKREYEEFKVRINALVAKAQKKPEEGWVMQDGTPWPGNNTRDHPGMIQVYLGSQGALDVEGSELPRLVYVSREKRPGYNHHKKAGAMNSLVRVSAVLTNAPFILNLDCDHYVNNSKAVREAMCFLMDKQLGKKLCYVQFPQRFDGIDRHDRYANRNTVFFDVSTAFFSGVRASRRDINMKGLDGIQGPVYVGTGTVFNRQALYGYDPPRPEKRPKMTCDCWPSWCCCCCCFGGGKRGKSHKNKKGGGGGEGGGLDEPRRGLLGFYKKRSKKDKLGGGAASLAGGKKGYRKHQRGFELEEIEEGLEGYDELERSSLMSQKSFEKRFGQSPVFIASTLVEDGGLPQGAAADPAALIKEAIHVISCGYEEKTEWGKEIGWIYGSVTEDILTGFKMHCRGWKSVYCTPARAAFKGSAPINLSDRLHQVLRWALGSVEIFMSRHCPLWYAYGGRLKWLERFAYTNTIVYPFTSIPLLAYCTIPAVCLLTGKFIIPTLNNLASIWFIALFLSIIATGVLELRWSGVSIEDWWRNEQFWVIGGVSAHLFAVFQGLLKVLGGVDTNFTVTSKAAADETDAFGELYLFKWTTLLVPPTTLIIINMVGIVAGVSDAVNNGYGSWGPLFGKLFFSFWVILHLYPFLKGLMGRQNRTPTIVVLWSILLASIFSLVWVRIDPFIPKPKGPVLKPCGVSC

SEQ ID NO: 186295 - protein, 115 aa, Oryza sativa
  Clone ID: PAT_MRT4530_83108C.1.pep
MATRTAVARVVAPHQPAWAAAVLARRMEGGRRVARYFSDGTGRVLSEEERAAESVYIQKMEREKLEKERRKADKDKADAAKRAAAAKGDKVKLKTNQLAGLDLLQLRSIWLISGL

SEQ ID NO: 186296 - protein, 253 aa, Oryza sativa
  Clone ID: PAT_MRT4530_83109C.1.pep
MLMPVPELTPPETTTTRDWSELPVDVLSVVFAKLGAAEILMGAGIVCSSWLHAAKLPHLWRCVDIPQVVRNDAVCCAMAKVAVDRSDERLEVFKAMYFVDDELLKYIGHRSPGLKSLCLDSCSMVSNTGLTQLMAMTPLLEDLVLRGGLDLSDEFDDPLVIPTMHQLRQIALGSLYISRKTLTKFVDSCPHLELLDASECVAVDVVDDALRAKCARIKTLKLPSYSSATDAMATLDQLYYLADDDDEFFTAYY

SEQ ID NO: 186297 - protein, 67 aa, Oryza sativa
  unsure (1)..(67): unsure at all Xaa locations
  Clone ID: PAT_MRT4530_8310C.1.pep
AWCCSPPCILPTEALLXLDNTIFAYLRKQLFLHTASFFLXXXXIVIFVRLFSQAQVSVAXQGFVTNF

SEQ ID NO: 186298 - protein, 71 aa, Oryza sativa
  unsure (1)..(71): unsure at all Xaa locations
  Clone ID: PAT_MRT4530_83110C.1.pep
KKEEKKEREKKXXKKKKKKKKKKEKKKKGKKRKKKKKEKKKKGXXXKXXEXKFXXGVXMKKKIMHNIRTNI

SEQ ID NO: 186299 - protein, 110 aa, Oryza sativa
  Clone ID: PAT_MRT4530_83111C.1.pep
SIMNHILACITLNIHKQNPQQQRCHLLLRPNLVAPVPLRVSYVCGRIGSSRDGRSAHLSPALLSEGLWTLGETKQEAITSAKRGGRHGSTREGARSRTYHARRDEERANP

SEQ ID NO: 186300 - protein, 81 aa, Oryza sativa
  Clone ID: PAT_MRT4530_83112C.1.pep
IFNSTTRRDLFQFTTISTLSFIPPLPQKYGCPPTTNKHYKKRCEKHIQPEKKKLTRPPTQEEQKKKNGPPLFTLGKIQQNG

SEQ ID NO: 186301 - protein, 191 aa, Oryza sativa
  Clone ID: PAT_MRT4530_83113C.1.pep
MTAMSSSVTGSMSCTNVAFLTDGVAGDAMHAGPGYDDARPYTVLFHPLTGRCVVRRAADDAAAATAAGTLELGWCEDTDAWAYTQPVSTLAMQGVWRGSPPLCLRAVGSGRPARLATNDAAADAAGCRGDARLLRERRAARAAPGMRRRTGRTIVGRKRKENRGETDILGARRAIWNCLVHYHNLPYHATA

SEQ ID NO: 186302 - protein, 319 aa, Oryza sativa
  Clone ID: PAT_MRT4530_83114C.1.pep
MSLSPFWTLKTDPRYRQVLDPAKKTSLLLFSWGISDTSFQQQREETHYGAFYWTWLLMTSSRRGWWRTRPPAMSSGVDSGGCGHRRRAVAWCGTWMVEDAVAGDELQRGVGVWTAEDAAAGDKLRRGAWAVEDVATGNELWRSVRRGQRRALQVGDKVPARRGPSIAKEVATSDELWRGVWTAENAAASDDLRRGRRRKRAPPQTYLCPAPDTKHHDSSHDTQCLDEESTDGEVPLEGSEELSAEARDYEEVSPGCSRRWKEARNRAIPRRIRHDLEKPTDGARAGGRKRGIGKPAFGERWSSFSFLSAGFATMRASGG

SEQ ID NO: 186303 - protein, 106 aa, Oryza sativa
  Clone ID: PAT_MRT4530_83115C.1.pep
MAQAAVSRSKGQCEAFRSQHAVDDGFLLFLGETSLIHLFCTCIRIICFDLWAWNSKAKSDQTNRSSSQCKVHMGEVINHQTDRSRRICHNSSNHHTRHNLQGRKEA

SEQ ID NO: 186304 - protein, 43 aa, Oryza sativa
  Clone ID: PAT_MRT4530_83116C.1.pep
DLVVDEQTKARGMEGYCVFAHAPDKESANAWADAWADAWADEW

SEQ ID NO: 186305 - protein, 132 aa, Oryza sativa
  unsure (1)..(132): unsure at all Xaa locations
  Clone ID: PAT_MRT4530_83117C.1.pep
KKGFIASSKAVPPVNRVQRDGLRNQRPRSNLSRTDGRDRSGPPRAMDDVSNDISDDVIAGGGSRPRARRRTAARRRKRRTPTGRARLGELTSGLDDGKRXTDDDVGEVEAAAVFGSAVTAALRREMAATSRS

SEQ ID NO: 186306 - protein, 91 aa, Oryza sativa
  Clone ID: PAT_MRT4530_83118C.1.pep
TPAMGGAMVLPNVPKAAQESLTPSLKNFLLSIVSGGVVLVPIVGAVVPVSNLDPVKGTGSSPSPSFTNTPRSLSCIEIMVSLQGCFGDFVN

SEQ ID NO: 186307 - protein, 85 aa, Oryza sativa
  unsure (1)..(85): unsure at all Xaa locations
  Clone ID: PAT_MRT4530_83119C.1.pep
WQTTTDDDVGEVEAAAVFGSAVTAALRREMAATEGWTRCCSSSRSXMXQRRPKAAAAIAVRRGCNSGRRLKTTDRWTPPVRGVPA

SEQ ID NO: 186308 - protein, 76 aa, Oryza sativa
  Clone ID: PAT_MRT4530_8311C.1.pep
MWILLRWDISCMQHAKQAVGLSAAELSTMILRWRLLNLIVENHKIKRRLYTFAFSENSCWAGGLERDCHQCEARNS

SEQ ID NO: 186309 - protein, 39 aa, Oryza sativa
  Clone ID: PAT_MRT4530_83120C.1.pep
IQVLSYYLAFFICFIILFFFFFFCFYFFFFLTTEFCLIA

SEQ ID NO: 186310 - protein, 550 aa, Oryza sativa
  Clone ID: PAT_MRT4530_83121C.1.pep
MQVVYSNSSYTTYNIPTLCYNSMMPRAQLTTFLIVTSFLSTVPYLRAPVHGGVLTSYDVSSLDIMSKIHTDHDATTKASSDFGHIVHATPNGVFRPTFPADIAALIRLSLSQPTPFTVAPRGKGHSSRGQAFAPGGIVVDMSALGDHGHHTSHRIDVSVDRMYVDAGGEQLWIDVLHTALKHGLTPRVWTDYLRITVGGTLSNAGIGGQAFRHGPQISNVHELDVVTGMGEMITCSPEVNSALFFAVLGGLGQFGVITRARIRLEPAPKRVKWVRIAYSDVHPFTTDQELLISKWASGSGFDYVEGQVQLNRTLTQGRRSSSFFSATDLARLTGLAIDTGSVAIYYIEGAMYYDDNTAASVDQKLDALLEELSFVRGFVFVRDASYVEFLDRVGREEQNLRSAGAWDVPHPWLNLFVPRSRILHFDAAVFKGILRNANPVGLILMYPMNKDMWDDRMTAMTPDEDVFYAVGLLRSAVAGGSGGDVEQLERENAAVLELCDLAGGGIGCRQYLPHHASRDGWRRHFGAKWGRVADLKARRLICEGAEWFGL

SEQ ID NO: 186311 - protein, 62 aa, Oryza sativa
  Clone ID: PAT_MRT4530_83122C.1.pep
VWARCLRISPRSPPGTPCSRPGSRVRPAAVGGRRSRASPPPSPCPWWASAERRVVVEKRVVR

SEQ ID NO: 186312 - protein, 275 aa, Oryza sativa
  Clone ID: PAT_MRT4530_83123C.1.pep
MAARMGSKVAAILAILSVLVVHGSCKGHPVNYNVSDASAYGSGWLPARATWYGAPTGAGPDDNGGACGFKNVNQYPFSSMTSCGNEPIFKDGKGCGSCYQIRCNKDPSCSGNIETVIITDMNYYPVARYHFDLSGTAFGAMAKPGLNDKLRHSGIIDIQFRRVPCNYPGLKINFHVEEGSNPVYFAVLVEYEDLDGDVVQVDLMESKSAYGGATGVWTPMRESWGSIWRLDSNHRLQAPFSLRIRSDSGKTLVANNVIPANWSPNSNYRSIVQFS

SEQ ID NO: 186313 - protein, 338 aa, Oryza sativa
  Clone ID: PAT_MRT4530_83124C.1.pep
MGRVLADQAPTGGPCVSFACGSWLDASYSLKPAYRDAIVGTYKGAASTVDFKNHPVEARKEINAWVARATKNLITEVIKPESQSVDTRHVVGNAIYFKGEWLAPFDKSDTAEREFRRLDGSSVEVPFMQRPSGSYHHVACHDGFRVLRLPYKATSDTYNLKLRYSLPSFAMLVFLPDDRDGLPGLLDRITASPEFVDEHLPPGCVPVGRFRVPKFKLAFCHYGIADVLRGLGLRLPFDMFAAEMSGIAVEGDGEDPAMFVSSVIHKVVVEVNEEGSEAAAYTEESDDDLGCSLYDDDYTPPPKLVDFVADHPFAFFIVEERSQAIVFAGHVLDPSEEE

SEQ ID NO: 186314 - protein, 364 aa, Oryza sativa
  Clone ID: PAT_MRT4530_83125C.1.pep
MICCGGEEEETYAPRAASRSRSRRPTPATQYNAGPRKPRGPNAPRSGGPPPKVLSIDVPAISMGELNNITGHFGQSALIGEGSYGRIYRAVLTSGEPVAIKKLDPSVSSDSEADFSAQLSMVSRLKNEYFIRLMGYYLDANRRILVYQFATHGSLHDILHGKKGVRDAAPGPALNWSQRVKVAYGAARGLEYLHEKAQPPIVHRDVRSSNVLLFDGYESKLADFNLTTQPPDGAARLHSTRVLGTFGYHAPEYAMTGQLNQKSDVYSFGVILLELLTGRKPVDHTMPKRQQSLVTWATPRLSEDKVRQCVDPKLGDDYPPKAVAKMAAVAALCVQYESDFRPNMTIVVKALQPLLSKPAGAGGP

SEQ ID NO: 186315 - protein, 90 aa, Oryza sativa
  unsure (1)..(90): unsure at all Xaa locations
  Clone ID: PAT_MRT4530_83126C.1.pep
FQQRQACCSTRPCTIKCTIQYHIGDGCMARIQCISLLVSATHQRTITPAITYCNTIQSTQXFQHTLAHQATSLSPTPPKLVAHPPMVHPI

SEQ ID NO: 186316 - protein, 67 aa, Oryza sativa
  Clone ID: PAT_MRT4530_83127C.1.pep
TKHTTQCNYGGLFILLLGYMEKEQLWWRMSSSKAKESELGTGATHAISVCIPLSQKSHRCARQWFEF

SEQ ID NO: 186317 - protein, 154 aa, Oryza sativa
  Clone ID: PAT_MRT4530_83128C.1.pep
LQPFPFNGNPSPAAATRRPPPAASPLARSGGGEGAAATRRPPPAASPPTKSGGGKGATAARHLPSPLPPDPAEWMVPPQPFASRLVPPPAASPPAGFGGGEGAAAAVAASVEPPPGHRRARERDRDERAERERGERDRDGRGERITLTWLRRLI

SEQ ID NO: 186318 - protein, 573 aa, Oryza sativa
  Clone ID: PAT_MRT4530_83129C.1.pep
MAATSPSQADEEDVGPTWQRQEAKHRQSQLRGNLNVEVPVAAPTGCFAGCFRPSPTSSRSSPPSCNSQADRPASPSLIRSPSAWIRARGQSFASSARHARRRSGDFQYDARSYARNFDEGTDGEASGDEQAGLAAGDTLKYRSFASRLPPSPTPALSPSAAPVGGRRRNPSPAAATRRPPPAASPLARSGGGEGAAATRRPPPAASPPTKSGGGKGATAARHLPSPLPPDPAEWMVPPQPFDRRRLLSCAAAGRPPLATSRLVPPPAASPPAGFGGGEGAAAAVAASVEPPPGHRHGDGGIRGSRRIVLSARSSVVDLEGIASRKSKLEGQRAAASAASAVCGRRSGGGLANGRWRDCSKSCACALLCFAKSFDRPFVSLHRLPIPNVCLPAPFPHRPCRRFSHRRARQRLYLPDEHLGQILVTLSQSLAHGVDEPTTPLSLSPRVSASPCPRASYPIPVPTMTSTPTSSRLTKLASSSVVVLPSIHSISPLSRARSSPPREISLLLMPSTTTTSFFCVASGDTHHRPGLFADARIARFYGSFPGGWLAAELPESRGHALLNLCTGSRIALST

SEQ ID NO: 186319 - protein, 52 aa, Oryza sativa
  Clone ID: PAT_MRT4530_8312C.1.pep
GIIVRSECNFYQVSAIVMMTTSAYAPHYKASCMSSLIPSNISMSLSAQGYKS

SEQ ID NO: 186320 - protein, 113 aa, Oryza sativa
  Clone ID: PAT_MRT4530_83130C.1.pep
MLLIFLFFLLFLYFLSGGRFLRRRKNYPRIAPPPLASSPDLYEGTTAATGEGGCRHCREKGPLPLQGEGGLRRCLLVAAAAFGRRGRCRYKEKGAPPPLSRGGLGVYRMQHQA

SEQ ID NO: 186321 - protein, 389 aa, Oryza sativa
  unsure (1)..(389): unsure at all Xaa locations
  Clone ID: PAT_MRT4530_83131C.1.pep
MTSLGPYNGVSLKGLVLQLRHLIVELGYTEEVQFVGTTVPDEGEKELASPRWSVKATLLSTNPSLESLELTGGTDTFIDACQEVVLLGIGRLLQRHWTRLQHTPFRYHPTRSLAEDYATFRDAEHENDTTIDHLAKMVQAYDDARVDYYKMAKRGFIQASSRILRLRRKNLCVKLEMASLKRELRNLELGHGQVGEGSSVVGSKRCRVGPSLKITTRKRDGLPPMVHDAQASARVIVQNYLERRGLTVALANEDDSNDNSYDGDDESEPTVDDNATKDEAHVPAGVLALRKKEFRELKQDGRTVTEFLHEFNRLARYAPEDVRTDEEKQEKYLEGLNDELSIHLISGDYEDFQKLVDKAIRLEDKHXKMESKKRKLANASQFVLSDTYA

SEQ ID NO: 186322 - protein, 78 aa, Oryza sativa
  Clone ID: PAT_MRT4530_83132C.1.pep
FWFFFFFFFFFFFFFFFFFFFFFLGNNNRPFFIFSPGLSLPGGGAPLTKTKRAWTKATGATGHTGDSAFKQASKSHPS

SEQ ID NO: 186323 - protein, 30 aa, Oryza sativa
  Clone ID: PAT_MRT4530_83133C.1.pep
GRNCYDRYVGLTGIPSYSGHLADEMSLTIS

SEQ ID NO: 186324 - protein, 51 aa, Oryza sativa
  Clone ID: PAT_MRT4530_83134C.1.pep
ASYSIFHLAHEQHHGLSWCFEPWELRCSLMFVHLGILISFWCYFAFLGFLI

SEQ ID NO: 186325 - protein, 104 aa, Oryza sativa
  Clone ID: PAT_MRT4530_83135C.1.pep
MMPTENRARSVQHTELDEHPAEHTSSRCAALLPRSSSYSDPRLLSLDMGPREGSMLMGGGRWRRPPFRWEGRRRRSDVPDPYSFCTHPCWQGHGDSRRRLRRLG

SEQ ID NO: 186326 - protein, 100 aa, Oryza sativa
  unsure (1)..(100): unsure at all Xaa locations
  Clone ID: PAT_MRT4530_83136C.1.pep
XFIVNPTGEEVDGGGAGARXXERRRRLRTASAEGGFFRDFPKKGTSPXYREKKKXTRRKPXPXSRLSPSPTRLDSTSTPSSXSSXPFFGFLLXKSEGWLG

SEQ ID NO: 186327 - protein, 47 aa, Oryza sativa
  Clone ID: PAT_MRT4530_83137C.1.pep
FFFFFFFFFFFFFFRFSVEKITWHLFNSLTHMEHDNNNNNPTPHPTP

SEQ ID NO: 186328 - protein, 350 aa, Oryza sativa
  Clone ID: PAT_MRT4530_83138C.1.pep
LVVQIGSIGGGGSPEERAAAGGPVCVTGSTGYVGSWLVRALLRRGYRVHATARDPDKAWRVFSAVEEGKDQLRVFRADMAGEGSFDAAATGCVAFFHVAASMDIHVPPQNGNDNNIEEHVRTRVLEPATRGTINVLQSCVRAGTVRRVVFTSSISTMTAATTTAATGRRKAVVDESCLRAAADVWNTKPIGWVYILSKLMTEEAAFGFARENGINLASLVLPTVAGPFLTPNVPTSIQLLLSPITGKQILHHTSDPKLYSLLASVHSRFGCVPLAHIQDVCDAHVFLMETEQADGRLSKDFHGSNPSVVSSKRLRDLGFRFEYDVEEIIKNSVVQCVDHGFLQDPDSSNC

SEQ ID NO: 186329 - protein, 765 aa, Oryza sativa
  unsure (1)..(765): unsure at all Xaa locations
  Clone ID: PAT_MRT4530_83139C.1.pep
KVSTSAVIVFQELSNDSSYFWFGFRPIDGNSSFYLLAIWFNKISDKTATWYAKTSXARTTADTSAIGSILQFTSTGVLSLRDPTNREVWNPGATGAPYASMLDTGNFVIAAAGGSTISWETFKNPTDTILVTQALSPGMKLRSRLLTTDYSNGRFLLNMETQRAALYTMAVPSGNLYDPYWSTPIDENVTNQVTNLVFNTTGRIYVSMKNGTQFNMTSGVIRSMEDYYHRATLDPDGVFRQYVYPKKPSSMSQAWTAVSIQPENICNAQTKVGSGTCGFNSYCMFDGSNNQTSCVCPEQYSFFDEVRKYRGCRPDFELQSCDLDEAASMAQYEFNLVNNVDWPQADYEWYTPIDMDECRRLCLIDCFCAVAVFHENTCWKKKLPLSNGIMGSGVQRTVLIKVPKSNSSQPELRKSRKWKSDKKLWILGSSLLLGGSVIAXFALSSVLLRTAAAARLDDDGGLRIFTYRELEKATGGFHEVLGTGASGIVYKGQLQDECGTNIAVKKIEKLQQEAQKEFLVEVQTIGQTFHRNLVRLLGFCNEGTEKLLVYEFMSNGSLNTFLFNDSHPHWSLRVQVALGVSRGLFYLHEECNKQIIHCDMKPQNILLDDNFVAKISDFGLAKLLPVNQTQTNTGIRGTRGYVAPEWFKNIGITSKVDVYSFGVILLELVCCRKNVELEVADEEQTILTYWANDCYRCGRIDLLVASDDEAIFNIKKVERFVAVALWCLQEEPSMRPTMHKVMQMLDGAVQIPTPPDPSSYISSLA

SEQ ID NO: 186330 - protein, 79 aa, Oryza sativa
  Clone ID: PAT_MRT4530_8313C.1.pep
MGKTPKGGLFLTEKTRRKAWRPCGVRRAGPERHEIPDPGMIMRNIENLGGSLSPPARPEPSVPGNLPPVTVRRLRVRHR

SEQ ID NO: 186331 - protein, 42 aa, Oryza sativa
  unsure (1)..(42): unsure at all Xaa locations
  Clone ID: PAT_MRT4530_83140C.1.pep
GRAPGPPPAAAPAAAASWQSSTVGCXGETGHGKESPPIRNYS

SEQ ID NO: 186332 - protein, 92 aa, Oryza sativa
  unsure (1)..(92): unsure at all Xaa locations
  Clone ID: PAT_MRT4530_83141C.1.pep
APTKRGKNTARPNSVPAPIAALAQAPTPAPAPAQAPAPTPMAALAPAPTXAPAPAPAPAPAAGAWPSVAAPPQASLHILVQASSFFPEAQRS

SEQ ID NO: 186333 - protein, 339 aa, Oryza sativa
  unsure (1)..(339): unsure at all Xaa locations
  Clone ID: PAT_MRT4530_83142C.1.pep
GASAGGCGPAQGGAQQPAGGGGGARSRRALRGGAAARSRGAAARGRGTTRRWPARQRQAGAGAVQGAGRRQXRLRARHRQGGQQSKKMDRKRKGKALASQKSVTEIVNSFDYTDNYNDLDTESVNNSKQPRPLLFLRQLTLELWLRRPSEPPLCTTPFGRLLPSSRSLLSHAIDVNSFVVPRSSSTASSPPLGAARTTFLVRDHRRSTARATVLRSATAFTPCRLLSLGIWAVHAAVPPWHAELLWPPHGYHVVHAHPSHGGPSSFDPATECHDSRVTPRAGATRVVTAAATPPPLPPSLPRRHPSGPPETTRSERRQQQCLLSSPRGRRVVAHNLTWF

SEQ ID NO: 186334 - protein, 100 aa, Oryza sativa
  Clone ID: PAT_MRT4530_83143C.1.pep
NFVVLAFDQPNVPNQPLTRPTTTITMQVLRSVIVLTSSEKTVLYYRRDEKLYAKKFLKWKQEQGQCENAKLSLNSSTYVHSRTSALHSHINRLPLSTSDL

SEQ ID NO: 186335 - protein, 120 aa, Oryza sativa
  Clone ID: PAT_MRT4530_83144C.1.pep
MNLSNFFDHCLGAHTSSSSTTICDLLFPEFRTPRMQVLARYYTENRPDGFELDCLPESMRHSTQLKNSLPPGFFARHRALLRLSIGFRTKKDRQLSLERKELQNYCIPPNKNKSKKGLSL

SEQ ID NO: 186336 - protein, 345 aa, Oryza sativa
  Clone ID: PAT_MRT4530_83145C.1.pep
MAAGSDGDLAGARVVGRGFGGHLHVEGDDANPMVLTYASNDDRRRPATRGGGGGLDLADSGAPATCNGSERPDGARLLLANPEIATATGDDHHSDGAGRLERRWQRRRLGRRGGCATSDGGARDLGANGRGRLGDALYRHGRFLGRDRYGMGFEDFQEQVEICVMVSSQMKGKECKPRTSERRKRNVLQRVKRNMIKRKWGRTKDGAHSSPIAAKVPYVSRRTRVEVNSSAELSAACFQVSSQAQNHLDDSRYSSGRGLASISTRREYSLSPWQQRGGGDLHGATRGVRNSGKRRSHMVVEEELVWAPRQWSKKFDKFMVDRYLSIPVVGADEPPSALAAALGGL

SEQ ID NO: 186337 - protein, 104 aa, Oryza sativa
  Clone ID: PAT_MRT4530_83146C.1.pep
MRARRPALVRQREEGRWRREEATSSETMATTTMQTRDDDDANPMTMTVRAAITASVGGGGQWEEAAAGGRRRELGDAWKEEMPAIDRGGSVDATSPWPARPSMP

SEQ ID NO: 186338 - protein, 58 aa, Oryza sativa
  Clone ID: PAT_MRT4530_83147C.1.pep
MGWHQCGAFSPSRRARKRAAGRAAAAKSAAWQAEAATVTTGQAAAAAGQAAVAEDAAR

SEQ ID NO: 186339 - protein, 95 aa, Oryza sativa
  Clone ID: PAT_MRT4530_83148C.1.pep
MALRALISEIRGMKVREVPGYLKPRLSWENVKKSSDQAVDRYIDKYIETSSPEPLFHVIYGLMAFSYLINLPKERRHLAHLEELERQGAAGAAHH

SEQ ID NO: 186340 - protein, 95 aa, Oryza sativa; identical to SEQ ID NO: 186339
  Clone ID: PAT_MRT4530_83149C.1.pep

SEQ ID NO: 186341 - protein, 71 aa, Oryza sativa
  unsure (1)..(71): unsure at all Xaa locations
  Clone ID: PAT_MRT4530_8314C.1.pep
MVSLRFPGATFPRLQLESFFFLQGGVXNPYNECVRQQYGIGGGLFLHLAAFQLRNNQVWQQLALVAHQSHY

SEQ ID NO: 186342 - protein, 49 aa, Oryza sativa
  Clone ID: PAT_MRT4530_83150C.1.pep
SRSIGTLGVYSYQENGLSLNMLPHTWLHFTTKGISLRPQIVSVLCMLNF

SEQ ID NO: 186343 - protein, 310 aa, Oryza sativa
  Clone ID: PAT_MRT4530_83151C.1.pep
MADKSHKTLHEFVAPSADNVAIGPQINLGEVDFDLKSSLITMAQASLFCDKPNEDANAHLQQFLEICSTYTMKGVSPNAVRLWLFPFSLLGKAKLWFYANRAMIYTWDKCSTAFLSKLFPMGKTSALRGRISCFQQTGDESIPEAWERLQKMKRLPRLCKGSSPSSSHHDESSARSSTDVSMEDADILQRLLSDADFDLVDDQERQAYYMPRDREYTHTREYSLELLEKIGEWRSSSSRWDLGEITRRMNTLDMHMGEVQYNLEEHIAQAQEWQQTTDAQFTNINNLMQQKPDDLQTYFRFQGFNPYQGP

SEQ ID NO: 186344 - protein, 76 aa, Oryza sativa
  unsure (1)..(76): unsure at all Xaa locations
  Clone ID: PAT_MRT4530_83152C.1.pep
RKATWKPKGPYXLEKNMTVLLGANRGKRITGPRGLIKLTWEEGKPHPIGSITFDSWQLENYAERGRTSNPGDLSGL

SEQ ID NO: 186345 - protein, 91 aa, Oryza sativa
  Clone ID: PAT_MRT4530_83153C.1.pep
TKPPDPEARSSPLDLTMSLSMIMFAKPPKYSLDLGLLLSPNARTSMKREKKRKQSFFFFFLFQVHSIAFRGSTSPSESDEPGEKFWHDLPP

SEQ ID NO: 186346 - protein, 109 aa, Oryza sativa
  Clone ID: PAT_MRT4530_83154C.1.pep
MDFPIQPDLVFASGWPGRLHEKVCKNSDFRMRALHPHAKLLFSHAGGGLPPSDLGGRRRAAAAVRSHHCRSCCRIQAAGGPPLLDPGGRRQITIVKAATVRSHRRCSYR

SEQ ID NO: 186347 - protein, 78 aa, Oryza sativa
  Clone ID: PAT_MRT4530_83155C.1.pep
SITRRAAAGGGGAVVAAAEGWRRLGDGGVGSATRRTAGGGSVNRRIARWRLGGSCGGVTLAHRRGERSAATAAAAVAR

SEQ ID NO: 186348 - protein, 244 aa, Oryza sativa
  unsure (1)..(244): unsure at all Xaa locations
  Clone ID: PAT_MRT4530_83156C.1.pep
VDPRAAGPIEDIVTWSNRIGAKVLVDACQSVPHMPVDVQRLGADFLVASSHKMCGPTGVGFLHGKFDLLSSMEPFLGGGEMIADVFQDKSTYAEPPSSCSXRFEAGTPAIGEAIGLGTAIDYLSQIGMQKIHEYENELATYLYESLIAVPNVRIYGPAPCQTVHRAPLCSFNVENVHPTDIAEILDLQHGVAIRSGHHCAQILHRTLGINASARASLHFYNTKEEVDVFVDALKDTIDFLTSEH

SEQ ID NO: 186349 - protein, 549 aa, Oryza sativa
  Clone ID: PAT_MRT4530_83157C.1.pep
MHKALTNHLSKEKSFASLKAPFFSNNFDWPQLDLELLMQFKCAGFYLVYASQQRQYSLVVLAASIISKSGKALVSRQFVDMSRIRIDGLLAAFPKLVGSGKQHTYVETENVRYVYQPIEALYLLLITNKQKGVCKAAFELLFAFIEAISLGNKENVTVAQVKQYCEMESHEEKLHKLVMQSKINETKDVMRRKVTEIEKSKTDRGKPDKGGFGSLRTPNSFSDMGIRGGGPGGDPIFGDMDSFTHKAKGRPSAPAPASASTKVPGGMKLSKAQKTNQFLESLKAEGEVILEDTQPSATQSRSSYIPPSDPITVTIEEKLNVTVKRDGGVSNFDIQGTLALQILNDTDGFIQLQIENQDVPGLNFKTHPNINKELFNSQQIVGAKDPNRPFPSGQNETPLVKWRIQELNESSLPLAVNCWPSVSGNETYVNIEYEASEMFDLHNVVISIPLPALREAPGVRQIDGEWRYDSRNSVLEWSIILVDQSNRSGSLEFTVPAADPSTFFPISVGFSASNTFSDLKVTAIRPLREGSPPKFSQRNRLVTYNYQVV

SEQ ID NO: 186350 - protein, 493 aa, Oryza sativa
  unsure (1)..(493): unsure at all Xaa locations
  Clone ID: PAT_MRT4530_83158C.1.pep
MVVLAASIISKSGKALVSRQFVDMSRIRIDGLLAAFPKLVGSGKQHTYVETENVRYVYQPIEALYLLLITNKQSNILEDLDTLRLLSKLIPEYAPSLDEEGVCKAAFELLFAFIEAISLGNKENVTVAQVKQYCEMESHEEKPGRVKMEEEKQALQRQLXEASEGTSDRGKPDKGGFGSLRTPNSFSDMGIRSGGPGGDPIFGDMDSFTHKAKGRPSAPAPASASTKVPGGMKLSKAQKTNQFLESLKAEGEVILEDTQPSATQSRSSYIPPSDPITVTIEEKLNVTVTRDGGVSNFDIQGTLALQILNDTDGFIQLQIENQDVPGLNFKTHPNINKELSDHRWCLXVRDDASLTSTPALPSYMQSTESARAKSRYRSLLTDRFEVPERVPLVHSSIKKRLSFPVADKPNGEHADKLMERGRRHSDPPKSLLLLGCFSVPAADPSTFFPISVGFSASNTFSDLKVTAIRPLREGSPPKFSQRNRLVTYNYQVV

SEQ ID NO: 186351 - protein, 340 aa, Oryza sativa
  Clone ID: PAT_MRT4530_83159C.1.pep
MGKKGNWFSAVKKVFSSSDPDGREAKIEKADKSRSRRKWPFGKSKKSDPWTSTVAVPTSTAPPPQPPPPPPTHPIQPQPEEIKDVKAVETDSEQNKHAYSVALASAVAAEAAAVAAQAAAEVVRLTTATTAVPKSPVSSKDELAAIKIQTAFRGYLARRALRALRGLVRLKSLVDGNAVKRQTAHTLHCTQTMTRVQTQIYSRRVKMEEEKQALQRQLQLKHQRELEKMKIDEDWDHSHQSKEQWKNSGRTITPTFTDQGNPNWGWSWMERWMTSRPWESRVISDKDPKDHYSTKNPSTSASQTCNTKQVKPSTKSAIAINSPVKGPLSYRKDQTSKSTG

SEQ ID NO: 186352 - protein, 415 aa, Oryza sativa
  Clone ID: PAT_MRT4530_8315C.1.pep
MVSQHGILLAVAIISDHFGPLVSEIVRRLELSPGQVKNSLLVLIQHNCVQAFNAPRGNGDKTVTHYLAIFDNIVHRQRFSKFLSIIRADIPELSEALLEGLLQNGSITPAREEIRMNFNKLVFAHYVERCPKPEPFFDPLVDEQSTSSRKRAPKTVEIALSIDKKVVNTAALSDAERFSEIPYIMEDASNANDSPRSSISGAKRKHNALEGDAELDSTIAENEVLWRANFEKFTFCLKKKFCADRKKPKLKVGTHPIWEAFFEASLMERDNNSVTSPINGIMERLGQKEGDLSRIVEASRNEEIESLVRKKYGQEAFTIFRLLVRERGPVETDKIIDTTILDKQIVHGTLYKLWKDDYIDTERILSGTGTGNTQYFVWRVKNTFREQFIDNLCHAALNLRQMVNYIAELLLEVTY

SEQ ID NO: 186353 - protein, 179 aa, Oryza sativa
  unsure (1)..(179): unsure at all Xaa locations
  Clone ID: PAT_MRT4530_83160C.1.pep
NKSSRPPSRQSPSTPPSRVPSVTGKIRPASPRDSWLYKEDDLRSITSIRSERPRRQSTGGASVRDDASLTSTPALPSYMQSTESARAKSRYRSLLTDRFEVPERVPLVHSSIKKRLSFPVADKPNGEHADKLMERGRRHSDPPKVDPASLXGCSGFIIQSYYQSLLLLGCFSSFVYFLI

SEQ ID NO: 186354 - protein, 63 aa, Oryza sativa
  unsure (1)..(63): unsure at all Xaa locations
  Clone ID: PAT_MRT4530_83161C.1.pep
MAKEPMRVLGTRSPGQMAYALAPMIATRVMVGAXDHADIIHSACIAPATESLNGHNMELVDAT

SEQ ID NO: 186355 - protein, 1844 aa, Oryza sativa
  unsure (1)..(1844): unsure at all Xaa locations
  Clone ID: PAT_MRT4530_83162C.1.pep
MAEKQPPPPSPSSAKGKPLKLGLTDIIEENVMPINPEKFTPEQKEEFEAMMQQARDQFLNSFTQTRKGTFVQKYKIKVVADDPRTGSSKDGEGKQAPDGSAQPSIKSATDGDQGDDSQGVHRIQGDGAQGPQGGNLNQNNEAAQDFFNKFQDRVDYAIHNDLINQSRVLTNTLANMMKSVADGSIAEHQAAGPVYLQGSTFPNYRPLITDIHPPTQAVPPIASSAQPTAPASAPVPATPPSAPGQLINPQLLVREQPQHAGPNVTQLAQDQAVQPVQQTPSRGPALQPIQQTPLRQQAVQPIQQQGLLDASAGLATPSGQLMQYAPNQVVPEHLVHHAQPDGTMIPQVVPEHLVRGIQPNLHNYQGGNLNYQYQPLSPQVQYQQTGSAQPQFAPQHNQFEPIPQQPQESPQQGQSADVIADVMREQFGLKPKKTGNLYRQPYPEWFERVPLPNRFKVPDFSKFSGQDTTSTYEHISRFLAQCGEASVVDALRVRLFRLSLAGSAFTWFSSLPHGSINSWADLEKQFHSYFYSGIHEMKLSDLTSIKQKHDEPVHEYIQRFREMRNKCYSLSLTDAQLADLAFQGMIAPIREKFSSEDFESLSHLTQKVALHEQRCAEARKNSRKINHVYPYMYDSDDDENDSEIAAAEWVRSKKVIPCQWVKNSGKEERQQIQVAIEGGKIKFDDSKRPMKVDGMRLPSIEECPGCNEVAESSSRSYDRGNRLRQRVPVHQRLGPINHDRGQEDNEDRKTQWCPSADVDEVEEESAKLVLSPEQAVFKKPEGTENRHLKPLYINGYVNGKPMSKMMVDGGAAVNLMPYATFRKLGRNADDLIKTNVVLKDFGGNPSETKGVLNVELTVGXSYSLLLGRDWIHANCCIPSTMHXCLIQWQGNKIEIVPADXMENPSYYFEGVVEGSNVYTKDTVDDLDDKQGHKILSFMDGNAGYNQIFMAEEDIHKTAFRCPGAISLFEWVVMTFSLKSAGATYQRAMNYIYHDLIDWLVEVYIDDVVVKSKGIEDHIADLRKVFERTRKYGLKMNPTKCAFGVSAGQFLGFLVHERGIEVTRRSINAIKKIKPPGDKTELQEMIGKINFVRRFISNLSGRLEPFTPLLRLKPDQQFTWGTEQQKALDNIKDYLSSPPVLIPPQKGIPFRLYLSAGEKSIGSVLIQELEGKERVVFYLSRRLLDAETRYSPVEKLCLCLYFLCTRLRHFLLSNECTVICKADVVKYMLSAPILKGRVGKWIFSLTEFDLRYESPKAINGQAIADFIVDRRDDSIGSVEIVPWTLFFDGSVCTHGCGIGLVIISPRGACFEFAYTIKPYATNNQAEYEVVLKGLQLLKEVEADAIEIMGDSLLVISQLAGEYEYKNDTLIVYNEKCQELMREFRLVTLKHVSREQNIEANDLAQGASGYKPMIKDVQIEVAAVTADDWRYEVHQYLQNPSQSASRKLRYKALKYTLLDDELYYRTIDGVLLKCLSADQAKVAIGVVHEGICGTHQSAHKMKWLLRRAGYFWPTMLEDCFRYYKGCQDCQKFRAIQRAPASAMNHIIKPWPFRGWGIDMIGMINPPSSKGHKFILVATDYFTKWVEAIPLKKVDSGDAIQFVQEHIIYRFGIPQTITTDQGSIFGSDEFVQFADSRGIKFLNSSPYYAQANGQAEASNKSLIKLIKRKISDYPRQWHTRLAEALWSYRMACQGSIQVPPYKLVCGHEAVLPWEVRVGSRRIELQDGLTADEYYNLMADEREDLVQSRLRALAKVTRDKERVARHYNKKVAPKTFSEGDLVWKLILPIGTRDSKFGKWSPNWEGPFQIHKVVSKGAYMLQGLDGEVCGRALNGKYLKKFYPSVWVNT

SEQ ID NO: 186356 - protein, 70 aa, Oryza sativa
  Clone ID: PAT_MRT4530_83163C.1.pep
MEQCEPALPVDQQPLGFQNRPRLAYSSVSTRGYSLDHSRSFSCQELAAAAASLSSYYHYISQLVATVGDL

SEQ ID NO: 186357 - protein, 677 aa, Oryza sativa
  Clone ID: PAT_MRT4530_83164C.1.pep
MAEKQPPPPSSPGSVKGKTLKLGLTDIIEENVMPIDLEKFTPEQKEEFEARLQQARDQFLNSFMQTRKGTLVQKYKIKVVADDPRTGSSKDGEGKQAPDGSAQPSIKGATDGSLGDQGDNSQGVHGVQVSASISASPISAGGPTQPQFASQYGQFEPMQQQPQGAVQQRPWADVIADVMREQFGLKLKETGSLYRQPYPEWFERVPLPNRFKVPDFSKFLGQDGVSTCEHISRFLAQCGEASAVDAVRVSLFRWADLEKQFHSYFYSGVHEMKLSDLTAIKQRHDEPVPEYILKFREMRNMCFSLSLTDAQLADLAFQGMIAPIREKFSSEDFDSLSHLIQKVTLHEHGSAEARRSSKKVNHVYPYMYDSDDDEDDSEIAAAEWVRSKKVIPCQWVKNHGKEEKYDFDINKADKIFDLLLREKQIQLPAGHTIPSAEELGKKRYCKWHNSGSHSTNDCKVFRQQIQVAIEGGKIKFDDSKRPMKVDGNPFPVNMVHTASRTADTGHMRGFQVNSAKIINKYQRKYDKQQEKYYEEEDDGFDPHWGCMRLPSIEKCPGCNDIAESSSRSYSRSNRLRQTRVPVHHKLGPINQDRGKEDNKNRKTQWCPSAKFGIDRADVDEVEEESAKLVLSPEQAVFEKPEGTENRHLKPLYINGYVNGKPMSKMMVDGGAAVNLMA

SEQ ID NO: 186358 - protein, 104 aa, Oryza sativa
  Clone ID: PAT_MRT4530_83165C.1.pep
GRRRRASVRPRRGRWPPEGAATGAWRSWCDGAVMGLSSRTECERSEEKTEWANVQTKWQHLQALSVSHHSPQVVGSHHKKPFCSMISTHARDVTNNFNQNYQPK

SEQ ID NO: 186359 - protein, 44 aa, Oryza sativa
  unsure (1)..(44): unsure at all Xaa locations
  Clone ID: PAT_MRT4530_83166C.1.pep
MAASLQAAATLMXPAKLGXRASSAALPXRPSXHVAKXFGVXTGA

SEQ ID NO: 186360 - protein, 45 aa, Oryza sativa
  unsure (1)..(45): unsure at all Xaa locations
  Clone ID: PAT_MRT4530_83167C.1.pep
YMCGIKGMXKGMEYIMMDLAAKYGMEWLDYNNQLKKSEQWNVKVY

SEQ ID NO: 186361 - protein, 77 aa, Oryza sativa
  Clone ID: PAT_MRT4530_83168C.1.pep
ALRSQNPGVFSFAHAGFGLNPPFSDDFFIKAFPGDKKIINLLPAPFLKNPSFLSCWLPPPGPFSPGPRCFGTFLFYP

SEQ ID NO: 186362 - protein, 59 aa, Oryza sativa
  Clone ID: PAT_MRT4530_83169C.1.pep
AAPGSTSRHDATSPSLLVIRMRWLLLFFLGGGGGPSFEGPLVLPPHLLLFLGGEVILDV

SEQ ID NO: 186363 - protein, 54 aa, Oryza sativa
  Clone ID: PAT_MRT4530_8316C.1.pep
SYSGFMLVADGAESTRDAPGVSPAASSSPHASGRKQAGRDTRARGEHGGERGIR

SEQ ID NO: 186364 - protein, 551 aa, Oryza sativa
  Clone ID: PAT_MRT4530_83170C.1.pep
MRSTSGARPSSGGGGGDDDYAFYYSFFQDAAAAAASPLGLDDAAAMTNGGRKRKRGGGGDGPDGGAPAAYRKDGPGGDGEGGNGRKRSIAKILTSLAALEAEEHSDRAGAADASRRELALLESNADHKSQAMMDYYAKMEGSFDAAAESDATARSKRSRLAASATTAAVVATEEGAAETASASASPSRASGGGGAGHHQRRLWVKDRSRAWWDKCNSPDYPEEEFRRAFRMGRETFDMICEALGSAVAKEDTMLRAAIPVRQRVAVCIWRLATGEPLRLVSKRFGLGISTCHKLVLEVCAAIKSVLMPRFLQWPDEAAAAAFKERFQAAYGVPGVIGAMYTTHIPIIAPKISVAAYFNRRHTERNQKTSYSITLQGVVGPDGAFTDVCIGWPGSMPDDQVLEKSMLHQRAAAGMMHSACLVGGASYPLMDWVLVPYTHQNLTWTQHAFNEKVGDLRRVAVDAFARLKARWACLQKRTEVKLQDLPVVLGACCVLHNICETRGEELEPELRFELVDDETSPETPVRSEAAKRARDNIAHNLLHRGFAGTTFF

SEQ ID NO: 186365 - protein, 85 aa, Oryza sativa
  Clone ID: PAT_MRT4530_83171C.1.pep
IFRYIKEDLNFGQVTDYLELRTMLTFAVHETGITGEGQFLPSKCRKTRLGFVSLHGTKLLELMRWDKHCTCNTLKRQQQTRSTSP

SEQ ID NO: 186366 - protein, 96 aa, Oryza sativa
  unsure (1)..(96): unsure at all Xaa locations
  Clone ID: PAT_MRT4530_83172C.1.pep
RKTCIRLNFDQLLYCANVVRSITFLFPRXTWSSXKLALLLLPLXFVMLFCTLRYLXACHNDAVLCSVGTAXNHXLSLLGSXKIXPYHXVSREQFAP

SEQ ID NO: 186367 - protein, 136 aa, Oryza sativa
  Clone ID: PAT_MRT4530_83173C.1.pep
SENVLSLFSFLAVSSIKLFDVYFDFKFSPLHCMDILSSISISIFLIFTYYIKFQGVFAYKFRTSPNSLPTYKHIFLSDFLFHRACVRRTCYFFFVRFSSHDFQIAWRLGPCRPLSRSLTKPTSPPSPRLPASSEPP

SEQ ID NO: 186368 - protein, 76 aa, Oryza sativa
  Clone ID: PAT_MRT4530_83174C.1.pep
IGLLVLLKAIISKKINLAKRCRIEHATRRSRAYIFVWDHNGIQICIYTYICKNIYNDSELQELTNHAITSRRAPYI

SEQ ID NO: 186369 - protein, 294 aa, Oryza sativa
  Clone ID: PAT_MRT4530_83175C.1.pep
MGCAASAFVDDDDDDDRRRRIIGVSASHIVSLTSSTYGILDNILVSSAQSQSQSQSPTRIPPPPTPPPRPTTTTNPPCAAPPEKHLKKQGEAEVINSWELMAGLLDPATPQKPRRPTHHSPPPAPPAGVLLYTTTLRGVRATFEACNAVRAALHSHGVAFRERDISMDRGFREELRHRISLDHHDRAPLVPRLFVRGNHVGGAAEVARLEEEGKLAALLEGLPRARPGGGCCDGCGGMRFLPCFDCNGSRKLCFSLPTPVPAAAAARSNKTRAVVVVRCGECNENGLVLCPICS

SEQ ID NO: 186370 - protein, 33 aa, Oryza sativa
  Clone ID: PAT_MRT4530_83176C.1.pep
VLSPTSLSARRINHYGRHERRREEDDLASHLVP

SEQ ID NO: 186371 - protein, 95 aa, Oryza sativa
  unsure (1)..(95): unsure at all Xaa locations
  Clone ID: PAT_MRT4530_83177C.1.pep
INLLNVVQKPAYQLLFTYRRYHRKVWVXSLRPHSISLSLKXLQSVLKKDEPLESDCFNMAIPTWKARPCSRWNKDITLWRQIMVNNPVLDRQVIF

SEQ ID NO: 186372 - protein, 58 aa, Oryza sativa
  Clone ID: PAT_MRT4530_83178C.1.pep
QLSDNSDDIGGTNAEVDNGSITSGKFVTSRRPPPPGDGSALWQSGVGPSSRRSDDASQ

SEQ ID NO: 186373 - protein, 72 aa, Oryza sativa
  Clone ID: PAT_MRT4530_83179C.1.pep
RYWASTIVFVAQETMVLENCQNLMNIKLTRRFKIFNKTSCTICPGEGVPNGAKLFNEIFGPSKGPIPLLTIG

SEQ ID NO: 186374 - protein, 512 aa, Oryza sativa
  unsure (1)..(512): unsure at all Xaa locations
  Clone ID: PAT_MRT4530_8317C.1.pep
MKVIEKIQEAAADGRTVFSFEYFPPKTEEGLDNLFERMDRMVAHGPNFCDITWGAGGSTADLTLEIANRMQNMVCVETMMHLTCTNMPVEKIDDALTTIKSNGIQNVLALRGDPXHGQDKLSVLWISFFGLVLWTTTTSTXSLRGVQGDLMTSYSLQPLVSEFLSLSSVIASTTIGQLSSKAFAHVISKDSSSLIFRDLYRFYWIHPTYINXKMSCVSIEKKKKKKDNEEAVKAYGIHLGTEMCKKILATGIKTLHLYTLNMEKSALGILMNLGLIEESKISRSLPWRPPTNVFRVKEDVRPIFWANRPKSYISRTLGWDQYPHGRWGDSRNPSYGALTDYQFTRPRGRGKKLQEEWAVPVKSVEDINERFMNFCQGKLTSSPWSELDGLQPETKIIDDQLVKINQKGFLTINSQPAVNGERSDSTSVGWGGPGGYVYQKAYLEFFCSKEKLDQLIEKSKAFPSLTYIAVNKDGESFSNIPTNAVISKDSSSLIFRDLYRFYWIHPTYINKK

SEQ ID NO: 186375 - protein, 58 aa, Oryza sativa
  Clone ID: PAT_MRT4530_83180C.1.pep
RSRCVCGSASVKGGQEHVVEITAKQRRHMCLTVSWPCLQWHSVCSQHVSCVTAVSHPE

SEQ ID NO: 186376 - protein, 70 aa, Oryza sativa
  Clone ID: PAT_MRT4530_83181C.1.pep
KNLSCRRKCGEIPVLPPPTHSEVELTLPMYTHPHRGRSVKCQQLKQLAAAAAAADLPFHPGANDNYALDG

SEQ ID NO: 186377 - protein, 54 aa, Oryza sativa
  unsure (1)..(54): unsure at all Xaa locations
  Clone ID: PAT_MRT4530_83182C.1.pep
KFVASXVLXRFELRPVAPEGSPEFVPLLTAHMAGGLKVTXRRRQRQNGTCTSQF

SEQ ID NO: 186378 - protein, 233 aa, Oryza sativa
  Clone ID: PAT_MRT4530_83183C.1.pep
MDGGGGMLGAVLCLLLVFAIFPLLLWRRRSDAAHRLPPQPLQDERVLRGGPAPGPAARRMRRRPLSTSADASTSRDRDVDDADSDLEEEIQDVPRGSKKKEKKRQDREAQRQAEEAARDSRRTKQDRYAEMRRKKDEEREAQERLMEEEARARKAKEEEAAALEFEKWKGAFSVDAEGTTESDTQDDGQGLLHNFVEYIKNQKCVPLEDLAAEFRMRTQDCINRIITLEGMDR

SEQ ID NO: 186379 - protein, 89 aa, Oryza sativa
  Clone ID: PAT_MRT4530_83184C.1.pep
PPPRFSMGTVPLQLTFLGSLLWGSLQKSVRFCPRSINCSSVSRINVRFLLAPVVGCPSFGKKVSFVPVVCFFVRVFTLSIEIWCCDFFF

SEQ ID NO: 186380 - protein, 493 aa, Oryza sativa
  Clone ID: PAT_MRT4530_83185C.1.pep
MLTSSLTRPPPPPFVWNGRSLDLSPNTTGLPPPPLSTTPISLCSRPASMHDTGLSARAAGASSSSSPYAGASSATSVGDDDDESKIRKANPAFVAAAYARLHSSHRAAASFLLLLAVAATAFLIGRARPRADCPPPRLDARFLALPDAAAASDFGALGVPWCRSKTGKIVEWTSKDLLRGLEEFVPIYETRPIKNNMYGMGFDHSFGLWFVARWLKPDLMIESGAFKGHSTWVLRQAMPNTKIISLSPRHPEKYLKKGPAYVDGNCTYLAGKDFIDFGSVDWGKLLRNHGISDLSRVLVFFDDHQSELKRLKQASIVGFRHIIFEDNYDTGTGDHYSLRQICDQEHIRGGGHSCFWDSDEARLRSRRKSFWEKAVETDELCGKDDAWWGVRGYMRDNFNHSNKAISYKEHFQNSRLVESVLDLYWELPPVAGPSLTHQTRYDPARASDPIIEDGRFGMFQRIGLARLDASVFNGYTQMSYVQISGSMLSREDA

SEQ ID NO: 186381 - protein, 872 aa, Oryza sativa
  Clone ID: PAT_MRT4530_83186C.1.pep
MDLSLRGEAEAAAVYRSNSKQFTIEVHHGGFFYGMGVNRSYVDGKVSWFDYVDSREWGSSLQLADLVAMLGYDAGPRLKVYWLLPGKNLVDGRNQEDIVVSPVSELPIVMSPVRGCQQKGDGNQGGSNVGVQACGVVDEVADEIEDDVEYDSDGSEVDDSDFVDSDYEFQDDDDDLFEDNVDGDVVDQGPAPKKFNQKKVAGGKLKGKRVIREEGSDEESSDEECLELPENPDEINLRFKSFNPEDMNNPVFKVGMVFPSVELLRKTITEYSLKNRVDIKMPRNDRTRIKAHCAEGCPWNMYASLDSRVHGFIVKTYVPQHKCRKEWVLQRCTANWLALKYIESFRADSRMTLPSFAKTVQKEWNLTPSRSKLARARRLALKEIYGDEVAQYNMLWDYGNELRRSNPGSSFYLKLDDGKFSCLYFSLDACKRGFLSGCRPIICLDGCHIKTKFGGQLLTAVGIDPNDCIFPIAMAVVEVESFSTWSWFLQTLKDDVGIVNTYPWTIMTDKQKGLIPAVQQLFPDSEHRFCVRHLYQNFQQSFKGEILKNQLWACARSSSVQEWNTKFEEMKALNEDAYNWLEQMAPNTWVRAFFSDFPKCDILLNNSCEVFNKYILEAREMPILTMLEKIKGQLMTRFFNKQKEAQKWQGPICPKIRKKLLKIVEQANICYVLPAGKGVFQVEERGTKYIVDVVTKHCDCRRWDLTGIPCCHAIACIREDHLSEEDFLPHCYSINAFKAVYAENIIPCNDKANWEKMNGPQILPPVYEKKELMGPQAGGSSLLAEVNDNMLDHMLQEASQPSQLTQEHGPLPDCAFIQENQPTARPVVLTTSTKEGRSKMTKPKKNAAGTSKKKKATDGLSDGAAAKKKKKA

SEQ ID NO: 186382 - protein, 907 aa, Oryza sativa
  Clone ID: PAT_MRT4530_83187C.1.pep
MDLSLRGEAEAAAVYRSNSKQFTIEVHHGGFFYGMGVNRSYVDGKVSWFDYVDSREWGSSLQLADLVAMLGYDAGPRLKVYWLLPGKNLVDGLRIVDSEVEINVMNSVCNKVKNFVIYLDHTDHVSGRNQEDIVVSPVSELPIVMSPVRGCQQKGDGNQGGSNVGVQACGVVDEVADEIEDDVEYDSDGSEVDDSDFVDSDYEFQDDDDDLFEDNVDGDVVDQGPAPKKFNQKKVAGGKLKGKRVIREEGSDEESSDEECLELPENPDEINLRFKSFNPEDMNNPVFKVGMVFPSVELLRKTITEYSLKNRVDIKMPRNDRTRIKAHCAEGCPWNMYASLDSRVHGFIVKTYVPQHKCRKEWVLQRCTANWLALKYIESFRADSRMTLPSFAKTVQKEWNLTPSRSKLARARRLALKEIYGDEVAQYNMLWDYGNELRRSNPGSSFYLKLDDGKFSCLYFSLDACKRGFLSGCRPIICLDGCHIKTKFGGQLLTAVGIDPNDCIFPIAMAVVEVESFSTWSWFLQTLKDDVGIVNTYPWTIMTDKQKGLIPAVQQLFPDSEHRFCVRHLYQNFQQSFKGEILKNQLWACARSSSVQEWNTKFEEMKALNEDAYNWLEQMAPNTWVRAFFSDFPKCDILLNNSCEVFNKYILEAREMPILTMLEKIKGQLMTRFFNKQKEAQKWQGPICPKIRKKLLKIVEQANICYVLPAGKGVFQVEERGTKYIVDVVTKHCDCRRWDLTGIPCCHAIACIREDHLSEEDFLPHCYSINAFKAVYAENIIPCNDKANWEKMNGPQILPPVYEKKELMGPQAGGSSLLAEVNDNMLDHMLQEASQPSQLTQEHGPLPDCAFIQENQPTARPVVLTTSTKEGRSKMTKPKKNAAGTSKKKKATDGLSDGAAAKKKKKA

SEQ ID NO: 186383 - protein, 610 aa, Oryza sativa
  unsure (1)..(610): unsure at all Xaa locations
  Clone ID: PAT_MRT4530_83188C.1.pep
PYSPAVARRGIRQRRDAVARHSAAARRSRETATDGRPVTAGARPRGRGAGARRRPANSCSSAGQRPAALRQAQFQGXGSGSGSTTQPVRIDSEVAVPSVQPITDANESPVQIQITAVEVVPEVAASDAARDVTEPETEVASNDPDIATAVTQQEQPSTWSPIRDWSPIRDGDDEETEYDSSDEAIYDIDLLCHDPGRRIAIKNYDVNERNSVIRGYIALGPCQPRSHNFPIRKIGEQESDHGEDGSAPKAAAVRGGSPRGGVRWWLSVAADMFMVLCGQTVATLLGRLYYNSGGNSKWMATLTQSAGSPLLAILLLFTPAPAADEPRPAAAKMAPIYVGLGIIIGFDNLMYSYALQYLPVSTFSLVAATQLGFNSVTSRLINAQRFTVLIANSVVVLTFSAALLGIGASSDETASSVPRGKYPAGFALTLAASAVFALILSLFEATFEKVVRTRTLRWVLRAQLWTNVVASTVSAVGLLASGDWRTIPAEMAAFKDGRARYVATLVGTAVSWQVMAVGSLRLIVRVSSLFANVTGTLSLPLVPVFAVALFGDRMTGIKAVSMLMAVWGFLSYAYQQYIDGRRAAGAGKGRAAAECRVCAARAGSDPDSPA

SEQ ID NO: 186384 - protein, 304 aa, Oryza sativa
  Clone ID: PAT_MRT4530_83189C.1.pep
MGAPKQKWTSEEEEALRRGVLKHGPGKWRTIQKDPEFSPVLSSRSNIDLKDKWRNLSFSASGLGSRDKLKVPRIKGPSSSTSPSSQTPLLVLPPNKVAEASPSADPEKSSQDVKIPNSMVIEALCEIGDPNGSDVDAICHYIEQRHEVQANFRRLLTAKLRRLIAAKKIEKIDRSYRITESYAAKVSQANKSPSPKKDPAKPLKASQNLGSFAGTSPALEAAAAAAMKVADAEAKSHLANEHMTEAERIFKLAEETESLVTLATEIYERCSRGEILTIMQVAQSNFEFQSVSGNGSGTGSTVLA

SEQ ID NO: 186385 - protein, 89 aa, Oryza sativa
  Clone ID: PAT_MRT4530_8318C.1.pep
MRRRLASGRLVSGDEAGGGGLERGGELPGGRRRRGATATVPHPVPAAAVAAAGGRWGGGAATADLATATGASGSGEDDDDEEDDGDCGF

SEQ ID NO: 186386 - protein, 230 aa, Oryza sativa
  unsure (1)..(230): unsure at all Xaa locations
  Clone ID: PAT_MRT4530_83190C.1.pep
PLRAHGGSWRRERLPTARRRTAGARQRRRHSRSGARRKLRWQQTGSLTHEAEEGRWRRINPTLERLLQSILTLVPWAKRTDRTTGGEGLSCLHYSALSPKWRRTYLQESNQLGSVLKGFXESFLSSSKDTSNLKRSGKFQADERPRSLSSFSPPXLASAISSRRGTIETLGSIQAASWXDGREYGSGRSKGATTPANGHRKPKKGGRPGGRDGKRIRPSNDPDLDEEEDF

SEQ ID NO: 186387 - protein, 212 aa, Oryza sativa
  unsure (1)..(212): unsure at all Xaa locations
  Clone ID: PAT_MRT4530_83191C.1.pep
AGPTGSGSKRGGXSAGLGSVPSRPAGYGERWRCTVTGDGNRRRRTARKAAASAEGNGARAVDGSGHGRERKREEREFSPRRGLTAVLAVASSGWRSGKGGGGGCSGAGAMEGTGGRGGKRKKVEGIAGELYRGSGGADVAGGLPISPATWEVERERVGGIQXESRPLRGCVRGGEEGETGGDAATWARERRAAWGRGATGKAAICFAWMIMY

SEQ ID NO: 186388 - protein, 43 aa, Oryza sativa
  unsure (1)..(43): unsure at all Xaa locations
  Clone ID: PAT_MRT4530_83192C.1.pep
RHPLSISQRVRRTRISVLHIQLQNIVPNMDKQTNXADMLDLGC

SEQ ID NO: 186389 - protein, 529 aa, Oryza sativa
  Clone ID: PAT_MRT4530_83193C.1.pep
MAMASLARRRAAEAALLRRAPAAAWASAWRGYAAAAAGEESDVVVIGGGPGGYVAAIKAAQLGLKTTCIEKRGTLGGTCLNVGCIPSKEVMNHFDPFYLAVPSIYYELRSTMGALLHSSHMYHEAKASFAHHGIKFSNLEIDLPAMMSQKDKAVAGLTKGIEGLFKKNKVEYVKGFGKFVSPSEVSVDLLDGGSTTVKGKNIIIATGSDVKSLPGVTIDEKKIVSSTGALALSEIPKKLVVIGAGYIGLEMGSVWNRLGSEVTVVEFASDIVPSMDGEIRKQFQRMLEKQKMKFMLKTKVVGVDTSGSGVKLTVEPAAGGEQSVLECDIVLVSAGRVPYTSGLGLNALGVETDKGGRILVDKRFMTNVKGVYAIGDAIPGPMLAHKAEEDGVACVEFIAGKEGHVDYDTVPGVVYTHPEVASVGKTEEQVKASGVAYQVGKFPLLANSRAKAIDDAEGLVKVVAEKETDRILGVHIMAPNAGEIIHEAVLALQYGASSEDIARTCHAHPTVSEALKEACLQTYLKAIHI

SEQ ID NO: 186390 - protein, 185 aa, Oryza sativa
  unsure (1)..(185): unsure at all Xaa locations
  Clone ID: PAT_MRT4530_83194C.1.pep
RLHELRSGSRDVVAQGRGSKRGGGVRRARLGSKPAGRLRRAVAVHXVTGDGNRRRRTARKAAASAQGNGARAVDGIGHGRERKREEREFSPWTSAARTRRRRRRGLTAVLAVASSGWRSGKGGGGGCSGAGAMEGTGGRGGKRKKVEGIAGELYRGSGGADVAGGLPISPATWEVERERVGGIQI

SEQ ID NO: 186391 - protein, 59 aa, Oryza sativa
  Clone ID: PAT_MRT4530_83195C.1.pep
WPLSKVLKPANCPGLLGLAWTREEMVVVSPWSMIWWKMNKGPFELQSELFMPPLVLFAE

SEQ ID NO: 186392 - protein, 406 aa, Oryza sativa
  unsure (1)..(406): unsure at all Xaa locations
  Clone ID: PAT_MRT4530_83196C.1.pep
MRAAGSPPPAAVMTAAAEALAGQRSLPTPFLTKTYQLVEDPAVDDVISWNEDXLNTYGFRKIVPDRWEFANDCFRRGEKRLLCDIHRRKVVAAAAAAPPPPSPGMATAAAAVASGAVTVAAAPIPMALPVTRAGSPAHSSEEQVLSSNSGSGEEHRQASGSGSAPGGGGGGSASGGDMGEENERLRRENARLTRELGHMKKLCNNILLLMSKYAATQHVEGSAGISSIANCSGESSEAVPPPPPLPPAILDLMPSCPALATAAAAAGLAIDGEPDPSARLFGVSIGLKRTRDDAAAAADEDGGGEDQAEHGGADVKPEAADPHPAGGGGGSSTEASPESHPWPIYRPTPMYHAVRPTCNGPDRAGSDQDGSSSSVRSIRMPVHSLVSFTSVLGVSAKNGGDIGRKH

SEQ ID NO: 186393 - protein, 287 aa, Oryza sativa
  unsure (1)..(287): unsure at all Xaa locations
  Clone ID: PAT_MRT4530_83197C.1.pep
GGAGGGRGGCGRRGAAAGGGDDGGGGGXAGQRSLPTPFLTKTYQLVEDPAVDDVISWNEDGSTFVVWRPAEFARDLLPKYFKHNNFSSFVRQLNTYGFRKIVPDRWEFANDCFRRGEKRLLCDIHRRKVVAAAAAAPPPPSPGMATAAAAVASGAVTTSDRLVGVSIGLKRARDDAAAADEDGGGEDQAEHGGADVKPEAADPHPAGGGGGSSTEASPESHPWPIYRPTPMYHAVRPTCNGPDRAGSDQDGSSSSVRSIRMPVHSLVSFTSVLGVSAKNGGDIGRKH

SEQ ID NO: 186394 - protein, 78 aa, Oryza sativa
  Clone ID: PAT_MRT4530_83198C.1.pep
GMIFKKSAGFFAKLPAPAPGDVVFTGSEHPSQKSPGALGGLHFAGPFNFSDTVTFTFQVTWSENRNSYQLVSAQHLKA

SEQ ID NO: 186395 - protein, 249 aa, Oryza sativa
  Clone ID: PAT_MRT4530_83199C.1.pep
MAGSSESDYYSEEEEELGWEEDGLGSEGEEEDAEAARERALKRLDGLGKRGVCYLSRVPPNMNPSHVRQMLSKYGEVQRIYLVPEGQGHRKHTNVRAKAYTEGWIEFSKKSVAKRVANLLNGEQIGGKKRSPFYYDIWNIKYLKKFKWDDLVGEIAEKTHIREQKLNLEIAAAKKQRDHYLSNVEKSRTLKHIQERRKKKQKTEGAEFNEVREEKIARPIPQKKPVEETDAKTKPKLPKDILAGVFGGP

SEQ ID NO: 186396 - protein, 143 aa, Oryza sativa
  unsure (1)..(143): unsure at all Xaa locations
  Clone ID: PAT_MRT4530_8319C.1.pep
TSVGWGGPXGGYVYQKAYLEFFCSKEKLDQLXEKSKAFPSLTYIAVNKDGESFSNIPTNAVNAVTWGVFPGKEIVQPTVVDSASFMVWKDEAFEIWSKGWACLFPEGDSSREILDKVQKSYFLVSLVDNDYINGDLFAAFKEI

SEQ ID NO: 186397 - protein, 190 aa, Oryza sativa
  Clone ID: PAT_MRT4530_831C.1.pep
MVRIDRRGHRCREIPRQRNCRTRRRWSTQSRPGPPASAPTHQRTTRPDATVSGGRGGRHRRCLRPNVAAREGRKRGRGTGAGFDIAARGRRRGEGRTDADVHAMSRARAADDEGEDGAAPIGLRHSVTSAYRGVATALDSEGRVAAATDLSLPTEPLPHPPSTPPPPSTGSRKREGICHWFHPLRSHRLF

SEQ ID NO: 186398 - protein, 445 aa, Oryza sativa
  unsure (1)..(445): unsure at all Xaa locations
  Clone ID: PAT_MRT4530_83200C.1.pep
GGAGGGRGGCGRRGAAAGGGDDGGGGGXAGQRSLPTPFLTKTYQLVEDPAVDDVISWNEDGSTFVVWRPAEFARDLLPKYFKHNNFSSFVRQLNTYGFRKIVPDRWEFANDCFRRGEKRLLCDIHRRKVVAAAAAAPPPPSPGMATAAAAVASGAVTVAAAPIPMALPVTRAGSPAHSSEEQVLSSNSGSGEEHRQASGSGSAPGGGGGGSASGGDMGEENERLRRENARLTRELGHMKKLCNNILLLMSKYAATQHVEGSAGISSIANCSGESSEAVPPPPPLPPAILDLMPSCPALATAAAAAGLAIDGEPDPSARLFGVSIGLKRTRDDAAAAADEDGGGEDQAEHGGADVKPEAADPHPAGGGGGSSTEASPESHPWPIYRPTPMYHAVRPTCNGPDRAGSDQDGSSSSVRSIRMPVHSLVSFTSVLGVSAKNGGDIGRKH

SEQ ID NO: 186399 - protein, 60 aa, Oryza sativa
  Clone ID: PAT_MRT4530_83201C.1.pep
ETWKQRENGNKLRDAHMLKEIDRSHCKSKLSRLLSIMNGVPEHLAAVGVSVDFLFIFSRY

SEQ ID NO: 186400 - protein, 232 aa, Oryza sativa
  Clone ID: PAT_MRT4530_83202C.1.pep
MASSSDPWVREYSEASRLADDVTSMIADRGSLPQSGPEIMRHTSAIRRKITILGTRLDSLEALLSRIPPKSITDKELHKRQDMLSNLKSRAKQMATSFNMSNFANREDLLGQSKKAADDMSRVAGLDNQGIVSLQRQVMKEQDEGLEKLEETVLSTKHIALAVNEELTLHTRLIDDLDDYVDVTNSRLQRVQKRLAILNKRVKGGCSCMALLISVVAIVFLAVIAWLLIKHL

SEQ ID NO: 186401 - protein, 112 aa, Oryza sativa
  Clone ID: PAT_MRT4530_83203C.1.pep
MDGWPQDTGGHATAVAVDGHEVSGPTSPDQTASLGNTCPRPIEFAAVQLQLQLQLQAEVAVQFAASGQASAYEPAGTISGSCELVVLVLPCLRRWSSRLAASPPLEKTSNER

SEQ ID NO: 186402 - protein, 133 aa, Oryza sativa
  Clone ID: PAT_MRT4530_83204C.1.pep
MEPSPDAPRAGAAEEQPGPSSSASAPAPAASSNEEEGRHQSQAQQQVQEAQPQPLAQHAPAAAGLSRYESQKRRDWNTFLQYLRNHKPPLTLPRCSGAHVIEFLKYLDQFGKTKVHADRCAYFGEPNPPAPCA

SEQ ID NO: 186403 - protein, 101 aa, Oryza sativa
  Clone ID: PAT_MRT4530_83205C.1.pep
MELLITIKHLHFDDSYFARSVLYFCTIGALSNVLLLKASSLSPSALTGAIAHGARLGEGEPEKIVPAAEALLMACVKLSNTRVPLAICANVELRGTERLFG

SEQ ID NO: 186404 - protein, 55 aa, Oryza sativa
  unsure (1)..(55): unsure at all Xaa locations
  Clone ID: PAT_MRT4530_83206C.1.pep
XXEREANNIXIGWVELEHKHKRLHGLVRLEQKTLDRARLCPGINNGIGIGRNQWS

SEQ ID NO: 186405 - protein, 85 aa, Oryza sativa
  Clone ID: PAT_MRT4530_83207C.1.pep
MAVSQHAEDIKLGMLVHEYQVPFVAFKLLDSGHLVQQAQARVDAPSNSSCSAASMTSCLSDKGSFQDGHLCRLLEEDEEANRREL

SEQ ID NO: 186406 - protein, 92 aa, Oryza sativa
  Clone ID: PAT_MRT4530_83208C.1.pep
MECSLSSTPLLCPHHHLPHPCGGLEEISALRDAKGGGGSWSLCEGGTPFAVHKFAANMPGDKVVPTVHHHCWSSPLYVSRTKVRRRCRPSPT

SEQ ID NO: 186407 - protein, 94 aa, Oryza sativa
  Clone ID: PAT_MRT4530_83209C.1.pep
MAAIKNNGAMVLCFATLFAMSVVFMSCDATGRHNAGVLDDAGVLCFTWLNCTNASCQKECKAGKWDAKKSSCGASDVCCCRAAKLLVLDEQAVR

SEQ ID NO: 186408 - protein, 106 aa, Oryza sativa
  Clone ID: PAT_MRT4530_8320C.1.pep
MGSLSFLSCLCLRCVTGGVKHIRHSCVAQGPLMPTCGLIQSYQHKIMAHWHQIVRLMNITMQMFQLVFSTVPDGFMLIRGNKMGVEFRVIAAEAAAAAMQRTALAN

SEQ ID NO: 186409 - protein, 132 aa, Oryza sativa
  Clone ID: PAT_MRT4530_83210C.1.pep
HEAQIRRALPIVVVASSTPPRSSSPPRSSLRGAAPPSSPCFAPPLLLPRSSPRGARRHRPLPPPSYPSTAARTPPPIRRHRPLPQPEPRSSPSATQIAPWQLTKFPTRGPPRLHRANPAVAPLITITPPPRL

SEQ ID NO: 186410 - protein, 65 aa, Oryza sativa
  unsure (1)..(65): unsure at all Xaa locations
  Clone ID: PAT_MRT4530_83211C.1.pep
LLAARRCXRRRRGGXVGAQRVSHPPTGHLPRXRXLLAPLSTLLSXFLLHSSHLQGGVAXGCGVAG

SEQ ID NO: 186411 - protein, 86 aa, Oryza sativa
  Clone ID: PAT_MRT4530_83212C.1.pep
SATGGGGHGDDEQHQPDIGALYWHQAMQAAEEAARDGDNSAVLCTPSAPILRGAACTPSTPTPAPPKLAAAMVGWTTTVKIEHGKR

SEQ ID NO: 186412 - protein, 530 aa, Oryza sativa
  Clone ID: PAT_MRT4530_83213C.1.pep
MYLYFCSPVESTKDCCLLLNCHILLLGTHKFSGVLLDKLISILAGQLLHLHLQGMKVKAIRVHKIGGPEVLTWEEVEIGEPSEGEIRIKNKAIGVNYVDIYYRTGLHQEPLPFVPDLVYGDSDNKIPTYFVKSNVSSWPGENSWLPSELIEYTGKEAVGVVSAVGPGVTGIEVGDVVGYADTPMGTYTEEQIIPATLAIPIPPSVDHITAASVLLKGMTTYVLVKQAFKIQAGHTVLVHAAAGGVGSLLCQWANALGATVIGTVSTQEKAIQAAEDGCHHVIIYTEEDFVAQVAEITSRKGVHVVYDAVGKDTFKGSMECLMPRGCMISYGQCSGRPDPVPVSDLASKSLILGRPGMRHYTATRDELLHAAGEVFAGVAAGVLRVRVNHVYPLHEAARAHADLEARRTSGSVWYQSPRFGTWNNFHGSHGGEARPNVTWVAYGWWAGLRTPTSGRLTFITSGENNFHGSHGNKVVSEPKVWIPEQFPWVTWWTGQLRLISTGKRDGGDHHSDKPHAGMSFQAVNLKDLTV

SEQ ID NO: 186413 - protein, 103 aa, Oryza sativa
  Clone ID: PAT_MRT4530_83214C.1.pep
MPAATPGSGGGGSQARDEVVAPLPRRRLGCRLLFDEADAEERSCIDVRSIRRRGCSPIHVAVEVDAAARSVEADLRVGTAEVLVTSGDEERRMMQQEGGKGGA

SEQ ID NO: 186414 - protein, 382 aa, Oryza sativa
  Clone ID: PAT_MRT4530_83215C.1.pep
MLLPRDLLLLPWRRATAAGEAIARRLNHHRAPPFSDPDDDPPFTRLAERPPRAPSKKKKKEEEDQGGRIRPPEPASSDLPFDFRYSYSETDPAWRPIGFREPTRFSPFGPGRLDRPWDGVAAAAARGEGAGAAATSREEVLGEPLAEEEVAQLVERYRHSDCSRQINLGKGGVTHNMIDDIHNHWKRAEAVRIKCLGVPTLDMDNICFHLECTIVQDKTGGKVIYRNINILILYRGRNYDPKQRPQIPLMLWKPLAPIYPRLVQNVADGLTFEKTKELRNTGLNSSPLMKLTRNGVYVNVVDRVREAFKTVEVVRLDCSHVGSSDCKKIGVKLRDLVPCVPLLFKDEQIILWRGKLSGIWSCLKELPVLHEMKTLLYLSAEH

SEQ ID NO: 186415 - protein, 115 aa, Oryza sativa
  Clone ID: PAT_MRT4530_83216C.1.pep
FGFLNFFVFFFFFFFFFFFFFFFACSKTPINFCTNRLLPTKRCLHGSPKKNNFPKKDSFKKVKTNPKSSLAILAIPLALSFKPCQLNHVPKNSYLFNKDKFIKKIYLIIGWGKPI

SEQ ID NO: 186416 - protein, 139 aa, Oryza sativa
  Clone ID: PAT_MRT4530_83217C.1.pep
ARCQPDPPPPQSQTEAQPPRCHHGPPRRRSGPATVATQSLELAPSPHGPDSGVGGPDLPPPHDALPSSPPTTEVDAVGFAPTSSCQGGCRRAQLASPPPSQLAGSTPASSGGGEVEERAGITARGRLRFPLPSRPPVFL

SEQ ID NO: 186417 - protein, 400 aa, Oryza sativa
  Clone ID: PAT_MRT4530_83218C.1.pep
MGHHCCSKQKVKRGLWSPEEDEKLVRYISEHGHSCWSSVPKHAGLQRCGKSCRLRWINYLRPDLKRGTFSEQEERTIIDVHRILGNRWAQIAKHLPGRTDNEVKNFWNSCIKKKLIAQGLDPKTHNLLPASKTLLHGGGGGGAANPSGNGLAQFQSNNGAAAAGTTPFTISSPAKAAAYDVAPPALYDVVLPANPAGGMLMAHDHHHHHQVAAAAAPVGYPYADHGGNGGGVLMSFRDQNAGVHGAASMDFMNGSSSSSSMEQLGGGGGMSSNGNGSFSASMAAFMDEEAAMWATAVAPPGMGGLAGMDQVAQQQQQQQVLVQDAAVGVAPTTLMMHGGGAATAGAMVVDKSVEMVDVSSAVYGGATATAFDLDLMVESCGMFCGGGGAGNAMEQLQWDC

SEQ ID NO: 186418 - protein, 169 aa, Oryza sativa
  Clone ID: PAT_MRT4530_83219C.1.pep
MTAADGAHGGAADDRPPRAPSNRRRCRPPPLRAGAGVAVHHAAAASLARRRLSPQIGADPDRTRHRRRPPAQRAGAGGAMLDAAAAPSARRRRTHARVRESCHGVYAAMASCCCLPETARSGTHYAAAQLYSNVYLHQEATVKELYIEGRVELEFRRNLSKEDKQDLEM

SEQ ID NO: 186419 - protein, 36 aa, Oryza sativa
  Clone ID: PAT_MRT4530_8321C.1.pep
HGQPSFLIIDYHECISGALKNFFFKKIKGEQRCLSS

SEQ ID NO: 186420 - protein, 312 aa, Oryza sativa
  Clone ID: PAT_MRT4530_83220C.1.pep
MEFTPISPPTRVAGGEEDSERGAAAWAVVEKEHMFEKVVTPSDVGKLNRLVIPKQHAERYFPLDAAAGAGGGGGGGGGGGGGKGLVLSFEDRTGKAWRFRYSYWNSSQSYVMTKGWSRFVKEKRLGAGDTVSFGRGLGDAARGRLFIDFRRRRQDAGSFMFPPTAAPPSHSHHHHQRHHPPLPSVPLCPWRDYTTAYGGGYGYGYGGGSTPASSRHVLFLRPQVPAAVVLKSVPVHVAATSAVQEAATTTRPKRVRLFGVNLDCPAAMDDDDDIAGAASRTAASSLLQLPSPSSSTSSSTAGKKMCSLDLGL

SEQ ID NO: 186421 - protein, 105 aa, Oryza sativa
  unsure (1)..(105): unsure at all Xaa locations
  Clone ID: PAT_MRT4530_83221C.1.pep
FYFDNGRVNSRVCNCLPVNEVPFYSWLCDCRHTIPAKQRCGFDTIIVPGAWSIWKERNXLRVFEHRQRSGTEGAKAMSEEATLWRLARTAIPQLGLGHTIVLGDQ

SEQ ID NO: 186422 - protein, 297 aa, Oryza sativa
  Clone ID: PAT_MRT4530_83222C.1.pep
MASDPLDTSISMEITAFWLWLEGNYDHTDYLERIDSFDDDHFQAIAFVAKSFVETLNLDHCDLSNTRSPFQQEAIEGIAFYLNNVCYKALKDLHGHEETEEFPDQICRDNEGNLNDQVPLSTDDLLSKIKSLYANNQENHGESSSYRSIQYPRNHILQDTKVAIDEYASSSCLVSFLDNLSLREKHSDPVVQQPSDVPNDERTLFVTFSNGYPLSKDELYDFFMRHYGDIEDITIEEPPEPRPPLFAQVTFYSQLTLLRVLDGNKRVKFMTRGKHLWARQFVPKKKKSKNDEANLID

SEQ ID NO: 186423 - protein, 46 aa, Oryza sativa
  Clone ID: PAT_MRT4530_83223C.1.pep
LFDYTIKLALWLSSFVQVQNFLSFLLTFLKLLNGVFFVKKIYRKVV

SEQ ID NO: 186424 - protein, 163 aa, Oryza sativa
  Clone ID: PAT_MRT4530_83224C.1.pep
VIIAISHGCAGVAARACGLVGMEPAKVAEILKDRPLWLRDCRSMDVVNVLPAGANGTIELLYMQLYAPTTLAPARDFWLLRYTSILDDGSLVVCERSLSSKQGGPSMPLVQPFIRGEMLPSGFLIRPSDVGGSVIHIVDHMDLEPWSVPEVVRPLYESSAMVA

SEQ ID NO: 186425 - protein, 146 aa, Oryza sativa
  unsure (1)..(146): unsure at all Xaa locations
  Clone ID: PAT_MRT4530_83225C.1.pep
SIDEVSVETQESTAVNADLTSRLAQIEDELQXLTCENEDKXEKLKDITVIXQGHGRTRELTQSLQFRDEXTDLHMENDINDIRGLQDDLRSSNENLLREERLIXSFXSILASLTSKLSQKSMAVLFNFLCSLSCLQFVHLLDRLGN

SEQ ID NO: 186426 - protein, 110 aa, Oryza sativa
  Clone ID: PAT_MRT4530_83226C.1.pep
LISVVLNGRSSCSTCSLQLYAPTTLAPAHEFWLLRYTSILGDGSLVVCERSLSSKQGGPSMPLVQPFIRDEMLPSGFLIRTSDGGGSVIHIVDHMDLEPWSVPEVVRTLV

SEQ ID NO: 186427 - protein, 342 aa, Oryza sativa
  unsure (1)..(342): unsure at all Xaa locations
  Clone ID: PAT_MRT4530_83227C.1.pep
MALPQRMMGPRIIVNKYFDVIKDNPTWKVEHIKKSVLKDMLVDVPISKCKRAKALVLQEALDKTRXRVSRVYDYQLELLRSNPGSIVVVTLNPDILDKKVFERFYVCFDACRKGFLAGCRRVIGLDGCFFKGACNGELICAIGRDANNXMYPIAWASVEKEIYDSWYWFLGXAKKDLNINDGGEGWVIISDQXKGLIKAVAELITRVEHRMCARQIYANWRKKDTDQKLQKKIXNCAKSSCRELFNYNRAKLAQDTPQGAKDMMTTTPEHWSRAFFQLVSNCDSADNNMCESFNNSIMDSRFFLVISMNEAIRFKVFSTLAALFSSTRRCPPKVRPSPLAPA

SEQ ID NO: 186428 - protein, 686 aa, Oryza sativa
  Clone ID: PAT_MRT4530_83228C.1.pep
MANHLYITGTACESHEQPATAAKRHLDIRRCDGLTKMVEEFWFPARGLWTNVVGDENHGRRPSSRHGEQSRRAASLPKPRHRGDLGRRPLAVPQRAWLRTALPLPDDVMQEQELPPLLPYVFTPQKEWIGVNQQRCGLCSDLGRGGYKNTAMRSGAVCGGPSMPADGDGSLHLRIPHQHAALQVKLLYMQARTDKPENFCGKFLAQPEIPKLKSVFSLQLYAPTTLAPAHDFWLLRYTSILGDGSLVVCERSLSSKQGGPSMPLVQPFIRDEMLPSGFLIRPSDGGGSVIHIVDHMDLEPWSVPEVVRPLYESSALVAQKISMASCKIQSLRCLRQVAYKDTRSVITGWGRKLAALHALSQKAHHVGLLNSRCFLVLAMNLQFKSVKNNFACSLFRGFNEVLNGLADDGWSVIESDGIDDVCISVNSSKVTGCNATFSSGLTIVSTGVLCAKASMLLQFLEVIKLGNTRNYQDTLVHRDLFLLQDTSSSNCMLDLASMLEAATPWSRISGINCSGCAAAASSKAVMTIAFQFVFESHLQGSVPAMAQQYMCSIISSVQRIAVVLSSSRLVPPGVAAATQHAPATRCCPDGFARAIDANSSSESVLKAVWHHPSAILYCSLKVMPVFTFANRRRRRRQAQDGGGGKSCNSSSICASLDVKSAFITVMPGKSCNSSQGSGMREDIVCR

SEQ ID NO: 186429 - protein, 216 aa, Oryza sativa
  Clone ID: PAT_MRT4530_83229C.1.pep
MHSPSLLLILCAAVASFLIFLCGGDGGAAAAAGGPRSVKMASSLYVPQLTRWRVALGGVSRGVVEHEGKVHLVVSRGEDDDRVVAAAGKEEEKEDEDEDPRERVEIGGRLFPVVDETEVALHGGKVVRAVEYGERRGSPAAPLLLTVTEGKEKEVAEVVGAPDGGGVLRVVGCGCYADPVTGTVQHMVDVQGSEAFVLLVSVREELGRIVSIKRLN

SEQ ID NO: 186430 - protein, 53 aa, Oryza sativa
  Clone ID: PAT_MRT4530_8322C.1.pep
FGVMLLVVSTIHWTPDIRDLSDGQISFMPVLYDSVGPLVQNFHSAGHYLNKKT

SEQ ID NO: 186431 - protein, 199 aa, Oryza sativa
  unsure (1)..(199): unsure at all Xaa locations
  Clone ID: PAT_MRT4530_83230C.1.pep
CCAKWKVKLLYMQARTDKPENFCGKFLAQPEIPKLKSVFSLQLYAPTTLAPAHDFWLLRYTSILGDGSLVVCERSLSSKQGGPSMPLVQPFIRDEMLPSGFLIRPSDGGGSVIHIVDHMDLEPWSVPEVVRPLYESSALVAQKISMASLCCLRQVAYKDTRSVITGWGRKLAALHALSQKXLTTGFNEVLNGLADDGWS

SEQ ID NO: 186432 - protein, 886 aa, Oryza sativa
  Clone ID: PAT_MRT4530_83231C.1.pep
MDASKYVRYTPEQVEALERLYYECPKPSSLRRQQLVRECPALANVDPKQIKVWFQNRRCREKQRKESSRLQALNRKLTAMNKLLMEENDRLQKQVSQLVYDHGRHGVAAAGMMRRVPAFPPQAAAAAGHQLATATDTSCESVVTSGHHHQQQQHNVVQPPPRDASPAGLMSIAEETLTEFLSKATGTAVEWLQMPGMKPGPDSIGIIAISHGCAGVAARACGLVGMEPAKVAEILKDRPLWLRDCRSMDVVNVLPAGANGTIELLYMQARTHKPENSEPEPEILKLKFVFDLQLYAPTTLAPARDFWLLRYTSILDDGSLVVCERSLSSKQGGPSMPLVQPFIRGEMLPSGFLIRPSDVGGSVIHIVDHMDLEPWSVPEVVRPLYESSAMVAQKISMAALRYLRQVAHEDTRSVITGWGRQPAALRALSQKLTRGFNEALNGLADDGWSVIESDGVDDVCISVNSSKVIGCNATFSSGLPIVSTGVLCAKASMLLQDVSPPSLLQFLREHRSQWADSNLDAFFASTMKPNFCNLPMSRLGGFSGQVILPLAHTFEPEEFLEVIKLGNASNYQDTLVHRDLFLLQMYNGVEESSAGTCSELIFAPIDASFSDDSPLLPSGFRIIPIDSPLDTSSPNCTLDLASTLEAATPRSRISGVNGGGGGCAAAAASSSSKAVMTIAFQFAFDGHLQDSVAAMARQYMRNIISSVQRIAVALSSSRLVPPGAGAAAAQLSPVTPEAATLPRWICQSYRFHFGDELIKSVDANSSNESILKAVWHHPSAILCCSLKAMPVFTFANQSGLDMLETTLVALQDMTLEKVFDDQGRKNLCTELPNIMEQGMACMEGGVCVSSVGRAASYEKAVAWKVVDGDGGGAHCICFMFINWTFL

SEQ ID NO: 186433 - protein, 58 aa, Oryza sativa
  Clone ID: PAT_MRT4530_83232C.1.pep
ITTLLQCYFYHPKAGYSSTLFHSLSVICVHVYSASKHIAFVNTCCHCPFDRPQKSHPS

SEQ ID NO: 186434 - protein, 653 aa, Oryza sativa
  unsure (1)..(653): unsure at all Xaa locations
  Clone ID: PAT_MRT4530_83233C.1.pep
MANHLYITGTACESHEQPATAAKRHLDIRRCDGLTKMVEEFWFPARGLWTNVVGDENHGRRPSSRHGEQSRRAASLPKPRHRGDLGRRPLAVPQRAWLRTALPLPDDVMQEQELPPLLPYVFTPQKEWIGVNQQRCGLCSDLGRGGYKNTAMRSGAVCGGPSMPADGDGSLHLRIPHQHAALQVKLLYMQARTDKPENFCGKFLAQPEIPKLKSVFSLQLYAPTTLAPAHDFWLLRYTSILGDGSLVVCERSLSSKQGGPSMPLVQPFIRDEMLPSGFLIRPSDGGGSVIHIVDHMDLEPWSVPEVVRPLYESSALVAQKISMASCKIQSLRCLRQVAYKDTRSVITGWGRKLAALHALSQKAHHVGLLNSRCFLVLAMNLQFKSVKNNFACSLFRGFNEVLNGLADDGWSVIESDGIDDVCISVNSSKVTGCNATFSSGLTIVSTGVLCAKASMLLQFLEVIKLGNTRNYQDTLVHRDLFLLQDTSSSNCMLDLASMLEAATPWSRISGINSSGCAAAASSKAVMTIAFQFAFESHLQGSVPAMAQQYMCSIISSVQRIAVVLSSSRLVPPGVAAATQHAPATXVLPRWICQSYRFHFGAELIKSADANSSSESVLKAVWHHPSAILYCSLKASSASIFLFLIKIQILPRFL

SEQ ID NO: 186435 - protein, 211 aa, Oryza sativa
  unsure (1)..(211): unsure at all Xaa locations
  Clone ID: PAT_MRT4530_83234C.1.pep
ACVKNWTKIKTHASTSLFGCPIGTLLFTYLGLPLGTKPPNVIDFATLTDRIERRLPSATTFLSYGDRLTLVNSVFSSPPNVXICVLCLPESVXKSIDRVRRHCLWRGSDIISTSSISLVLWDRVCQPKXRGGLQVINLRLQNNALLMKSLRKVYNRMPLPWVKLIWNTYYMNKXHMIHPLEAFWXRDICQFMDIFRGIACCQPKDGKTCLY

SEQ ID NO: 186436 - protein, 149 aa, Oryza sativa
  Clone ID: PAT_MRT4530_83235C.1.pep
KTTPAGEYLTSALMDFDPNQFEGVAAIADGANKLLMLVLAAVIKAGAAREHEILAEIRDAVFSFIRKMEPRKVMDTMLVSRVKILYIRSLLARSPELQSIKVSPVERFLEKSHTSRSRSSSRGSSPGRSPVHHHHDHGSRTSLIDEHVH

SEQ ID NO: 186437 - protein, 67 aa, Oryza sativa
  Clone ID: PAT_MRT4530_83236C.1.pep
YKRCETFRKYRKCVANKRSQCQCRVFVLCIFMHSFPSLNNLCVCEPSHSGAHCTFHLVSYRFMHLGT

SEQ ID NO: 186438 - protein, 1285 aa, Oryza sativa
  Clone ID: PAT_MRT4530_83237C.1.pep
MADTRGRWAWDVPGFEPPQPVVGAAAGMPLAPPTAMPRAPPYRHGGPRRRGPTGRWFPVADRLDQLADSVPDQAALETEARITPLIHEKKRLFNDLLTLKGNVKVFCRSRPLFEDEGSSVVEFPDDFTIRVNTGDESLTNPKKDYEFDRVYGPHIGQGELFHDVQPLVQSALDGYNVAIFAYGQSRSGKTHTLVADTSVLSISPGHIVLEFYEGSSHDRGLYLRSFEELFDLSNSDTTSTSHFNFYITACELYNDQVRDLLSDSISPVPKVRMGVQESFVELVQEKVENPLEFSNSLKAALENRSANSLKVMVSHLIVTIHIHYRNYVTGEHLYSKLSLVDLPASECLLEEDANRDNVTDFLHVSKSLSALGDALASLSAKKEPVLSGNSRITQILADSLGSSSKTLLIVHVSPSASNLSRTLSTLSFSARAKNAELSLGNRDTIKKWKDVANDSRKELHDKEKEVLDLRQEVLGLKLSLKEANDQCTLLFNEVQKAWRVSSTLQADLKSENLMLAEKHRIEKEQNNQLRDQISRLLEVEQEQKIKMHERDLTIQSLQAKLKSIESQLNEALNSSDARSTIGSESASVISTPKMMESTADSSSVTKRLEEELAKRDALIEKLHEENEKLFDRLTEKSGLGSSPQAPSPSNKQTNAQGRDIGRSDSTKSQSSDVFPLPVSQDKAGNSGAIVKSSNELTKTTPAGEYLTSALMDFDPNQFEGVAAIADGANKLLMLPYFHCHRDYNETPPISDWCMVLAAVIKAGAAREHEILAEIRDAVFSFIRKMEPRKVMDTMLVSRVKILYIRSLLARSPELQSIKVSPVERFLEKSHTSRSRSSSRGSSPGRSPVHHHHDHGSRTSLIDEHVHGFKVNIKPDRKSKFSSIVLKLRGIEEETWRQHVTGGKLREITEEAKAFAIGNKALAALFVHTPAGELQRQIRAWLAENFEFLSVTGGDVAGASGQLELLSTAIMDGWMAGLGTARPPSTDALGQLLSEYTKRVYTSQLHHLKDIAGTLATEVADDPAHVSKLRSALESVDHKRRKIMQQMRTDTVLLTKEEGGSPIRNPPTAAEDARLASLISLDNIIKQVKEVMRQSSARPLRKSKKKALLESLDDLLAQMPSLLDVDHPCAQKQIMEARKVVESLQEDPDEPATDLNSNTLGESEVSQWNVLQFNTGTSAPFIIKCGANSSCELVIKADQKIQEPKGDEIIRVVPKPSVLAEMSFEEIKGVFEELPEAISLLALARTADGTRARYSRLYRTLANKVPALKDIVAEMEKGGVFKDVRS

SEQ ID NO: 186439 - protein, 90 aa, Oryza sativa
  Clone ID: PAT_MRT4530_83238C.1.pep
DELIKDQDFSYGIFKQGSVECFLSQENRNKTIYRSNPTYPVSKGAMPHEHNQRNRASTSNVTKTTSQVSTKKRITQQHIKQICRTKRQAL

SEQ ID NO: 186440 - protein, 90 aa, Oryza sativa
  unsure (1)..(90): unsure at all Xaa locations
  Clone ID: PAT_MRT4530_83239C.1.pep
FFFFSRNXXFSLQIQIEIQNTICQILNANTQGVPSTRTMHTALLKSPPRTYVHNYTNPXKRKVLLYXXHNXRSSGGAMVASSSASPSSXS

SEQ ID NO: 186441 - protein, 363 aa, Oryza sativa
  unsure (1)..(363): unsure at all Xaa locations
  Clone ID: PAT_MRT4530_8323C.1.pep
GRRRRPSGRGRAASRRLRRLGRPRARRVAAAWGPAVSRPRPRPHPRARAADGRXPPGSRGARPKAASPARPTGGGAPAPRWSPPAXQQRGGAAPEREEGRGKRKERSTAHPGSTRTAETTTGAEEGGGAVRIDEDGGAPTVGGRNEGVAEVDGDAAKPKEVTPSREEVQSDYGGEPELGGDGGERGRRRGHESDGEERRRVAETVEESTGVAXIGLGVREGGRRRWKPARRIRPPLMAPARFAGVNPDESEGEREGKTGGKREGIVGNISPLFIARGXAGGGEIRGGGGARARAXRRERREEGDDRWAPPVSEGGGRARLSAARARGGSRWXRGEEREREGELGRAGPREEGGKRRLLGIFFL

SEQ ID NO: 186442 - protein, 62 aa, Oryza sativa
  Clone ID: PAT_MRT4530_83240C.1.pep
MAALSIGQLLSHKKQAQARPVPFDLNLEAGEIRIHEREHGQQRLNNVQLVRQVGHHPMRLVC

SEQ ID NO: 186443 - protein, 57 aa, Oryza sativa
  Clone ID: PAT_MRT4530_83241C.1.pep
DELIKDQDFSYGIFKQGSVECFLSQENRNKTIYRSNPTYPVSKGAMPHEHNQRNRAS

SEQ ID NO: 186444 - protein, 145 aa, Oryza sativa
  Clone ID: PAT_MRT4530_83243C.1.pep
FFFFFFKFCMTILFRFVSPRCFNLSHTMMHDFIFLSCTHSSLAHNSITQITHLTVSVQCVTKWQRGWFVRLGSALSGIIWTGKVLSGANISFGCLAALRPLHPHMSRTCPKPTNVGCVQAFVQPCIGDPTFCPWKTNLGQSCGAL

SEQ ID NO: 186445 - protein, 975 aa, Oryza sativa
  unsure (1)..(975): unsure at all Xaa locations
  Clone ID: PAT_MRT4530_83244C.1.pep
GRPAALLALGNGAYIEHRPVIVTFGEGVAGQVRNGSAGFIFEAEWVHEENCEAVVSNAWRLSMNTGTGRVADAVRDVAGDLWDWSRNILGDLEKRIKKVKKDLEACRRGGLDGASVHREQMLQCKLEKLEDQCLLQQVPTKVTDAMNMELMKPYSDEEIKXALFSMGDLKAPGPDGMPALFYKNFWETMGLDVGKEVKSLLIGSEMPAHWNETVVVLIPKVVANRLKRILPEIISLNQSAFVPGRMIMDNVLLAYELTHFLQNKRRGSGKFAALKLDMSKAYNRVEWEFLRRMMGKLGFCQEWINIVMGFVSTVSYRIKVNGDLTEQIIPXRRLRQGDPLSPYLFLLCAEAFSCLLNSAEDRGDIEGMRVCQGAPIINHLLFADDSLLLFKINNQSSTHLXNVLSLYEDCLGQTINKDKSTIMFSKNSTTVEKENVMAGLGIQSEARNEKYLGLPIYMGRSRSQTFSYLKDRVWKRLQGWKERLLSKAGKEILIKSVVQSIPTYAMSCFDLTKTLCNELGSLVCRFWWAQQENENKVHWVSWELLCRRKEQGGIGYRDLHLFNLAMLARQGWRLIMEPMSLCAQVLRAKYFPTGDLMAVREKPGISYSWRSIVRGIQALKKGLIWRVGDGTNIDIWHDPWLPSGITRRPITPRGRTVVNKVTDLIDPTIGKWDKELIEGLFWEEDVKQILTIPIRAGVEDGLAWHFDNRGIFSVKSAYHVLEDERRRHKPKQDGASSSGQTNMEKLCWQQIWKLPYLPKVKHFIWHLAHNSLPFRMSIQKRGMQIDTRCPVCHRQNEDGGHYFLKCKLMRKCWQSLDLEECRLELVQMQSAXNLWTKSCRKVTVKTTIFYLLWVWWSARNKXKRRGGEANTWKAPPPGILKINFDGAYREMSRDGAWGFVIRGENGRGVLAGSGRLPMVSDALMAEAEACLAALEAAIDHGISRVIIESDCLNLAMQPITMETVLTELVAPHRET

SEQ ID NO: 186446 - protein, 63 aa, Oryza sativa
  Clone ID: PAT_MRT4530_83245C.1.pep
MAIDFCGSDLGLPWKMNRAVRVNRAREDSREAAARNEAMHLQSYSVYSSVGSVLLSGEAAGDK

SEQ ID NO: 186447 - protein, 1486 aa, Oryza sativa
  Clone ID: PAT_MRT4530_83246C.1.pep
MEAVEGMMERMKLSMAEKKGIRVQAEGSGSQLAAPQAVGKVLAEKLVGADGLAQTLGRIWCPIKGVMCKDLGENHFLFTFLQGSGKKRALDDGPWMFGKDLVEIEFVSIPIWIRVMKLPCGMMNRCTGKAIGDEVGTFLEMDMDENCTAVGRFLRIKIRLDIRKPLMRGVTVMIGKEEKALWCPLEYEFLPDFCYSCGIIGHTNKICEKEVMKGELPPFNKQLRCIPSKKRSDDGYGDRGIGGRLQLGWRAGSGGSRESFGGSGSRSGSGKPAKVGEEEVTSSIKVVEKLAVRPNVGRALVLEKEVHDLVLEDLVVNAPKVSSGQTNDGGKEDGSSIVTEHSVMQSMQNDVGGVGGSLGKKEEVFGESKTGGRAKYKRRSRGEGQAVARASVVTLERKRQIEDAVMEDGDSKKAKIGAPDCDAGLSEQPCETQWRSGGLAIFWRRGIAFTLRAVSRLYIDGDVVGTNGLTWRFTGFYGEPKSDQREVSWKALRVLNAAGQNPWLCMGDFNEILMNGEKEGGHPRSQICMDRFKGALDECGLEDLGYTGDMFTWRNNCKSSQQYIRERLDIAVADRAWQNHFPDFHVRNGDPHHSDHRPVIVTFGEGVAGQVRNGSAGFRFEAEWVHEENCEAVVSNAWRLSMNTGTGRVADAVRDVAGDLWDWSRNILGDLEKRIKKRAKTHWLQYGDRNTRFFHQFASERKRANRIRKLVKEDGSAVVNQDGMCSLVTDYYRTLFTSQQGTRYDELLQQVPTKVTDAMNMELMKPYSDEEIKNALFSMGDLKAPGLDGMPALFYKNFWEKVGLDVGKEVKSLLNGSEMPAHWNETVVVLIPKIPNPERLKDLRPISLCNVVYKIASKVVANRLKRILPEIISLNQSAFVPGRMITDNVLLAFELTHFLQNKRRGSDKFAALKLDMSKAYDRVEWEFLRRMMGKLGFCQEWINIVMGFVSTVSYRIKVNGDLTEQIIPQRGLRQGDPLSPYLFLLCAKAFSCLLNSAEDRGDIEGVRVCQGGPIINHLLFADDSLLLFKINNQSSAHLQNVLSLYEDCSGQTINKDKSMIMFSKNSTTLEKENVMAGLGIQSEARNEKYLGLPIYMGRSRSQTFSYLKDRVCKRLQGWKERLLSKAGKEILIKSVVQSIPTYAMSCFDLTKNLCDELGSLVCRFWWAQQENENKVHWVSWELLCRRKEQGGIGYRDLHLFNLAMLARQGWRLIMEPMSLCAQVLRAKYFPTGDLMATTYYTPGENCVNKVVDLIDPTTGKWDKELIEGSLTRATPNPPHHQHYCRTLPLMNDCKEKRIYCVSGLGFRWTGRTGDGSRERTAEINPSKTDGRDRSVHDRLTANGPDDVGDDVTTGGGGSAAQMAHARQRTAALRHERRAPTGSGQHGELTGDQSDGRRGTDGDGDEEEAAALFGSTAAMVLRRSSAAAKGRTRTAETWRSRRWPSRATTTTGTAATHGWSDGGDGGAKLHGARALRTTRGEGEGGGG

SEQ ID NO: 186448 - protein, 210 aa, Oryza sativa
  Clone ID: PAT_MRT4530_83247C.1.pep
MAAFATATPSPAISVSPWSMSSLRAALPSPTRASPAGKLRSSFSPAAAATAASVGCLSSFSGLTPISPLLSLGEETSSFEHRLFGIDARGRIVAMRHGRRVPKLSRPPDQRKALLRGLTTQLLKYGRIKTTRPRAKAMRKYVEKMITLAKDGSLHKRRQALAFIYEKHIVHALFAEVADRYGEREGGYTRIIPTFPRRGDNAPMAYIELV

SEQ ID NO: 186449 - protein, 102 aa, Oryza sativa
  Clone ID: PAT_MRT4530_83248C.1.pep
QGRGIGTLKRPQKNLGTGGGPPHPYWKPNKSNLFLPPFFLRKKNPDQKNLGSQPQLRGKKICQNRKGNCPGPHSPGRGARPSNVLGPKKTPKPIGALLTISP

SEQ ID NO: 186450 - protein, 139 aa, Oryza sativa
  Clone ID: PAT_MRT4530_83249C.1.pep
FVVFFFFFFFFLFFFFFFFVEKKKGFAVFKSPIHFWDSHTIHRTLAYITTTVGRLTQKGGTIPNFFSINPRPQGNDCIQRFGETPFSLTSLIAVPPHSLGFQAPKMPCSMQKVRFLDKSNHAGHTKILKVGKEDNWGCI

SEQ ID NO: 186451 - protein, 146 aa, Oryza sativa
  Clone ID: PAT_MRT4530_8324C.1.pep
WSNHYHFHKFSGTRVRIVCMLNTNHIGSKNEFAQINLFQLDLNITIMVIQVSTIYTTISIYAYPSSGGSNMGRGVQLNPETFLGTIKLLLVLRLRQISRTEARVNANSRKECVGGPRHRERERWERGCASPMWRKQQDERRSLARS

SEQ ID NO: 186452 - protein, 185 aa, Oryza sativa
  Clone ID: PAT_MRT4530_83250C.1.pep
AGIRHEARLRRCRHPPPPPQVLAPASPSSTSRPGKEREDGGDGGGRKEGEGGADFDLAGAAAGWVEARTSCPHLPAMGAASADDLARVPPPDSPCSRCHHPAENWLCLICKDVLCSRFINKHMLYHYQDTGHCLALSFSDLSVWCFACDSYLDVQSILELRPVYEVAHLMKFRQRPPFRSLDVLD

SEQ ID NO: 186453 - protein, 50 aa, Oryza sativa
  Clone ID: PAT_MRT4530_83251C.1.pep
AVGASALLSCCNNGTFVEAHNRAYAQRKLAALDRGSSVASRLSGLSEKTN

SEQ ID NO: 186454 - protein, 99 aa, Oryza sativa
  Clone ID: PAT_MRT4530_83252C.1.pep
MASISRTMGNLKAATHDGIDDSTHGFNSFGLLGLIRSNLNICGRMIWTPIHQKFQRMMGNIVANYDMDTHTIAMCDMRFDTVQVLSCNAALRLTMDLSA

SEQ ID NO: 186455 - protein, 428 aa, Oryza sativa
  Clone ID: PAT_MRT4530_83253C.1.pep
MGRSPCCDENGLKKGPWTTEEDEKLMEYIQKNGHGSWRALPKLAGLNRCGKSCRLRWTNYLRPDIKRGKFTSAEKDTILQLHAVLGNKWSAIAKHLPGRTDNEIKNYWNTHLKKDLIQKGIDPTTHRPRTDFFAALPQLIALANLRQLVGQLPWDDPAAAAAGLQQAEAAQAAKFGQYLHLQALLQPPPPSAATSPRSGCIGGAAAAMPGGDMEQMGAGLLSPPAMSSAALSPMSTSSLSPLPSPMSSTALSPLPPSSFFGNGGQGSFLAGQLPNIQMHGSSLFDQSAAIINDANHNQDYAASTGEREIINGATKTTTTTLLPEGSLPPLADYPTISNLGDVYSTPSCDGNITEFPLLPDALFDELMRDYISNCFLEDWKNTDSKNLDVSDILQIQVAVKILPLASLSGIGPEPHLSVRESAAQCQKA

SEQ ID NO: 186456 - protein, 65 aa, Oryza sativa
  Clone ID: PAT_MRT4530_83254C.1.pep
GQPLLPPLIGEKGPPPRFKTTGLRGGSFFFGGEIKKKEEIPPGFKKKINPFFPGGIKKVPWELTP

SEQ ID NO: 186457 - protein, 101 aa, Oryza sativa
  Clone ID: PAT_MRT4530_83255C.1.pep
TETRIFIQVRAPELSVDNRVVFLLESVPDEIRDSAFVFPDSIRRHRRGLAVLIPEVDIRRLVLAYIGFYLSGTPSISKVSFRIRHGIWWVLPRFNQLPLGM

SEQ ID NO: 186458 - protein, 93 aa, Oryza sativa
  Clone ID: PAT_MRT4530_83256C.1.pep
AGHEGVRAVIPVPVRVLSFPGRRAYFPRGVGVRGHHAVLQVQPYQGGAVTKSSGVRASCPCRRRGPSRSTKLDPRPSISAPSIIAACELIFCL

SEQ ID NO: 186459 - protein, 97 aa, Oryza sativa
  Clone ID: PAT_MRT4530_83257C.1.pep
PTRALVSSAKKRVNSHNGVREGDSLTATSAQFFLWGKCSAGRNHGSFCVVSCVFLGSDLTDARRRRREQQREGMRACMIARMQGQLLSPISFATASA

SEQ ID NO: 186460 - protein, 328 aa, Oryza sativa
  Clone ID: PAT_MRT4530_83258C.1.pep
MDGATFCEANLFYFQFEDGHRDKRNVTLELAYQYASKGASLALVARRKQALKSVAAAARERGAPDVLVLDADVSDAGQSRRAVEETIAHYGKLNHLVANAGIWSTCPFDEITNITAFTTIMDVNFWGAVYPTYYALPHLKASRGKLVVCSSAAGTVATSRMSFYNASKAAVLRFYETLRAELGSEVGVTILTHGYVESEMTMGKAVQKDGVLVVDQEARDVQIGVFPVGGVGAMCRVAMDGIRRGDRYVTWPSVYRPLQLVACLAPEIVSWLSYAMYNTKAGGGAPLSKRALDATGARRFFPEGLRRNPVVIKTDEECDGDEGVAACN

SEQ ID NO: 186461 - protein, 163 aa, Oryza sativa
  Clone ID: PAT_MRT4530_83259C.1.pep
SPLVMKGCTPPERTDGSCCNLQHGKKPVEATPRTATKKNKKQKRVGTGIVLGGRNPPRDENQPEIRSYHERFQPPRRIKKQPEMRCERSSTGGGGGGNLGGNKSGGNGESKRGIAARFLLLSRSSPPRGSGWLVATGNKQTQRKEERGAIKFATKIRTKATRT

SEQ ID NO: 186462 - protein, 52 aa, Oryza sativa
  Clone ID: PAT_MRT4530_83260C.1.pep
HVHRTFHSTLTSLIISTKVTVLFIEQSAMEWYDTSQKKKTNGHKSERILKGR

SEQ ID NO: 186463 - protein, 153 aa, Oryza sativa
  unsure (1)..(153): unsure at all Xaa locations
  Clone ID: PAT_MRT4530_83261C.1.pep
DGDRSMGTFVDVGLSKNVLVEQMLEPGKRVTIAMGTNRDITTAGKRQIGAASSARDETEKDRGKTVGHASKEGGVVRESRSKEGYDYIIGTSEHGKVISSSELNLPSFXGKGVDDVFNTYLNTCPSQGSRTIRTEEALLISLQYFQDPIRRAG

SEQ ID NO: 186464 - protein, 60 aa, Oryza sativa
  unsure (1)..(60): unsure at all Xaa locations
  Clone ID: PAT_MRT4530_83262C.1.pep
XFXFFLVIQHLIMHCLGSALSRSIHLTHGVDPSHVTVTELIFRLRATIRSELVGIHPPQW

SEQ ID NO: 186465 - protein, 175 aa, Oryza sativa
  Clone ID: PAT_MRT4530_83263C.1.pep
MPWPLPITAYGARNVLVEQMLEPGKRVTIAMGTNRDITTACKRKIVSPSSPRDEMELYWGYKVRYASNLGGVFSDSPYKEGYDYIIGTSEHGKIISSSELILPSFRHLLIAFGGLAGLEECIEEDRNLKGKGVDDVFNTYLNTCPSQGSRTIRTEGFEALLISLQYFQDPIRRAG

SEQ ID NO: 186466 - protein, 353 aa, Oryza sativa
  Clone ID: PAT_MRT4530_83264C.1.pep
MAKRGSRAVAGCGRSGRRASPAAERRQRSAVVERRLRAAQPHAVAAVVVGSPPSSSSWARLHGAAVRRHRPGVAVAMHSGSGGGGSVADLIAWSSRTPSSRSCSRSVSTLGVPSASWTVVGTGAVTLVVFADIVVALDVVAHTHIRRGVQRKASAAEERRRASAAVGKAAEGKLGEAEDSGWDEELPRARPPPPPCPRGWPTMLGEAPPAGEGEEAEEAIVSWSPAASPSLPNSLAAALALRSSLRGLLALHCSARRRARAFRCSVAALALRCAARIRARRSARCLRSAARRPHRIASPTATTTVESRRRRWRAGDDGGHGARLLCPQPEGEENREKRKEKRREGEEKRRKKM

SEQ ID NO: 186467 - protein, 186 aa, Oryza sativa
  unsure (1)..(186): unsure at all Xaa locations
  Clone ID: PAT_MRT4530_83265C.1.pep
CRTPIHKQIAAQIHPIPSFHPWGCSTMAAASAAPAGRTSAGASSASPSSSPSPSSSSSSSPSASSSSPPSPSTTPPSPASPSPPRPPPPSPTTSPSPSPSATATGPCPXRTSSRSRPPTGSTASSSTASSSPTRAPSRGPRRRWCTGSPPAATLPRRPAWATPASPSSRRRTPRGRSRWRWGSPAR

SEQ ID NO: 186468 - protein, 85 aa, Oryza sativa
  Clone ID: PAT_MRT4530_83266C.1.pep
HITHNSNYYTLPFWTKQNGVYYTPPRSHLKRPQTRPIYVNGPKIFNQNHGPYSRGFLLVFGPCGTRPKDDTTDFFLIGSHIICSG

SEQ ID NO: 186469 - protein, 141 aa, Oryza sativa
  Clone ID: PAT_MRT4530_83267C.1.pep
MAIPGRIHHEDYIPDDYAKMQPQHVNEGFKTYDLDFLTCDGLAVLGDAVEYIILWHKKDIIFGTSIDAPLKPPTPPQKKSAPHEVEKDSKEHEVAPCDGHIEKMVDELAREEYIPTDEVPAKFENGKSSGPITCLKKVHRR

SEQ ID NO: 186470 - protein, 265 aa, Oryza sativa
  Clone ID: PAT_MRT4530_83268C.1.pep
MRAAGERGSRAVAGGGRSRRRASPEAERRQWSAAAERRLRAEQGVAVAVHRWLEVPADDAPQSLALLLCRGSDNGGGGSVAGLIPWSSRTPSSRSCSRSVSTLGVPSASWTVVGAGAVTLVVFTDVTVALDVVAHMHIRRRRSADAGGAAEGERGGGAAAGERGGGQSSGGRARRSGRQWMGRGAPPCSAATNAVPPRVADDARRGTTGYTTSAKPDKDDIATRREIAASRLAWDEGTKLLLVQIPLRPTCGNGPRKRPIEMDVG

SEQ ID NO: 186471 - protein, 361 aa, Oryza sativa
  Clone ID: PAT_MRT4530_83269C.1.pep
NLTVCPLNISWRRAAGERGSRAVAGCGRSGRRASPAVERRQRRLRAEQPRAVAAVVVGSPPSSSPWARLHGAAVRRHRPGVAVAVHRWFKVPADDAPQSLTLLLCRGSGSGGGGSVASLIPWSSRTPSSRSCSRSVSTLGVPSASWTVVGAGAVTLVVFADLAVALDVVAHTHIRWRRSADAGGAAEGERGGRAAAGERGGGQSSGRRARRSGRQWMGRGAPPCSAATTAVPPRVADDARRGTTGGRRGRGRGSDCFLVAGRLPLPPKLAGRRSATALALRYSVHGLLALHCSACRRARTFRCSVAALALRYAGRIHARRSARCLRSAAGRPRRVASPTATTTAESRRRRRPRRAAAPPAA

SEQ ID NO: 186472 - protein, 68 aa, Oryza sativa
  unsure (1)..(68): unsure at all Xaa locations
  Clone ID: PAT_MRT4530_8326C.1.pep
LGYRYEYGYFLPDTNTDMVSGFPPDTDNNSDIRKNCFRIRVRSYSIFIRIRSNLYLFLFXSCPYSYSW

SEQ ID NO: 186473 - protein, 186 aa, Oryza sativa
  Clone ID: PAT_MRT4530_83270C.1.pep
MARRRCRIRRLLRGSGARAAPSRRRRARGRRGGQIRPPSIRIRSRRPSPDPQAARRRGAAVQSRRGRGCGVAVRRRRRHGLAVRRRWRSCAEAEAQALRWRRGNEPAGAALAGGGASAGWPVGRRRRRQRVHEVRLARAEASEARPVAAEATVVRGGAVAVPVRRDEAARAWRQWPVRREERPVAR

SEQ ID NO: 186474 - protein, 247 aa, Oryza sativa
  Clone ID: PAT_MRT4530_83271C.1.pep
MEQEQVMSQESNSCTCSSSSNDASSAACSSLNASSPSSVDSGSAGGGGGGKKRPRSDHLKHPTYRGVRMRSWGKWVSEIREPRKKSRIWLGTFDTAEMAARAHDVAALAIKGRTVHLNFPDLAHLLPRAASASPKDVQAAAALAAATASPAPALSPTPCHDVDAAADDEPEPAEPEQATAPVCIVENGTLQQDGGTGLDYTYFTMPDALLEFGFTLPPPPPPYYCGSPWDDDADDFFFGEPLVLWEH

SEQ ID NO: 186475 - protein, 46 aa, Oryza sativa
  unsure (1)..(46): unsure at all Xaa locations
  Clone ID: PAT_MRT4530_83272C.1.pep
HNKINYNYIFFLNKTKYQTFVKKSXASYIKKFQREYFYCREIICWL

SEQ ID NO: 186476 - protein, 91 aa, Oryza sativa
  unsure (1)..(91): unsure at all Xaa locations
  Clone ID: PAT_MRT4530_83273C.1.pep
LVGPVQVREEIARCFDLVRRLGRGAVYLGSSRVPPTHPHYLHAAELSREIARLLDCTTWSGAGPGFMDAATQGALEAXKPVGGFKIGNEAG

SEQ ID NO: 186477 - protein, 45 aa, Oryza sativa
  Clone ID: PAT_MRT4530_83274C.1.pep
SHLHPHITKKGIKNKALQGKNPPNNLFGNVLCPMLINLKTPFQLF

SEQ ID NO: 186478 - protein, 74 aa, Oryza sativa
  Clone ID: PAT_MRT4530_83275C.1.pep
GLTGVQFFISFLPLKIGTVAWKIHVSVQAKSHLCINAWLITLSPRLIYTTLLPKLDGMKRSLKGLIHDYAFQCF

SEQ ID NO: 186479 - protein, 53 aa, Oryza sativa
  Clone ID: PAT_MRT4530_83276C.1.pep
MERLLLPTGRNTEGNAPVVAQCSRINQYASRVESTKLTKDWQTSIKILSDFGI

SEQ ID NO: 186480 - protein, 398 aa, Oryza sativa
  Clone ID: PAT_MRT4530_83277C.1.pep
MSRGQENQSYEILCVMPDCLRINIDLGIAVFMSYVAMKDSQDIQSPTELQSSAQGTNEVQSNQPNPMATDGPGGDSGSLSIASNDNRKVSREDIELVQNLIERCLQLYMNKGEVVRTLSTRARIEPGFTTLVWQKLEEENSEFFRAYYIRLKLKRQIILFNHLLQHQYNLMKYPAPPNVPLAPMQNGMHPMPVNNLPMGYPVLQQPMMPAPGQPHIDSMACGLSSGHVVNGIPAAGGYHPIRMNSGNDMVVDNGAPETAHVGATCSAMSSEMAVSPSSAASSNHAPFTPSEIPGITMDTSALDSTFVSDVENTGQLQLGPDGSSRDSIRSLGQLWNFSLSDLTADLTSLGDLEALENYAGTPFLASDSDILLDSPDQNDIVEYFADAINGPSQSDEEK

SEQ ID NO: 186481 - protein, 69 aa, Oryza sativa
  Clone ID: PAT_MRT4530_83278C.1.pep
MLMGEKDDVDPGGDVACGCGADDGGDTATHEKSAVAVAASLVDASVDSRFFVACGSDNDSRRNLGDNGE

SEQ ID NO: 186482 - protein, 202 aa, Oryza sativa
  Clone ID: PAT_MRT4530_83279C.1.pep
MSYVAMKDSQDIQSPTELQSSAQGTNEVQSNQPNPMATDGPGGDSGSLSIASNDNRKVSREDIELVQNLIERCLQLYMNKGEVVRTLSTRARIEPGFTTLVWQKLEEENSEFFRAYYIRLKLKRQIILFNHLLQHQYNLMKYPAPPNVPLAPMQNGMHPMPVNNLPMGYPVLQQPMMPAPGQPHIDSMACGLSSGHVVNGIP

SEQ ID NO: 186483 - protein, 74 aa, Oryza sativa
  Clone ID: PAT_MRT4530_8327C.1.pep
MASWLFCSGKAAARGEFREAGVPRRPRRAARPGGAGRSEVMARPPAVRGGADRRFSETPARGRFQLTGSGRRAG

SEQ ID NO: 186484 - protein, 65 aa, Oryza sativa
  Clone ID: PAT_MRT4530_83280C.1.pep
SPPPAQCLNTDTVSASACDHGPWSQDHDLSCVGCVWVMVIAISIISAKCCRCGPVYVLDLGPRNT

SEQ ID NO: 186485 - protein, 233 aa, Oryza sativa
  Clone ID: PAT_MRT4530_83281C.1.pep
MDLENASSTALTGQINNHHIKSRREGRAVGARDEDRWERPRLRQRLLRRDGEAPVVADSCHAAAVDEAEDVGVEVAPWRVVHWRGGGAACRWQGEEAMRYSAVCAPSPGLVPLLLGTGGHGRSGWATILTLWYRAPEVLLGATHYSTPVDIWSDSCLDSVDISCAFQLSWSLLNLFSLEIPRLLGTPNEQVWPGVSKLPNWHEYPQWNPSKVSDLVHGLDADAVLNDVNKELY

SEQ ID NO: 186486 - protein, 405 aa, Oryza sativa
  Clone ID: PAT_MRT4530_83282C.1.pep
MEDELGGAPLLHEPPPPPQTPPRRRRTGVPVPILHGNNCNSDLYFWLPLVDAKGVHRGDLRLPDVRGIAEAVRDGARVVYADVVDGLGGGRVVARIRGQLVLLEVAPLAAYAGGDGGGGGDDGDEEEEVLEPDDKEADAQEQGGKPDFKTKKKQPPSTTAHGVRGGPAVAAGDATAAAGGELHLSAQPCRRSVELLVHVVEYSISIETMDKIRHFRGIPLGVDLCGHATLASAHFLFTTVLAKQQHAAMVEFVTRSGILTAKKVPAPRPPRRGQKRARHPRRRRERLHGCAERWSSPATPAVASPAATAGPPRDPRNQSRRGRAHSGIAHRLLALPPASRASASPMDDAPWRDLDADVLRLVDRSRMARVCHNWRLAVAPQQPLPETRPLPSILVPRADGPSFAS

SEQ ID NO: 186487 - protein, 53 aa, Oryza sativa
  Clone ID: PAT_MRT4530_83283C.1.pep
MREEEGEEDGRTARRSRGDRQGRMSRERGQMEAKWSKTILKERIWTMTASDTK

SEQ ID NO: 186488 - protein, 138 aa, Oryza sativa
  Clone ID: PAT_MRT4530_83284C.1.pep
PHPTHLGRGYSLVILISIQTRILLDPREDVNGVAIPTSAETVAHGQGYHLRPLLSLIYTESRASPVESMDMGLPSGYYYDTFDEEAPFEQGLATMQYISCADPAKLLNDGSEELTCSSLRSSTRFQLWAITILDPVLG

SEQ ID NO: 186489 - protein, 193 aa, Oryza sativa
  unsure (1)..(193): unsure at all Xaa locations
  Clone ID: PAT_MRT4530_83285C.1.pep
MASFLQAGTSLMHHLLPTLQRKANCGSTFHALSVTSRLRCPSSATIFRKSIALTPEMLXPVVRRQYRERHGCPFQSSTLTSSQEKETFXPSSSWPTPSNNSDPYFEGPPQYMMNNRTYQDPAPDPLLSQFICSMAQTDTNSDNTNTEIAVSAVSHDQRLSQRVTLTDDASKLELKERLQRIEFVKEIIMSTIL

SEQ ID NO: 186490 - protein, 65 aa, Oryza sativa
  Clone ID: PAT_MRT4530_83286C.1.pep
LMILLSMTRNIRVPNFDQAPGPPGTFKLMQFLAPSRAFSTQVPYCTFLTGFYFGFGEFCPLTKSY

SEQ ID NO: 186491 - protein, 134 aa, Oryza sativa
  Clone ID: PAT_MRT4530_83287C.1.pep
GSDPPPPEPTGVFENLKPGASSFFVSFPPSLPARAGQTSQGTTTTTAPPTARQRTVRCEGARRTRARVAQVVGLGRGWQWRTRRRLCIGGGEEEAGRNGESLCPCGRRARAEFMQPGGSSSYRASAAAVGYARS

SEQ ID NO: 186492 - protein, 76 aa, Oryza sativa
  unsure (1)..(76): unsure at all Xaa locations
  Clone ID: PAT_MRT4530_83288C.1.pep
PPAPVVSPPSPVFFPPPAFLPPPPPKTXPPPPVSLPPPPPPRIMSPPPPIQKPVSPPPILSPKNPSPPPPFFEGYL

SEQ ID NO: 186493 - protein, 92 aa, Oryza sativa
  Clone ID: PAT_MRT4530_83289C.1.pep
MAVAEVETAALGDGGSGGGGGRRRGRGHLLQSMMPTRRTCLQHCPGINFEHDQRVPRGRQTHCLQYGASTDMRSIEKFMWLLEVLYKEEGDQ

SEQ ID NO: 186494 - protein, 43 aa, Oryza sativa
  Clone ID: PAT_MRT4530_8328C.1.pep
ATTQSSSYSLPRVTKLSNDLLTKKKSLKAAGLGWNESLSGKKT

SEQ ID NO: 186495 - protein, 46 aa, Oryza sativa
  Clone ID: PAT_MRT4530_83290C.1.pep
PSLAGQGSSPYGSAAQPPGYGSGRQQRMLGSNYEAPHGRNKLGTNL

SEQ ID NO: 186496 - protein, 113 aa, Oryza sativa
  Clone ID: PAT_MRT4530_83291C.1.pep
MRTRAAEHSRRTCCSKSPSCTAWACTCRGKQAQSGGVDPQAGAAGKASLEPSRHAQQVVAEMYAGGWIEILRIKAFIMSGDGKQLELRLTQSSVHRRPAGSTGLLVRDFGGVI

SEQ ID NO: 186497 - protein, 839 aa, Oryza sativa
  Clone ID: PAT_MRT4530_83292C.1.pep
MVCFGSKALRRKGDKQRCLPEGDIDDSLPMRRGRKDKSEKPRKGGSSSSNRPSAEKAKHGRKKSGDGKKSKGRGKSCHSDSSIEMNPGHMKNDNTLLPSKASKPVTNFLRKRVDPETAKYFLEISYLFDNKEIDLEERATICANALEETKGKELELATDGPISHTLQVLVEGCELEQLCVFLHNSIESFHIIAVDKFGSHVAEAALKSLATHLEDEASRGIIEDILIRICKVIAGDAANVMSSCYGSHVLRTLLCLCKGVPLQSLQDFHTTKRSAVLAERLSCGSTRSGGSDPKNQGCGFSDIFKSFVREMLQNAKDDIASLETDKNSSLVLQTALKLSAGDDHELNYIISILLGFDEDDTAQKKDRSEQKNEIIALLEDTAYSHLLEVIVEVAPEELRNNMLTGTLKGALFAISSHHCGNYVVQALVASAKTSDQMEQIWDELGSRINELLELGKAGVVASILAACQRLETKRLESSQVLSAALSSNSESSDSIVAHMLFLENYLHQKSSWEWPLGAKMSVLGCLMLQSILQYPHQYIRPYVASLLAMDDNKILQISKDSGGSRVLEAFLCSSATAKRKFKVFAKLQGHYGEIAMNPSGSFLVEKCFTASNFSHKEAIVVELLAVQTELSRTRHGFHLLKKLDVDRYSRRPDQWRASQTSKETTQREFQVEFGLSSKGAGQNIEELLTSRSPSKKRKQKDKTDVTTEDASTNKQDLSHVGKTKRIKSEKTTCEKESSNKKPTNEDSGTSMAFLKNSAKRKSPGFLSDKPSFKRQKHHKPNAGNSSGKMFVRDSAGTPFVRNSGKQKRSIAELADLAGKEKLSASEVRKLLKTEMPGKS

SEQ ID NO: 186498 - protein, 77 aa, Oryza sativa
  Clone ID: PAT_MRT4530_83293C.1.pep
TVGPYFRALVEKSEHSQGIPRPTFACIISRPDQINAQCMYRRTSKYSLKFSKSPVSVNSHRRPRVFKSLLKKSASRV

SEQ ID NO: 186499 - protein, 134 aa, Oryza sativa
  Clone ID: PAT_MRT4530_83294C.1.pep
MAVTMWQSSLLVASGLCQPGVGCTTIGVGCSMASGSTTGLAGLAFDDAGRCDRNSLGRSGGHTMRWALGGMKQTLLQTHALLRQRLATTRWPRWQAYTGKSGSTLLSHPLLLQLKDVDEVEHIGMSSSYLLADR

SEQ ID NO: 186500 - protein, 220 aa, Oryza sativa
  Clone ID: PAT_MRT4530_83295C.1.pep
PGGQTFQGRGAIKNLFRGQFPLAVVWCPPGLFFLFQLLPKANFPPKAGALFWVSPFFFPGAPFFFFFWGPRSLSLWPGFFTPPPPGKRPQGFFQFPALFFLPPQRPPGGFWFFFGPNPPFLFWPPSRAKFLNGGFLLGPFFPLFLGPGGFSPFFFSLVFFGPPPVNFRAPQFFLGNFAPFFFFPKKKKKKKKKKKKKKKKKKKKKKKKKKKKKKKKKKAP

SEQ ID NO: 186501 - protein, 142 aa, Oryza sativa
  unsure (1)..(142): unsure at all Xaa locations
  Clone ID: PAT_MRT4530_83296C.1.pep
MRAPQGSDSGRAVHATQAAGLHGPDLPPGRSDSGGGSRPGAHGHGSSRPGGRGARRRSTTRRRCKAATGGDRPAAEGGGVTATQTATAAAKRLGGGAAAKRRGREGGXGEEGSHRRRPTTASDGGRWRRRDGLRNHLRDQKG

SEQ ID NO: 186502 - protein, 526 aa, Oryza sativa
  unsure (1)..(526): unsure at all Xaa locations
  Clone ID: PAT_MRT4530_83297C.1.pep
MIPSISRSNHKEDRKQYSDGTEKRAAGERGAQDRWHPPPLRRRRESRRRSRRSSPAATRAASSSRRPLRRXGGYGAGTGHTAAAGTTTDAGGTAYTPTTQPTHEKKGMXRRSRRSSPLPGSPTGGALLSGPSPSSSWRRRAQQPSPRPAPASPGPRRPRHPRARVPAPTSPSLPPAPALETAGIQFLNPASLSSPPLPTPPAKSRSPRQSAAGAPSAPRAGELRHGRRLRLPPXPSMPVSPSPSPSVARRRRSPSVRPLLPFLPLSRXRLAAAPPPSRLAAAVAVCVAVTPPPSAAGRSPPFRLSHRSGVLXNSRRGSSSSRARQMADHPPNHRGEGMDDFVAELACMTLVVGYPNAPEYSTVPPLSGELPHRVRLEVHGYVDTCLANMVVQASGGTADHACQEAAYLVMARLRDRHNYTFCNTAYRFHPRRASGDDVSTFRPTAGENDTTFGHMCAVMRGRDRMHSDLHKASKALNDGKLVRIIALKDEIARLKKENAQLKGFPAPGGVRIRTTPLKLTTVPMRI

SEQ ID NO: 186503 - protein, 936 aa, Oryza sativa
  Clone ID: PAT_MRT4530_83298C.1.pep
MSKQKKDEVDPSNIFPISLDDLEGDARKIMEERIKAVTQEMLMKSCTKTRQGVVLNPGPSPKVIFDEPSYNLKPLQVLVKPLLIKYIANLMGQYANNRGYPQDTGYGQYNNIAPQQLLFRPPNPPPNRAPNPPRPETMEDLIRTIIRDNFWFEVRNCAKVHQSPYPDYYDNIPYPRGYRVPEFTKFGGEDSRTTWEHVQSAINEGRLKFTDGSKMKLDHDPFPVNTIDFNDKKVLIRPEQAESTKGKGVIIGEPRPKMMVPKNSEVSVWKENMSEASNYKTPRKTKVTFDMLLNKYEKRFTKGSLEASSPSSKINKGHYIPPGTESKSRWMPKDLMATQKRRLQCLRAQELREREAEEWRDRRFNELGPPPTKMWRRKSIEIEELVIVQKEKEEQSIARDDSLPKEDMTINMVCILPMEFCATDEAKVAQLSLGPKDAVIEKPDESNRHMKPLYLKGHIDGKPVSRMLEDGGAIVNLMPYSLFKKLGCGDDELKKTNMILNGFNGEPTETKGVFSVELTVGNKTLPTAFFIIDVQANVIKHMLQMPILSGRIGKWAYALIEYDLTYEPLKSMKDQIVVDFIVDHHIDIAYEDEAVEIVFDESDEEPKRGGSVFGHAAINRERFRMKRPLFLRIMNAVEAHDDYFVQKRNTASIIGLSCLQKSFRRFIIVVAEVFGEEYMRTPNENDIARLFADGERRGFLSMLGSLDCMHWEWKNCPTAWHGQYKGKEGVPILVLEAVASHDRWIWHVFFGLPGTHNDINALQRSLLFAKLAKGQGPKVNYTMNGHDYTMGYYLADAIYPAWATLVKSIQMPQRNKRKYFSKAQESIRKDVEQAFGVLQALFAIVRGPIRFWDNLTIRKIMRCCVILNNMIVEDERDDEEDLHYDELGEQVEDYHERTAEFNEFLSNYEKIKDKTVHNQLQEDLIEHLWQRHGDQY

SEQ ID NO: 186504 - protein, 91 aa, Oryza sativa
  Clone ID: PAT_MRT4530_83299C.1.pep
SSRYDNDYGKESSKGSSVHRNADKTSHLDRSAYTNGPSFYHTYISRVGGMGPRYRHVDLKVNTCYQREPGTIVCLTSRLNGSPIGVLHGKF

SEQ ID NO: 186505 - protein, 95 aa, Oryza sativa
  Clone ID: PAT_MRT4530_8329C.1.pep
LNKRQQSETTGHHERVSSQELQRVTFICLRSRPCRGTPRQHPHHQVTSKGFATKPLDACSFTGSSEPIDQLIIARDSFSRWRSFLAEQEILHERE

SEQ ID NO: 186506 - protein, 634 aa, Oryza sativa
  Clone ID: PAT_MRT4530_832C.1.pep
MGYKIFEGSLVLLSLLLFTSLAVADIASEKQALLAFASAVYRGNKLNWDVNISLCSWHGVTCSPDRSRISALRVPAAGLIGAIPPNTLGRLVSLQVLSLRSNRLIGSIPSDITSLPSLQSIFLQDNELSGDLPSFFSPTLNTIDLSYNSFAGQIPASLQNLTQLSTLNLSKNSLSGPIPDLKLPSLRQLNLSNNGLNGSIPPFLQIFSNSSFLGNPGLCGPPLAECSLPSPTSSPESSLPPPSALPHRGKKVGTGSIIAAAVGGFAVFLLAAAIFVVCFSKRKEKKDDGLDNNGKGTDNARIEKRKEQVSSGVQMAEKNKLVFLDGCSYNFDLEDLLRASAEVLGKGSYGTAYKAILEDGTIVVVKRLKDVVAGKKEFEQQMEQIGRVGKHANLVPLRAYYYSKDEKLVVYEYVATGSFSAMLHGIKGIAEKTPLDWNTRMKIILGTARGIAHIHAEGGSKLAHGNIKATNVLLDQDHNPYVSDYGLSALMSFPISTSRVVVGYRAPETFESRKFTHKSDVYSFGVLLMEMLTGKAPLQSQGQDDVVDLPRWVHSVVREEWTAEVFDVELMKYLNIEDELVQMLQLAMACTSRSPERRPTMAEVIRMIEELRQSASESRDSSNENARESNPPSA

SEQ ID NO: 186507 - protein, 99 aa, Oryza sativa
  Clone ID: PAT_MRT4530_83300C.1.pep
TCSTSSRGPCPWGFFPRPRICPPSSLLFFTNPFLPTRVPGGPQEYPRVSLRVLFPPAAVCCTPDCACLSPLSWLSPCSLVWCSFGPTVKEKGVKGIATP

SEQ ID NO: 186508 - protein, 279 aa, Oryza sativa
  unsure (1)..(279): unsure at all Xaa locations
  Clone ID: PAT_MRT4530_83301C.1.pep
MSPPGSLVKMLLDDESSSDDDDEFIFEAVETIFDDNNEEPKRGGSVFGHAVINRERLAGHWRLYNDYFSEEPTYLHVQFRRRFRMKRTLFLRIMNAVEAHDDYFVQKRNAAGIIGLSCLQKVTAVSRMLCYGIAADAVDEYVRIGGSTVIESFRRFIVAVLDEVFGEEYMRTPNENDIARLLAVGERRGFPGMLGSLDCMHWEWKNCPTAWHGQYKGKEGVPTSVLEAVASHDRWIWHAFFGLPGTHNDINVLQRSPLXAPKVNYTINGHNYTMGYYLV

SEQ ID NO: 186509 - protein, 77 aa, Oryza sativa
  Clone ID: PAT_MRT4530_83302C.1.pep
PERKCRPTPTTYDEASLSHRNQPNTTATSSPPIIPIPSLSPPPRPARASNLTFPCCCDVSYAAATEQPAVFFLPSWS
